United States Patent Application Publication US 2026/0191920 A1 - sequence listing, part 9

SEQ ID NO: 40054 - protein, 241 aa, unidentified
  source 1..241: note = Neorhizobium sp.
  REGION 1..241: note = tr|A0A386E139|A0A386E139_9RHIZ 7-cyano-7-deazaguanine synthase OS=Neorhizobium sp. NCHU2750 OX=1825976 GN=queC PE=3 SV=1
MKTFVVCSGGLDSVSLAHSIAARGELMGLISFDYGQRHQKELEFAALAAKHLGVFHQIIDMRAIGSQLTGSALTDDLDVPDGHYAEETMRITVVPNRNAIMLTIAFGVAAARQADAVAIAVHGGDHFIYPDCRPGFIDSFDAMQRHALDGYASVKLLAPYVTGSKADIVTDGARHGTPFAETWSCYKGGERHCGRCGTCVERREAFHLAGVEDPTDYADPDFWKATTQGFKAPEFKAEEVR

SEQ ID NO: 40055 - protein, 236 aa, unidentified
  source 1..236: note = Neorhizobium sp.
  REGION 1..236: note = tr|A0A4R3A9D5|A0A4R3A9D5_9RHIZ 7-cyano-7-deazaguanine synthase OS=Neorhizobium sp. JUb45; OX = 2485113 GN=queC PE=3 SV=1
MKTIVVCSGGLDSVSLAHRIADQGDLMGLISFDYGQRHKKELEYAAACAKRLGVFHQIIDMRAIGSQLTGSALTDDLDVPDGHYAEETMRVTVVPNRNAIMLTVAFGVAAARAAEAVAIAVHGGDHFIYPDCRPGFIDSFDAMQRHALDGYASVKLLAPYVNGSKADIVSDGAKHATPFVETWSCYKGGEKHCGRCGTCVERREAFHLAGVEDPTDYADPDFWKAATAGFRAEEIR

SEQ ID NO: 40056 - protein, 233 aa, unidentified
  source 1..233: note = Neosynechococcus sphagnicola
  REGION 1..233: note = tr|A0A098TJQ2|A0A098TJQ2_9CYAN 7-cyano-7-deazaguanine synthase OS=Neosynechococcus sphagnicola sy1 OX=1497020 GN=queC PE=3 SV=1
MKAVILLSGGLDSATVLYQAQADGCDCYALSFDYQQRHRRELTAARTIAQCAGVIDHQVVSFDLRQWGGSALTDVEIDLPQSRSLAEMSQTIPVTYVPARNTIFLSFALAYGETIAAERVYLGVNSLDYSGYPDCRPDYIQAMQTVFQLGTKQGREGTAIAIVTPLITLKKTAIIELGDRLGVPWELTWSCYAGGDEACGTCDACQLRLTAFAELGRTDPIPYGLNRNPQASL

SEQ ID NO: 40057 - protein, 227 aa, Neptuniibacter sp.
  REGION 1..227: note = tr|A0A136HHU8|A0A136HHU8_9GAMM 7-cyano-7-deazaguanine synthase OS=Neptuniibacter sp. Phe_28 OX=1795871 GN=queC PE=3 SV=1
MNTPASPKAVVLLSGGLDSATALAMASDRGYDCYVLSFDYGQRSLTELNAAKEIAKQLKAVEHRVIRLHLEDFGGSALTDHSIDVPEEETDEIPVTYVPARNTVFLSLALGWAEVLEADTIFIGVNAVDYSGYPDCRPEYIAAFETMANLATKRGVSGDPIRIETPLIDLSKEQIIQAGTTLGVDYGLTVSCYQADDDGRACGVCDSCRLRTQGFVDAGIKDPTRYQ

SEQ ID NO: 40058 - protein, 228 aa, Neptunomonas antarctica
  REGION 1..228: note = tr|A0A1N7KB07|A0A1N7KB07_9GAMM 7-cyano-7-deazaguanine synthase OS=Neptunomonas antarctica; OX = 619304 GN=queC PE=3 SV=1
MSKPAPKAVVLLSGGLDSATALAMAKKQGFQCFALSFDYGQRSLTELNAARRIVEQMGIAEHRVIRLHLEDFGGSALTDHTIDVPDHDTGGIPVTYVPARNTVFLSLALGWAEVLEADAIFIGVNAVDYSGYPDCRPEFIDAFEKMANLATKTGISGQGIKIHTPLMNMTKADIIREGQYLGVSYADTISCYQADDDGRACGVCDSCRLRAQGFKDAGVTDPTHYIKV

SEQ ID NO: 40059 - protein, 232 aa, unidentified
  source 1..232: note = Neptunomonas qingdaonensis
  REGION 1..232: note = tr|A0A1I2UUF8|A0A1I2UUF8_9GAMM 7-cyano-7-deazaguanine synthase OS=Neptunomonas qingdaonensis OX=1045558 GN=queC PE=3 SV=1
MIKPAPKPARKAVVLLSGGLDSATALAMAKNQGFDCYVLSFDYGQRALTELNAARCVVEQLGITEHRVIRLHLEDFGGSALTDHSIDVPDHETGGIPVTYVPARNTVFLSLALGWAEVLEATAIFIGVNAVDYSGYPDCRPEFIDAFEKMANLATKTGVSGQGVKIYTPLMNMTKADIIREGQSLGVNYADTISCYQADDEGRACGVCDSCRLRAKGFEDAGVQDPTRYISA

SEQ ID NO: 40060 - protein, 227 aa, Neptunomonas sp.
  REGION 1..227: note = tr|A0A437QCU6|A0A437QCU6_9GAMM 7-cyano-7-deazaguanine synthase OS=Neptunomonas sp. HPM-16; OX = 1815562 GN=queC PE=3 SV=1
MNKPSPKAVVLLSGGLDSATALAIAKDQGFDCYVLSFDYGQRSLTELNAARKVVEQLGVSEHRTVRLHLEDFGGSALTDHDIDVPEQEEEGIPVTYVPARNTVFLSLALGWAEVLEASAIFIGVNAVDYSGYPDCRPEFIDAFEKMANLATRAGVEGQGVAIHTPLMRLTKSDIIREGQRLGLNYADTVSCYQANDNGEACRVCDSCRLRAKGFEDAGVPDPTRYFA

SEQ ID NO: 40061 - protein, 229 aa, unidentified
  source 1..229: note = Nevskiales bacterium
  REGION 1..229: note = tr|A0A2F0A0V0|A0A2F0A0V0_9GAMM 7-cyano-7-deazaguanine synthase OS=Nevskiales bacterium; OX = 2026766 GN=queC PE=3 SV=1
MSARAVVLVSGGLDSATTLAIARHEGFECHGLSVHYGQRHLSELQAAKRVCSHLGAVDHREVAVGLDALGGSALTDPNIDVPTRQTDGIPVTYVPARNTVMLSIAMAHAEVIGANTVFIGVNAVDYSGYPDCRPAFIDAFANLSRWATRQGVETGQGLAVHAPLIQLTKADIIRRGVALGVDYAMTVSCYQADAGGAACGVCDSCRIRRDGFAQAGVLDPTLYQSGASG

SEQ ID NO: 40062 - protein, 205 aa, Niabella sp.
  REGION 1..205: note = tr|A0A5C7W750|A0A5C7W750_9BACT 7-cyano-7-deazaguanine synthase (Fragment) OS=Niabella sp.; OX = 1962976 GN=E6Q58_03330 PE=3 SV=1
VLMYSGGVDSTVAGLILQEQGKDVYPLFIDYGQSSVTAERQLVENVPVQLGFQPTQVIETDLLKKLTRSKLLGEESKDDSDAWVPGRNTLFMVIAGIYAEQIDGDGIAIGYMLDDNFVFGDNDYFHHKGVEDILSKSFLRPMEVFLPIRSLTKKDLLKRLSDAGMLDLTVSCWNAQYNDGKITSCHECANCKEREKNIAEIKENI

SEQ ID NO: 40063 - protein, 269 aa, Niastella populi
  REGION 1..269: note = tr|A0A1V9G6G7|A0A1V9G6G7_9BACT 7-cyano-7-deazaguanine synthase OS=Niastella populi; OX = 550983 GN=A4R26_33515 PE=3 SV=1
MKNAVVIFSGGVDSTAATLWTLEQGYDDVELLTYRFADERRQYGELKGAMTVASHLNLNHTIIDHQIPYPAYPLTNQPFCQHIERKELPNDVALYGVFPFNVALLLIFGASYAALRNATDIIFGAIADEAHISPDFRTEYTELITQLLNKSKTVTKKEMKVITPLVNKHKWEIMETYKGKEDLFHKTWSCKYSNDSTHCGECYGCEGRRLGALLAGLDDKTAYKKNEIEFPFSDFELNTMKNKETRSSLLSNIDFLSKISLYSHGSGKG

SEQ ID NO: 40064 - protein, 363 aa, Niastella populi
  REGION 1..363: note = tr|A0A1V9GB99|A0A1V9GB99_9BACT Uncharacterized protein OS=Niastella populi OX=550983 GN=A4R26_32630 PE=4; SV = 1
MDNIADPTIYFDDKGICNYYYGYKEAEKNGILTGREAEMKISEVVRLLKEKGRNKKYDCIIGVSGGIDSTYLSLKAKEYGLRVLCVHFDNGWNSELAVKNIENIVSKCGFDLYTYVIDWEEFKDIQLAYFKAGVIDIEAVTDIAIFDSLDRICAEKNVGFILDGRNICTEQTLPSCWINKNPNNLYAIHQKFGKIPLNRYPAKFKDGKYLRPRGSYESIPLLNYLDYNKKRVKEIIARELGWKDYGGKHYESVFTRFYQGHILPEKFKVDKRKAHLSNLIFSGQLTKEEALLELEKPVYPEGQLEIDKTFVLKKLGFSKEEFDAYINAPSFSHEYYGNNSDTYQTTYVKARHFFGRIKRKLFS

SEQ ID NO: 40065 - protein, 226 aa, unidentified
  source 1..226: note = Nibricoccus aquaticus
  REGION 1..226: note = tr|A0A290QBI1|A0A290QBI1_9BACT 7-cyano-7-deazaguanine synthase OS=Nibricoccus aquaticus; OX = 2576891 GN=queC PE=3 SV=1
MKVVVLCSGGMDSVTALYWARKEHAVLAAVSFDYGAKHNPKELPFAAEHAAALGVRHEVVSLRFMDRLFTSDLLSSGGEIPEGHYEAANMKQTVVPFRNPIMLSIATGFAESIGAEGLVIAAHGGDHAIYPDCREEFMRAMGEAMRLGTYAGIQLLRPFIAISKGQIAAEGAKLGVDFSRTWSCYKGGAIHCGKCGTCVERREAFLTAGVVDPTVYAETGALPAKP

SEQ ID NO: 40066 - protein, 246 aa, Nicoletella semolina
  REGION 1..246: note = tr|A0A4R2N7X2|A0A4R2N7X2_9PAST 7-cyano-7-deazaguanine synthase OS=Nicoletella semolina; OX = 271160 GN=queC PE=3 SV=1
MHSSFLSTPLSQGSLLLDGTSTNDSVQKHALPKAAVIFSGGQDSTTCLFLAIKEFGLKNVEVITFQYGQRHAIELQKAQWIAQDLGVKQTVIDTSVIKAITTNALMDENATIEQQGSMPNTFVDGRNALFLLYAAIYAKGQGIHTIFTGVCETDFSGYPDCRDVFIKSMNVTLNLAMDYPFDIRTPLMFLTKKQTWALADKLGAFDYVRNHTHTCYLGVDGGCHDCPSCRLREKGLAEYLEEKTNV

SEQ ID NO: 40067 - protein, 234 aa, Nisaea sp.; identical to SEQ ID NO: 37116
  REGION 1..234: note = tr|A0A2D7JNN3|A0A2D7JNN3_9PROT 7-cyano-7-deazaguanine synthase OS=Nisaea sp. OX=2024842; GN = queC PE=3 SV=1

SEQ ID NO: 40068 - protein, 241 aa, Nisaea sp.
  REGION 1..241: note = tr|A0A2D7Z479|A0A2D7Z479_9PROT 7-cyano-7-deazaguanine synthase OS=Nisaea sp. OX=2024842; GN = queC PE=3 SV=1
  VARIANT 72: note = Xaa can be any naturally occurring amino acid
  VARIANT 78: note = Xaa can be any naturally occurring amino acid
  VARIANT 191: note = Xaa can be any naturally occurring amino acid
  VARIANT 229: note = Xaa can be any naturally occurring amino acid
MATMSDTALVLFSGGQDSATCLAWALDRFQHVETIAFDYGQNHRVELAVRGAFLAALRAAYPAWATKLGGDXVIDMGXLATISDTALTHDRAIEMTEAGLPNTFVPGRNLMFFTTAAAVAYRRGARHLVGGMCETDYSGYPDCRDDTLKALQVALTLGLDRRTTVHTPLMWLDKAATWQMAWRLGGQVLVXMLVEHTHTCYRGVRDRRHDWGYGCDDCPACELRKSGWXRFAADREKRGDL

SEQ ID NO: 40069 - protein, 232 aa, unidentified
  source 1..232: note = Nissabacter sp.
  REGION 1..232: note = tr|A0A4P8SEV6|A0A4P8SEV6_9GAMM 7-cyano-7-deazaguanine synthase OS=Nissabacter sp. SGAir0207 OX=2126321 GN=queC PE=3 SV=1
MKRAVVVFSGGQDSTTCLIQAMAQYDEVHCVTFDYGQRHRAEIDVARQLAETLGARAHKVLDVGLLNELAVSSLTRDNIPVPGYEANAEGQLPSTFVPGRNILFLTLASIYAYQIGAEAVITGVCETDFSGYPDCRDEFVKALNHAVSLGLARDVRFETPLMWLNKAETWALADYYGQLERVRRDTLTCYNGIQGDGCGECAACHLRANGLAVYQQDRAGVLASLKQKSGLQ

SEQ ID NO: 40070 - protein, 225 aa, Nitratifractor salsuginis
  REGION 1..225: note = tr|E6X050|E6X050_NITSE 7-cyano-7-deazaguanine synthase OS=Nitratifractor salsuginis (strain DSM 16511 / JCM 12458 / E9I37-1) OX=749222 GN=queC PE=3 SV=1
MKKAVCIISGGMDSAVSAALAKREGYEIIAVHFNYGQRTERKELECFRLLAEDLEAVERYEIDLPFFTQIGASALTDPSIDVPTEGLEPGVPVTYVPFRNGIFLSIAAAIAEKHGAEAIVIGVVEEDSSGYPDCRESYIRAMEKAINLGTKEETKITIKMPLVHLRKSEIVTKALEIGVDLSHTWSCYKEEEAACGVCDSCRLRLEGFKQAGVEDPIRYAESKND

SEQ ID NO: 40071 - protein, 237 aa, Nitratireductor aquibiodomus
  REGION 1..237: note = tr|I5BY79|I5BY79_9RHIZ 7-cyano-7-deazaguanine synthase OS=Nitratireductor aquibiodomus RA22 OX=1189611; GN = queC PE=3 SV=1
MKTLVVCSGGLDSVSLAHKVAREQNLIGLISFDYGQRHRKELDFAAKAAARLGVPHDLLDISAIGRHLSGSALTDAIDVPDGHYAEETMRVTVVPNRNAIMLAIAFGIAAARGADAVAAAVHGGDHFIYPDCRPGFIDAFQAMQDAALEGMGAVSLYTPFVNGTKGDIVREGARVDTPFAETWSCYRGGENHCGRCGTCVERREAFHEAGVPDPTIYDDPNFWLAATGQTTGEAEHV

SEQ ID NO: 40072 - protein, 234 aa, Nitratireductor indicus
  REGION 1..234: note = tr|K2PTC7|K2PTC7_9RHIZ 7-cyano-7-deazaguanine synthase OS=Nitratireductor indicus C115 OX=1231190; GN = queC PE=3 SV=1
MKTLVVCSGGLDSVSLAHKVAREHTLTGLVSFDYGQRHSKELDFAARAAERLGVLHDVIDISAVGSHLGGSALTDAIEVPDGHYAEETMRITVVPNRNAIMLAIAFGMASARRDDAVAAAVHSGDHFIYPDCRPAFINAFQAMQDAALEGMGAIRLYTPFLNGTKGDIVREGARAETPFAETWSCYKGAEHHCGRCGTCVERREAFFEAGIDDPTIYDDPDFWLRATGREARHV

SEQ ID NO: 40073 - protein, 236 aa, Nitratireductor pacificus
  REGION 1..236: note = tr|K2MRM4|K2MRM4_9RHIZ 7-cyano-7-deazaguanine synthase OS=Nitratireductor pacificus pht-3B OX=391937; GN = queC PE=3 SV=1
MKTLVVCSGGLDSVTLADKVARENTLVGLISFDYGQRHRTELNRARRAAERLSVPFDLIDISAFGRHLAGSALTDEIDVPDGHYAEETMRITVVPNRNAIMLTVAFGIASARKADAVAAAFHGGDHFIYPDCRPAFTDAFQAMQNAALDGLGRIELYTPFVDRSKAEIVAEGARLGTPFAETWSCYKGGARHCGRCGTCVERREAFHLADVADPTGYDDADFWRAATRGKANHVPG

SEQ ID NO: 40074 - protein, 200 aa, Nitratireductor sp.
  REGION 1..200: note = tr|A0A1H4MPV2|A0A1H4MPV2_9RHIZ 7-cyano-7-deazaguanine synthase OS=Nitratireductor sp. ES.061 OX=1855335 GN=SAMN05216452_3400 PE=3 SV=1
MRALLFSGGLDSSALAWWLRPEVCVTIDYGQRAAKGEIAASSALCSQIGLEHRTIHANLSSLGSGSMAAKAAADGASAEEFWPYRNQMLVTLAAMKLMPEGVTEIILGSVSTDQHADGKAPFLKSLDRTLSLQEGHVRVTAPARRMSTRTLLRTSGFPYELIGLTFSCHVHEYACGQCNGCLKHRECVEMTYHGSKRGAA

SEQ ID NO: 40075 - protein, 208 aa, Nitratireductor sp.
  REGION 1..208: note = tr|A0A5B8L3M3|A0A5B8L3M3_9RHIZ 7-cyano-7-deazaguanine synthase OS=Nitratireductor sp. SY7; OX = 2599600 GN=FQ775_20425 PE=3 SV=1
MTQGVMLLASGGLDSTTVAFGLHAEGKDVTPLFFDYGQHCVETEWDRVNEVLPKGMRRPERVDLSDLFRDSKSRLIVEANLWTDDVRDDDLYIPYRTLLFYAAAAARAQTLGIFEVYTGFINSNHAKEIDCTAEFMNKLDGLTDAIGPVRFMSPYRYSSKTEVTQEAIRLGVPIGRTFSCQASSNLPCGACPNCVERLGALRQTGLLR

SEQ ID NO: 40076 - protein, 220 aa, Nitratiruptor sp.
  REGION 1..220: note = sp|A6Q342|QUEC_NITSB 7-cyano-7-deazaguanine synthase; OS = Nitratiruptor sp. (strain SB155-2) OX=387092 GN=queC; PE = 3 SV=1
MKAVVILSGGMDSSITAYMAKKDGYEIIAVHFNYGQRTEQKELEAFRAIAGELNAKTYEIDLPFFEQIGASALIDTNIAIPKQGIEPGIPVTYVPFRNGIFLSVAAAIAEKEGADSIYIGVVEEDSSGYPDCREDFIQKMESAINAGTKPETDIKIKTPLIHLRKEDIVQLGLSLGVPLEKTWSCYESEDEACGECDSCRLRLKGFEKAGAKDKIPYKST

SEQ ID NO: 40077 - protein, 221 aa, Nitratiruptor tergarcus
  REGION 1..221: note = tr|A0A1W1WTK5|A0A1W1WTK5_9PROT 7-cyano-7-deazaguanine synthase OS=Nitratiruptor tergarcus DSM 16512 OX=1069081 GN=queC PE=3 SV=1
MKKAVCILSGGMDSTLASFIAKNEGYSIIAIHFNYGQRTQTKELEAFRAIAKELGAKIYEIDLPFFKQIGASALVDENIAVPVDGIKPGVPITYVPFRNGIFLSIAAAIAEKEGAEAIYIGVVEEDSSGYPDCRESFIEAMEKAINLGTKDETNIAIKAPLIHLKKEDIVSKAYSLGVPLELTWSCYQNEDEACGVCDSCRLRLKGFKKAGLKDKIPYKAT

SEQ ID NO: 40078 - protein, 231 aa, Nitrincola lacisaponensis
  REGION 1..231: note = tr|A0A063Y0V6|A0A063Y0V6_9GAMM 7-cyano-7-deazaguanine synthase OS=Nitrincola lacisaponensis OX=267850 GN=queC PE=3 SV=1
MTSGKRAVVLLSGGLDSATVLAMAKDQGYSCYVLSFDYGQRSLTELNAARSVAAELGAVEHRVLRLHLEDFGGSALTDHSLNMPEGAPAEDPADGIPLTYVPARNTVFLSLALGWAEVLDAQAIFIGVNAVDYSGYPDCRPEFIRAFEAMAALATRQGVEGAPIKIVTPLIDLTKAQIIQEGVRLGLDYAKTVSCYQADDQGRACGRCDSCRLRAVGFQQAGIADPTLYQS

SEQ ID NO: 40079 - protein, 228 aa, unidentified
  source 1..228: note = Nitrincola nitratireducens
  REGION 1..228: note = tr|W9VLS5|W9VLS5_9GAMM 7-cyano-7-deazaguanine synthase OS=Nitrincola nitratireducens OX=1229521 GN=queC; PE = 3 SV=1
MLEKKRAVVLLSGGLDSATVLAIAKNSGYECYVLSFDYGQRSLTELNAARRVSESLHVADHRVLRLNLEDFGGSALTDHSLQMPEEGEQPGIPLTYVPARNTVFLSLALGWAEVLDAQAIFIGVNAVDYSGYPDCRPEFIKAFQDMAALATRQGVEGQPIRIETPLINLTKAEIIRQGLALGLNYAATVSCYQADDEGRACGRCDSCRLRAKGFADAGVADPTLYSPR

SEQ ID NO: 40080 - protein, 230 aa, Nitrincola sp.
  REGION 1..230: note = tr|A0A099PF59|A0A099PF59_9GAMM 7-cyano-7-deazaguanine synthase OS=Nitrincola sp. A-D6; OX = 1545442 GN=queC PE=3 SV=1
MTGKCAVVLLSGGLDSATVLAMAKDQGYSCYVLSFDYGQRSLTELNAARIVAMEADVVEHRVLRLNLEDFGGSALTDHNLSMPESDTDDVQEEGIPLTYVPARNTVFLSLALGWAEVLDASAIFIGVNAVDYSGYPDCRPEFIRAFEAMAALATRQGVEGKPIRIHTPLIDLTKAQIIQAGTALGMDYANTVSCYQADDEGRACGRCDSCRLRAKGFEQAGVPDPTRYQP

SEQ ID NO: 40081 - protein, 228 aa, Nitrincola sp.
  REGION 1..228: note = tr|A0A5A9W3D5|A0A5A9W3D5_9GAMM 7-cyano-7-deazaguanine synthase OS=Nitrincola sp. MEB193; OX = 1708751 GN=queC PE=3 SV=1
MTQRAVVLLSGGLDSATCLALAQSQGYECYVLSFDYGQRSATELNAARALASAMAVKEHRVLRLHLEDFGGSALTDNTLEVPEYSVEGEIPVTYVPARNTVFLSLALGWAEVLDADAIFIGVNAVDYSGYPDCRPEFIRAFEAMAALATRQGVEGRPIRIETPLLYLTKAEIIQAGLSLGVDYAQTLSCYQADEQGRACGRCDSCRLRAKGFADAGVADPTRYQSSVN

SEQ ID NO: 40082 - protein, 228 aa, unidentified
  source 1..228: note = Nitrincola tibetensis
  REGION 1..228: note = tr|A0A364NNK9|A0A364NNK9_9GAMM 7-cyano-7-deazaguanine synthase OS=Nitrincola tibetensis; OX = 2219697 GN=queC PE=3 SV=1
MLERKRAVVLLSGGLDSATVLAIAKSSGYECYVLSFDYGQRSLTELNAARRVSESLQVADHRVLRLNLEDFGGSALTDHSLQMPEEGEQPGIPLTYVPARNTVFLSLALGWAEVLDAQAIFIGVNAVDYSGYPDCRPEFIKAFQDMAALATRQGVEGQPIRIETPLINLTKAEIIRQGLDLGLDYAATVSCYQADDEGRACGRCDSCRLRAKGFADAGVVDPTLYSPL

SEQ ID NO: 40083 - protein, 238 aa, Nitrobacter hamburgensis
  REGION 1..238: note = sp|Q1QM87|QUEC_NITHX 7-cyano-7-deazaguanine synthase; OS = Nitrobacter hamburgensis (strain DSM 10229 / NCIMB 13809 / X14) OX=323097 GN=queC PE=3 SV=1
MTDQPVSRTALVLFSGGQDSATCLAWALQRFAHVETLGFDYGQRHAIELDCRDALLAGMTSLRPDWAEKLGEGHTLAIPTLAEISDTALTRNVAIEMGEGGLPNTFVPGRNLVFLTFAAALAYRRGMTDIVGGMCETDYSGYPDCRDDTIKALQTALNLGMDKQFELHTPLMWLDKAATWALAHELGGAGLVDLIREHSHTCYLGERGARHDWGYGCGECPACRLRAKGWCEYVARAV

SEQ ID NO: 40084 - protein, 238 aa, Nitrobacter sp.
  REGION 1..238: note = tr|A0A1M3CDE5|A0A1M3CDE5_9BRAD 7-cyano-7-deazaguanine synthase OS=Nitrobacter sp. 62-23; OX = 1895798 GN=queC PE=3 SV=1
MTDQPASRTALVLFSGGQDSATCLAWALQRFARVETLGFDYGQRHVIELQCRDNLLAGMRSLRPDWTGKLGENHTLAIPTLAEISDTALTRNVAIEMGEGGLPNTFVPGRNLVFLTFAAALAYRRGISHIVGGMCETDYSGYPDCRDDTIKALQAALNLGMARQFELHTPLMRLDKAATWSLAHELGEAGLVDLIRERSHTCYLGERGARHDWGYGCGECPACRLRAKGWREYAARTA

SEQ ID NO: 40085 - protein, 250 aa, Nitrobacter sp.
  REGION 1..250: note = tr|A3WWP8|A3WWP8_9BRAD 7-cyano-7-deazaguanine synthase OS=Nitrobacter sp. Nb-311A OX=314253 GN=queC PE=3; SV = 1
MARLPRDAIGIAMIDEATSRTALVLFSGGQDSATCLAWALQRFARVETLGFDYGQRHAIELNCRDKLLAGMASLRPDWAKKLGETHTLAVPTLAEISDTALTRNVAIEMGEGGLPNTFVPGRNLVFLTFAAALAYRRGVTDIVGGMCETDYSGYPDCRDETIRALRTALNLGMATRFELHTPLMRLDKGATWSLAHELGGAGLVDLIREHSHTCYLGERGARHAWGYGCATCPACELRAKGWRKYVTQTV

SEQ ID NO: 40086 - protein, 238 aa, Nitrobacter vulgaris
  REGION 1..238: note = tr|A0A1V4I0V5|A0A1V4I0V5_NITVU 7-cyano-7-deazaguanine synthase OS=Nitrobacter vulgaris; OX = 29421 GN=queC PE=3 SV=1
MIDEPASRTALVLFSGGQDSATCLAWALQRFARVETLGFDYGQRHAIELDCRDKLLAGLKSLRPDWADKLGESHTLAIPTLAEISDTALTRNVAIEMGEGGLPNTFVPGRNLVFLTFAAALAYRRGVTDIVGGMCETDYSGYPDCRDETIRALRIALNLGMARQFELHTPLMRLDKAATWSLAHELGGAGLVDLIREHSHTCYLGERGARHEWGYGCGDCPACGLRAKGWREYVARSV

SEQ ID NO: 40087 - protein, 452 aa, Nitrobacter winogradskyi
  REGION 1..452: note = tr|Q3SW10|Q3SW10_NITWN Uncharacterized protein; OS = Nitrobacter winogradskyi (strain ATCC 25391 / DSM 10237 / CIP 104748 / NCIMB 11846 / Nb-255) OX=323098; GN = Nwi_0264PE=4 SV=1
MTATAFQPRIPDKAIDVVEPGRRARKGHLVCQLGRDLSFSTAALEHYAFARWEPVIYDAMLVAAAVEYADRSIRRPSLGWTRKIALRVPVHDPGRWSDPGVFTALHEALRFLTGDIWDLEFIKRRSAAPKPQQEFLQLPVKTEAVIAYSDGMDSRAVAGLMAESLGERLVRVRVGPKAGGRPFKGQREPFAAVPYSVAATGETSGRSRGFKFALISGIAAYLAEADVILVPESGQGAFGPALVTVAHAYPDYRNHPLFTSRMERFLNALFRRPVRFVFPRLWHTKAETLREYAALPGSKWDDTKSCWRNARWSALNGNLVQCGICAACMLRRMSIHTAGLVDGPDAYVCNDLTAATIEEAVHPGFKKVNSAFREYAIAGTLHLDHLADMAQPNNHAALKRHAALTSTALGMTAAEAEGRLIGLLERHAAEWNKFTDDLGARSFIKKWTRASQ

SEQ ID NO: 40088 - protein, 238 aa, Nitrobacter winogradskyi
  REGION 1..238: note = sp|Q3SSM7|QUEC_NITWN 7-cyano-7-deazaguanine synthase; OS = Nitrobacter winogradskyi (strain ATCC 25391 / DSM 10237 / CIP 104748 / NCIMB 11846 / Nb-255) OX=323098 GN=que C; PE = 3 SV=1
MIDEPASRTALVLFSGGQDSATCLAWALQRFARVETLGFDYGQRHAIELDCRDSLLAGMASLRPDWAKKLGETHTLAIPTLAEISDTALTRNVAIEVSESGLPNTFVPGRNLVFLTFAAALAYRRGVTDIVGGMCETDYSGYPDCRDETIRALRIALNLGMVRQFELHTPLMRLDKGATWSLAHELGGTGLVDLIREHSHTCYLGERGARHAWGYGCGECPACGLRAKGWREYLARIA

SEQ ID NO: 40089 - protein, 243 aa, Nitrococcus mobilis
  REGION 1..243: note = tr|A4BLV0|A4BLV0_9GAMM 7-cyano-7-deazaguanine synthase OS=Nitrococcus mobilis Nb-231 OX=314278 GN=queC; PE = 3 SV=1
MNERHPRAVVLLSGGLDSTTTLAIAQAQGFCCFALSFDYGQRHASELSAGTAIAKAMSVAEHRVLRIGLDDLGGSALTDVASPLPKPPSKGIPATYVPARNTIFLAYALAYAEVLQAHDIFIGVNAIDYSGYPDCRPEFITAFEHMANLATKSSAEDRSCYHISTPLIQLTKAEIIQCGARLGVDYSITVSCYNADQIGRACGRCDACYYRAKGFRQAGMPDPTRYQPGVSVSDTSPSPEEKS

SEQ ID NO: 40090 - protein, 228 aa, unidentified
  source 1..228: note = Nitrolancea hollandica
  REGION 1..228: note = tr|I4ECX1|I4ECX1_9CHLR 7-cyano-7-deazaguanine synthase OS=Nitrolancea hollandica Lb OX=1129897 GN=queC; PE = 3 SV=1
MTIRTPADNSAVVLLSGGLDSTTAAYLARASGMAVHALSFDYGQRHRRELDAAATVANRLGVAEHRVIQIGLSDWAGSSLTGTGPIPDQLDETRIPSTWVPARNHIFLAIAHGYAEAIGAKAVYIGTSQVDYSGYPDCRREFLDAYQRAADLASKQFVEEGRSIPVIAPLLYLSKAETIRLGLSLGVDYSLTWSCYAGGETPCGVCDSCRLRAAAFDAAGVPDPLLAR

SEQ ID NO: 40091 - protein, 464 aa, unidentified
  source 1..464: note = Nitrolancea hollandica
  REGION 1..464: note = tr|I4EGF4|I4EGF4_9CHLR Uncharacterized protein; OS = Nitrolancea hollandica Lb OX=1129897 GN=NITHO_270012; PE = 4 SV=1
MVMAEASEPISCQVTFDVDGRVRTTRGDTLVRPESICYIGDETIARTFRSILPKHLADLIDIALAVYIADRLVRRSQNSSDRYHSRWCRQLHLRLPLRDPEPWQDAPLRMRLREVLTFFTDDEWHFDFIPRSDGWRVSEIQDFLFPTPPRAPVMAALFSGGLDSLAGLCREFIDCPPESVVLLCGGTNGRTVAVQRRLIAALRTRLGKTIIPVIVPFGLRQRGSQYDGDERTQRTRGFVYQTLGAVTAIMAGADSLAVYEPGVGAINLAYTTAQLGTQSARACHPQAVAAMGDLIRMAVGKPFKIRLPFPFFTKAQLCTSLPELGLSDLVEYTVSCDGFPQRVPGRVQCGLCTSCLLRRQAVFASGLMEYDATAAYVNDVFDPMVPLPQAKLYPLRAMLDQVETLQHTLDCAEPWKMLSRRYPQLLEVAVALSATGRQLTDIESQIVDLYRRYCSEWEGFPPRR

SEQ ID NO: 40092 - protein, 224 aa, unidentified
  source 1..224: note = Nitrosococcus halophilus
  REGION 1..224: note = tr|D5C4X4|D5C4X4_NITHN 7-cyano-7-deazaguanine synthase OS=Nitrosococcus halophilus (strain Nc4); OX = 472759 GN=queC PE=3 SV=1
MSSPKAVVLVSGGLDSATVLAIAREQEFACYTMSFDYGQRHRVELQAAAEISRLLGAVEHKLITIDLGGMGGSALTDSSIAVPEAPTEAIPVTYVPARNTVFLAFALGWAEVLGAQDIFIGVNAVDYSGYPDCRPAFVEAFEHLANLATRAGLEGQRFRIQAPLIHLSKAEIIREGIRLGIDYSRTVSCYQADETGRACGVCDSCRFRKQGFQEAGVPDPTRYH

SEQ ID NO: 40093 - protein, 224 aa, Nitrosococcus oceani
  REGION 1..224: note = tr|A0A0E2Z582|A0A0E2Z582_9GAMM 7-cyano-7-deazaguanine synthase OS=Nitrosococcus oceani C-27 OX=314279 GN=queC PE=3 SV=1
MTAPKAVVLVSGGLDSATVLAIAREQEFICHTLSFNYGQRHRVELQAAAEISRRMGAVEHKRITIDLGGFGGSALTDPSMAVPEASSGAIPITYVPARNTVFLSFALGWAEVLGAQDIFIGVNAVDYSGYPDCRPAFIKAFEHLAKLATCAGLEGRAFRIQAPLLHLSKAEIIREGMRLGIDYSRTISCYQADENGRACGVCDSCRFRKQGFWDAGVPDPTRYH

SEQ ID NO: 40094 - protein, 425 aa, Nitrosococcus oceani
  REGION 1..425: note = tr|Q3JDB4|Q3JDB4_NITOC Uncharacterized protein; OS = Nitrosococcus oceani (strain ATCC 19707 / BCRC 17464 / NCIMB 11848 / C-107) OX=323261 GN=Noc_0663 PE=4 SV=1
MRIICGPSNSKFERLRKDDLRCILYGSAENSYHGSAGGTLLKHVQSLKLSPAPRAWDLLSLALSVICADTAVRRGESPDGWTRQISLTVAVSDPDFWTTQRSLIEDQLKFLTTDLWALQFVGYGLYPKPSKVPKLPDGDCVTLLSGGLDSFVGAIDLVADGKAPFAVSQVAAGDKQSQADFAAKIGGGLNHLQLNHNVKCPGENERSQRARSFIFLAYGVLAASAQKHYHDGERVDLYICENGLISINPPLTPARLGSLSTRTTHPVFLGLFQRLLDVAELRIAVRNPYQFRTKGEMLLECKDQAFLRKHAAETTSCGRYARNGWQHCGRCFPCLIRRAAFHAWGKDDRTKYVYADLSKNDSQHARYDDVRCAAMAAALVDADGLDALATNNLNALAMGDLTPYKAILTRGIREVGQFLAAAGVR

SEQ ID NO: 40095 - protein, 224 aa, unidentified
  source 1..224: note = Nitrosococcus wardiae
  REGION 1..224: note = tr|A0A4P7BXS4|A0A4P7BXS4_9GAMM 7-cyano-7-deazaguanine synthase OS=Nitrosococcus wardiae; OX = 1814290 GN=queC PE=3 SV=1
MSSPKAVVLVSGGLDSATVLAIAQEQKFACYAMSFDYGQRHRAELQAAAEISRLLGAVEHKLVTIDLGGMGGSALTDPSIAVPEASTETIPVTYVPARNTVFLAFALGWAEVLGAQDIFIGINAVDYSGYPDCRPAFVEAFEHLANLATRAGLEGQQFRIQAPLIHLSKAEIIREGIRLGIDYSPTVSCYQADETGRACGVCDSCRFRKQGFQEAGVPDPTRYY

SEQ ID NO: 40096 - protein, 224 aa, unidentified
  source 1..224: note = Nitrosococcus watsoni
  REGION 1..224: note = tr|D8K8Q6|D8K8Q6_NITWC 7-cyano-7-deazaguanine synthase OS=Nitrosococcus watsoni (strain C-113) OX=105559; GN = queC PE=3 SV=1
MTAPKAVVLVSGGLDSATVLAIAREQAFICHTLSFNYGQRHSVELQAAAEISRQMGAVEHKCITIDLGGFGGSALTDPSMAVPEASTGTIPITYVPARNTVFLSFALGWAEVLGAQDIFIGVNAVDYSGYPDCRPAFIKAFEQLAKLATCAGLEGRSFRIQAPLLPLSKADIIREGMRLGVNYSRTISCYQADENGRACGVCDSCRLRKQGFWDAGVPDPTHYH

SEQ ID NO: 40097 - protein, 223 aa, unidentified
  source 1..223: note = Nitrosomonadaceae bacterium
  REGION 1..223: note = tr|A0A2E6USQ9|A0A2E6USQ9_9PROT 7-cyano-7-deazaguanine synthase OS=Nitrosomonadaceae bacterium OX=2026767 GN=queC PE=3 SV=1
MTKAVVLLSGGLDSATILAIARDKGYQCYAMSLDYGQKNRSELIAARYLAQEIGVLKHQIINIDLTVFGGSALTDDSVAMPVEGVKEGIPVTYVPARNTIMLSLALSWAEVLGSGDVFIGVNAVDYSGYPDCRPEYIEAFERMANLATKASTQNKKLNIHAPLMNLSKAEIIQKGKLLDVDYGMTVSCYQANEEGVACGLCDSCRLRRAGFKAARVPDPTRYR

SEQ ID NO: 40098 - protein, 236 aa, unidentified
  source 1..236: note = Nitrosomonadaceae bacterium
  REGION 1..236: note = tr|A0A4P5UDE8|A0A4P5UDE8_9PROT 7-cyano-7-deazaguanine synthase OS=Nitrosomonadaceae bacterium OX=2026767 GN=queC PE=3 SV=1
MLRIYFVCPMTKAVVLLSGGLDSATTLAIARDQGYECYALSVDYGQRHGVELVAAEKVARSIGVGEHRTVKVDLAGFGGSALTDRSIDVPIEGINAGIPVTYVPARNTIMLSLAIAWAEVLGSYNVFIGVNAVDYSGYPDCRAEYIAAFEQMANLATRAATEGNRLNIYTPLISLTKAEIIRQGALRGVDYSLTVSCYQAGADGLACGVCDSCRLRRMGFEAAGVSDPTRYWPSSP

SEQ ID NO: 40099 - protein, 224 aa, unidentified
  source 1..224: note = Nitrosomonadales bacterium
  REGION 1..224: note = tr|A0A2E0I7C6|A0A2E0I7C6_9PROT 7-cyano-7-deazaguanine synthase OS=Nitrosomonadales bacterium OX=2026761 GN=queC PE=3 SV=1
MSKKAIILLSGGLDSSTVLAIAKSKGYECYALTINYQQRHNAELKAAKKIANLYNVKDFKIVDIDLSWLKSSALTNKDIDIPENFSPGIPVTYVPARNTIMMTLALAWAETIKSQDIFIGVNSVDYSGYPDCRPEYIESFQKMANLATKAAIEGNKIKIHTPLINLTKDQIIHEGLKNKVDYKITVSCYQASENGLACGKCDSCRLRKEGFKSAKVKDPTNYKN

SEQ ID NO: 40100 - protein, 232 aa, unidentified
  source 1..232: note = Nitrosomonadales bacterium
  REGION 1..232: note = tr|A0A1E4GIN7|A0A1E4GIN7_9PROT 7-cyano-7-deazaguanine synthase OS=Nitrosomonadales bacterium SCN 54-20 OX=1660164 GN=queC PE=3 SV=1
MVKAVVLLSGGLDSATVLAIARQQGYECHALSVSYGQRHDSELVAAKNLARSLGAAAHKVIEVNLSTLGGSALIDKALEVPTGGVKPGIPSTYVPARNTIMLSLALAWAEALGSGDIFIGVNAIDYSGYPDCRSEYIGAFETMANLATKAGTEGVRLTIHAPLLNLSKAEIIKRGCLLGVDYSMTVSCYQADDAGLACGVCDSCRLRRAGFEAANVPDVTRYHADFRQATAL

SEQ ID NO: 40101 - protein, 225 aa, Nitrosomonas aestuarii
  REGION 1..225: note = tr|A0A1I3XC98|A0A1I3XC98_9PROT 7-cyano-7-deazaguanine synthase OS=Nitrosomonas aestuarii; OX = 52441 GN=queC PE=3 SV=1
MSAKAVVLLSGGLDSATALAIAKDQQFECYALSVDYGQRHAAELSAAKKIAQALDATAHKIIKIDLTAFGGSALTDTALEVPIAGENTDIPITYVPARNTIMLSLALAWAETLNCRDIFIGVNAVDYSGYPDCRPAFIQAFENMANLATKAAIEGKKLTIHTPVIDLSKQDIIQTGLELGVDYSLTVSCYQADEAGNACGVCDSCRIRRKGFTEAGIADMTRYQV

SEQ ID NO: 40102 - protein, 225 aa, Nitrosomonas communis
  REGION 1..225: note = tr|A0A1H2VW74|A0A1H2VW74_9PROT 7-cyano-7-deazaguanine synthase OS=Nitrosomonas communis; OX = 44574 GN=queC PE=3 SV=1
MRKAVVLLSGGLDSATTLAMACDKGFACYALSIDYGQRHQSELAAARKVGQSMGIKMHRTISIDLSALGGSALTDRSIAVPTEGTTTGIPVTYVPARNTVMLSLALAWAEVLGSHDIFIGVNAIDYSGYPDCRPDYIEAFEKMSNLATKTAREGNKLTLHAPLLNLSKKEIISLGKELGVDYALTVSCYQADESGSACGLCDACRIRKAGFLAADISDPTRYRVG

SEQ ID NO: 40103 - protein, 225 aa, Nitrosomonas communis
  REGION 1..225: note = tr|A0A1I4TJ07|A0A1I4TJ07_9PROT 7-cyano-7-deazaguanine synthase OS=Nitrosomonas communis; OX = 44574 GN=queC PE=3 SV=1
MRKAVVLLSGGLDSATTLAIACDKGFVCYALSIDYGQRHQSELAAALKIGQSMGIQAHQTISVDLSALGGSALTDRSIAVPTEGTIAGIPVTYVPARNTIMLSLALAWAEVLGSYDIFIGVNAIDYSGYPDCRPDYIEAFEKMSNLATKTAREGNKLMLHAPLLNLSKKEIICLGTELGVDYALTVSCYQANESGSACGLCDACRIRKAGFLAADISDPTRYRIG

SEQ ID NO: 40104 - protein, 225 aa, unidentified
  source 1..225: note = Nitrosomonas cryotolerans
  REGION 1..225: note = tr|A0A1N6G6I6|A0A1N6G6I6_9PROT 7-cyano-7-deazaguanine synthase OS=Nitrosomonas cryotolerans ATCC 49181 OX=1131553 GN=queC PE=3 SV=1
MKKAVVLLSGGLDSATTLAIARNKQFQCYALSVDYGQRHESELVAARNVARSLGACSQHVIKVDLAAFGGSALTNHSIDIPITGQETDIPVTYVPARNTIMLSLALAWAETLGSHDIFIGVNAVDYSGYPDCRPEYIKAFENMANLATKAATKGHKTAIHTPLIMLPKEAIIRQGIALGLDYSITISCYQADEAGSACGVCDSCRIRRTGFNKAGLMDPTRYRQS

SEQ ID NO: 40105 - protein, 228 aa, Nitrosomonas europaea
  REGION 1..228: note = tr|A0A1I0C1Y8|A0A1I0C1Y8_NITER 7-cyano-7-deazaguanine synthase OS=Nitrosomonas europaea; OX = 915 GN=queC PE=3 SV=1
MKKAVVLLSGGMDSATTLAIARQSGFACYALSIDYGQRHVAELAAAARIGQSLQVSDHQFLKLDLAVLASSVLTDISATVPLHGTSTGIPVTYVPARNTIMLALALAWAEVLGSHDIFIGVTAVDYSGYPDCRRDYIDAFEKMANLATKAGREGMVLTVHAPLIDLPKREIIQCGMELGIDYGLTVSCYQADEAGYACGQCDACHIRRAGFEAADIPDPTCYRNKQIS

SEQ ID NO: 40106 - protein, 228 aa, Nitrosomonas europaea; identical to SEQ ID NO: 40105
  REGION 1..228: note = sp|Q82XN5|QUEC_NITEU 7-cyano-7-deazaguanine synthase; OS = Nitrosomonas europaea (strain ATCC 19718 / CIP 103999 / KCTC 2705 / NBRC 14298) OX=228410 GN=queC PE=3 SV=1

SEQ ID NO: 40107 - protein, 226 aa, Nitrosomonas eutropha
  REGION 1..226: note = tr|A0A2V3QTJ1|A0A2V3QTJ1_9PROT 7-cyano-7-deazaguanine synthase OS=Nitrosomonas eutropha; OX = 916 GN=queC PE=3 SV=1
MKKAVVLLSGGLDSTTTLAIARGNGFACYALSVDYGQRHAAELAAATRIGQLLQVCEHQFLKLDLTVLASSALTDPSVTVPIHGTNRGIPATYVPARNTIMLSLALAWAEVLGSQDIFIGVTAVDYSGYPDCRPDYIDAFEKMANLATKAGREGNLLKVHAPLINLPKHDIIRRGLELGIDYSMTVSCYQADASGWACGQCDACHIRRAGFAAANIPDPTYYQDKR

SEQ ID NO: 40108 - protein, 226 aa, Nitrosomonas eutropha; identical to SEQ ID NO: 40107
  REGION 1..226: note = sp|Q0AJ94|QUEC_NITEC 7-cyano-7-deazaguanine synthase; OS = Nitrosomonas eutropha (strain DSM 101675 / C91); OX = 335283 GN=queC PE=3 SV=1

SEQ ID NO: 40109 - protein, 225 aa, Nitrosomonas halophila
  REGION 1..225: note = tr|A0A1H3IT60|A0A1H3IT60_9PROT 7-cyano-7-deazaguanine synthase OS=Nitrosomonas halophila; OX = 44576 GN=queC PE=3 SV=1
MRKAVVLLSGGIDSATTLAIARAQGFACYALSIDYGQRHRSELVAAARIGEFLQASDHQFVQLDLTTLAASALTNATIAVPTDGVSEGIPVTYVPARNTVMLSLALAWAEVLESRDIFIGVTAVDYSGYPDCRPDYIAAYEKMANLATKAGREGEPFTIHAPLIDLSKHAIIRSGMRLGVDYGLTVSCYQADDDGRACGLCDACRLRRAGFEAANVPDPTRYQQD

SEQ ID NO: 40110 - protein, 231 aa, Nitrosomonas marina
  REGION 1..231: note = tr|A0A1H8CKS2|A0A1H8CKS2_9PROT 7-cyano-7-deazaguanine synthase OS=Nitrosomonas marina; OX = 917 GN=queC PE=3 SV=1
MTNSTGARAKAVVLLSGGLDSATTLAIAKDRQFDCSALSINYGQRHESELNAARNVANAISVADHKIISVDLSTFGGSALTDPSIAVPTGKNNGGIPITYVPARNTIMLSLALAWAETIGCRDIFIGINAVDYSGYPDCRPEYIQAFEKMANLATKTAIEGNKLTIHTPLIDLPKKDIIKTGAALGVDYSLTISCYQADEAGRACGVCDSCRIRREGFAAAGIADMTRYKT

SEQ ID NO: 40111 - protein, 231 aa, Nitrosomonas marina
  REGION 1..231: note = tr|A0A1I0BG56|A0A1I0BG56_9PROT 7-cyano-7-deazaguanine synthase OS=Nitrosomonas marina; OX = 917 GN=queC PE=3 SV=1
MTSSTGAGAKAVVLLSGGLDSATTLAIAKDRQFDCFALSINYGQRHESELNAARNVANAIGVADHKIISVDLSAFGGSALTDPSIAVPAGKNSGGIPITYVPARNTIMLSLALAWAETLGCRDIFIGVNAVDYSGYPDCRPEYIQAFEKMANLATKTAIEGNKLTIHTPLIDLPKKDIIKTGIALGVDYRLTISCYQADEAGRACGICDSCRIRREGFAAAGIVDITRYKT

SEQ ID NO: 40112 - protein, 225 aa, unidentified
  source 1..225: note = Nitrosomonas mobilis
  REGION 1..225: note = tr|A0A1G5SE90|A0A1G5SE90_9PROT 7-cyano-7-deazaguanine synthase OS=Nitrosomonas mobilis; OX = 51642 GN=queC PE=3 SV=1
MKKAVVLLSGGMDSATTLAIAHQAGFLCYALSIDYGQRHHSELQAAANIGNLIQVASHQFIKLDLTTLASSALTDPSTTLPTKEEPGEIPITYVPARNTIMLSLALAWAEVLQSYDIFIGVTAVDYSGYPDCRPDYIAAFQKMTNLATKAGREGKYFQIHAPLINCSKAAIIRKGITLGLDYSLTVSCYQADESGHACGHCNACRIRHAGFIAAGIADPTRYQEK

SEQ ID NO: 40113 - protein, 225 aa, Nitrosomonas nitrosa
  REGION 1..225: note = tr|A0A1I4S4A6|A0A1I4S4A6_9PROT 7-cyano-7-deazaguanine synthase OS=Nitrosomonas nitrosa; OX = 52442 GN=queC PE=3 SV=1
MKKAVVLLSGGLDSATVLAIARSERFECYALSVDYGQRHRSELVAAHKVGQSLGVKAHQSIRIDLSVLGKSALTDKSIAIPTEGLTNGIPVTYVPARNTIMLSLALAWAEVLECHDIFIGVNAVDYSGYPDCRPDYIEAFEKMSNLATKAAREGNKLTLHAPLLYLSKKEIIRLGVERGVDYSLTVSCYQADEEGSACGLCDACRLRKAGFLAAEVPDPTRYSLP

SEQ ID NO: 40114 - protein, 188 aa, Nitrosomonas nitrosa
  REGION 1..188: note = tr|A0A1I4TI03|A0A1I4TI03_9PROT 7-cyano-7-deazaguanine synthase OS=Nitrosomonas nitrosa; OX = 52442 GN=SAMN05421880_1328 PE=3 SV=1
MFTEQLSKEALVLLSGGIDSMSCVHFLKCQNYSVKGIFVNYGQASFEYELCAVKKIQTHFEIDVDHVSIKSDKNIGSGELAGRNALLISTAILYGNINRGLIVIGVHAGTPYYDCSEGFIERMKKVTEEYFHGLVTLSAPFLSWDKATIYKYFCDQNLPVNITYSCESGTLPPCGVCASCLDRSKFGC

SEQ ID NO: 40115 - protein, 224 aa, Nitrosomonas oligotropha
  REGION 1..224: note = tr|A0A5C7VTN5|A0A5C7VTN5_9PROT 7-cyano-7-deazaguanine synthase OS=Nitrosomonas oligotropha OX=42354 GN=queC PE=3 SV=1
MKKAVVLLSGGLDSATVLAIARDQGFQCYALSVDYGQRHRSELEAARKVAQSLHSHAHQIIRLDLTAFGGSALTDRTMEIPTSGEKTEIPVTYVPARNTIMLSLALAWVETLQSQDIFVGVNAVDYSGYPDCRPEYIQAFEQMANLATKAGVEGKKLNIHVPLMHLSKKEIIQAGLALGVDYGLTVSCYQADEMGRACGICDSCRIRKAGFAAAGVSDSTCYRL

SEQ ID NO: 40116 - protein, 227 aa, Nitrosomonas oligotropha
  REGION 1..227: note = tr|A0A1H8NSB7|A0A1H8NSB7_9PROT 7-cyano-7-deazaguanine synthase OS=Nitrosomonas oligotropha OX=42354 GN=queC PE=3 SV=1
MKKAVVLLSGGLDSATVLAIARDQGFQCYALSVDYGQRHRSELEAARKVAQSLHSHAHQIIRLDLTAFGGSALTDRTMEIPTSGEKTEIPVTYVPARNTIMLSLALAWAETLQSQDIFVGVNAVDYSGYPDCRPEYIQAFEQMANLATKAGVEGKKLNIHVPLMHLSKKEIIQAGLALGVDYGLTVSCYQADEMGRACGICDSCRIRKAGFAAAGVSDSTCYRLRSV

SEQ ID NO: 40117 - protein, 229 aa, Nitrosomonas sp.
  REGION 1..229: note = tr|A0A1H3NGE0|A0A1H3NGE0_9PROT 7-cyano-7-deazaguanine synthase OS=Nitrosomonas sp. Nm58; OX = 200126 GN=queC PE=3 SV=1
MRKAVVLLSGGLDSTTTLAIARAKQFECYALSIDYGQRHQSELAAALKIGQSMGVQEHRTISIDLSILGRSALTDESIAIPIEGIMAGIPVTYVPARNTIMLSLALAWAEVLESHDIFIGINAIDYSGYPDCRPDYIEAFEKMSNLATKTAREGNKLTLHAPLMHLSKKEIICLGIELGVDYGLTVSCYQADESRFACGLCDACRLRMAGFLAAEIPDPTRYRNALELI

SEQ ID NO: 40118 - protein, 225 aa, Nitrosomonas sp.
  REGION 1..225: note = tr|A0A1H3MRE5|A0A1H3MRE5_9PROT 7-cyano-7-deazaguanine synthase OS=Nitrosomonas sp. Nm33; OX = 133724 GN=queC PE=3 SV=1
MRKAIVLLSGGLDSATTLAIARDKGFECYALSIDYGQRHPSELAAALKIGQSMGVQAHQTISVNLSVLGGSALTDKSIAVPTEGIITGIPVTYVPARNTIMLSLALAWAEVLESHDIFIGVNAIDYSGYPDCRTDYIEAFEKMSNLATKTAREGNKLTLHAPLLNLSKKEIICLGVELGIDYAVTVSCYQADESGFACGLCDACRIRKAGFLAAEIPDPTRYRIC

SEQ ID NO: 40119 - protein, 226 aa, unidentified
  source 1..226: note = Nitrosomonas stercoris
  REGION 1..226: note = tr|A0A4Y1YR81|A0A4Y1YR81_9PROT 7-cyano-7-deazaguanine synthase OS=Nitrosomonas stercoris; OX = 1444684 GN=queC PE=3 SV=1
MKKAVVLLSGGLDSATVLAIAKQSGFACYALSVHYGQRHAAELVAAKQISQALQVHEHQIFELDLSVLTTSALTNSAIAVPTNNNDQGIPVTYVPARNTIMLSLALAWAEVLESQDIFVGVTAVDYSGYPDCRPDYIAAFATMANLATKAGREGKTLTIHTPLIDLPKHEIIRRGTALGIDYSMTVSCYQADDVGRACGKCDACRIRKNGFTAANMADPTRYQQNS

SEQ ID NO: 40120 - protein, 225 aa, Nitrosomonas ureae
  REGION 1..225: note = tr|A0A2T5IXI2|A0A2T5IXI2_9PROT 7-cyano-7-deazaguanine synthase OS=Nitrosomonas ureae; OX = 44577 GN=queC PE=3 SV=1
MKKAIVLLSGGLDSATTLAIARSQDFRCYALSIDYGQRHHVELNAAQKIAQSLGSHNHQIIKIDLTTFGGSALTDQSIKVPTSGENPGIPVTYVPARNTIMLSLALAWAETLDCRDIFTGVNAVDYSGYPDCRAEYIQAFGIMANLATKASVEGKQLTIHAPLILLSKQEIIHAGLALGVDYSLTVSCYQADEAGRACGVCDSCRIRKAGFKAANIPDPTAYKAN

SEQ ID NO: 40121 - protein, 225 aa, Nitrosomonas ureae
  REGION 1..225: note = tr|A0A0S3AGL7|A0A0S3AGL7_9PROT 7-cyano-7-deazaguanine synthase OS=Nitrosomonas ureae; OX = 44577 GN=queC PE=3 SV=1
MKKAIVLLSGGLDSATTLAIARSQDFRCYALSIDYGQRHHVELNAAQKIAQSLGSHNHQIIKIDLTTFGGSALTDQSIKVPTSGENPGIPVTYVPARNTIMLSLALAWAETLDCRDIFTGVNAVDYSGYPDCRAEYIQAFGIMANLATKASVEGKQLTIHAPLMLLSKQEIIHAGLALGVDYSLTVSCYQADEAGRACGVCDSCRIRKAGFKAANIPDPTAYKAN

SEQ ID NO: 40122 - protein, 228 aa, Nitrosospira briensis
  REGION 1..228: note = tr|A0A1I5ENB9|A0A1I5ENB9_9PROT 7-cyano-7-deazaguanine synthase OS=Nitrosospira briensis; OX = 35799 GN=queC PE=3 SV=1
MEKAVVLLSGGLDSATTLAIACNRGYECHAFSVDYGQRHRSELEAAKKLARSLGASDHKTIHIDLSAFGGSALVDKFSPVPAGGTDTGIPVTYVPARNTIMLSLALAWAEVLKSRDIFIGVNAVDYSGYPDCRPEYIAAFEQMANLATKAAIEGARLRIHAPLMEMSKAQIIRQGVVLGLDYSLTVSCYQADEAGRACGVCDSCRIRRAGFESADVPDVTRYRSWVRL

SEQ ID NO: 40123 - protein, 228 aa, unidentified
  source 1..228: note = Nitrosospira lacus
  REGION 1..228: note = tr|A0A1W6SLW7|A0A1W6SLW7_9PROT 7-cyano-7-deazaguanine synthase OS=Nitrosospira lacus; OX = 1288494 GN=queC PE=3 SV=1
MTKAVVLLSGGLDSATTLAIARSRGYECYALSVDYGQRHESELAAAATTARFLGTREHKTMKVDLGEIGGSALTDEFIAVPTEGTKAGIPVTYVPARNTIMLSLALAWAEVIKSRDIFIGVNVVDYSGYPDCRPEYIAAFEKMANLATKAAIEGARLSIHAPLINLSKAEIILLGISLGVDYSLTVSCYQADDTGLACGVCDSCRLRQAGFESANVPDVTRYQFGSGG

SEQ ID NO: 40124 - protein, 232 aa, Nitrosospira multiformis
  REGION 1..232: note = sp|Q2Y5H4|QUEC_NITMU 7-cyano-7-deazaguanine synthase; OS = Nitrosospira multiformis (strain ATCC 25196 / NCIMB 11849 / C 71) OX=323848 GN=queC PE=3 SV=1
MVKAVVLLSGGLDSATVLAIARQQGYECYALSVSYGQRHGAELAAAKNLARSLGATAHKIIQVDLSTFGGSALIDKEREIPTDGVTPGIPSTYVPARNTIMLSIALAWAEVLGSGDIFIGVNAIDYSGYPDCRPEYIEAFETMANVATKAGIEGTRLAIHAPLMNLSKAEIIKRGGVLGVDYSMTVSCYQADDAGLACGVCDSCRLRRAGFESADVPDVTRYHAGFRQTPAS

SEQ ID NO: 40125 - protein, 232 aa, Nitrosospira multiformis
  REGION 1..232: note = tr|A0A2T5I8M0|A0A2T5I8M0_9PROT 7-cyano-7-deazaguanine synthase OS=Nitrosospira multiformis OX=1231 GN=queC PE=3 SV=1
MVKAVVLLSGGLDSATALAIARQQGYECYALSVSYGQRHGSELAAAKNLAHSLGAAAYKVIEVDLSTFGGSALIDKEREIPTGGVTPGIPSTYVPARNTIMLSLALAWAEVLGSGDIFIGVNAVDYSGYPDCRPEYIEAFETMANLATKTGTEGARMTIHAPLMNLSKAEIIKRGCLLGVDYSMTVSCYQADDAGLACGVCDSCRLRRAGFESANVPDVTRYHAGFRQATAL

SEQ ID NO: 40126 - protein, 227 aa, Nitrosospira sp.
  REGION 1..227: note = tr|A0A2T5JVH7|A0A2T5JVH7_9PROT 7-cyano-7-deazaguanine synthase OS=Nitrosospira sp. Nsp2; OX = 136548 GN=queC PE=3 SV=1
MAKAVVLLSGGLDSATALAIAHSRGHECFALSVDYGQRHVSELAAAAALANSIGAVEHRVIKVDLSTFGGSALTDLSTAIPAGGIKPGIPVTYVPARNTIMLSLALAWAEVLRSLDIFIGVNAVDYSGYPDCRPEYITAFENMANLATKAAIEGAKLRIHAPLLNLSKAQIIEQGNLLGLDYSVTVSCYQADEAGWACGICDSCRIRRAGFESAQVPDPTHYRPLFP

SEQ ID NO: 40127 - protein, 227 aa, Nitrosospira sp.
  REGION 1..227: note = tr|A0A495EPM9|A0A495EPM9_9PROT 7-cyano-7-deazaguanine synthase OS=Nitrosospira sp. Nsp44; OX = 1945879 GN=queC PE=3 SV=1
MTKAVVLLSGGLDSATTLAIAHSSGYECFALSIAYGQRHVSELAAAAKLAESVGARDHKVIEVDLSVFGGSALTDPSRIVPAGGIKPGIPVTYVPARNTIMLSLALAWAEVLESRHIFIGVNAVDYSGYPDCRSEYITAFENMANLATKAGIEGARIHIHAPLMHLSKDQIIKRGASLGLDYSLTVSCYQADEAGRACGVCDSCRIRRTGFQSAQMPDPTHYRTPFP

SEQ ID NO: 40128 - protein, 224 aa, unidentified
  source 1..224: note = Nitrosovibrio sp.
  REGION 1..224: note = tr|A0A286C1P6|A0A286C1P6_9PROT 7-cyano-7-deazaguanine synthase OS=Nitrosovibrio sp. Nv4; OX = 1945880 GN=queC PE=3 SV=1
MAKAVVLLSGGLDSATTLAIARSRKYECYALSIDYGQRHGSELAAAEKLAHSLGARDHKVIKVDLSAFGGSALTDKSSAIPTEGTEAGIPVTYVPARNTIMLSLALAWAEVLESRDIFIGANVVDYSGYPDCRPEYLAAFERMANLATKAAIEGARLSIHAPLMKLSKAQIIQQGALLGLDYSLTVSCYQADEEGLACGVCDSCRLRRAGFESANIADVTRYQS

SEQ ID NO: 40129 - protein, 228 aa, unidentified
  source 1..228: note = Nitrosovibrio sp.
  REGION 1..228: note = tr|A0A1K1MXY5|A0A1K1MXY5_9PROT 7-cyano-7-deazaguanine synthase OS=Nitrosovibrio sp. Nv17; OX = 1855339 GN=queC PE=3 SV=1
MNPAVVLLSGGLDSATTLAIARDLGYRCHALSVDYGQRHAAELRAAASVARLLGACEHRTVKVDLGAFGGSALTDASIPLPLAGLRNGIPATYVPARNTIMLSLALAWAEVLGSRDILLGVNVVDYSGYPDCRPEYVAAYQHLANLATRSGIEGRRLSIHAPLMHLSKAEIIRRGLALGVDYALTISCYQADETGAACGACDACRLRRAGFAAAQVSDPTRYRAGTAT

SEQ ID NO: 40130 - protein, 229 aa, unidentified
  source 1..229: note = Nitrosovibrio tenuis
  REGION 1..229: note = tr|A0A1H7LG76|A0A1H7LG76_9PROT 7-cyano-7-deazaguanine synthase OS=Nitrosovibrio tenuis; OX = 1233 GN=queC PE=3 SV=1
MTKAVVLLSGGLDSATTLAIANSRGYECHALSVDYGQRHRSELVAAAKLAQSIGAREHKIVKVDLTLFGGSVLTQKSRAVPVGGIKAGIPVTYVPARNTIMLSLALAWAEVLESSDIFLGVNAIDYSGYPDCRPEYIAAFERMANLATKRSVEGARLSVRAPLIALSKAEIIQQGALLSVDYSLTVSCYQADESGLACGVCDACRIRRTGFQAAGMPDPTRYQFAPVAC

SEQ ID NO: 40131 - protein, 268 aa, Nitrospina gracilis
  REGION 1..268: note = tr|M1Z8I7|M1Z8I7_NITG3 Uncharacterized protein; OS = Nitrospina gracilis (strain 3/211) OX=1266370; GN = NITGR_1020006 PE=4 SV=1
MTLHDKHKRMQAQIAALPGAIVAFSGGVDSTLVLAIAHAALGERVLAVTGRSPSVPERELEASKRLARQIGARHLIVDTGEIHNPDYTANPANRCYFCKTELYDHLKRIASEHGLPCILNGTNSDDLGDHRPGLVAADEAKVLSPLADAGMNKQDVRDLSQELELPTWNKPAMACLASRVPYGQEVTGEKLSMIERAEDILLGMGLKQVRVRHHGDIARIEAPQDDLPMLLDPEQARVIESKFREIGFQFVTVDILGFRSGSLNQVLG

SEQ ID NO: 40132 - protein, 229 aa, Nitrospina gracilis
  REGION 1..229: note = tr|M1YYL0|M1YYL0_NITG3 7-cyano-7-deazaguanine synthase OS=Nitrospina gracilis (strain 3/211) OX=1266370; GN = queC PE=3 SV=1
MKKAIVLLSGGLDSTTVLAIARNEGFQPFTLSFDYGQRHRIELERAAVVAEALGAKDHRVVSVDLAQFGGSALTADIAVPTGRTAKEMAGEVPVTYVPARNTVFLSYALAYAEVTGSHDLFIGVNALDYSGYPDCRPEYIKAFETMANLATKAGVEGTERLTIHTPLIEMTKAEIIKKGLALGVDYGLTHSCYDPRPGGVPCGACDSCMLRKKGFDEAGVEDPLLQRGT

SEQ ID NO: 40133 - protein, 229 aa, Nitrospina sp.
  REGION 1..229: note = tr|A0A0J6YR99|A0A0J6YR99_9BACT 7-cyano-7-deazaguanine synthase OS=Nitrospina sp. SCGC_AAA799_C22 OX=1628279 GN=queC PE=3 SV=1
MTPKTIVLLSGGLDSTTTLALAQSEGYDAFTLSFDYGQRHRVELDRAQKLAEQMKTVEHHVVKIDLRQFGGSALTDSIEVPTHRSEGDMASCIPVTYVPARNTIFLSYALAYAEVKDCADIFIGVNALDYSGYPDCRPEYIAAFERLANLATKSGVEGQRKIKIHTPLIRMTKAEIIRKGLDLGVNYGLTHSCYDPGEAGLACGACDSCLLRLKGFKEAGVEDPLEYRA

SEQ ID NO: 40134 - protein, 232 aa, Nitrospina sp.
  REGION 1..232: note = tr|A0A523N4U5|A0A523N4U5_9BACT 7-cyano-7-deazaguanine synthase OS=Nitrospina sp.; OX = 2024844 GN=queC PE=3 SV=1
MKKKAIVLLSGGLDSATVLAIALQQGYSPVTLCFDYGQRHRVELAKARALSLKMGALEHREVKVDLRQFGGSALTDEIAVPKGRTDGEMSAEIPITYVPARNTIFLSFALAAAEIAGAEDIFIGVNAIDYSGYPDCRPEYIQAFEQMANLATKAGVEGTSKFKIHTPLIQMTKAEIIKKGLELGVDYSLTHSCYHPDANGRPCGQCDSCLLRKKGFQEAGVVDPLIQIGIQE

SEQ ID NO: 40135 - protein, 241 aa, unidentified
  source 1..241: note = Nitrospinae bacterium
  REGION 1..241: note = tr|A0A1G1DYH6|A0A1G1DYH6_9BACT 7-cyano-7-deazaguanine synthase OS=Nitrospinae bacterium RIFCSPLOWO2_12_FULL_45_22 OX=1801687 GN=queC PE=3 SV=1
MKRAVVLSSGGIDSTTCLAIARQEGYAIYSLSINYGQRHAYELNAARRIANFFRVEQHLIINVDLSVFGGSALTDQKLTVPKERQEPDITTGIPITYVPARNTIFLALALAWAEVLGAEAIFLGANYLDYSGYPDCRPEYIAAFEQLACLATKAGIEGRWKIKVHTPLINLTKAQIIKKGLELGIDFSLTHSCYDPDDKGRPCGRCDSCYWRLKGFQEAGLVDPLIYREQGAGGRGQGDRY

SEQ ID NO: 40136 - protein, 244 aa, unidentified
  source 1..244: note = Nitrospinae bacterium
  REGION 1..244: note = tr|A0A351RW90|A0A351RW90_9BACT 7-cyano-7-deazaguanine synthase OS=Nitrospinae bacterium; OX = 2026769 GN=queC PE=3 SV=1
MHDKKAIVLSSGGIDSTTAMAIAGAEGYKIYSLSFNYGQRHSFELKKASEVAKFFNAKEHLIFDIDLRKIGGSALTSDIDVPIRVSSQQSAVSSQNIKTKDSRLSTIPITYVPARNTIFLSLALAWAEVLEAEDIFIGANAIDYSGYPDCRPEYIDAFEKMANLATKAGVEGKSRIKIHTPLINLTKGEIIKKGISLGVDYSLTSSCYSPDKGGNPCGLCDSCQFRLKGFKDAGIKDPLTYKQS

SEQ ID NO: 40137 - protein, 246 aa, unidentified
  source 1..246: note = Nitrospira bacterium
  REGION 1..246: note = tr|A0A0S8APY2|A0A0S8APY2_9BACT 7-cyano-7-deazaguanine synthase OS=Nitrospira bacterium SG8_35_4 OX=1704025 GN=queC PE=3 SV=1
MSKGNRAVVLLSGGIDSATTVAIAHNESLDIFALSFDYGQRHKIELECAGYIAEKFGAREHLIINFNLRDIGGSALTADLEVPKRSTETQKRGSGKGQDDTSDIQSIPITYVPARNTIFLSFALAWAETLEASEIFIGANIIDYSGYPDCRPEFLEAFQNMANLATKASVEGSIKFTIRAPLIKMTKSDIIKRGADLGVDYSLTWSCYDPQSRGNKVFPCLRCESCQLRAKGFLESGLVDPISLNL

SEQ ID NO: 40138 - protein, 236 aa, unidentified
  source 1..236: note = Nitrospira bacterium
  REGION 1..236: note = tr|A0A0S8DAG0|A0A0S8DAG0_9BACT 7-cyano-7-deazaguanine synthase OS=Nitrospira bacterium SG8_35_1 OX=1704024 GN=queC PE=3 SV=1
MKKAVVLLSGGLDSSTMLAYAREKGYEVYALSFNYGQRHRIELESAQRVAASFNVAKHLVIDINLREIGGSALTAEIDVPKDRTQLREDTDLSEIPVTYVPARNAIFLSFALAWAETLEAADIFIGANAIDYSGYPDCRPEFIQAFENMANLATKISVDGTLKFTVHTPLMNLTKAEIIKKGTALNVDYSLTWSCYDPQFLNNRYAACMKCDSCLLRAKGFKEAGVEDPSFRRPGE

SEQ ID NO: 40139 - protein, 232 aa, unidentified
  source 1..232: note = Nitrospira defluvii
  REGION 1..232: note = tr|D8PCP6|D8PCP6_9BACT 7-cyano-7-deazaguanine synthase OS=Nitrospira defluvii OX=330214 GN=queC PE=3 SV=1
MTHVDPKAVILLSGGLDSTVTAAIAKQDGYRLYCLTISYGQRHHVEVERARAVAQALSAAAHVVVDVDLRAFGGSALTDDVTVPKDRTQEDRAGGIPVTYVPARNTIFLSLALAYAETLEAQRIYFGANVLDYSGYPDCRPDFIHAFETVARLGTKIGMEGRSVEVCAPLLMLSKAEIVQRGQELRAPLELTHSCYDPGADGVACGRCDSCRIRREGFRLAGVVDPVPYAIL

SEQ ID NO: 40140 - protein, 232 aa, unidentified
  source 1..232: note = Nitrospira japonica
  REGION 1..232: note = tr|A0A1W1I626|A0A1W1I626_9BACT 7-cyano-7-deazaguanine synthase OS=Nitrospira japonica; OX = 1325564 GN=queC PE=3 SV=1
MSGVNGSRAVVLASGGLDSAVTAAIARRDGHELYFLTFDYGQRHAVEVRQARRLAEAMAVTHHLVCSVDLRAIGGSALTGDQGVPKDFDRPGRASEIPVTYVPGRNLIFLSLASAYAETIGAESVYFGANVLDYSGYPDCRPQFIRAFEKAVKEGTKAGVEGRALRVQAPLLALSKADIIREGVALGVPLALTHSCYDPVGDLACGQCDSCRIRRDGFRTAGVVDPTRYAIT

SEQ ID NO: 40141 - protein, 275 aa, unidentified
  source 1..275: note = Nitrospira lenta
  REGION 1..275: note = tr|A0A330L6Z1|A0A330L6Z1_9BACT Uncharacterized protein OS=Nitrospira lenta OX=1436998 GN=NITLEN_20660; PE = 4 SV=1
MQPLSLEHKLLHLREIFAAMDSVLVAYSGGIDSTVVLKVAHDQLLDRAVGVTAISPTFPAVELDSATRVAKEIGVRHELVQTDQLLISAFTENDANRCFHCKTDLYHLLGKLRKARAAAVIVDGTNLDDLSDDRPGLRAAREWGVRSPLVEANLSKAEIRSLAKDLGLSNWDKPAAACLSSRIPRGITITREKLSRVEQAEEVLLAEGFRHCRVRDHGEIARIEVSQDELARIIEGERGTRISRHVKELGFRFVTIDLDGYRPGGVSIDPPRPAK

SEQ ID NO: 40142 - protein, 234 aa, unidentified
  source 1..234: note = Nitrospira lenta
  REGION 1..234: note = tr|A0A330KZS7|A0A330KZS7_9BACT 7-cyano-7-deazaguanine synthase OS=Nitrospira lenta; OX = 1436998 GN=queC PE=3 SV=1
MPLDAVPQRRAVILLSGGLDSTVTAAVAKQEGCDLFLLTIAYRQRHAIEIEQAKQVAASFGVQHHQVVEVDLRALGGSALTGNLAVPKDRKEQERTQGIPITYVPARNLIFLSLAAAHAEVVGASVVYFGANVLDYSGYPDCRPEFIRAFEQAVAVGTKSGVEGTRLEVRAPLLTMSKAEIIQLGMTLHAPLHLTHSCYDPVGSLACGHCDSCLIRRQGFAQAGVEDPVAYAVR

SEQ ID NO: 40143 - protein, 232 aa, Nitrospira moscoviensis
  REGION 1..232: note = tr|A0A0K2G9F9|A0A0K2G9F9_NITMO 7-cyano-7-deazaguanine synthase OS=Nitrospira moscoviensis; OX = 42253 GN=queC PE=3 SV=1
MTVQSVPPAVVLASGGLDSTVTAAVARRDGFGLHLLTIAYQQRHAVEVERAGRVAVALHAKRHVVLDVNLRALGGSALTADLPVPKKRDAGARSRGIPATYVPGRNLIFLSLAAAHAEIVGASVIYFGANVVDYSGYPDCRPEFIRAFEAAVHAGTKAGVEGQRIEVRAPLLTLTKAEIIRLGVELQVPFELTHSCYDPIGSLACGECDSCLIRKQGFAQAGVVDPIAYAIG

SEQ ID NO: 40144 - protein, 232 aa, Nitrospira sp.
  REGION 1..232: note = tr|A0A136K548|A0A136K548_9BACT 7-cyano-7-deazaguanine synthase OS=Nitrospira sp. OLB3; OX = 1617410 GN=queC PE=3 SV=1
MTLTRSNAVVLLSGGLDSTVTAAVAKQEGYAIHCLTVAYGQRHRIELDRAKAVAHALGAAGHIVVEVNLRAFGGSALTADLDVPKDRSDEERSTTIPVTYVPARNTIFLSLALAYAETLEAQAIYFGANVLDYSGYPDCRPEFIHAFETVARLGTRMGVAGRTIDVRAPLLMQSKADIIRRGLDLRIPFELTHSCYDPGETGVACGRCDSCLIRREAFRRLGVVDPVPYAVP

SEQ ID NO: 40145 - protein, 232 aa, Nitrospira sp.
  REGION 1..232: note = tr|A0A1W9GP11|A0A1W9GP11_9BACT 7-cyano-7-deazaguanine synthase OS=Nitrospira sp. SG-bin2; OX = 1827377 GN=queC PE=3 SV=1
MNEHTRQRAVILASGGLDSTVVAAVAQRDGYEIYLLTLAYRQRHAIEIERAAQVASALGARQHRVIEVDLRAIGGSALTDDLPVPKKRTEQDRGQGIPITYVPGRNLIFLSLAAAHAEVLGASVIYFGANVVDYSGYPDCRPEFLRAFETVVQAGTKAGAEGRRIEVRTPLLSLTKADIVRLGLTLNAPIHLTHSCYDPVGAVACGLCDSCLIRKQGFADAGVEDPIPYAVS

SEQ ID NO: 40146 - protein, 240 aa, unidentified
  source 1..240: note = Nitrospiraceae bacterium
  REGION 1..240: note = tr|A0A3D1BL94|A0A3D1BL94_9BACT 7-cyano-7-deazaguanine synthase (Fragment); OS = Nitrospiraceae bacterium OX=2026770 GN=queC PE=3 SV=1
MVKRAVILLSGGIDSATTMALAKNEGFELYAVSFDYGQRHRRELESAKLVASSLSAKKHLIIKFDLREIGGSAITSHDIEVPKNRQVLSVRREVIKEIQATEIPVTYVPARNTIFLSFALAWAEVLGAEDIFLGANAVDYSGYPDCRPEFLRAFEAMANLATKASVEGMVRFKINAPLVSFTKAEIIRKGFELGVDFSLTWSCYDPQPAAFPPSSPIHCGSCDSCLLRAKGFREAGIKDP

SEQ ID NO: 40147 - protein, 227 aa, unidentified
  source 1..227: note = Nitrospiraceae bacterium
  REGION 1..227: note = tr|A0A354F1U8|A0A354F1U8_9BACT 7-cyano-7-deazaguanine synthase OS=Nitrospiraceae bacterium OX=2026770 GN=queC PE=3 SV=1
MSKKAVVLLSGGIDSATTLAIAGTEGYELYALSINYGQRHLLEIECARKIAAFYNVKEHKIFNVDLRGIGGSALTSDIEVPKDRDREDITHGIPVTYVPARNTIFLAISLSWAEVIGADTIFFGANILDYSGYPDCRPEFIHAFEIMANLATRAGVEGENKFTIKTPLIAMTKAEIIKKGVELGVDFSMTHSCYDPTKDGIACGRCDSCILRQRGFAEAGLNDPIKY

SEQ ID NO: 40148 - protein, 227 aa, unidentified; identical to SEQ ID NO: 40147
  source 1..227: note = Nitrospirae bacterium
  REGION 1..227: note = tr|A0A1G1HK17|A0A1G1HK17_9BACT 7-cyano-7-deazaguanine synthase OS=Nitrospirae bacterium RIFCSPLOW2_12_42_9 OX=1801722 GN=queC PE=3 SV=1

SEQ ID NO: 40149 - protein, 169 aa, unidentified
  source 1..169: note = Nitrospirae bacterium
  REGION 1..169: note = tr|A0A1G1KG75|A0A1G1KG75_9BACT 7-cyano-7-deazaguanine synthase (Fragment) OS=Nitrospirae bacterium RIFCSPLOWO2_12_FULL_63_8 OX=1801718; GN = A3K11_12895 PE=3 SV=1
MPSNSSRAVVLASGGLDSTVAATVAKRDCCRLFLLTIVYGQRHRIEVERARQVARALGAADHRVLGIDLRALGGSALTSDQPVPKDSSEAERRDGIPSTYVPARNTIFLSLALAYAETVEAGSIYIGANVLDYSGYPDCRPEYLSAFEQVSRLGTKAGVEGRGIEIRAP

SEQ ID NO: 40150 - protein, 170 aa, unidentified
  source 1..170: note = Nitrospirales bacterium
  REGION 1..170: note = tr|A0A524IWK8|A0A524IWK8_9BACT 7-cyano-7-deazaguanine synthase (Fragment); OS = Nitrospirales bacterium OX=2358460 GN=E4H32_00925 PE=3; SV = 1
MVPVPVVILASGGLDSTVTAALAKAEGCDLYLLTIDYGQRHRFEIECAKKIAVWLEAKDHKILQLDLGLFGGSALTDQIPVPTDRPSHEREHGIPVTYVPARNTIFLSLALAYAEVLNATKIFFGANIRDYSGYPDCRPEFIQAFMEVAKQGTRLGQEGHPMEVMAPLLY

SEQ ID NO: 40151 - protein, 218 aa, unidentified
  source 1..218: note = Nitrospirillum amazonense
  REGION 1..218: note = tr|A0A560I5J6|A0A560I5J6_9PROT 7-cyano-7-deazaguanine synthase OS=Nitrospirillum amazonense OX=28077 GN=FBZ92_1153 PE=3 SV=1
MCSNQRFHVSYIPSNMDDARMKTGLLLSGGMDSVAIAWWKRPDVAFTIDYGQRAAEAEIDAARAVCDDLSIKHEIIRVDCSSLGSGDMVGASPSAVAPVSEWWPFRNQLLLTLAGMAAIRAEVSEIMIGALRTDGVHADGRSEFLEKISHLMSGQEGGISVSAPAIDLDAVELIKISGIPVGILSWAHSCHIANAACGSCHGCLKHYGTWKVISGAPY

SEQ ID NO: 40152 - protein, 188 aa, unidentified
  source 1..188: note = Nitrospirillum amazonense
  REGION 1..188: note = tr|G1Y1M0|G1Y1M0_9PROT 7-cyano-7-deazaguanine synthase OS=Nitrospirillum amazonense Y2 OX=1003237; GN = AZA_09496 PE=3 SV=1
MDSVAIAWWKRPDVAFTIDYGQRAAEAEIDAARAVCDDLSIKHEIIRVDCSSLGSGDMVGASPSAVAPVSEWWPFRNQLLLTLAGMAAIRAEVSEIMIGALRTDGVHADGRSEFLEKISHLMSGQEGGISVSAPAIDLDAVELIKISGIPVGILSWAHSCHIANAACGSCHGCLKHYGTWKVISGAPY

SEQ ID NO: 40153 - protein, 239 aa, Nocardia brasiliensis
  REGION 1..239: note = tr|K0ES65|K0ES65_9NOCA 7-cyano-7-deazaguanine synthase OS=Nocardia brasiliensis ATCC 700358 OX=1133849; GN = O3I_023490 PE=3 SV=1
MAMTDTRVVVPLSGGLDSAVAAALAVAAGAEVIAISYRYGQRNQRELEAADVVARKLGVGQHYVIDVALSSWGGSRLFAGTEDSASSYYVPGRNSVFAAIALSLAESRGADAIHLGFTAADRRYPDATAEYLTVLRSLAALTTANAGRPGGIAIDAPLIAMDKLTIVRKAIELQVPVAETWSCYAGGVDPCGCCDACRIRDLSLIRAGVPELATGPGRAAYDDGAERATENLWRFLLRD

SEQ ID NO: 40154 - protein, 231 aa, Nocardia sp.
  REGION 1..231: note = tr|A0A3A4KMR6|A0A3A4KMR6_9NOCA 7-cyano-7-deazaguanine synthase OS=Nocardia sp. YIM PH 21724 OX=2340916 GN=queC PE=3 SV=1
MDTRPKAVVLLSGGLDSTTVLAIAREQGFDPYAMSFRYGQRHRVELEAAKRVAAALGVAEHVVVDIDLRAFGGSALTADIAVPHHDSVEEIDAEQVPSTYVPARNTIFLSFALAWAETLGASDIFLGVSAVDYSGYPDCRPEYLESFERMADLATRAGVEGEQRLRIHAPLIALSKAQTIQRGLELGVDYAMTHSCYDPDAEGRACGGCDSCLLRGKGFTELGLTDPALAR

SEQ ID NO: 40155 - protein, 232 aa, unidentified
  source 1..232: note = Nocardioidaceae bacterium
  REGION 1..232: note = tr|E9US37|E9US37_9ACTN 7-cyano-7-deazaguanine synthase OS=Nocardioidaceae bacterium Broad-1 OX=408672; GN = queC PE=3 SV=1
MTKKAVVLLSGGLDSTTVLAIAKDQGYEPYALSFRYGQRHEIELEAARRVAEAAGVTRHVLCDIDLRVFGGSALTADVDVPKHGSADELASDDVPITYVPARNTVFLSFALAYAETIEATDIFIGVSALDYSGYPDCRPEYIAAYEQMANLATRAGIEGNRMKIHTPLIELTKGQTVEIGKRLGVDYSLTSSCYDPDAEGHPCGHCDSCLLRLKGFAEVGLEDPLVYQESLA

SEQ ID NO: 40156 - protein, 232 aa, Nocardioides caeni
  REGION 1..232: note = tr|A0A4V4HKW2|A0A4V4HKW2_9ACTN 7-cyano-7-deazaguanine synthase OS=Nocardioides caeni; OX = 574700 GN=queC PE=3 SV=1
MTRKAIVLLSGGLDSTTVLAIAKDQGFEPYALSFRYGQRHEIELAAAQRVAEAAGVERHVVCDIDLRVFGGSALTADVAVPKHDSADEIGDDEIPITYVPARNTVFLSFALAYAEVVGATDIFIGVNALDYSGYPDCRPEFIQAYERMANLATRAGVEGNELKIHTPLIDLTKAQTVELGTRLGVDYSLTSSCYDPDDQGRPCGHCDSCLLRLKGFAEAGLSDPLEYQDAPA

SEQ ID NO: 40157 - protein, 527 aa, unidentified
  source 1..527: note = Nocardioides currus
  REGION 1..527: note = tr|A0A2R7YZI9|A0A2R7YZI9_9ACTN GMP synthase [glutamine-hydrolyzing] OS=Nocardioides currus OX=2133958; GN = guaA PE=3 SV=1
MTATPDHDLVLVVDFGAQYAQLIARRVREARVYSEIVPHTLPVAEMLARNPKAIILSGGPSSVYADGAPGIDTAIFTSGTPVFGMCYGFQLMASGLGGEVAHTGAREYGRTPVAVTTPGTLLAGIPEAHNVWMSHGDSVASAPAGFTVLASTDVTPVAAFEDVDRGLAGVQWHPEVLHSEHGQQVLEHFLHEIAGCRQTWTMVNIVEEQVERIRSQIGETGRAICALSGGVDSAVAAAIVQRAIGDRLTCVYVDHGMMRKGETEQVRRDFEEVFAALDVVDASDQFLDALAGVHDPEEKRKIIGREFIRTFEAAEVRVFGGLAAGSADDRATAWLVQGTLYPDVVESGGGAGTSTIKSHHNVGGLPDDLQFELVEPLRTLFKDEVRAVGEQLGLPSTMVWRQPFPGPGLGIRIIGEVTRERLDLLRDADAIAREELTRAGLDRDIWQMPVVLLADVRSVGVQGDGRTYGHPVVLRPVTSEDAMTADWARLPYDVMERISTRITNEVADINRVTVDITSKPPGTIEWE

SEQ ID NO: 40158 - protein, 232 aa, Nocardioides sp.
  REGION 1..232: note = tr|A0A1V1W5Z4|A0A1V1W5Z4_9ACTN 7-cyano-7-deazaguanine synthase OS=Nocardioides sp. PD653; OX = 393303 GN=queC PE=3 SV=1
MSRKAVVLLSGGLDSTTVLAVAKDQGFEPYAISFRYGQRHAVELEAARRVAKAAGIERHVVCDIDLRVFGGSALTADVDVPKHESAEELSDDEIPITYVPARNTVFLSFALAYAEVIGSTDIFIGVNALDYSGYPDCRPEYIAAYEQMANLATRAGVEGNAMKIHTPLINLTKAETVELGTKLGVDYSLTLSCYDPDTEGRSCGHCDSCLLRLRGFADVGLTDPVSYQEATA

SEQ ID NO: 40159 - protein, 207 aa, Nocardioides sp.
  REGION 1..207: note = tr|H0BWW7|H0BWW7_9BURK 7-cyano-7-deazaguanine synthase OS=Nocardioides sp. SLBN-35 OX=512030 GN=queC; PE = 3 SV=1
METIGFDYGQRHSVELQARQAVLAALRGQFPHWAARLGADHMVDLAVLGNISDTALTRETEIRMTESGLPNTFVPGRNLLFFNLAAAVGYRRGLHTLVGGMCETDFSGYPDCRDDTLKALQVAVSLGMGQRFTFETPLMWLDKADTWELARAMGGEALVALIVSDTHTCYHGVRDTPHAWGYGCGTCPACELRRNGYERWRSVSNHA

SEQ ID NO: 40160 - protein, 243 aa, Nocardiopsis dassonvillei
  REGION 1..243: note = tr|A0A223QE18|A0A223QE18_NOCDA 7-cyano-7-deazaguanine synthase OS=Nocardiopsis dassonvillei OX=2014 GN=queC PE=3 SV=1
MRGQDTPRDEIGGDPFTVVVVFSGGMDSTTLLAHFAALRFRLVAVTVEYGQRHGKEVDAARAVARHYGAEHHILGIAGFGPLLRGSALTDARVDVPDGHYAEESMRDTVVPNRNAVLANLAASVAVARRAGTVALGMHSGDHFVYPDCRPAFVDALRHLVGVANEGFAAPRVEAPFMAWSKADIARHGVRLGAPLEHSWSCYKGGDIHCGTCGTCYERREAFQEAGLPDPTEYLDGVTRFSAP

SEQ ID NO: 40161 - protein, 243 aa, Nocardiopsis dassonvillei
  REGION 1..243: note = tr|D7AWP3|D7AWP3_NOCDD 7-cyano-7-deazaguanine synthase OS=Nocardiopsis dassonvillei (strain ATCC 23218 / DSM 43111 / CIP 107115 / JCM 7437 / KCTC 9190 / NBRC 14626 /NCTC 10488 / NRRL B-5397 / IMRU 509) OX=446468
MRGQDTPRDEIGGDPFTVVVVFSGGMDSTTLLAHFAALRFRLVAVTVEYGQRHGKEVDAARAIARHYGAEHHILGIAGFGPLLRGSALTDARVEVPDGHYAEESMRDTVVPNRNAVLANLAASVAVARRAGTVALGMHSGDHFVYPDCRPAFVDALRHLVGVANEGFAAPRVEAPFMAWSKADIARHGVRLGAPLEHSWSCYKGGDIHCGTCGTCYERREAFQEAGLPDPTEYLDGVTRFSAP

SEQ ID NO: 40162 - protein, 231 aa, Nocardiopsis sinuspersici
  REGION 1..231: note = tr|A0A1V3BTT3|A0A1V3BTT3_9ACTN 7-cyano-7-deazaguanine synthase OS=Nocardiopsis sinuspersici OX=501010 GN=queC PE=3 SV=1
MGRPAVVLLSGGLDSTTVLAIAKNQGFSPYALSFRYGQRHSIELDAARRVAETLGAERHVIADIDLRIFGESALTDEISVPKHDSVEELGSDSVPVTYVPARNTIFLSYALAYAEVVGAKDIFTGVTAVDYSGYPDCRPDYMDAYEKMANLATRAGVEDETPLRLRSPLIEMSKADIVREGLRLGVDYSLTFSCYDPDEQARACGHCDTCLLRLKGFAEAGATDPVQYRVG

SEQ ID NO: 40163 - protein, 434 aa, Nocardiopsis sp.
  REGION 1..434: note = tr|A0A317LU49|A0A317LU49_9ACTN 7-cyano-7-deazaguanine synthase in queuosine biosynthesis; OS = Nocardiopsis sp. L17-MgMaSL7 OX=1938893 GN=BDW27_112157; PE = 4 SV=1
MPREATTRVTYSSDLEPELRAFDQDTEILKVIPELIVDYLDEDHLAADLWTIAATAFAVDRNLRRPALNSWRKGQEWHRTISTTFPVRNPAWWAQRTADVEAPLNWLTADTWHIEFTQGGPVPNQASLFSNAELHLEGATALFSGGLDSVCGIIADLEEEGDPLHAISVSTNNRMENQQKRVHDTLRNADSRLRSWSPFRLQVRLSNRESTARSRGFVFLTAGVLSAIARGTNSLRLYENGPGALNLALSRGQVGAQAAKAVHPKTLRYMEHLARAVTGDSEFQIENRAFERTKAEMVRRVPAHFDGALAASVSCDTGFSHHEGGDAPAHCGRCSSCVLRRQALAAAGRNIPTSVRGVPRRKDDHPRLMAWQVARLRHVLRDGFDWARMVREFPDIVCDPRSFLPERREVLLRVFTEYASEWDLPAVIKEFAEE

SEQ ID NO: 40164 - protein, 226 aa, Nocardiopsis sp.
  REGION 1..226: note = tr|A0A495L3P8|A0A495L3P8_9ACTN 7-cyano-7-deazaguanine synthase OS=Nocardiopsis sp. Huas11; OX = 2183912 GN=queC PE=3 SV=1
MTPRTVVAASGGLDSTVLAYDLARSGHELALLSFDYGQRHRRELHAARRLAHRLSANHRVVDLSSLKTLFSGSALTNPDITVPAGQYTAETLRTTVVPARNAIFLSVAIGAAVSWDAQAVAFAAHSGDHQVYPDCRPAFVRAVQELARASTEGFGDVGVLAPYVTWSKAQIVEHGQRLGVPFETTWSCYQGLEWHCGTCSTCRERRSAFVSAQVPDPTEYMETAGA

SEQ ID NO: 40165 - protein, 225 aa, Nodularia sp.
  REGION 1..225: note = tr|A0A218Q4B5|A0A218Q4B5_9CYAN 7-cyano-7-deazaguanine synthase OS=Nodularia sp. NIES-3585; OX = 1973477 GN=queC PE=3 SV=1
MKAVILLSGGLDSATVLYQAKADGYECYPISFDYQQRHRRELHSAFLVAKKAGVVKHQVINFDLRQWGGSALTDDTINLPQERSLEQMSQNIPVTYVPARNTIFLSFALGYAEAIAAQRVYIGVNALDYSGYPDCRPDYIQAMQKVFQLGTKQGREGDPINIVAPLIDLKKTEIIQLGNQLGVPWDLTWSCYAGNDVACGVCDSCRLRLAAFAELGLKDPLPYRE

SEQ ID NO: 40166 - protein, 234 aa, Nodularia spumigena
  REGION 1..234: note = tr|A0A2S0Q929|A0A2S0Q929_NODSP 7-cyano-7-deazaguanine synthase OS=Nodularia spumigena UHCC 0039 OX=1914872 GN=queC PE=3 SV=1
MGNLKVETEMKAVILLSGGLDSSTVLYQAKADGYECHPISFDYQQRHRRELHSAFLVAQTLGVVKHQVVNFDLRLWGGSALTDETINLPQERSLDEMSQNIPVTYVPARNTIFLSFALGYAEAIAAQRVYIGVNALDYSGYPDCRPDYIQAMQKVFQLGTKQGREGNPIKIVAPLIDLKKTEIIQLGNQLGVPWELTWSCYAGSDVACGVCDSCRLRLAAFAELGLKDPLPYSP

SEQ ID NO: 40167 - protein, 236 aa, Nodularia spumigena
  REGION 1..236: note = tr|W6FPB2|W6FPB2_NODSP 7-cyano-7-deazaguanine synthase OS=Nodularia spumigena CCY9414 OX=313624 GN=queC; PE = 3 SV=1
MAMGNLKVETEMKAVILLSGGLDSSTVLYQAKADGYECHPISFDYQQRHRRELHSAFLVAQTLGVVKHQVVNFDLRLWGGSALTDETINLPQERSLDEMSQNIPVTYVPARNTIFLSFALGYAEAIAAQRVYIGVNALDYSGYPDCRPDYIQAMQKVFQLGTKQGREGNPIKIVAPLIDLKKTEIIQLGNQLGVPWELTWSCYAGSDVACGVCDSCRLRLAAFAELGLKDPLPYSP

SEQ ID NO: 40168 - protein, 231 aa, unidentified
  source 1..231: note = Nonomuraea solani
  REGION 1..231: note = tr|A0A1H6EYW3|A0A1H6EYW3_9ACTN 7-cyano-7-deazaguanine synthase OS=Nonomuraea solani; OX = 1144553 GN=queC PE=3 SV=1
MANEPAVVLLSGGLDSATVLAIAKHEGYRLHALSFRYGQRHGVELAAARRVAEQFGVERHVVADIDLRLFGGSALTADIAVPRHGHVDELDDSIPVTYVPARNTIFLSFALAWAESLGGNDVFIGVNALDYSGYPDCRPEYIAAFERMAALATKAGVEGTQRLRIHTPLIELTKAQIIERGLALGVDYSLTHSCYDPDSEGRPCGSCDSCLLRGRGFAEAGLPDPALTGRA

SEQ ID NO: 40169 - protein, 231 aa, Nonomuraea sp.
  REGION 1..231: note = tr|A0A5C4UTX6|A0A5C4UTX6_9ACTN 7-cyano-7-deazaguanine synthase OS=Nonomuraea sp. PA1-10; OX = 2219224 GN=queC PE=3 SV=1
MANEPAVVLLSGGLDSATVLAIAKHEGYRLHALSFRYGQRHGVELAAARRVAEQFGVERHVVADIDLRLFGGSALTADIAVPRHRHVDELDDSIPVTYVPARNTIFLSFALAWAESLGGNDVFIGVNALDYSGYPDCRPEYIAAFERMAALATKAGVEGTQRLRVHTPLIELTKAQIIERGLALGVDYSLTHSCYDPESEGRPCGSCDSCLLRGRGFAEAGLPDPALTGRA

SEQ ID NO: 40170 - protein, 248 aa, Nonomuraea sp.; identical to SEQ ID NO: 35661
  REGION 1..248: note = tr|A0A1V0A0E8|A0A1V0A0E8_9ACTN 7-cyano-7-deazaguanine synthase OS=Nonomuraea sp. ATCC 55076 OX=1909395 GN=BKM31_21330 PE=3 SV=1

SEQ ID NO: 40171 - protein, 213 aa, unidentified
  source 1..213: note = Nosocomiicoccus massiliensis
  REGION 1..213: note = tr|A0A2J6NI13|A0A2J6NI13_9STAP 7-cyano-7-deazaguanine synthase OS=Nosocomiicoccus massiliensis OX=1232430 GN=queC PE=3 SV=1
MSKALIVFSGGQDSTTCLAYALKHYDEVETITFHYNQRHAEEVEIAQKIAKDFNVKNTCIDVSLINDLTENALTRDIDIKSDGDVPNTFVPGRNILFFNIASIAAYQIGADTIVTGVSETDFSGYPDCRSDFVTALEHAIHLGLDRHIKIDTPLMDKDKSEVWEMADELGVFDYVKNETLTCYNGIKGSGCGECPACILRNEGLEEYEKRKFN

SEQ ID NO: 40172 - protein, 224 aa, unidentified
  source 1..224: note = Nostoc azollae
  REGION 1..224: note = tr|D7DXT8|D7DXT8_NOSA0 7-cyano-7-deazaguanine synthase OS=Nostoc azollae (strain 0708) OX=551115 GN=queC; PE = 3 SV=1
MKAVILLSGGLDSSTVLYQARADGCECYAISFDYQQQHCRELQSAVLVGKSVGVVQHQVVNFDLRLWGGSALTDDAIALPQARSLDEMSQNIPVTYVPARNTIFLSFALGYAEVIAAERVYIGVNALDYSGYPDCRPDYIQAMQEVFRLGTKQGREGQPINIIAPLVNLKKTEIIQLGNQLGVPWELTWSCYAGGDKACGVCDSCRLRLAAFAELGLEDPVDYV

SEQ ID NO: 40173 - protein, 225 aa, Nostoc calcicola
  REGION 1..225: note = tr|A0A1U7IDS8|A0A1U7IDS8_9NOSO 7-cyano-7-deazaguanine synthase OS=Nostoc calcicola FACHB-389 OX=1357508 GN=queC PE=3 SV=1
MKAVILLSGGLDSSTILYKAKADGFSCHAISFDYQQRHRRELQSALLVGQKAGVVKHQVVNFDLRQWGGSALTDDAIDLPQERSLDEMAQNIPVTYVPARNTIFLSFALSYAEAIAAERVYIGVNALDYSGYPDCRPDYIQAMQEVFRLGTKQGREGQPINIVAPLINLKKTEIIQLGNQLGVPWELTWSCYAGGDVACGVCDSCRLRLAAFAELGLVDPVAYTF

SEQ ID NO: 40174 - protein, 249 aa, unidentified
  source 1..249: note = Nostoc carneum
  REGION 1..249: note = tr|A0A1Z4HUI3|A0A1Z4HUI3_9NOSO 7-cyano-7-deazaguanine synthase OS=Nostoc carneum NIES-2107 OX=1973483 GN=queC PE=3 SV=1
MRSPTGVQRLKQADLAIENLKIKPTMKAVILLSGGLDSSTILYQAKADGYECHALSFDYQQRHQRELESARLVAQKAGVAKHQVVNFDLRQWGGSALTDSSIDLPEERSLDEMSQNIPVTYVPARNTIFLSFALAYAEAIAAERVYIGVNALDYSGYPDCRPDYIQAMQEVFHLGTKQGREGEPITITAPLINLKKTEIIQLGNQLGVPWELTWSCYAGANVACGVCDSCRLRLAAFAELGLKDPVAYV

SEQ ID NO: 40175 - protein, 225 aa, Nostoc commune
  REGION 1..225: note = tr|A0A2R5FRS4|A0A2R5FRS4_NOSCO 7-cyano-7-deazaguanine synthase OS=Nostoc commune NIES-4072 OX=2005467 GN=queC PE=3 SV=1
MKAVILLSGGLDSSTILYKAKADGCECHAISFDYQQRHRRELQSALTVAQKAAIAKHQVVNFDLRQWGGSALTDDAIDLPQERSLDEMSQNIPVTYVPARNTIFLSFALGYAEAIAAERVYIGINALDYSGYPDCRPDYIQAMQEVFRLGTKQGREGQPINIVTPLINMKKTEIIQLGNELGVPWELTWSCYAGDDVACGVCDSCRLRLAAFAELELVDPVEYAS

SEQ ID NO: 40176 - protein, 218 aa, unidentified
  source 1..218: note = Nostoc cycadae
  REGION 1..218: note = tr|A0A2H6LP33|A0A2H6LP33_9NOSO 7-cyano-7-deazaguanine synthase OS=Nostoc cycadae WK-1; OX = 1861711 GN=queC PE=3 SV=1
MSGGLDSSTVLYQAKADGCECYAISFDYQQRHRRELNSARHVAQTAQVVEHQVVNFDLRQWGGSALTDDKIDLPEARSLAEMSQNIPVTYVPARNTIFLSFALGYAEAIAAERVYIGVNALDYSGYPDCRPDYIQAMQEVFRLGTKQGREGNPTAIVAPLVNLKKTEIIQLGNTLGVPWDLTWSCYSGGDVACGVCDSCRLRLAAFDELGLTDPVPYA

SEQ ID NO: 40177 - protein, 225 aa, unidentified
  source 1..225: note = Nostoc flagelliforme
  REGION 1..225: note = tr|A0A2K8SYM8|A0A2K8SYM8_9NOSO 7-cyano-7-deazaguanine synthase OS=Nostoc flagelliforme CCNUN1 OX=2038116 GN=queC PE=3 SV=1
MKAVILLSGGLDSSTILYKAKADGCECHAISFDYQQRHRRELQSALTVAQKAAIAKHQVVNFDLRQWGGSALTDDAIDLPQERSLDEMSQNIPVTYVPARNTIFLSFALGFAEAIAAERVYIGVNALDYSGYPDCRPDYIQAMQEVFRLGTKQGREGQPINIVAPLINLKKTEIIQLGNQLGVPWELTWSCYAGGEVACGVCDSCRLRLAAFAELGLVDPLAYGS

SEQ ID NO: 40178 - protein, 225 aa, unidentified
  source 1..225: note = Nostoc linckia
  REGION 1..225: note = tr|A0A1Z4L755|A0A1Z4L755_NOSLI 7-cyano-7-deazaguanine synthase OS=Nostoc linckia NIES-25; OX = 1091006 GN=queC PE=3 SV=1
MKAVILLSGGLDSSTILYKAKMDGCECYAISFDYQQRHRRELQSALLVGQKAGVVKHQVVNFDLRQWGGSALTDEAIDLPEERSLDEMAQNIPVTYVPARNTIFLSFALSYAEAIAAERVYIGVNALDYSGYPDCRPDYIQAMQEVFRLGTKQGRQGQPINIVAPLINLKKTEIIQLGNQLGVPWELTWSCYAGGDVACGVCDSCRLRLAAFAELGLVDPVAYSF

SEQ ID NO: 40179 - protein, 225 aa, unidentified
  source 1..225: note = Nostoc linckia
  REGION 1..225: note = tr|A0A2C6TWR4|A0A2C6TWR4_NOSLI 7-cyano-7-deazaguanine synthase OS=Nostoc linckia z16; OX = 1628751 GN=queC PE=3 SV=1
MKAVVLLSGGLDSSTILYKAKKDGCECYAISFDYQQRHRRELHSAVLVAQKAGVVKHQVVSFDLRQWGGSALTDDAIDLPQERSLDEMAQNIPVTYVPARNTIFLSFALSYAEAIAAQRVYIGVNALDYSGYPDCRPDYIQAMQEVFRLGTKQGREGEAINIVTPLINLKKTEIIELGNQLGVPWELTWSCYAGGDVACGMCDSCRLRLAAFAELGLVDPLAYSI

SEQ ID NO: 40180 - protein, 233 aa, Nostoc minutum
  REGION 1..233: note = tr|A0A367QVM6|A0A367QVM6_9NOSO 7-cyano-7-deazaguanine synthase OS=Nostoc minutum NIES-26; OX = 1844469 GN=queC PE=3 SV=1
MANPKFEIEMKAVILLSGGLDSSTVLYQAKADSHECHTISFDYQQRHRRELQSAFSVAEKAAVVQHQVVNFDLRQWGGSALTDDAIALPQERSIDEMSQNIPITYVPARNTIFLSFALGYAEAIAAELVYIGVNALDYSGYPDCRPDYIQAMQEVFRLGTKQGREGKPITIVAPLINLKKTEIIQLGNQLGVPWEQTWSCYAGGDVACGICDSCRLRLAAFTELGLVDPLSYR

SEQ ID NO: 40181 - protein, 481 aa, unidentified
  source 1..481: note = Nostoc piscinale
  REGION 1..481: note = tr|A0A0M4TJJ2|A0A0M4TJJ2_9NOSO Uncharacterized protein OS=Nostoc piscinale CENA21 OX=224013; GN = ACX27_08630 PE=4 SV=1
MNYQTSLVQESDYSDYQDYTLDFQPVSNIDGSVLFIDHSRGKQLNFGINVDDKEFKYRVKADFSPVVADLIDIAIAIYTSDRLAPQNLTEKQRRFHVKLPVRNPEWLSSETFRTKLDDLLTWTTDSKWIFDFQKRIAPERLVEQLSLPIAPQGCEVTLWSGGLDALAGLYTRLVMYPEQQFVLFGTGSNDSVYARQERVYQEIQSIFPGRCHLFRIPIRFDSSSEQHKNKLSRARGVVFTLLGSACTYLMGQQVLYLYENGIGAINLPYRESAVGLDHSRSVHPLTLQKVSDVVSQLLGKEFQVKNPFLFWTKAEMCKSLADDGRDDLPPLTMSCDSPHRQKPVQCGYCSSCLLRRQSLAASRITDKTRYVVLHGERSVKKPSLCFLNMQAQVKTLDSLLSISDEPWKNLTKKFPILDDIVDRTATAENLSLIDMQGHLVQLYQKYVSEWNAVESHIATELSNKHSDHKASSKYVVSSQQG

SEQ ID NO: 40182 - protein, 231 aa, unidentified
  source 1..231: note = Nostoc piscinale
  REGION 1..231: note = tr|A0A0M4SIP7|A0A0M4SIP7_9NOSO 7-cyano-7-deazaguanine synthase OS=Nostoc piscinale CENA21; OX = 224013 GN=queC PE=3 SV=1
MKAVILLSGGLDSSTVLYQAKADGCECYAISFDYQQRHRRELNSAMLVAQTAGVEEHQVVNFDLRKWGGSALTDEKIDVPQARSLEEMSQNIPATYVPARNTIFLSFALGYAEAIAAERVYIGVNALDYSGYPDCRPDYIQAMQEVFRLGTKQGREGNATAIAAPLIHLKKTEIIQLGNKLGVPWHLTWSCYSGADIACGVCDSCRLRLAAFEELGLQDPLAYAAGVGSKE

SEQ ID NO: 40183 - protein, 224 aa, unidentified
  source 1..224: note = Nostoc punctiforme
  REGION 1..224: note = sp|B2IUR7|QUEC_NOSP7 7-cyano-7-deazaguanine synthase; OS = Nostoc punctiforme (strain ATCC 29133 / PCC 73102); OX = 63737 GN=queC PE=3 SV=1
MKAVILLSGGLDSSTILYKAKADGCECHAISFDYQQRHRQELQSALTVAKKAAIAKHQVVNFDLRQWGGSALTDDAIDLPQQRSLDEMSQNIPVTYVPARNTIFLSFALGYAEAIAAERVYIGVNALDYSGYPDCRPDYIEAMQEVFRLGTKQGREGQPIKIVAPLINLKKTEIIQLGNELGVPWELTWSCYAGNDVACGVCDSCRLRLAAFAELGLVDPLVYA

SEQ ID NO: 40184 - protein, 484 aa, unidentified
  source 1..484: note = Nostoc punctiforme
  REGION 1..484: note = tr|A0A367R0P2|A0A367R0P2_NOSPU Uncharacterized protein OS=Nostoc punctiforme NIES-2108 OX=1356359; GN = A6769_35300 PE=4 SV=1
MNYRPLIQQKLNNSDYSDYILHFEPIVNSNGSVHFIDHSQCNNFTIGINVDDTEFKYRVKEEFPAIVADLIDLSVAIHTSDRLAPQNLNGKQRRLYVVLPVRHPELLSAEPFRTKLDDLLKWATDSEWVFDFQRRIATERLVEHPSLPIAPQGSEVALWSGGLDALAGLYTRFRMYPEKRFLLFGTGSNDSVYARQERVATEIKSIFPGRSNLFRVPIRFDDSRVQRKNKLSRARGVVFTLLGAACAHLMGQKVLYLYENGIGAINLPYRESAVGLDHSRSVHPLTLFMVGDVISELLGEEFQVHNPFLFWTKAEMCKALAKDWRNDLPPLSMSCDSPHRQKPIQCGYCSSCLLRRQALAAASIEDKTRYVVLHGERPVKNPSLYFLNMLAQVHTLRCLLSISDEPSLQWKALTGKFPVLDDIVDRSAVAENLVPADMRSHLIKLYQNYVSEWDAVELEISDGLLNKHSNQQEYSKYVVSAQQG

SEQ ID NO: 40185 - protein, 229 aa, Nostoc sp.
  REGION 1..229: note = sp|Q8YM45|QUEC_NOSS1 7-cyano-7-deazaguanine synthase; OS = Nostoc sp. (strain PCC 7120 / SAG 25.82 / UTEX 2576); OX = 103690 GN=queC PE=3 SV=1
MKAVILLSGGLDSSTILYQAKADGCECYSISFDYQQRHRRELHSAFLVAQTAGIVQHQVINFDLRLWGGSALTDDNIDLPQERSLDAMSQNIPVTYVPARNTIFLSFALAYAEAIAAQRVYIGVNALDYSGYPDCRPDYIEAMQEVFRLGTKQGREGQPINIVAPLINLKKTEIIQLGNQLGVPWNLTWSCYAGGDVACGVCDSCRLRLAAFAELGLEDPLPYAYLKGV

SEQ ID NO: 40186 - protein, 224 aa, Nostoc sp.
  REGION 1..224: note = tr|K9QZM9|K9QZM9_NOSS7 7-cyano-7-deazaguanine synthase OS=Nostoc sp. (strain ATCC 29411 / PCC 7524); OX = 28072 GN=queC PE=3 SV=1
MKAVILLSGGLDSSTILYQAKADGCECYSMSFDYQQRHRRELQSALLVAQKAGVVQHQVVNFDLRQWGGSALTDDAIALPQERSLEEMSQNIPVTYVPARNTIFLSFALAYAEAIAAERVYIGVNALDYSGYPDCRPDYIQAMQEVFRLGTKQGREGKPIQIIAPLLDLKKTEIIQLGNKLGVPWELTWSCYAGGDAACGVCDSCSLRLAAFKELGLVDPLPYA

SEQ ID NO: 40187 - protein, 225 aa, unidentified
  source 1..225: note = Nostocales cyanobacterium
  REGION 1..225: note = tr|A0A1Y0RIC8|A0A1Y0RIC8_9CYAN 7-cyano-7-deazaguanine synthase OS=Nostocales cyanobacterium HT-58-2 OX=1940762 GN=queC PE=3 SV=1
MKAVILLSGGLDSSTVLYQALVDGFECHTISFDYQQRHRRELQSALAIAQKAGVVDHQVVRFDLRQWGGSALTDDAIDLPHKRDPEEMSQSIPVTYVPARNTIFLSFALAYAETIVAQRIYIGVNALDYSGYPDCRPDYIQAMQEVFRLGTKQGRSGQPISIVTPLIHLKKTEIIQLGNKLEVPWELTWSCYAGGDVACGICDSCRLRLAAFADLGLKDPLAYAQ

SEQ ID NO: 40188 - protein, 235 aa, unidentified
  source 1..235: note = Notoacmeibacter marinus
  REGION 1..235: note = tr|A0A231UXR9|A0A231UXR9_9RHIZ 7-cyano-7-deazaguanine synthase OS=Notoacmeibacter marinus; OX = 1876515 GN=queC PE=3 SV=1
MQSDTSALVLFSGGQDSTTCLAWALDRFARVETVGFDYGQRHSVELECRQTILGRIASDFPQWAKRLGDDHMVPMKELAVLSQTAMTEEVAFETGQQGLPNTFVPGRNLLFFTYAATIAWRRGIRHLIGGMCETDYSGYPDCRDDTLKALQVTLNLGMDMRSVIHTPLMWLDKGQTFALAEELGGEAFLDLVVENSHSCYRGERDQRHEWGYGCGDCPACELRANGWREFRADSR

SEQ ID NO: 40189 - protein, 235 aa, unidentified
  source 1..235: note = Notoacmeibacter sp.
  REGION 1..235: note = tr|A0A3L7JCK1|A0A3L7JCK1_9RHIZ 7-cyano-7-deazaguanine synthase OS=Notoacmeibacter sp. M2BS9Y-3-1 OX=2448481 GN=queC PE=3 SV=1
MQSDTSALVLFSGGQDSTTCLAWALDRYERVETVGYDYGQRHSVELECRKTILETIRRDFPQWADRLGEDHQIPMRELGAISETAMTEEVEFETGKQGLPNTFVPGRNLLFFTYAATIAWRRGIRHLVGGMCETDYSGYPDCRDDTLKALQVTLNLGMEMRSVVHTPLMWLDKAQTFAMAQELGGSAFLDLVVEHSHSCYRGDRTHRHEWGYGCGTCPACELRANGWQKFTAAER

SEQ ID NO: 40190 - protein, 233 aa, unidentified
  source 1..233: note = Noviherbaspirillum autotrophicum
  REGION 1..233: note = tr|A0A0C2BY31|A0A0C2BY31_9BURK 7-cyano-7-deazaguanine synthase OS=Noviherbaspirillum autotrophicum OX=709839 GN=queC PE=3 SV=1
MMQSSRALVLFSGGQDSTTCLAWALAHYAHVETIGFDYGQRHAIELAVRPGLLQKMRALSADWSSRLGEDHMIDLSLLSRISDTALTSDVEIAMQENGLPNTFVPGRNLLFMTVAATVAYRRGLDVLVGGMCETDFSGYPDCRDDTMKALQVALNLGMGTRLKIDTPLMWIDKAATWRLAEELGGPALVDLIRTDTHTCYLGERGALHDWGHGCGTCPACELRARGYRQFRQE

SEQ ID NO: 40191 - protein, 235 aa, unidentified
  source 1..235: note = Noviherbaspirillum denitrificans
  REGION 1..235: note = tr|A0A254TDI4|A0A254TDI4_9BURK 7-cyano-7-deazaguanine synthase OS=Noviherbaspirillum denitrificans OX=1968433 GN=queC PE=3 SV=1
MTLNNGALVLFSGGQDSATCLAWALARYARVETIGFDYGQRHAIELSVRPALLQKTRALSPEWDARLGEDHMIDLSLLGKISDTALTADVEIAMQSNGLPNTFVPGRNLLFMTVAATVAYRRGLDVLVGGMCETDFSGYPDCRDDTMKALQVALNLGMATRLKVETPLMWIDKAATWRLAQELGGTALVDLIRADTHTCYLGERGELHDWGYGCGKCPACELRARGYRQFAAGAV

SEQ ID NO: 40192 - protein, 246 aa, unidentified
  source 1..246: note = Noviherbaspirillum humi
  REGION 1..246: note = tr|A0A239CGY5|A0A239CGY5_9BURK 7-cyano-7-deazaguanine synthase OS=Noviherbaspirillum humi; OX = 1688639 GN=queC PE=3 SV=1
MSASIPDILLPAEPDKALVLFSGGQDSTTCLAWALARYGHVETIGFDYGQRHAIELEVRPALLDRMRGMSEAWRAKLGEDHMIDLSLIGKISDTALTRDVEINMQENGLPNTFVPGRNLLFMTVAATVAYRRGLNVLVGGMCETDYSGYPDCRDDTMKALQVALNLGMATRLKLETPLMWIDKGDTWRLAENLGGRALVDLIRADTHTCYLGERGALHPWGHGCGTCPACVLRARGYDAYLQRRQA

SEQ ID NO: 40193 - protein, 233 aa, unidentified
  source 1..233: note = Noviherbaspirillum sp.
  REGION 1..233: note = tr|A0A3A3G9M9|A0A3A3G9M9_9BURK 7-cyano-7-deazaguanine synthase OS=Noviherbaspirillum sp. K1S02-23 OX=2320865 GN=queC PE=3 SV=1
MNTINGALVLFSGGQDSATCLAWALARYPRVETIGFDYRQRHAIELAVRLPLLDQMRALSPEWDRKLGEDHLIDLGLISTIADTALTRDVAISMQDNGLPNTFVPGRNLLFMMVAATVAYRRGLDVLVGGMCETDFSGYPDCRDDAMKALQVTLNLGMATRLKLETPLMWLDKAATWRLAQDLGGPALVELVRSGTHTCYLGERGVLHDWGYGCGHCPACELRARGYRQFMQA

SEQ ID NO: 40194 - protein, 233 aa, unidentified
  source 1..233: note = Noviherbaspirillum sp.
  REGION 1..233: note = tr|A0A5B8NA63|A0A5B8NA63_9BURK 7-cyano-7-deazaguanine synthase OS=Noviherbaspirillum sp. UKPF54 OX=2601898 GN=queC PE=3 SV=1
MMHSSRALVLFSGGQDSTTCLAWALSRYAHVETIGFDYGQRHAIELSVRPLLLQKMRALSAGWNARLGEDHMIDLSLLSRISDTALTSDVAITMQENGLPNTFVPGRNLLFMTVAATVAYRRGLDVLVGGMCETDFSGYPDCRDDTMKALQVALNLGMSTRLKIDTPLMWIDKAATWRLAEELGGPALVDLIRTDTHTCYLGERGALHDWGHGCGTCPACELRARGYRQFRQE

SEQ ID NO: 40195 - protein, 222 aa, unidentified
  source 1..222: note = Novimethylophilus kurashikiensis
  REGION 1..222: note = tr|A0A2R5FB87|A0A2R5FB87_9PROT 7-cyano-7-deazaguanine synthase OS=Novimethylophilus kurashikiensis OX=1825523 GN=queC PE=3 SV=1
MKKAVVLLSGGLDSATVLAIARSQGYECYCLSFDYHQRHVAELDASRRVAAALGAAEHRVFQLDLSAFGGSALTDTSIAVPQSPTEGIPVTYVPARNTIMLSLALAWAEVLGSRDIFIGVNAVDYSGYPDCRKEYIEAFQRMANLATKAGVEGDTVEIHTPLIDLSKAEIIRQGTALGVDYSLTVSCYQADAEGHACGQCDSCRLRHEGFVAAGLADPTRMI

SEQ ID NO: 40196 - protein, 233 aa, Novosphingobium aromaticivorans
  REGION 1..233: note = sp|Q2G3K1|QUEC_NOVAD 7-cyano-7-deazaguanine synthase; OS = Novosphingobium aromaticivorans (strain ATCC 700278 / DSM 12444 / CIP 105152 / NBRC 16084 / F199) OX=279238 G; N = queC PE=3 SV=1
MPSNSPAPDAPLAVVLLSGGLDSMVCAGLAQEQGFRVLALTIDYNQRHRVELDAARAIAARLGVERHVILPLDLRQFGGSALTADIAVPKDGVGDDIPVTYVPARNLIFLSLALAWAEAAGSKDLFIGVNALDYSGYPDCRPEFVAGFEDLARIATKVGSEGGTVTVHAPLQHLKKSEIAREAARLGLEAGDSWSCYDPLPDGRACGVCDSCRLRRAGFEEAGLNDGTRYGGG

SEQ ID NO: 40197 - protein, 236 aa, unidentified
  source 1..236: note = Novosphingobium barchaimii
  REGION 1..236: note = tr|A0A561HY26|A0A561HY26_9SPHN 7-cyano-7-deazaguanine synthase OS=Novosphingobium barchaimii OX=1420591 GN=queC PE=3 SV=1
MQISQDSSSQDNRGHKAVVLLSGGLDSMVSAGIARETGFAVNALTIDYNQRHRCEIDSARKIAEFVGAERHVVLPLDLRQFGGSALTDNIEVPKDGVSPGVPVTYVPARNLVFLSLTLAWAEAIGATDIFIGVNALDYSGYPDCRPEFIAAFQDIARLATKEGDQGTQFRIHAPLQFMGKADIAREADRLGMDAGMSWSCYDPQPGDVACGECDSCRLRKAGFADAGLIDPTPYAV

SEQ ID NO: 40198 - protein, 231 aa, unidentified
  source 1..231: note = Novosphingobium barchaimii
  REGION 1..231: note = tr|A0A0J8AL62|A0A0J8AL62_9SPHN 7-cyano-7-deazaguanine synthase OS=Novosphingobium barchaimii LL02 OX=1114963 GN=queC PE=3 SV=1
MQETTSPEPKQAVVLLSGGLDSMVSAGIAREQGFAVNALTIDYNQRHRRELDAAADIARFIGARRHVVMPLDLRQFGGSALTDDIEVPKEGVGADIPVTYVPARNLVFLSLTLAWAEAIGANDIFIGVNALDYSGYPDCRPEFISAFENIAALATKAGAEGQVLRIHAPLQFMGKADIAREADRLGLDPGMSWSCYDPQPDGTACGLCDSCRLRKAGFADAGLIDPTPYSA

SEQ ID NO: 40199 - protein, 234 aa, unidentified
  source 1..234: note = Novosphingobium fuchskuhlense
  REGION 1..234: note = tr|A0A117UZD1|A0A117UZD1_9SPHN 7-cyano-7-deazaguanine synthase OS=Novosphingobium fuchskuhlense OX=1117702 GN=queC PE=3 SV=1
MVAKAVSEQPPLAVVLLSGGLDSMVCAALALEQGFRVLALTIDYNQRHRVEIDAARGIAQSLGVERHIVLPLDLRQFGGSALTADIAVPKGGLGEDIPVTYVPARNLVFLSLALAWAEAAGSGDLFIGVNALDYSGYPDCRPEFIGGFENLARVATARGDRGGTVRVHAPLQHLKKSEIAQEAARLGLDPAASWSCYDPQPDGRACGVCDSCRLRRAGFDAAGIEDGTQYGDDG

SEQ ID NO: 40200 - protein, 231 aa, unidentified
  source 1..231: note = Novosphingobium ginsenosidimutans
  REGION 1..231: note = tr|A0A5B8S3M9|A0A5B8S3M9_9SPHN 7-cyano-7-deazaguanine synthase OS=Novosphingobium ginsenosidimutans OX=1176536 GN=queC PE=3 SV=1
MSSAANSSQRQAVVLLSGGLDSMVVAGLAQEAGYAINALTIDYNQRHRRELDAARAIAERIGAVRHVVLPLDLSRFGGSALTADIDVPKQGVGADIPVTYVPARNLVFLSLTLAWAEALGVRDIFIGVNALDYSGYPDCRPEFIAGFQDLARLATKAGAEGDEWRIHAPLQFLGKAEIAAEAHRLELDAGLSWSCYDPQPDGSACGLCDSCRLRREGFAKAGLVDPTRYAA

SEQ ID NO: 40201 - protein, 235 aa, unidentified
  source 1..235: note = Novosphingobium guangzhouense
  REGION 1..235: note = tr|A0A2K2FTD7|A0A2K2FTD7_9SPHN 7-cyano-7-deazaguanine synthase OS=Novosphingobium guangzhouense OX=1850347 GN=queC PE=3 SV=1
MHEETSPQPTSAAPQAVVLLSGGLDSMVSAGIARERGFAVNALTIDYNQRHRRELDAAADIARVIGAARHVVLPLDLRRFGGSALTDDIAVPKGGVGTDIPVTYVPARNLVFLSLTLAWAEAIGASDIFIGVNALDYSGYPDCRPEFISAFEDIATLATKAGDEGQKLRIHAPLQFMSKADIAREADRLGLNPGMSWSCYDPQPDGRACGQCDSCRLRKGGFEEAGLIDPTPYAA

SEQ ID NO: 40202 - protein, 233 aa, unidentified
  source 1..233: note = Novosphingobium kunmingense
  REGION 1..233: note = tr|A0A2N0H5K7|A0A2N0H5K7_9SPHN 7-cyano-7-deazaguanine synthase OS=Novosphingobium kunmingense OX=1211806 GN=queC PE=3 SV=1
MTEMAEEPPRQAVVLLSGGLDSMVTAALAREAGFAVNALTIDYNQRHRIELDAARRVAAEIGVARHVILPLDLRQFGGSALTDEIAVPKDGVGPDIPVTYVPARNLVFLSLTLAWAEALGARDVFIGVNALDYSGYPDCRPEFIAGFADLARLATKAGAEGDAFTVHAPLQFMGKADIARECARLGLDPALSWSCYDPQPGCLACGQCDSCRLRQEGFEKAGIADETRYSAPR

SEQ ID NO: 40203 - protein, 231 aa, unidentified
  source 1..231: note = Novosphingobium lindaniclasticum
  REGION 1..231: note = tr|T0J3T2|T0J3T2_9SPHN 7-cyano-7-deazaguanine synthase OS=Novosphingobium lindaniclasticum LE124; OX = 1096930 GN=queC PE=3 SV=1
MQHSPDTVGRKAVVLLSGGLDSMVVAGMAREAGYAVNALTIDYNQRHRCEIDSARTIAAFVGAERHVILPLDLRQFGGSALTDDIDVPKDGIGPGVPVTYVPARNLVFLSLTLAWAEAIGATDIFIGVNALDYSGYPDCRPEFIAAFQDIARLATKEGDQGADFKIHAPLQFLGKADIAREADRLGMDAGMSWSCYDPQPGDLACGECDSCRLRKAGFADAGLTDTTPYAV

SEQ ID NO: 40204 - protein, 231 aa, unidentified
  source 1..231: note = Novosphingobium malaysiense
  REGION 1..231: note = tr|A0A0B1ZT96|A0A0B1ZT96_9SPHN 7-cyano-7-deazaguanine synthase OS=Novosphingobium malaysiense OX=1348853 GN=queC PE=3 SV=1
MQNSSSPQARQAVVLLSGGLDSMVSAGIARESGFEINALTIDYNQRHRREIEAAGTIAQHLGANRHVVLPLDLRQFGGSALTDDIDVPKEGVGDDIPVTYVPARNLVFLSLTLAWAEALGAHDIFIGVNALDYSGYPDCRPEFIAAFESIADLATKAGAQGQKVKIHAPLQYLGKADIAREADRLGLDAGMSWSCYDPQPDGRACGLCDSCRLRRTGFAEAGLVDPTPYAA

SEQ ID NO: 40205 - protein, 209 aa, Novosphingobium mathurense
  REGION 1..209: note = tr|A0A1U6HEQ4|A0A1U6HEQ4_9SPHN 7-cyano-7-deazaguanine synthase OS=Novosphingobium mathurense OX=428990 GN=queC PE=3 SV=1
MVSAGLAKEAGFAVNALTIDYNQRHRREIDAARTIADRLGAERHVVLPLDLRRFGGSALTDDIEVPKDGVGPDIPVTYVPARNLVFLSLTLAWAETVGAKDIFIGVNALDYSGYPDCRPEFIAAFENIATLATKVGAQGNAFTIHAPLQYMSKAEIAGEAHRLGLDAGMSWSCYDPQPDGRACGLCDSCRLRKAGFEQAGLVDPTDYAA

SEQ ID NO: 40206 - protein, 214 aa, Novosphingobium nitrogenifigens
  REGION 1..214: note = tr|F1ZDR3|F1ZDR3_9SPHN 7-cyano-7-deazaguanine synthase OS=Novosphingobium nitrogenifigens DSM 19370; OX = 983920 GN=queC PE=3 SV=1
MVCAGLAREQGFEVLALTFDYNQRHRVELDASRKVAARVGVERHVILPLDLRQFGGSALTDDIAVPKDGVGEEIPVTYVPARNLVFLSLALAWAEAAGSSDIFIGVNALDYSGYPDCRPEFIGGFEALARVATKFGDKGGNVKIHAPLQYLKKADIAREAVRLGLETGESWSCYDPLPDGRACGLCDSCRLRRAGFKEAGIEDGTDYAAGDEAA

SEQ ID NO: 40207 - protein, 231 aa, Novosphingobium pentaromativorans
  REGION 1..231: note = tr|A0A2W5Q624|A0A2W5Q624_9SPHN 7-cyano-7-deazaguanine synthase OS=Novosphingobium pentaromativorans OX=205844 GN=queC PE=3 SV=1
MQNPQDNEVRKAVVLLSGGLDSMVSAGIAREAGYAVNALTIDYNQRHRCEIDAARTIAEFVGAERHVVLPLDLRQFGGSALTDDIDVPKDGLGDGVPVTYVPARNLVFLSLTLAWAEAIGASDIFIGVNALDYSGYPDCRPEFIAAFQDIARLATKEGDQGTQFQIHAPLQFMGKADIAREAHRLGMDAGMSWSCYDPQPGDLACGECDSCRLRKAGFADAGLIDPTPYAA

SEQ ID NO: 40208 - protein, 231 aa, Novosphingobium pentaromativorans
  REGION 1..231: note = tr|G6EC73|G6EC73_9SPHN 7-cyano-7-deazaguanine synthase OS=Novosphingobium pentaromativorans US6-1; OX = 1088721 GN=queC PE=3 SV=1
MQDHLSNQSRQAVVLLSGGLDSMVSAALAKEAGFAVNALTIDYNQRHRREIDAARTIAEELGAQRHVVLPLDLRRFGGSALTDDIDVPKGGVGADIPVTYVPARNLVFLSLTLAWAETVGAKDIFIGVNALDYSGYPDCRPEFISAFENIATLATKVGAEGNAFSIHAPLQYMSKAEIASEAHRLGLDAGMSWSCYDPQPDGRACGLCDSCRLRKAGFEQAGLVDPTDYAA

SEQ ID NO: 40209 - protein, 235 aa, Novosphingobium resinovorum
  REGION 1..235: note = tr|A0A1D8A7B2|A0A1D8A7B2_9SPHN 7-cyano-7-deazaguanine synthase OS=Novosphingobium resinovorum OX=158500 GN=queC PE=3 SV=1
MHEETTPQPGSAAPQAVVLLSGGLDSMVCAGIARERGFAVNALTIDYNQRHRRELDAAAEIASFVGAQRHVVLPLDLRRFGGSALTDDIAVPKDGVGEDIPVTYVPARNLVFLSLTLAWAEAIGANDIFIGVNALDYSGYPDCRPEFISAFENIATLATKAGDEGQKLRIHAPLQFMSKADIARETDRLGLNPGMSWSCYDPQPDGRACGLCDSCRLRKGGFEEAGLTDPTPYAA

SEQ ID NO: 40210 - protein, 235 aa, Novosphingobium resinovorum
  REGION 1..235: note = tr|A0A031JH29|A0A031JH29_9SPHN 7-cyano-7-deazaguanine synthase OS=Novosphingobium resinovorum OX=158500 GN=queC PE=3 SV=1
MHEETTPQPGSAAPQAVVLLSGGLDSMVCAGIARERGFAVNALTIDYNQRHRRELDAAAEIASFVGAQRHVVLPLDLRRFGGSALTDDIAVPKDGVGEDIPVTYVPARNLVFLSLTLAWAEAIGANDIFIGVNALDYSGYPDCRPEFISAFENIATLATKAGDEGQKLRIHAPLQFMSKADIAGETDRLGLNPGMSWSCYDPQPDGRACGLCDSCRLRKGGFEEAGLTDPTSYAA

SEQ ID NO: 40211 - protein, 234 aa, unidentified
  source 1..234: note = Novosphingobium sediminis
  REGION 1..234: note = tr|A0A512AJ20|A0A512AJ20_9SPHN 7-cyano-7-deazaguanine synthase OS=Novosphingobium sediminis OX=707214 GN=queC PE=3 SV=1
MVAETVSQQAPLAVVLLSGGLDSMVCAALAREQGFRILALTIDYNQRHRVEIEAARGIAKALGVERQVILPLDLRQFGGSALTADIAVPKDGVGDDIPVTYVPARNLVFLSLALAWAEAAGASDLFIGVNALDYSGYPDCRPEFIGGFEDLARVATKLGDQGGTVRVHAPLQHLKKSEIAQEAARLGLDPAASWSCYDPLPDGRACGVCDSCRLRRAGFDAAGIEDGTKYGDDG

SEQ ID NO: 40212 - protein, 233 aa, Novosphingobium sp.
  REGION 1..233: note = tr|A0A519QY18|A0A519QY18_9SPHN 7-cyano-7-deazaguanine synthase OS=Novosphingobium sp.; OX = 1874826 GN=queC PE=3 SV=1
MSTLPPGNGREAVVLLSGGLDSMVVAGLAREAGYRVNALTIDYNQRHRRELDAARTIAQDIGAARHVILPLDLRQFGGSALTDDIAVPKDGVAEDVIPVTYVPARNLVFLSLTLAWAEALSARDIFIGVNALDYSGYPDCRPEFIAGFADLADLATKAGAEGERFAIHAPLQFLGKAEIAQEAHRLGFDPAMSWSCYDPQPDGRACGRCDSCRLRRAGFADAGLVDGTLYAAD

SEQ ID NO: 40213 - protein, 232 aa, Novosphingobium sp.
  REGION 1..232: note = tr|A0A3B7DK26|A0A3B7DK26_9SPHN 7-cyano-7-deazaguanine synthase OS=Novosphingobium sp. THN1 OX=1016987 GN=queC PE=3 SV=1
MLQSPEVAQAPLAVVLLSGGLDSMVCAGLAKEQGFRVLALTIDYNQRHRIELDAARVIAERVGVERHVILPLDLRQFGGSALTADIDVPKDGVGDDIPVTYVPARNLVFLSLALAWAEAAGSKDLFIGVNALDYSGYPDCRPEFVQGFEGLARIATKIGSEGGTVTVHAPLQHLKKSQIAQEAARLGLDAGQSWSCYDPLPDGKACGVCDSCRLRRAGFEEAGLNDGTRYSD

SEQ ID NO: 40214 - protein, 209 aa, Novosphingobium subterraneum
  REGION 1..209: note = tr|A0A0B8ZNR4|A0A0B8ZNR4_9SPHN 7-cyano-7-deazaguanine synthase OS=Novosphingobium subterraneum OX=48936 GN=queC PE=3 SV=1
MVCAGLAKEQGFRVLALTIDYNQRHRIELDAARVIAERVGVERHVILPLDLRQFGGSALTADIDVPKDGVGDDIPVTYVPARNLVFLSLALAWAEAAGSKDLFIGVNALDYSGYPDCRPEFVQGFEGLARIATKIGSEGGTVTVHAPLQHLKKSRIAQEAARLGLDAGQSWSCYDPLTDGRACGVCDSCRLRRAGFEEAGLNDGTRYSD

SEQ ID NO: 40215 - protein, 210 aa, Novosphingobium taihuense
  REGION 1..210: note = tr|A0A562K0B8|A0A562K0B8_9SPHN 7-cyano-7-deazaguanine synthase OS=Novosphingobium taihuense OX=260085 GN=queC PE=3 SV=1
MVCAGLAKEQGFRVLALTIDYNQRHRVELDAAKVIAGRIGVERHVILPLDLRQFGGSALTSDIAVPKDGVGDDIPVTYVPARNLVFLSLALAWAEAAGSNDLFIGVNALDYSGYPDCRPEFVKGFEGLARVATRIGNDGGTVKVHAPLQHLKKSEIAQEAARLGLEPGQSWSCYDPLPDGRACGTCDSCRLRRAGFEEAGLHDGTRYGED

SEQ ID NO: 40216 - protein, 231 aa, Novosphingobium tardaugens
  REGION 1..231: note = tr|U3A2U7|U3A2U7_9SPHN 7-cyano-7-deazaguanine synthase OS=Novosphingobium tardaugens NBRC 16725; OX = 1219035 GN=queC PE=3 SV=1
MITPDTPQKRAVVLLSGGLDSMVSAALAQEQGYSVNALTIDYNQRHRRELDAARDVAAMLGVERHVTLPLDLSLFGGSALTDLSIAVPKDGVGPDIPITYVPARNLVFLSLTLAWAEALGAHDIFIGVNALDYSGYPDCRPEFIASFAETARLATKTGAEGAPFTIHAPLQFLGKADIAREAARLGLDPGRSWSCYDPQPDGLACGTCDSCRLRRAGFHDAGIEDPTPYAA

SEQ ID NO: 40217 - protein, 228 aa, Obesumbacterium proteus
  REGION 1..228: note = tr|A0A4Q9D799|A0A4Q9D799_9GAMM 7-cyano-7-deazaguanine synthase OS=Obesumbacterium proteus; OX = 82983 GN=queC PE=3 SV=1
MKRAVVVFSGGQDSTTCLIQALERYDEVHCITFDYGQRHRAEIDVARDLAIKLGASAHKVLDVGLLNELAISSLTRDNIPVPTESEDGIPNTFVPGRNILFLTLAAIYAYQVQAEAVITGVCETDFSGYPDCRDEFVKALNKAIVLGMARDVRFETPLMWLNKAETWALADHYQKLDLVRQETLTCYNGIQGDGCGECAACHLRSHGLNDYLANRAAVSASLKEKAGL

SEQ ID NO: 40218 - protein, 207 aa, Obesumbacterium proteus
  REGION 1..207: note = tr|A0A1B7KDZ0|A0A1B7KDZ0_9GAMM 7-cyano-7-deazaguanine synthase OS=Obesumbacterium proteus ATCC 12841 OX=1354268 GN=queC PE=3 SV=1
MERYDEVHCITFDYGQRHRAEIDVARDLAIKLGASAHKVLDVGLLNELAISSLTRDNIPVPTESEDGIPNTFVPGRNILFLTLAAIYAYQVQAEAVITGVCETDFSGYPDCRDEFVKALNKAIVLGMARDVRFETPLMWLNKAETWALADHYQKLDLVRQETLTCYNGIQGDGCGECAACHLRSHGLNDYLANRAAVSASLKEKAGL

SEQ ID NO: 40219 - protein, 237 aa, unidentified
  source 1..237: note = Oblitimonas alkaliphila
  REGION 1..237: note = tr|A0A0K1XG39|A0A0K1XG39_9GAMM 7-cyano-7-deazaguanine synthase OS=Oblitimonas alkaliphila; OX = 1697053 GN=queC PE=3 SV=1
MHSATPPSNPANAQSNTARALVIFSGGQDSTTCLIQAINDYGAAQVEAITFTYGQRHAIELECASKILQHFNIKQTLLDLSLLQQVTTNALMDSSAPIEDYDDAPPNTLVEGRNALFLLYAAIYAKSQGIQQLIIGVSEADSSGYPDCRQAFIQSMENTLQLAMDFPFKIHAPLMQLTKAQTWALADQLQHLEFVRDYSHTCYEGVKGGCHQCPSCLLREKGLAEYLAQRSASTAKE

SEQ ID NO: 40220 - protein, 232 aa, Oceanibaculum indicum
  REGION 1..232: note = tr|K2IZT1|K2IZT1_9PROT 7-cyano-7-deazaguanine synthase OS=Oceanibaculum indicum P24 OX=1207063 GN=queC; PE = 3 SV=1
MKDNAALVLFSGGQDSTACLAWALDRFERVATVGFDYGQRHRVELECRQTVRDAIAATFPTWATKLGEDHLLPLDVLKGISDTALTGEGEIAFQENGLPNTFVPGRNLLFFTFAAAIAYRRGMKHLVGGMCETDYSGYPDCRDDTLKALQVALTLGMDTRLVIHTPLMWIDKAETWRLTERLGGAPLVEITRDLTHSCYLGDRTKVHDWGHGCGSCPACELRAEGWRRYRAG

SEQ ID NO: 40221 - protein, 232 aa, Oceanibaculum indicum
  REGION 1..232: note = tr|A0A420WI14|A0A420WI14_9PROT 7-cyano-7-deazaguanine synthase OS=Oceanibaculum indicum; OX = 526216 GN=queC PE=3 SV=1
MKDNAALVLFSGGQDSTACLAWALDRFERVETVGFDYGQRHRVELECRQTVRDAIAATFPTWATKLGEDHLLPLDVLKGISDTALTGEGEIAFQENGLPNTFVPGRNLLFFTFAAAIAYRRGMKHLVGGMCETDYSGYPDCRDDTLKALQVALTLGMDTRLVIHTPLMWIDKAETWRLTERLGGAPLVEITRDLTHSCYLGDRTKVHDWGHGCGSCPACALRAEGWRRYRAG

SEQ ID NO: 40222 - protein, 240 aa, Oceanicaulis sp.
  REGION 1..240: note = tr|A0A2T4ZRL2|A0A2T4ZRL2_9RHOB 7-cyano-7-deazaguanine synthase OS=Oceanicaulis sp. PT13A; OX = 2135616 GN=queC PE=3 SV=1
MDTRSSSNAALVLFSGGQDSATCLAWALSRYERVETIGFDYGQRHDVELSARQSVRAEMLRAFPEWSDRLGEDRLVDLSGYGALAESALTADMEIVMTEAGLPSTFVPGRNLVFLTVAAALAYRRGVDVLVGGMCQTDYSGYPDCREDTIQTQAKALGLGLDRPTRVEAPLMHLDKAQTWALAHELGGDAFVDLIVEHSHTCYRGERGQRHDWGYGCGDCPACALRKTGWSRWREGAASL

SEQ ID NO: 40223 - protein, 612 aa, Oceanicaulis sp.
  REGION 1..612: note = tr|A0A2E5A9A8|A0A2E5A9A8_9RHOB 7-cyano-7-deazaguanine synthase (Fragment) OS=Oceanicaulis sp. OX=1924941 GN=CMH92_00810 PE=3 SV=1
MKRYLIECGASQPSAADAIAMDVQGAAKNVNLRIDYISRTMLGNVPDLLIDLLEVAAYVYCADQRLVRGSDKLRNFGESWRRSLRFSIPVRQLEAWQDPDVQEILADTLGFLSDDSYEFDFRIAEAPVQPRELYFPELLDASAEHDEVALFSGGVDSFAGAVNDIVTLGKSVTLVGHYSSTKVRAVQENLIQGLKQRGLDRRVSYIPVWVSNENERAREFTQRTRSFLFACLGLVVARMSGKDKFSFYENGVVSINPPLAGDVVGGRATRTTHPKVLRGLEALFSLLLDRQIEIQTPLQWLTKKEVTQKIKEAGVADMLGETVSCTRPRKWTEKQKHCGVCSQCIDRRFAVLAAGMGDHEPAENYMRDLLLADRSADDDLRMALSYVSFFQRVAATPKERFLVDFPEVVSALDRFPGLSTQDAGDHVYDLFQRHAKSVEEVITTAVSEHIGPLYRSELPSGSLLATCFSRGHIEAPPPSDYDVQAKAFMDRLGAPVLEFAFDQDAKRVLFQGSHYLEGANFRVVEALIENFREAKRQRADVPFLPATDLADRLGVSDQSMRQQLGRLRKAIEPLTVTLGIPLDQDSFVQTKERAGYRLNPEWREVSVGDIRV

SEQ ID NO: 40224 - protein, 233 aa, Oceanimonas baumannii
  REGION 1..233: note = tr|A0A235CLH4|A0A235CLH4_9GAMM 7-cyano-7-deazaguanine synthase OS=Oceanimonas baumannii; OX = 129578 GN=queC PE=3 SV=1
MKALLICSGGFDSVTLAWRLAAEQSLGALLTFDYGQRHKKEIEAARLCAERLGVPHLVMDIAHIGRQLSGSALTDDIDVPHGHYSEENMKVTVVPNRNAIMLTIAFGVAAARGLDTVALAVHGGDHFIYPDCRPDFIRLFGEMQARALDGVAEVALLAPYVDTDKTEIARDAARYRVPVAETWSCYEGGEVHCGRCGTCVERIEAMVLAGVADPTPYKDEQYWRDAVARVKGA

SEQ ID NO: 40225 - protein, 231 aa, Oceanimonas doudoroffii
  REGION 1..231: note = tr|A0A233RF51|A0A233RF51_9GAMM 7-cyano-7-deazaguanine synthase OS=Oceanimonas doudoroffii; OX = 84158 GN=queC PE=3 SV=1
MKALLICSGGFDSVTLAYRLAANNALGALLTFDYGQRHKKEIDAAHLCAERLNVPHLVMDIGHIGRQLSGSALTDDIDVPHGHYSEENMKVTVVPNRNAIMLTIAFGVAAARGLDTVALAVHGGDHFIYPDCRPDFIRLFGEMQARALDGVAEVALLAPYVDADKTEIARDAARFQVPVADTWSCYEGGDIHCGRCGTCVERIEAMALAGVTDTTSYKDEAYWRDAVARVK

SEQ ID NO: 40226 - protein, 231 aa, Oceanimonas sp.
  REGION 1..231: note = tr|H2FX33|H2FX33_OCESG 7-cyano-7-deazaguanine synthase OS=Oceanimonas sp. (strain GK1) OX=511062 GN=queC; PE = 3 SV=1
MKALLICSGGFDSVTLAYRLAADHALGALLTFDYGQRHKKEIDAARRCAERLGVPHLVMDIGHIGRQLSGSALTDDIDVPHGHYSEENMKVTVVPNRNAIMLTIAFGVAAARGLDTVALAVHGGDHFIYPDCRPDFIRLFGDMQAQALDGVAEVALLAPYVNTDKTEIARDAARFGVPVADTWSCYEGGEVHCGRCGTCVERIEAMALAGLADPTPYQDTQFWREAVARAK

SEQ ID NO: 40227 - protein, 235 aa, unidentified
  source 1..235: note = Oceanisphaera arctica
  REGION 1..235: note = tr|A0A2P5TQX9|A0A2P5TQX9_9GAMM 7-cyano-7-deazaguanine synthase OS=Oceanisphaera arctica; OX = 641510 GN=queC PE=3 SV=1
MKALLICSGGFDSVTLAYRLAAEQSLGALLTFDYGQRHKKEIDAARLCAERLGIPHLVMDIGHIGRQLSGSALTDDIDVPHGHYSEENMKLTVVPNRNAIMLTIAFGVAAARDLDTVALAVHGGDHFIYPDCRPDFIRLFGEMQARALDGVAEVALYAPYVDADKTEIARDAARFAVPVAETWSCYEGGELHCGRCGTCVERIEAMTLAGVVDPTSYRDEQYWREAVARVNKCTP

SEQ ID NO: 40228 - protein, 237 aa, unidentified
  source 1..237: note = Oceanisphaera avium
  REGION 1..237: note = tr|A0A1Y0CUU2|A0A1Y0CUU2_9GAMM 7-cyano-7-deazaguanine synthase OS=Oceanisphaera avium; OX = 1903694 GN=queC PE=3 SV=1
MNALLICSGGFDSVTLAYRLAKEHSLGALLTFDYGQRHKKEIDAARLCAEQLKVPHWVLDIGNIGQQLSGSALTDDIEVPHGYYTEQNMQLTVVPNRNAIMLTIAFGVAASRGFNTVALAVHGGDHFIYPDCRPDFIRLFGEMQSQALDGVAEVGLYAPYVHGDKTDIAKDAAQFGVPIANTWSCYEGGELHCGRCGTCVERIEAISLAGIMDPTPYQDNQFWKAASMSRVSQEQGT

SEQ ID NO: 40229 - protein, 242 aa, unidentified
  source 1..242: note = Oceanisphaera profunda
  REGION 1..242: note = tr|A0A1Y0D1Q8|A0A1Y0D1Q8_9GAMM 7-cyano-7-deazaguanine synthase OS=Oceanisphaera profunda; OX = 1416627 GN=queC PE=3 SV=1
MNALLICSGGFDSVTLAYRLASEGALSALLTFDYGQRHKKEIDAARLCAQQLKVPHLVLDIGHIGRQLSSALTDDIDVPHGHYSEENMKLTVVPNRNAIMLTIAFGVAASRGLDTVALAVHGGDHFIYPDCRPDFIRLFADMQAQALDGVAEVGLFAPYVHTDKIEIARDAARFNVPIAETWSCYEGGELHCGRCGTCVERIEAMTLAGIVDPTPYLDTQFWQTAVANSALANDKANAKADD

SEQ ID NO: 40230 - protein, 235 aa, unidentified
  source 1..235: note = Oceanisphaera psychrotolerans
  REGION 1..235: note = tr|A0A1J4QCR7|A0A1J4QCR7_9GAMM 7-cyano-7-deazaguanine synthase OS=Oceanisphaera psychrotolerans OX=1414654 GN=queC PE=3 SV=1
MKALLICSGGFDSVTLAHRLAAEQSLGALLTFDYGQRHKKEIDAARHCAERLKVPHLVMDIGHIGRQLSGSALTDDIEVPHGHYSEENMKVTVVPNRNAIMLTIAFGVAAARGLDTVALAVHGGDHFIYPDCRPDFIRLFGEMQARALDGVAEVALFAPYVDADKTEIARDAARFEVPVAETWSCYEGGEVHCGRCGTCVERIEAMALAGVEDPTPYLDKEYWLEAVARVKKCTP

SEQ ID NO: 40231 - protein, 219 aa, unidentified
  source 1..219: note = Oceanobacillus arenosus
  REGION 1..219: note = tr|A0A3D8Q3P3|A0A3D8Q3P3_9BACI 7-cyano-7-deazaguanine synthase OS=Oceanobacillus arenosus; OX = 1229153 GN=queC PE=3 SV=1
MKDDKAIVVFSGGQDSTTCLFWALKTFKEVEVVTFDYNQRHAAEIDCAKEIANDLGVKQHILDMGLINQLAPNALTRDTIEVEDGKDGELPNTFVPGRNLVFLTFAGILGYQIGAKHIITGVCETDFSGYPDCRDDFVKSLNVTLNLSMDHKFVIHTPLMWLNKAETWKMADDLDALEYVRTKTLTCYNGIKGDGCGTCPSCKLRLNGYEEYLKMKRTV

SEQ ID NO: 40232 - protein, 219 aa, unidentified
  source 1..219: note = Oceanobacillus bengalensis
  REGION 1..219: note = tr|A0A494YS93|A0A494YS93_9BACI 7-cyano-7-deazaguanine synthase OS=Oceanobacillus bengalensis OX=1435466 GN=queC PE=3 SV=1
MKKDKAIVVFSGGQDSTTCLFWAMQKFKEVETVTFDYGQKHKLEIECAKEIAEDLGVKHHILDMSLLNQLAPNALTRESIEVDEGDEGELPNTFVPGRNLLFLSFAGVLAKQVGAKHLVTGVSETDFSGYPDCRDTFIKSLNVTLNLSMDEVFVIHTPLMYLDKKGVWGLSDELGVLDIIREKTLTCYNGIKADGCGECPACKLRNHGLEQYLLNKGEK

SEQ ID NO: 40233 - protein, 97 aa, Oceanobacillus caeni
  REGION 1..97: note = tr|A0A0N0M7K5|A0A0N0M7K5_9BACI 7-cyano-7-deazaguanine synthase (Fragment); OS = Oceanobacillus caeni OX=405946 GN=AFL42_12820 PE=3 SV=1
SETDFSGYPDCRDSFIKSLNVTLNLAMDEGFVIHTPLMWLDKKEVWRLSDDLGVMDLIREKTLTCYNGIKADGCGKCPACKLRNHGLEQYLLTKGEK

SEQ ID NO: 40234 - protein, 121 aa, Oceanobacillus caeni
  REGION 1..121: note = tr|A0A0N1MXR1|A0A0N1MXR1_9BACI 7-cyano-7-deazaguanine synthase (Fragment); OS = Oceanobacillus caeni OX=405946 GN=AFL42_17970 PE=3 SV=1
MEKDNAIVVFSGGQDSTTCLFWAKEQFKEVETVTFDYGQRHQLEIECAKEIAEDLGVKHHILDMSLLHQLAPNALTRDDMEIADGDGTRLPNTFVPGRNLLFLSFAGVLAKQVGARHLVTG

SEQ ID NO: 40235 - protein, 219 aa, unidentified
  source 1..219: note = Oceanobacillus chungangensis
  REGION 1..219: note = tr|A0A3D8PN74|A0A3D8PN74_9BACI 7-cyano-7-deazaguanine synthase OS=Oceanobacillus chungangensis OX=1229152 GN=queC PE=3 SV=1
MNDEKAIVVFSGGQDSTTCLFWALKTFKEVEVVTFDYNQRHAAEINCAKEIADELGVKQHILDMGLLNQLAPNALTRETIEVEDGEDGELPNTFVPGRNLVFLTFAGILGYQLGARHIITGVCETDFSGYPDCRDEFVKSLNVTLNLSMDHKFVIHTPLMWLNKAETWKMADDLNALEYVRTKTLTCYNGIKGDGCGTCPSCKLRLNGYKEFLKMNHMA

SEQ ID NO: 40236 - protein, 216 aa, unidentified
  source 1..216: note = Oceanobacillus halophilus
  REGION 1..216: note = tr|A0A495A228|A0A495A228_9BACI 7-cyano-7-deazaguanine synthase OS=Oceanobacillus halophilus OX=930130 GN=queC PE=3 SV=1
MKNEKAMVVFSGGQDSTTCLFWALERFAEVEAVTFDYNQRHDAEIECAKEIANDFAIKHHILNMDLLNQLAPNALTRDNMEVKAGENGELPSTFVPGRNLLFFSFAGILANQVDAKHMITGVCETDFSGYPDCRDDFVKSLNVTLNLAMDENLVIHTPLMWLNKAETWKLADDMGKLDYIRSKTLTCYNGIKGDGCGTCPACKLRLQGYEKYIKMK

SEQ ID NO: 40237 - protein, 221 aa, Oceanobacillus iheyensis
  REGION 1..221: note = sp|Q8ETE9|QUEC_OCEIH 7-cyano-7-deazaguanine synthase; OS = Oceanobacillus iheyensis (strain DSM 14371 / CIP 107618 / JCM 11309 / KCTC 3954 / HTE831) OX=221109 GN=queC P E=3; SV = 1
MTGKKAVVILSGGLDSTTCMGVGKEAGYELYPISFHYGQRHDREIENAKKVASYFNVTEHKVFSLEFLKEIGGSSLTDQSMEVSQEGVGEDVPNTYVPGRNTIFLSIAASYAEAIGAEKIYVGVSAVDYSGYPDCRPEFIEAMQQTIYQGTNANPAMTIEAPLIDLSKGDTVKLGMKLNVPYHLTTSCYLGGEEACGECDSCRLRLQGFEEAGATDPIKYM

SEQ ID NO: 40238 - protein, 222 aa, Oceanobacillus oncorhynchi
  REGION 1..222: note = tr|A0A0A1MVF6|A0A0A1MVF6_9BACI 7-cyano-7-deazaguanine synthase OS=Oceanobacillus oncorhynchi OX=545501 GN=queC PE=3 SV=1
MEKNNRAVVVFSGGQDSTTCLFWALEKFEHVELVTFNYNQRHSLEIEVAKEIAGDQGLSHHILDMSLLNQLAPNALTREDIEVENAEDGGIPNTFVPGRNLLFLSFATILAKQIDAKHIITGVCETDFSGYPDCRDIFTKSLNVTLNLSMDEDFVIHTPLMWLDKAETWELADELQAFDYVRERTLTCYNGVRGAGCGECPACQLRQRGLDQYLVRRQEMNQ

SEQ ID NO: 40239 - protein, 219 aa, Oceanobacillus profundus
  REGION 1..219: note = tr|A0A417YLN7|A0A417YLN7_9BACI 7-cyano-7-deazaguanine synthase OS=Oceanobacillus profundus OX=372463 GN=queC PE=3 SV=1
MKKDKAIVVFSGGQDSTTCLFWAMEQFREVETVTFDYGQRHKLEIECAKEIAEDVGVKHHILDMSLLHQLAPNALTRNDIEVADGDETELPNTFVPGRNLLFLSFAGVLAKQVGAKHLVTGVSETDFSGYPDCRDSFIKSLNVTLNLAIDEPFVIHTPLMWLDKEEVWGLSDELGVLNVIREKTLTCYNGVKADGCGACPACKLRNNGLEQYLLKKGEK

SEQ ID NO: 40240 - protein, 224 aa, Oceanobacillus sojae
  REGION 1..224: note = tr|A0A511ZJB9|A0A511ZJB9_9BACI 7-cyano-7-deazaguanine synthase OS=Oceanobacillus sojae; OX = 582851 GN=queC PE=3 SV=1
MGKNNKRAVVVFSGGQDSTTCLFWALEKFEHVELVTFDYNQRHSLEIEVAREIAEEQGLRHHILDMSLLNQLAPNALTRADIEVENAEEEGKLPNTFVPGRNLLFLSFAAILAKQINAKHIITGVCETDFSGYPDCRDIFTKSLNVTLNLSMDEDFVIHTPLMWLDKAETWEMADGLQVFDYIRERTLTCYNGIRGAGCGECPACQLRQRGLDQYLARRQEVNQ

SEQ ID NO: 40241 - protein, 219 aa, Oceanobacillus sp.
  REGION 1..219: note = tr|A0A345PET8|A0A345PET8_9BACI 7-cyano-7-deazaguanine synthase OS=Oceanobacillus sp. 160; OX = 2052660 GN=queC PE=3 SV=1
MKKDKAIVVFSGGQDSTTCLFWAKKQFKEVETVTFDYGQRHKLEIECAKEIAEDLGVKHHILDMSLLHQLAPNALTRDDIEVAEGEGTELPNTFVPGRNLLFLSFAGVLARRVGAKHLVTGVSETDFSGYPDCRDSFIKSLNVTLNLAIDEEFVIHTPLMWLDKKEVWELSDDLGVLDLIREKTLTCYNGIKADGCGECPACKLRNNGLEQYLLKKGVE

SEQ ID NO: 40242 - protein, 219 aa, Oceanobacillus sp.
  REGION 1..219: note = tr|A0A498D1I6|A0A498D1I6_9BACI 7-cyano-7-deazaguanine synthase OS=Oceanobacillus sp. YLB-02 OX=2448030 GN=queC PE=3 SV=1
MKNEKAIVVFSGGQDSTTCLFWAKQQFKEVEAVTFDYGQKHKLEIECAKEIAEELGVKHHILDMSLLHQLAPNALTRDDIEVAQGDESELPNTFVPGRNLLFLSFAGVLARQVGAKHLVTGVSETDFSGYPDCRDSFIKSLNVTLNLAMDETLVIHTPLMWLDKKEVWGLSDELGIMDVIRKKTLTCYNGIKADGCGECPACKLRNNGLEQYLQSIGEK

SEQ ID NO: 40243 - protein, 220 aa, Oceanobacter sp.
  REGION 1..220: note = tr|A0A2G2JN09|A0A2G2JN09_9GAMM 7-cyano-7-deazaguanine synthase OS=Oceanobacter sp.; OX = 2030817 GN=queC PE=3 SV=1
MGEKAVVIYSGGMDSFTILQRAYKEGYELYALTFDYGQKHKKEIRYASAVCDELGIPHRVIDITAINQLLQSSSLTSDMEIPEGHYEAANMKSTVVPNRNMILLSLAIGYAVDIGASKVFYGAHSGDHAIYPDCRPDFVHAMNKVAKLANYEPVDIVTPYLNSAKTEILADGLSMGLDYGKTWTCYNGRDKACGKCGSCVERLEAFAANNAVDSLEYEQA

SEQ ID NO: 40244 - protein, 235 aa, unidentified
  source 1..235: note = Oceanococcus atlanticus
  REGION 1..235: note = tr|A0A1Y1SCA3|A0A1Y1SCA3_9GAMM 7-cyano-7-deazaguanine synthase OS=Oceanococcus atlanticus; OX = 1317117 GN=queC PE=3 SV=1
MNQDIEHAPRDAVILLSGGLDSATVLAMAQAQGFRCHALSISYGQRHVAELEAARALAEQAGCLSYRRIEMDMRLIGGSALTDPAIEVPTTPSDDIPITYVPARNTVFLSLAMGLAEVLGAQDLFIGVNAVDYSGYPDCRPAFLEQFQKLSQLATKAGVESGQGLRIHAPLLHMSKGEIIRQGIALGVDYAATVSCYQADDQGRACGVCDSCRLRQEGFVQAGVNDPTRYISAST

SEQ ID NO: 40245 - protein, 235 aa, unidentified
  source 1..235: note = Oceanococcus sp.
  REGION 1..235: note = tr|A0A520SLU9|A0A520SLU9_9GAMM 7-cyano-7-deazaguanine synthase OS=Oceanococcus sp.; OX = 1958892 GN=queC PE=3 SV=1
MNQDIEHAPRDAVILLSGGLDSATVLAMAQAQGFRCHALSISYGQRHVAELEAARALAEQAGCLSYRRIEMDMRLIGGSALTDPAIEVPTTPSDDIPITYVPARNTVFLSLAMGLAEVLGAQDLFIGVNAVDYSGYPDCRPAFLEQFQKLSQLATKAGVESGQGLRIHAPLLHMSKGKIIRQGIALGVDYAATVSCYQADDQGRACGVCDSCRLRQEGFVQAGVNDPTRYISAST

SEQ ID NO: 40246 - protein, 220 aa, unidentified
  source 1..220: note = Oceanospirillaceae bacterium
  REGION 1..220: note = tr|A0A2E0A0N8|A0A2E0A0N8_9GAMM 7-cyano-7-deazaguanine synthase OS=Oceanospirillaceae bacterium OX=1899355 GN=queC PE=3 SV=1
MAEKAVVIYSGGMDSFTILNRAIKEGFEVYALTFDYGQKHKKEIRYAESVCQELGISHRIIDITAINQLLQSSSLTSDKAIPEGHYEAANMKSTVVPNRNMILLSLAIGYAVDIGSNKVYYGAHSGDHAIYPDCRPDFVHAMNRVAKLANYEPVDIVTPYLNGDKIEILADGLKMGLDYGKTWTCYNGREKACGKCGSCVERLEAFEKNHATDPLEYETV

SEQ ID NO: 40247 - protein, 231 aa, unidentified
  source 1..231: note = Oceanospirillaceae bacterium
  REGION 1..231: note = tr|A0A2E2KKK3|A0A2E2KKK3_9GAMM 7-cyano-7-deazaguanine synthase OS=Oceanospirillaceae bacterium OX=1899355 GN=queC PE=3 SV=1
MVIHMNTPASPKAVVLLSGGLDSATALAMASDRGYDCYVLSFDYGQRSLTELNAAKEIAKQQGAVEHRVIRLHLEDFGGSALTDHSIDVPEEETEDIPVTYVPARNTVFLSLALGWAEVLEADAIFIGVNAVDYSGYPDCRPEYITAFETMANLATKRGVSGDPITIETPLIDLTKEEIILAGTKLNVDYGLTVSCYQADDNGKACGACDSCRLRAKGFENAGLKDPTKYQ

SEQ ID NO: 40248 - protein, 59 aa, unidentified
  source 1..59: note = Oceanospirillales bacterium
  REGION 1..59: note = tr|A0A357LV89|A0A357LV89_9GAMM 7-cyano-7-deazaguanine synthase (Fragment); OS = Oceanospirillales bacterium OX=1914300 GN=DEA26_00430; PE = 3 SV=1
IYPDCRPDFVHAMNRVAKLANYEPVDIVTPYLNGDKIEILADGLKMGLDYGKTWTCYNG

SEQ ID NO: 40249 - protein, 38 aa, unidentified
  source 1..38: note = Oceanospirillales bacterium
  REGION 1..38: note = tr|A0A357LVG3|A0A357LVG3_9GAMM 7-cyano-7-deazaguanine synthase (Fragment); OS = Oceanospirillales bacterium OX=1914300 GN=DEA26_00435; PE = 4 SV=1
WTCYNGREKACGKCGSCVERLEAFEKNHATDPLEYETV

SEQ ID NO: 40250 - protein, 226 aa, Oceanospirillum multiglobuliferum
  REGION 1..226: note = tr|A0A1V4T266|A0A1V4T266_9GAMM 7-cyano-7-deazaguanine synthase OS=Oceanospirillum multiglobuliferum OX=64969 GN=queC PE=3 SV=1
MSATNKKAVVLVSGGLDSATVLATAKAQGYECYALSFDYGQRQISELNAARAVALAHGAVDHKVVRLSLNDFGGSALTDHSIDVPETLEEGIPITYVPARNTVFLSLALGWAEVLSANEVFIGVNAVDYSGYPDCRPEFIQAFESMANLATKAGVEGHKLSIRTPLMQLTKAEIIRMGIAAGVDYSLTVSCYQADEEGKACGRCDSCRLRAKGFADAGVVDPTRYQ

SEQ ID NO: 40251 - protein, 235 aa, Oceanospirillum sp.
  REGION 1..235: note = tr|A0A2D5G9K0|A0A2D5G9K0_9GAMM 7-cyano-7-deazaguanine synthase OS=Oceanospirillum sp.; OX = 2021254 GN=queC PE=3 SV=1
MTDKKKAVVLVSGGLDSATVLATANDQGYDCYALSFDYGQRQISELNAARAVAEAHGAIDHKVVRLSLNDFGGSALTDDSIDVPEEETEGIPVTYVPARNTVFLSLALGWAEVLGANEIFIGVNAVDYSGYPDCRPEFIDAYEKMANLATKAGVEGQKLSIKTPLMSLTKAEIINLGTAVGVDYSLTVSCYQADDDGRACGKCDSCRLRAKGFEDAGVADPTRYQSQISKEYLSR

SEQ ID NO: 40252 - protein, 232 aa, Ochrobactrum anthropi
  REGION 1..232: note = sp|A6WXM7|QUEC_OCHA4 7-cyano-7-deazaguanine synthase; OS = Ochrobactrum anthropi (strain ATCC 49188 / DSM 6882 / JCM 21032 / NBRC 15819 / NCTC 12168) OX=439375 GN=queCPE=3; SV = 1
MKTLVVCSGGLDSVSLAYRIASEHQLTALLSFDYGQRHKKELDSAKACAERLGVPHQIIDITNIGASLTGSALTDDIDVPDGHYAEETMKITVVPNRNAIMLAIAFGVAAAQKAEAIALAVHGGDHFIYPDCRPGFIDAFQTMQNHALDGYADIKLLAPYVHASKADIVIDGAKHGAPFAATWSCYKGGEHHCGRCGTCVERREAFHLAGVEDPTLYEDADFWRSAIEKRNA

SEQ ID NO: 40253 - protein, 196 aa, Ochrobactrum anthropi
  REGION 1..196: note = tr|A0A011SXF7|A0A011SXF7_OCHAN 7-cyano-7-deazaguanine synthase OS=Ochrobactrum anthropi; OX = 529 GN=BG46_26450 PE=3 SV=1
MSIVTLVSGGLDSTLVAYLAKEEGIQQYPIFIDYGQRSRDREHAACRSAMAKLQLPDLEVADLSGYGRLIKSGLTDPNQRVLEDAFTPGRNLLFLLVAAAYAFQRDADAISIGLLHEETSLFPDQTSAFLQEAEAMIARSMGREIKVLAPLSSFHKQEVIELATLKGIEGTYSCHLGGETPCGACIACNEFKAEGV

SEQ ID NO: 40254 - protein, 232 aa, Ochrobactrum cytisi
  REGION 1..232: note = tr|A0A1J6HJ63|A0A1J6HJ63_9RHIZ 7-cyano-7-deazaguanine synthase OS=Ochrobactrum cytisi; OX = 407152 GN=queC PE=3 SV=1
MKTLVVCSGGLDSVSLAYRIATEHQLTALLSFDYGQRHKKELDSAKACAERLGVPHQIIDITNIGASLTGSALTDNIDVPDGHYAEETMKITVVPNRNAIMLAIAFGVAAAQKAEAVALAVHGGDHFIYPDCRPGFIDAFQTMQNHALDGYADIKLLAPYVHASKADIVIDGAKYGTPFAATWSCYKGGEHHCGRCGTCVERREAFHLAGIQDPTLYEDADFWRSAIEKRNA

SEQ ID NO: 40255 - protein, 232 aa, Ochrobactrum gallinifaecis
  REGION 1..232: note = tr|A0A502BLE7|A0A502BLE7_9RHIZ 7-cyano-7-deazaguanine synthase OS=Ochrobactrum gallinifaecis OX=215590 GN=queC PE=3 SV=1
MKTLVICSGGLDSVSLAHKIAAEHQLTGLISFDYGQRHKKELSFAQACARRLNVAHQIIDISPIGASLTGSALTDKIDVPDGHYAEETMKITVVPNRNAIMMTIAFGVAAAQKADAVALAVHGGDHFIYPDCRPGFINAFQTMQNHALEGYADIRLLAPYVQKSKSDIVIDGAKYKTPFEATWSCYKGGEHHCGRCGTCVERREAFHLAGITDPTRYEDADFWRSTIENRSA

SEQ ID NO: 40256 - protein, 232 aa, Ochrobactrum grignonense
  REGION 1..232: note = tr|A0A256FAJ0|A0A256FAJ0_9RHIZ 7-cyano-7-deazaguanine synthase OS=Ochrobactrum grignonense OX=94627 GN=queC PE=3 SV=1
MKTLVICSGGLDSVSLAHKIAAEHQLTGLISFDYGQRHKKELSFAEACAKRLNVPHQTIDIRPIGASLTGSALTDDIDVPDGHYAEETMKITVVPNRNAIMLAIAFGVAAAQKAEAVALAVHGGDHFIYPDCRPGFIDAFQTMQNHALEGYADIRVLAPYVHKSKSDIVSDGAKYEAPFEATWSCYKGGEHHCGRCGTCVERREAFHLAGVADPTRYEDADFWRAAIEKRNA

SEQ ID NO: 40257 - protein, 232 aa, Ochrobactrum haematophilum
  REGION 1..232: note = tr|A0A397L9T9|A0A397L9T9_9RHIZ 7-cyano-7-deazaguanine synthase OS=Ochrobactrum haematophilum OX=419474 GN=queC PE=3 SV=1
MKTLVVCSGGLDSVSLAHRIAAEHELTTLLSFDYGQRHKKELDSAKACAERLGVPHQIIDIRTIGASLTGSALTDDVDVPDGHYAEETMKITVVPNRNAIMLAIAFGVAAAQKADAVALAVHGGDHFIYPDCRPGFIDAFQTMQNHALEGYADIRLFAPYVNASKADIVTDGAKYGTPFEATWSCYKGGDRHCGRCGTCVERREAFHLAGVKDPTVYEDADFWRAAIERRNA

SEQ ID NO: 40258 - protein, 232 aa, Ochrobactrum haematophilum
  REGION 1..232: note = tr|A0A2P9HQW1|A0A2P9HQW1_9RHIZ 7-cyano-7-deazaguanine synthase OS=Ochrobactrum haematophilum OX=419474 GN=queC PE=3 SV=1
MKTLVVCSGGLDSVSLAHRIAAEHDLTALLSFNYGQRHKKELDSAKACAERLSVPHQILDIRTIGASLTGSALTDNVDVPDGHYAEETMKITVVPNRNAIMLAIAFGVAAAQKAEAVALAVHGGDHFIYPDCRPNFINAFQTMQNHALEGYADIKLLAPYVNASKADIVTDGARHDTPFEATWSCYKGGENHCGRCGTCVERREAFHLAGVKDPTVYEDADFWREAVARRNT

SEQ ID NO: 40259 - protein, 232 aa, Ochrobactrum intermedium
  REGION 1..232: note = tr|U4VFG2|U4VFG2_9RHIZ 7-cyano-7-deazaguanine synthase OS=Ochrobactrum intermedium 229E OX=1337887; GN = queC PE=3 SV=1
MKTLVVCSGGLDSVSLAYRIAGEHQLTALLSFDYGQRHRKELDSAKACAERLGAPHQIIDIRTIGASLTGSALTDDVDVPDGHYAEETMKITVVPNRNAIMLAIAFGVAAAQKADAVALAVHGGDHFIYPDCRPGFIDAFQTMQNHALDGYADIKLLAPYVHVSKADIVIDGAKYGTPFAATWSCYKGGEHHCGRCGTCVERREAFHLAGIEDPTLYEDADFWRAAIEKRSV

SEQ ID NO: 40260 - protein, 232 aa, Ochrobactrum intermedium; identical to SEQ ID NO: 40259
  REGION 1..232: note = tr|C4WJA1|C4WJA1_9RHIZ 7-cyano-7-deazaguanine synthase OS=Ochrobactrum intermedium LMG 3301 OX=641118; GN = queC PE=3 SV=1

SEQ ID NO: 40261 - protein, 198 aa, Ochrobactrum lupini
  REGION 1..198: note = tr|A0A256GWU3|A0A256GWU3_9RHIZ 7-cyano-7-deazaguanine synthase OS=Ochrobactrum lupini; OX = 255457 GN=CES86_0862 PE=3 SV=1
MRKALLLSGGMDSTCLAYWRRPDLAITIDYGHKAAKGEIRAATAICRHLGIEHLIIRCDLSALGSGDMAGKPADPNAPASEWWPYRNQMLATLAAMECIKHGINVLELGALRTDGFHVDGRREFVEALSALLSMQEGGLRLEAPAAAYSAEELVKASGTPIEILAWSHSCHTNEYSCGYCRGCQKHYVTMEAIGVGPY

SEQ ID NO: 40262 - protein, 232 aa, Ochrobactrum lupini
  REGION 1..232: note = tr|A0A256GRP2|A0A256GRP2_9RHIZ 7-cyano-7-deazaguanine synthase OS=Ochrobactrum lupini; OX = 255457 GN=queC PE=3 SV=1
MKTLVVCSGGLDSVSLAYRIASEHQLTALLSFDYGQRHKKELDSAKACAERLGIPHQIIDITNIGASLTGSALTDNIDVPDGHYAEETMKITVVPNRNAIMLAIAFGVAVAQKAEAIALAVHGGDHFIYPDCRPGFIDAFQTMQNHALDGYADIKLLAPYVHASKADIVIDGAKYGAPFAATWSCYKGGEHHCGRCGTCVERREAFHLAGIQDPTLYEDADFWRSAIEKRNA

SEQ ID NO: 40263 - protein, 232 aa, Ochrobactrum oryzae
  REGION 1..232: note = tr|A0A2S7J1D8|A0A2S7J1D8_9RHIZ 7-cyano-7-deazaguanine synthase OS=Ochrobactrum oryzae; OX = 335286 GN=queC PE=3 SV=1
MKTLVVCSGGLDSVSLAYRIAAEHQLTALLSFDYGQRHRKELDSARACAERLGAPHQIIDIRSIGASLIGSALTDDVDVPDGHYAEETMKMTVVPNRNAIMLAIAFGVAAAQKAEAVALAVHGGDHFIYPDCRPGFIDAFQTMQNHALDGYANIKLLAPYVRASKADIVIDGAKYGTPFTATWSCYKGGEHHCGRCGTCVERREAFHLAGIEDPTLYEDPDFWCDAVARRNA

SEQ ID NO: 40264 - protein, 232 aa, Ochrobactrum pecoris
  REGION 1..232: note = tr|A0A5C5CND7|A0A5C5CND7_9RHIZ 7-cyano-7-deazaguanine synthase OS=Ochrobactrum pecoris; OX = 867683 GN=queC PE=3 SV=1
MKTLVVCSGGLDSVSLAYRIASEYQLAALLSFDYGQRHKKELDSAKACAERLGVRHQIIDITNIGASLTGSALTDDVDVPDGHYAEETMKITVVPNRNAIMLAIAFGVAAAQTADAVALAVHGGDHFIYPDCRPGFIDAFQIMQNHALDGYADIKLLAPYVHASKADIVIDGARYGTPFAATWSCYKGGEYHCGRCGTCVERREAFHHAGIEDPTLYEDADFWRDAVARRNT

SEQ ID NO: 40265 - protein, 232 aa, Ochrobactrum pseudogrignonense
  REGION 1..232: note = tr|A0A256GNY7|A0A256GNY7_9RHIZ 7-cyano-7-deazaguanine synthase OS=Ochrobactrum pseudogrignonense OX=419475 GN=queC PE=3 SV=1
MKTLVICSGGLDSVSLAHKIAAEQQLTGLISFDYGQRHKKELSFAEACAKRLNVPHQIIDIRPIGASLTGSALTDDVDVPDGHYAEETMKITVVPNRNAIMLAIAFGVATAQKADAVALAVHGGDHFIYPDCRPGFIDAFQTMQNHALEGYADIQVLAPYVHKSKSDIVSDGVKYKAPFEATWSCYKGGEHHCGRCGTCVERREAFHLAGVTDPTRYEDADFWRAAIEKRSA

SEQ ID NO: 40266 - protein, 232 aa, Ochrobactrum pseudogrignonense
  REGION 1..232: note = tr|A0A1A9FRV6|A0A1A9FRV6_9RHIZ 7-cyano-7-deazaguanine synthase OS=Ochrobactrum pseudogrignonense OX=419475 GN=queC PE=3 SV=1
MKTLVICSGGLDSVSLAHKIAAEQQLTGLISFDYGQRHKKELSFAEACAKQLNVPHQIIDIRPIGASLTGSALTDDVDVPDGHYAEETMKITVVPNRNAIMLAIAFGVAAAQKADAVALAVHGGDHFIYPDCRPGFIDAFQTMQNHALEGYADIQVLAPYVHKSKSDIVSDGVKYKAPFEATWSCYKGGEHHCGRCGTCVERREAFHLAGVTDPTRYEDADFWRAAIEKRSA

SEQ ID NO: 40267 - protein, 232 aa, unidentified
  source 1..232: note = Ochrobactrum quorumnocens
  REGION 1..232: note = tr|A0A248UGF4|A0A248UGF4_9RHIZ 7-cyano-7-deazaguanine synthase OS=Ochrobactrum quorumnocens OX=271865 GN=queC PE=3 SV=1
MKTLVICSGGLDSVSLAHKIAAEHQLTGLISFDYGQRHKKELNFAEACAKRLNVPHQIIDIRPIGASLTGSALTDDIDVPDGHYAEETMKVTVVPNRNAIMLAIAFGVAAAQKADAVALAVHGGDHFIYPDCRPGFIDAFQSMQNHALEGYADIRVLAPYVHKSKSDIVLDGAKYRAPFEATWSCYKGGEHHCGRCGTCVERREAFHLACINDPTHYEDANFWRAAIEKRNG

SEQ ID NO: 40268 - protein, 232 aa, Ochrobactrum rhizosphaerae
  REGION 1..232: note = tr|A0A256F359|A0A256F359_9RHIZ 7-cyano-7-deazaguanine synthase OS=Ochrobactrum rhizosphaerae OX=571254 GN=queC PE=3 SV=1
MKTLVICSGGLDSVSLAHKIAAEHQLIGLISFDYGQRHKKELSFADACAKRLSVPHHIIDIRPIGASLTGSALTDAIDVPDGHYAEETMKITVVPNRNAIMLAIAFGVAAAQKAEAVALAVHGGDHFIYPDCRPGFIDAFQTMQNHALEGYADIRVVAPYVHKSKSDIVLDGAKYKTPFEATWSCYKGGEHHCGRCGTCVERREAFHLAGISDPTRYEDTAFWRAAIEKRSV

SEQ ID NO: 40269 - protein, 232 aa, Ochrobactrum sp.
  REGION 1..232: note = tr|A0A4R7WTR8|A0A4R7WTR8_9RHIZ 7-cyano-7-deazaguanine synthase OS=Ochrobactrum sp. LP_5_YM OX=2485134 GN=queC PE=3 SV=1
MKTLVICSGGLDSVSLAHKIAIEHQLTGLLSFDYGQRHKKELSFAEACAKRLNVPHQTIDIRPIGASLTGSALTDDIDVPDGHYAEETMRITVVPNRNAIMLAIAFGVAAAQKADAVALAVHGGDHFIYPDCRPGFIDAFQTMQNHALEGYADIRLLAPYVHKSKSDIVLDGAKYRAPFEATWSCYKGGQHHCGRCGTCVERREAFHLAGVSDPTHYEDADFWRAAIEKRNG

SEQ ID NO: 40270 - protein, 232 aa, Ochrobactrum sp.
  REGION 1..232: note = tr|A0A5C5CHJ1|A0A5C5CHJ1_9RHIZ 7-cyano-7-deazaguanine synthase OS=Ochrobactrum sp. LCB8; OX = 2479765 GN=queC PE=3 SV=1
MKTLVVCSGGLDSVSLAHRIAAEHDLTALLSFNYGQRHKKELDSAKACAERLSVPHQIIDIRTIGASLTGSALTDNVDVPDGHYAEETMKITVVPNRNAIMLAIAFGVAAAQKAEAVALAVHGGDHFIYPDCRPGFINAFQTMQNHALEGYADIKLLAPYVNASKADIVTDGARHDTPFEATWSCYKGGENHCGRCGTCVERREAFHLAGVKDPTVYEDADFWREAVARRNA

SEQ ID NO: 40271 - protein, 232 aa, Ochrobactrum thiophenivorans
  REGION 1..232: note = tr|A0A256G0W9|A0A256G0W9_9RHIZ 7-cyano-7-deazaguanine synthase OS=Ochrobactrum thiophenivorans OX=571255 GN=queC PE=3 SV=1
MKTLVICSGGLDSVSLAHKIAAEHKLTGLISFDYGQRHKKELDFAAACAERLNIPHQIIDIRPIGTSLSGSALTDDIDVPDGHYAEETMKITVVPNRNAIMMTIAFGVAAAQKADAVALAVHGGDHFIYPDCRPGFINAFQTMQNHALDGYADIRVLAPYVHKAKSDIVVDGAKHRTPFEATWSCYKGGEHHCGRCGTCVERREAFHLAGVTDPTRYEDADFWRAAIEKRSA

SEQ ID NO: 40272 - protein, 232 aa, unidentified
  source 1..232: note = Unknown
  REGION 1..232: note = tr|A0A2A4Z215|A0A2A4Z215_9PROT 7-cyano-7-deazaguanine synthase OS=OCS116 cluster bacterium OX=2030921 GN=queC PE=3 SV=1
MQTLVICSGGMDSITLAHKIADQGNLSHILTFDYGQRHVKEIDFARNCAADLDVPFTLIDMSNIGKQFTGTALTGNVDVPDGHYAEASMKVTMVPNRNVIMLSIAYGLAATHKLKRVALAVHGGDHFIYPDCRPDFIAAFAKMQKMALEGYADIDIYAPYVNASKADIATDAKALNVDHTKSWSCYKGGDLHCGRCGTCVERREAFDLAGYADPTIYADPDFWQGVVEEAAS

SEQ ID NO: 40273 - protein, 455 aa, unidentified
  source 1..455: note = Unknown
  REGION 1..455: note = tr|A0A2A4Z6D5|A0A2A4Z6D5_9PROT ATPase OS=OCS116 cluster bacterium OX=2030921 GN=COB13_05220 PE=4 SV=1
MPHNHLKPFEMSITRIYVTELGQCVPEGWDACFVGEHLKFKESALETYFFKNREDVVYDAFVLMAAVEYCDYIKQRVTRGWGRKFVLSVPVDDPLHWNDEKVRQPLISSLNILTGDFWNIKFHKRDFVPDWPSQGEFPIETNPLAVMAYSNGLDSLSVSGILSEEFGDKLVRIRLGGKAKNKKHPFVAIPYQVHPNVYKKESSGRSRGFKFAVLSASSAYLSGASRIIVPESGQGSLGPAFVPLGRIPIDYRNHPKFFSKMEQFLFALFGKELSFEIPRLWYTKGQTIAHYIKRSNDDKSWRETVSCWRGSQQTSVNREKRQCGICAACLLRRLSVHAAGLEESNDTYLWHDLSVSDFAKGAARDVDKMHDFGAHKKYAIAGMGHLRDMAEISHLGLSPSLNLHASELARIQNIEKKVIMSNQIELLSNHAQEWEAFLTSLGEKSFLVKWARRRK

SEQ ID NO: 40274 - protein, 615 aa, Octadecabacter arcticus
  REGION 1..615: note = tr|M9RQ48|M9RQ48_9RHOB Uncharacterized protein; OS = Octadecabacter arcticus 238 OX=391616 GN=OA238_c24870; PE = 4 SV=1
MDGVVQPPEHIVTCLPPEADGRGDAQLRFEIDGKLKAVSLRIGHIRKSLVAGLPDVALDLIEVAAFVYAIDSSVSRGGLMDQQMGAKWHRRFHVSLPVRNLALWSEPKLKTAFEETLMFLSGDRFVFDFVQSETEAATPERYFDFGKESAWEPDSVLMFSGGLDSYAGALEEIIERKHKVALISHFSATKIAPIQRDLQKHMAQKLGPQMLMHFPMRVQLKRGTNAEGTHRARSFLFAALGMATAIAFGQKRVSFYENGVVSLNLPPVGNVLGTRATRTTHPQTLQRFEALFSMIFDQNLRVDNPFFWRTKTEVVQTIARLGMADQIAFTRSCADVHNQTKQYAHCGRCSQCVDRRFAMLAAGLAGHDPEEAYRLDLMASPRERVQDKEVALSYVRSAFAYEAINEDELVARFPAILNAVESLGEPPDTALRRIVDLLKRHGSSVATVMRDEMSSTRMEPAPANSLPDLYGAAQREQLFTSMPVSPEPQNELEPVFDIVIDTKRKVLRINDAIQIKGAGFNLLNTLATAFLHGAGQGLDLLDFPTLDAGKLAVGAGLQDDAAVRQSVSRTRSLLGTKFTSAGLSSEDGKNLIENIPWSGYRLRPDRVRVGYVTGN

SEQ ID NO: 40275 - protein, 224 aa, Odoribacter laneus
  REGION 1..224: note = tr|R5UYQ6|R5UYQ6_9BACT 7-cyano-7-deazaguanine synthase OS=Odoribacter laneus CAG:561 OX=1263089 GN=queC; PE = 3 SV=1
MKKAIVLLSGGLDSSTALYVAKNEGFDELYALTFEYGQKHDKEIESAKAVARAAGVKEHKFVHLLLNQWGDCSLTNPALQIDKGNVNRTDIPATYVPARNMVFLSVAASYADALEISDLFIGVSETDYSGYVDCRESFIKAMEEAVNLGTVLGAEKKRRITIHAPFLHMTKADEIRLGIKLGVDFSLTWSCYRGEERPCGTCDSCLLRARAFAEAGIEDPLLKK

SEQ ID NO: 40276 - protein, 224 aa, Odoribacter laneus
  REGION 1..224: note = tr|H1DFE1|H1DFE1_9BACT 7-cyano-7-deazaguanine synthase OS=Odoribacter laneus YIT 12061 OX=742817 GN=queC; PE = 3 SV=1
MKKAIVLLSGGLDSSTALYVAKNEGFDEVYALTFEYGQKHDKEIESAKAVARAAGVKEHKFVRLLLNQWGDCSLTNPAVQIDKGNVNRTDIPATYVPARNMVFLSVAASYADALEISDLFIGVSETDYSGYVDCRESFIKAMEEAVNLGTVLGAEKKRRITIHAPFLHMTKADEIRLGIKLGVDFSLTWSCYRGEERPCGTCDSCLLRARAFAEAGIEDPLLKK

SEQ ID NO: 40277 - protein, 222 aa, Odoribacter sp.
  REGION 1..222: note = tr|R5P8R7|R5P8R7_9BACT 7-cyano-7-deazaguanine synthase OS=Odoribacter sp. CAG:788 OX=1262909 GN=queC; PE = 3 SV=1
MKKAIVLLSGGLDSSTALYVAKKEGFDELYALTFEYGQKHDREIRSASAIAKAVGVREHKIVRLMLNAWKGSSLTDPDVVIQDGDADRTDIPDTYVPARNMVFLSVAASYADALDITDIFIGVSEMDYSGYVDCREEFIRSMEQTINLGTVLGAEKKQKITIHAPFLRMTKADEVKLGTKLGVDFSLTWSCYRGGEKPCGTCDSCLLRARAFAEAGIADPLV

SEQ ID NO: 40278 - protein, 225 aa, Odoribacter sp.; identical to SEQ ID NO: 36916
  REGION 1..225: note = tr|A0A373UV75|A0A373UV75_9BACT 7-cyano-7-deazaguanine synthase OS=Odoribacter sp. AF21-41; OX = 2293111 GN=queC PE=3 SV=1

SEQ ID NO: 40279 - protein, 223 aa, Odoribacter splanchnicus
  REGION 1..223: note = tr|A0A3D1UEX9|A0A3D1UEX9_9BACT 7-cyano-7-deazaguanine synthase OS=Odoribacter splanchnicus OX=28118 GN=queC PE=3 SV=1
MKKAIVLLSGGLDSSTALYLAKSQGFDEIYAITFEYGQKHDKELKSAIAIAKAAGVKEHKIVNLLLNQWSGCALTDPDMEVEDGHIERQDIPSTYVPARNMVFLSVAASWADALDITDIFIGVSEVDYSGYVDCREEFIKAMENAINLGTVLGAEKKQRITIHAPFMHLTKAEEVKLGVSLGVDFGLTWTCYRGGEHPCGVCDSCLLRAKAFAEANEIDPLVC

SEQ ID NO: 40280 - protein, 223 aa, Odoribacter splanchnicus
  REGION 1..223: note = tr|A0A412WIR2|A0A412WIR2_9BACT 7-cyano-7-deazaguanine synthase OS=Odoribacter splanchnicus OX=28118 GN=queC PE=3 SV=1
MKKAIVLLSGGLDSSTALYLAQSQGFDEIYAITFEYGQKHDKELKSAIAIAKAAGVKEHKIVNLLLNQWSGCALTDPDMEVEDGHIERQDIPSTYVPARNMVFLSVAASWADALDITDIFIGVSEVDYSGYVDCREEFIKAMENAINLGTVLGAEKKQRITIHAPFMHLTKAEEVKLGVSLGVDFGLTWTCYRGGEHPCGVCDSCLLRAKAFAEANEIDPLVC

SEQ ID NO: 40281 - protein, 223 aa, unidentified
  source 1..223: note = Okeania hirsuta
  REGION 1..223: note = tr|A0A3N6NKW9|A0A3N6NKW9_9CYAN 7-cyano-7-deazaguanine synthase OS=Okeania hirsuta; OX = 1458930 GN=queC PE=3 SV=1
MKAVILLSGGLDSSTVLYQAKADGCQCYAISFDYQQRHRRELDSAKKIAESVGVVEHHVVSFDLRLWGGSALTDNQIDLPNDRSVEEMSQNIPITYVPARNTIFLSFALAYAEVVNASRVYIGVNALDYSGYPDCRPDYIQAMQEVFRLGTKQGREGEAIAIVSPLIDMKKTEIIQLGNNLGVPWEKTWSCYAGEEKPCGVCDSCRLRLAAFQELGLKDPLSD

SEQ ID NO: 40282 - protein, 228 aa, unidentified
  source 1..228: note = Oleiagrimonas soli
  REGION 1..228: note = tr|A0A099CVJ3|A0A099CVJ3_9GAMM 7-cyano-7-deazaguanine synthase OS=Oleiagrimonas soli; OX = 1543381 GN=queC PE=3 SV=1
MTEQTSSQPKAVVLVSGGMDSAVVVAMARAKGFEVYALSVAYGQRHDSELQAAARVCAMLGARAHKVVDVDLRSIGGSALTDDIDVPEEGGEGIPVTYVPARNTIMLSVALGWAEVLGASDIFCGVNAVDYSGYPDCRPAFIESFQQLAQVATRAGVEGSPMRIHAPLMAMGKADIVRAGLELGVDFAQTVSCYQADAEGRACGHCDACRLRAQGFAEAGVDDPTHYR

SEQ ID NO: 40283 - protein, 228 aa, unidentified
  source 1..228: note = Oleiagrimonas sp.
  REGION 1..228: note = tr|A0A328T2C2|A0A328T2C2_9GAMM 7-cyano-7-deazaguanine synthase OS=Oleiagrimonas sp. MCCC 1A03011 OX=1926883 GN=queC PE=3 SV=1
MTEQTSPQRNAVVLVSGGMDSAVVAAMARAQGFAVHALSVAYGQRHDSELQAAARVCAMVGASAHKVVDVDLRSIGGSALTDDIDVPEEGGDGIPVTYVPARNTIMLSVALGWAEVLNASDIFCGVNAVDYSGYPDCRPAFIESFQNLAQVATRAGVEGTPMRIHAPLMSMSKADIVRAGVELGVDFAQTVSCYQADAGGRACGHCDACRLRAQGFAEAGVEDPTHYR

SEQ ID NO: 40284 - protein, 220 aa, Oleibacter marinus
  REGION 1..220: note = tr|A0A1N7LHY9|A0A1N7LHY9_9GAMM 7-cyano-7-deazaguanine synthase OS=Oleibacter marinus; OX = 484498 GN=queC PE=3 SV=1
MAEKAVVIYSGGMDSFTILNRAKNEGFDLYALTFDYGQRHSKEIQFAKRVCDELEISHKIIDITAINQLLQSSSLTSDIEIPEGHYEAANMKSTVVPNRNMILLSLAIGYAVDISANKVFYGAHSGDHAIYPDCRPDFVHAMNRVAKLANYEPVDIVTPYLNSDKTEILADGLKMGLDYGKTWTCYNGRDKACGKCGSCTERLEAFAANSATDPIAYESV

SEQ ID NO: 40285 - protein, 226 aa, Oleiphilus messinensis
  REGION 1..226: note = tr|A0A1Y0I1V1|A0A1Y0I1V1_9GAMM 7-cyano-7-deazaguanine synthase OS=Oleiphilus messinensis; OX = 141451 GN=queC PE=3 SV=1
MVNPETTGAQDKAVVIYSGGMDSYTLLNLALRQHHRVYALSFNYGQRHSKELHFAQKVCDELAIPHKLVDIMAINQLILGSSLTDDIEVPEGHYEETSMKSTVVPNRNMIMLSLAIGWAVSIKANVVYYGAHSGDHAIYPDCRPEFVQKMDDVARIANYEEVQIQAPFMYMSKIDILAQGLQWQLDYGKTWTCYNGREKACGKCGSCTERLEAFTHHGLKDPLAYE

SEQ ID NO: 40286 - protein, 233 aa, Oleispira antarctica
  REGION 1..233: note = tr|R4YPA8|R4YPA8_OLEAN 7-cyano-7-deazaguanine synthase OS=Oleispira antarctica RB-8 OX=698738 GN=queC1; PE = 3 SV=1
MSDTSSDQLSTKQEKPKAVVIYSGGMDSYTILNKAKTEGYDLYALTFDYGQKHDKEIEFASNACKELEINHKIIDITAINQLLQSSSLTSDIEIPEGHYESASMKSTVVPNRNMILLSLAIGYAVDIGANKVFYGAHSGDHAIYPDCRPDFVHAMNKVAKLANYEPVDIVTPYLNSDKSEILADGLKMGLDYGKSWTCYNGREKACGKCGSCVERLEAFEINKTTDPLAYEAL

SEQ ID NO: 40287 - protein, 224 aa, Oleispira sp.
  REGION 1..224: note = tr|A0A2E3B8L2|A0A2E3B8L2_9GAMM 7-cyano-7-deazaguanine synthase OS=Oleispira sp.; OX = 2024846 GN=queC PE=3 SV=1
  VARIANT 119: note = Xaa can be any naturally occurring amino acid
MSDSTAKPKAVVIYSGGMDSFTILNKAKAEGYDLYALTFDYGQKHDKEIQFASNVCKELDIKHKIIDITAINQLLQSSSLTSDIEIPEGHYEAANMKSTVVPNRNMILLSLAIGYAVDXKASKVFYGAHSGDHAIYPDCRPDFVHAMNKVAKLANYEPVDIVTPYLNTDKADILADGIKMGLDYGKSWTCYNGREKACGKCGSCVERLEAFELNNATDPLSYEV

SEQ ID NO: 40288 - protein, 462 aa, unidentified
  source 1..462: note = Oleomonas sp.
  REGION 1..462: note = tr|A0A418WGQ2|A0A418WGQ2_9PROT ATPase OS=Oleomonas sp. K1W22B-8 OX=2320859 GN=D3874_21430 PE=4 SV=1
MIPKAFHVADAVPHRVDAIEIGEAPRDGARLATLGQTITLSIEGLKDFFFADWRPELIDLLVIAAAVEYCDLSVRRPSWGWARSFDLLVAVHEDEQWSAAPVGDALEEALAFLTGDRWRLSFTKRRNAVVKVSPRRFVFDTPDKVIMPYSDGLDSRAVAALVEEREKGGLVRVRLGSKGVDSARIPRKKRRFAVVPFEVKLDKRQRVESSSRSRGFKFAVVTGIAAQLAPVDRIVVTESGQGALGPILASSGQSYPDYRVHPAFTRRIERLFEALTNKAPSYEYPRIWNTKGETLAAATALPKPPTWHDTRSCWQDSRRVSFDGARRQCGICAACMLRRMSIHRAGIDEPSSGYIWEDLGAAEMEDGAVMGFSGMSSAFRDYAFAGILHLDHLAALSGSELHWRTVRRVARETAEALGIEMAEGERKMIELLERHRAEWLDFLVSLGSRSFVARVAMVSPWH

SEQ ID NO: 40289 - protein, 241 aa, unidentified
  source 1..241: note = Oleomonas sp.
  REGION 1..241: note = tr|A0A418WF89|A0A418WF89_9PROT 7-cyano-7-deazaguanine synthase OS=Oleomonas sp. K1W22B-8; OX = 2320859 GN=queC PE=3 SV=1
MPAVTSGPIMADGGALVLFSGGQDSATCLAWALDRFERVETVGFDYGQRHRVELACRATLRAGLGRMRPDWAAKLGDDHTIGLSALGEVSNTALTRDVAIEMTQGGLPNTFVPGRNIVFLTFAAALAYRRGLRHIVGGMCETDFSGYPDCRDDTIKALQVALNLGMDSRFVLHTPLMWIDKAQTWALARSLGGDALVDLIVEDSHTCYLGTREMRHPWGYGCGTCPACLLRAEGFRRFKSA

SEQ ID NO: 40290 - protein, 225 aa, Oligella ureolytica
  REGION 1..225: note = tr|A0A378XCC8|A0A378XCC8_9BURK 7-cyano-7-deazaguanine synthase OS=Oligella ureolytica; OX = 90244 GN=queC_2 PE=3 SV=1
MSVSDQALVIFSGGQDSTTCLLQAIARFGANHVQAISFVYGQRHAIELDCAKRIAQELGVKQIIIDLSLVGQITHNALMDDQATIEESGDGTPPNTMVDGRNALFLMYAGIYAKSQGMKHIYLGVSETDFSGYPDCRDVFVKSMNVTLNLSMDYDFQIHTPLMYLTKAQTWELADDLGYLDFVREKTHTCYLGVEGGCGECPSCVLRENGLREYLRSKGARDESR

SEQ ID NO: 40291 - protein, 224 aa, Oligella ureolytica
  REGION 1..224: note = tr|A0A378XAE0|A0A378XAE0_9BURK 7-cyano-7-deazaguanine synthase OS=Oligella ureolytica; OX = 90244 GN=queC_1 PE=3 SV=1
MSFSDQALVIFSGGQDSTTCLLQALAQYGPNQVQTISFIYGQRHSIEMDCAQAIAQDLGVKQTVMDLSLIGQITSNALMDDQATIEETADGPPNTMVDGRNALFLMYAGIYAKSQGIKHIYLGVSETDFSGYPDCRDVFVKSMNVTLNLSMGYDFQIHTPLMNLTKAQAWALADELGYLDYVREKTHTCYLGVKGGCGECPSCVLRNDGLREYLATKEASYENC

SEQ ID NO: 40292 - protein, 224 aa, Oligella urethralis
  REGION 1..224: note = tr|A0A095Z3P9|A0A095Z3P9_9BURK 7-cyano-7-deazaguanine synthase OS=Oligella urethralis DNF00040 OX=1401065 GN=queC PE=3 SV=1
MLCSEQALVIFSGGQDSTTCLLQALAHYGPNQVQAISFIYGQRHAIELNCARAIAEALGVKQHILDLSLMAQVTHNALMDAKAPIKNSPDGPPNTMVDGRNALFLMYAAIYAKSQGIKHVILGVSETDFSGCPDCRDIFVKSMNVSLNLAMDYDFQIHTPLMYLTKAQTWALADELGYLDFVRQKTHTCYLGVQGGCGHCPSCELRDKGLREYLSSKEAGNESC

SEQ ID NO: 40293 - protein, 224 aa, Oligella urethralis
  REGION 1..224: note = tr|A0A2X1UYF6|A0A2X1UYF6_9BURK 7-cyano-7-deazaguanine synthase OS=Oligella urethralis; OX = 90245 GN=queC PE=3 SV=1
MSCSEQALVIFSGGQDSTTCLLQALAHYGPNQVQAISFIYGQRHAIELDCARAIAEELGVKQHILDLSLMAQITHNALMDAEASIKNSPDGPPNTMVDGRNALFLMYAAIYAKSQGIKHVILGVSETDFSGYPDCRDIFVKSMNVSLNLAMDYDFQIHTPLMYLTKAQTWALADELGYLDFVRQKTHTCYLGVQGGCGHCPSCELRDKGLREYLSSKEAGNESC

SEQ ID NO: 40294 - protein, 244 aa, Oligotropha carboxidovorans
  REGION 1..244: note = tr|F8BUY4|F8BUY4_OLICO 7-cyano-7-deazaguanine synthase OS=Oligotropha carboxidovorans (strain ATCC 49405 / DSM 1227 / KCTC 32145 / OM5) OX=504832 GN=queC PE=3 SV=1
MIDRVMNNPLDKPLDDAALVLFSGGQDSATCLAWVLSRFARVETVGFDYGQRHAIELECRSTLIERFKAIKPEWKARLGEAHTLAIPTLAEISDTALTRDIAIEMDKGGLPNTFVPGRNLLFLTLAAALGYRRGIRHIVGGMCETDYSGYPDCRDETIKSLNVAINQGMGRDFELHTPLMWRDKGETWALAHELGGDALVDLIVQHSHTCYLGERGALHDWGYGCGECPACRLRAAGWAKYKTA

SEQ ID NO: 40295 - protein, 209 aa, unidentified
  source 1..209: note = Olleya namhaensis
  REGION 1..209: note = tr|A0A1I3MRU8|A0A1I3MRU8_9FLAO 7-cyano-7-deazaguanine synthase OS=Olleya namhaensis; OX = 1144750 GN=SAMN05443431_103275 PE=3 SV=1
MEKNKVILLLSGGIDSTTLLAKLKKENKEVIAISFFYEQKHAIELQYARNNAKKYNVIEHKVIQLDSQLFSGSALVNSEKQLSTYSNGENPIGQENAYVPYRNLVFLSMALSLAESSKINNIYIAFNKDDCVNFWDCKSAFLTQLNLISEHSNIQIQAPLIELTKKEVIMLSQKLEVDLNETISCYQPINDKECGKCLSCLVKSRGLNN

SEQ ID NO: 40296 - protein, 191 aa, Olleya sp.
  REGION 1..191: note = tr|A0A2K8X246|A0A2K8X246_9FLAO 7-cyano-7-deazaguanine synthase OS=Olleya sp. Bg11-27; OX = 2058135 GN=CW732_15505 PE=3 SV=1
MFLLISVLENKCIEKHAIELEFARDNAKKYTVIEHKTIQLDSQLFSSSALVDSHKQLSAYKDGEKPEGEENAYVSYRNLVFLSMAVSLAESHKINDIYVAFNKDDCVNFWDCTSAFLSQLNTISEHSKTEVHAPLINLTKKEVVQLAKKLDVDLNRTISCYQPSNDMECGVCLSCLVKREAFVKIKAELKK

SEQ ID NO: 40297 - protein, 232 aa, Olsenella sp.
  REGION 1..232: note = tr|A0A1T4LRN8|A0A1T4LRN8_9ACTN 7-cyano-7-deazaguanine synthase OS=Olsenella sp. KH1P3; OX = 1945884 GN=queC PE=3 SV=1
MRAVILSSGGVDSTTCVGIAVDKYGAQNVTTVSAWYGQKHKKELVCAQKIAQYYGVRHRVIDLEASRIFDGSNCTLLEGNGEIRHGSYARQKDEKHGGMVDTYVPFRNGLLLSSVAAAALSEYPGQEVELYLGAHADDAAGDAYPDCTKRFTDAMYEAIEAGTGGLVHVRAPFVELTKAGVVKWGLRLGVPYELTWSCYEGGDVQCGECGTCLDRKAAFAANGVEDPVPYRV

SEQ ID NO: 40298 - protein, 232 aa, Olsenella umbonata
  REGION 1..232: note = tr|A0A1H9P554|A0A1H9P554_9ACTN 7-cyano-7-deazaguanine synthase OS=Olsenella umbonata; OX = 604330 GN=SAMN05216446_0828 PE=3 SV=1
MRAVILSSGGVDSTTCVGIAVDKYGAQNVTTVSAWYGQKHKKELVCAQKIAQYYGVRHRVIDLEASRIFDGSNCTLLEGNGEIRHGSYARQKDEKHGGMVDTYVPFRNGLLLSSVAAVALSEYPGQEVELYLGAHADDAAGDAYPDCTKRFTDAMYEAIEAGTGGLVHVRAPFVELTKAGVVEWGLRLGVPYELTWSCYEGGDVQCGECGTCLDRKAAFAANGVEDPVPYRV

SEQ ID NO: 40299 - protein, 226 aa, unidentified
  source 1..226: note = Unknown
  REGION 1..226: note = tr|A0A2A5WFW8|A0A2A5WFW8_9GAMM 7-cyano-7-deazaguanine synthase OS=OM182 bacterium MED-G28; OX = 1986256 GN=queC PE=3 SV=1
MSLGLNNAVVLVSGGLDSATCLAIASAQGHDCYALSFNYGQRSTSELSAAKKVARSIGVMEHKIIELNIGELGGSALTDEEIEVPEAESEGIPVTYVPARNTLFLSYALAWAEVIGANSIFIGVNALDYSGYPDCRPEYIAAFQNLMDIATKTSVEGKHITLETPLINLSKAEIIKSGQSLSIDFGETVSCYQAMEDGSACGKCDSCRFRMKGFYDAGVEDPTRYF

SEQ ID NO: 40300 - protein, 222 aa, unidentified
  source 1..222: note = Unknown
  REGION 1..222: note = tr|A0A0R2S955|A0A0R2S955_9GAMM 7-cyano-7-deazaguanine synthase OS=OM182 bacterium BACL3 MAG-120507-bin80 OX=1655577 GN=queC PE=3 SV=1
MKKAIVLVSGGLDSATCLAIAQAEGYACYALSFDYGQRSASELDAAARLSETAGVVAHKKLPIDMGAIGGSALTDRSIAVPEEETVGIPVTYVPARNTVFLSYALAWAEVVEAEAIFIGVNALDYSGYPDCRPEYIDAFQSLINLATKAGVEGKNIVLRTPLIDLTKAEIIGVGLKLGVDYAATVSCYQADAEGRACGLCDSCRLRTKGFADAQSQDPTRYR

SEQ ID NO: 40301 - protein, 221 aa, unidentified
  source 1..221: note = Omnitrophica bacterium
  REGION 1..221: note = tr|A0A1G1J3H4|A0A1G1J3H4_9BACT 7-cyano-7-deazaguanine synthase OS=Omnitrophica bacterium RBG_13_46_9 OX=1801818 GN=queC PE=3 SV=1
MKKAIVLLSGGIDSATTLYVAKKKGFAPSALIFDYGQRQRKEIESAKKIAKKARCPYRIVRLPFFWKGSSLLDSKVPVPVNRSFNSIGRGIPSTYVPARNLVFLCIAASFAESTRTRAIFIGAHTQDFSGYPDCRKVFFEAFKKVLTAGTKDGSKIEVFTPLIDKNKEEIIKIGLRLNVPYRMTWSCYKGGKRPCGICDSCIIRARGFKEAGIADPYFGSS

SEQ ID NO: 40302 - protein, 226 aa, unidentified
  source 1..226: note = Omnitrophica bacterium
  REGION 1..226: note = tr|A0A1G1KU31|A0A1G1KU31_9BACT 7-cyano-7-deazaguanine synthase OS=Omnitrophica bacterium RIFCSPLOWO2_12_FULL_44_17 OX=1801832 GN=queC PE=3 SV=1
MKAAVCLLSGGLDSATTLFYTIKENFRVLALTVDYGQIHRRELESAKKITNYLKIEHEIISIELPWKGSALLDETIPIPQNRDTTEISKEIPVTYVPARNTIFLSLAASYAEVRGASAIFIGANAIDYSGYPDCRPEYFKQMETAICLGTKAGVEGARISIETPLIHLTKAEIIKLATQLGVPLEWTWSCYRGDRFPCENCDACFLRKKGFAEAGIDDPLFSSVKE

SEQ ID NO: 40303 - protein, 234 aa, unidentified
  source 1..234: note = Unknown
  REGION 1..234: note = tr|A0A1G1M2B6|A0A1G1M2B6_9BACT 7-cyano-7-deazaguanine synthase OS=Omnitrophica WOR_2 bacterium GWB2_45_9 OX=1801843 GN=queC PE=3 SV=1
MSKKAVVLLSGGLDSATTLYFAKAKGFQCYCLIFDYGQRHKKEIASAKKIAQRAGCAWQIIKLSLPWKGSSLLDKKLKIPEFSNSTNSINLSNSIPLTYVPARNIIFLSFALSCAEAIKASSIFIGANAIDYSGYPDCRPEFYRAFIRAVNLGTKAGVEGRGFSIFTPLIKMTKAGIIKLGTRLKVPYELTWSCYQGGRKPCGKCDSCNFRARGFQEAGYRDPLLRGVKYDRKN

SEQ ID NO: 40304 - protein, 222 aa, unidentified
  source 1..222: note = Unknown
  REGION 1..222: note = tr|A0A1G1NU28|A0A1G1NU28_9BACT 7-cyano-7-deazaguanine synthase OS=Omnitrophica WOR_2 bacterium RIFCSPHIGHO2_01_FULL_48_9 OX=1801851 GN=queC; PE = 3 SV=1
MNSAIILLSGGLDSATVLFLAKAKGFKTYALIFDYGQRHRKEILRAKKLAQLSGSESRVVKISLPWAGSALLDKKMRLPQNRKIIPREIPATYVPARNIIFLSLAASYAEVVGARAIFIGANAIDYSGYPDCRPAFFKAYQKVMHKGMKAGVEGKTIKIFAPLLYKTKEQIIRLGLKLKVPYELTWSCYAGGARPCGKCDSCLLREKGFEQVRKVTKSLGHQ

SEQ ID NO: 40305 - protein, 226 aa, unidentified
  source 1..226: note = Opitutaceae bacterium
  REGION 1..226: note = tr|A0A178IJX0|A0A178IJX0_9BACT 7-cyano-7-deazaguanine synthase OS=Opitutaceae bacterium TSB47 OX=1184151 GN=queC PE=3 SV=1
MKVIVLCSGGMDSVVALHWARREHEVAAAVSFDYGAKHNARELPMAAEQAALIGARHVVIPLRFMDELFESALLSSGGEIPEGHYEAENMKQTVVPFRNAIMLSVATGLAESTGAEGLVIAAHGGDHAIYPDCREDFMQAMGDAMRLGTYAGVRLLRPFIAMKKDRIAAEGARLGVDFARTWSCYKGGAVQCGRCGTCVERREAFIGAGLPDPTVYLDNGPLPAKP

SEQ ID NO: 40306 - protein, 230 aa, unidentified
  source 1..230: note = Opitutaceae bacterium
  REGION 1..230: note = tr|A0A2T6DS24|A0A2T6DS24_9BACT 7-cyano-7-deazaguanine synthase OS=Opitutaceae bacterium EW11 OX=2161865 GN=queC PE=3 SV=1
MKVVVLCSGGMDSVTALHWAARNHAVQAAISFDYGSKHNHRELPFAAEQASRLGVRHEVVPLRFMDQLFASALLSSGGEIPEGHYAAENMKQTVVPFRNAILLSVATGFAESIGAEGLVIAAHGGDHAIYPDCREEFMRAMGETMRLGTYAGIQLLRPFISLSKGQIAAEGARLGVDFSKTWSCYKGGVVHCGKCGTCVERREAFIEAGIPDPTVYESTPPLPRRPQGNG

SEQ ID NO: 40307 - protein, 229 aa, unidentified
  source 1..229: note = Opitutae bacterium
  REGION 1..229: note = tr|A0A2A2QNJ8|A0A2A2QNJ8_9BACT 7-cyano-7-deazaguanine synthase OS=Opitutae bacterium Tous-C5TDCM OX=1982322 GN=queC PE=3 SV=1
MNVVVLCSGGMDSVVALHWARREHVVVAAVSFDYGAKHNHREIPFAAEQAALAGVRHEIVALDFVNRLFASDLLKNGGEIPEGHYEAANMKQTVVPFRNAIMLAVATGLAESRGAEGLVIAAHGGDHAIYPDCREEFMRAMGDAMRLGTYAEVKLLRPFIAMTKAEIAAAGAKLGVNFGRTWSCYKGGEVHCGKCGTCVERREAFELAGISDPTVYAETGVLPGKPGVS

SEQ ID NO: 40308 - protein, 229 aa, unidentified
  source 1..229: note = Opitutae bacterium
  REGION 1..229: note = tr|A0A2G4HK83|A0A2G4HK83_9BACT 7-cyano-7-deazaguanine synthase OS=Opitutae bacterium; OX = 2026771 GN=queC PE=3 SV=1
MNVVVLCSGGMDSVVALHWARREHVVVAAVSFDYGAKHNHREIPFAAEQAALVGVRHEIVALDFVNRLFASDLLKNGGEIPEGHYEAANMKQTVVPFRNAIMLAVATGLAESRGAEGLVIAAHGGDHAIYPDCREEFMRAMGDAMRLGTYAEVKLLRPFIAMTKAEIAEVGAKLGVDFGRTWSCYKGGDVHCGKCGTCVERREAFELAGVSDPTGYAETGVLPSKPGVI

SEQ ID NO: 40309 - protein, 233 aa, unidentified
  source 1..233: note = Opitutales bacterium
  REGION 1..233: note = tr|A0A2E7VHX6|A0A2E7VHX6_9BACT 7-cyano-7-deazaguanine synthase OS=Opitutales bacterium; OX = 2026772 GN=queC PE=3 SV=1
MKSIIVYSGGMDSTVLLYQLVAAGDEVKALTIHYGQRHEKEINCARALAKGLGVEHRVVDLSSLAELLGGSALTSLEVEVPEGHYAEENMKATVVPNRNMILLAVAAGWAISSQFDRVGYAAHAGDHAVYPDCRPEFADALDAAIQLADWREVRLDRPFLDLTKAEIVKLGVDLGVPFDRTWSCYQGGELHCGRCGTCVERREAFHLAGIPDPTPYASGVPTVEEMIANDWKL

SEQ ID NO: 40310 - protein, 218 aa, unidentified
  source 1..218: note = Opitutales bacterium
  REGION 1..218: note = tr|A0A2E7PZE2|A0A2E7PZE2_9BACT 7-cyano-7-deazaguanine synthase OS=Opitutales bacterium; OX = 2026772 GN=queC PE=3 SV=1
MKAVALFSGGLDSTVLAYQLLAEGADLRLLSVHYGQRHRRELNNASRLAESMRVPHRILEFPELGSLLGGSSLTDESIDLPEGHYEEESMKATIVPNRNMILLSLAAGHALSIGFDTVAYAAHAGDHTIYPDCRPEFASAMENALGLADWQKLGLHRPFVDKTKADLVRIGHELGVPFESTWSCYAGRDLHCGRCGTCVERKEAFALAGIADPTEYEH

SEQ ID NO: 40311 - protein, 228 aa, Opitutus sp.
  REGION 1..228: note = tr|A0A1H1N9C2|A0A1H1N9C2_9BACT 7-cyano-7-deazaguanine synthase OS=Opitutus sp. GAS368; OX = 1882749 GN=queC PE=3 SV=1
MKVVVLCSGGMDSVTALHWARAHHTVAAVLSFDYAAKHNHREIPFAVEHASLVGAPHQTVPLDFIGKLFTSDLLVSGGDIPEGHYEDGNMKRTVVPFRNGIMLAAACGFAESARADGLVIAAHGGDHAIYPDCREDFMCAMGEAMKSGTYAGIQLLRPFITMTKAGIAAEGARLGVDFARTWSCYKGGEVHCGRCGTCVERREAFQLAGMPDPTKYESTPPLPRGPAV

SEQ ID NO: 40312 - protein, 225 aa, Opitutus sp.
  REGION 1..225: note = tr|A0A2T6D893|A0A2T6D893_9BACT 7-cyano-7-deazaguanine synthase OS=Opitutus sp. ER46; OX = 2161864 GN=queC PE=3 SV=1
MHRVKVIVLCSGGMDSVTALHAAHAAHEVVAALSFDYGSKHNHREIPFAAEHAAHLGVRHEVIRLDFVDRLFASDLLRSGGDVPEGHYAAANMKRTVVPFRNAIMLSIACGFAESVGAEGLVIAAHTGDHTIYPDCREDFMRAMGDAMRLGTYAGIQLLRPFIALDKGGIAREGARLGVDFARTWSCYKGGELHCGVCGTCVERREAFAVAGLPDPTTYAAAPAR

SEQ ID NO: 40313 - protein, 220 aa, Opitutus terrae
  REGION 1..220: note = tr|B1ZWM2|B1ZWM2_OPITP 7-cyano-7-deazaguanine synthase OS=Opitutus terrae (strain DSM 11246 / JCM 15787 / PB90-1) OX=452637 GN=queC PE=3 SV=1
MDSVTALYWAAREHHVSAVVSFDYGSKHNPKELPFAAEHAARLGARHEVIHLDFVNRLFASALLQRGGAIPDGHYEAENMKQTVVPFRNAILLSIACGLAESVGAEGLVIAAHGGDHAIYPDCREEFMRAMGEAMALGTYAGIRLLRPFIAKNKAQIAAEGARLGVDFARTWSCYKGGPVHCGTCGTCVERREAFAEAGLADPTVYASQPTLPERPKEVD

SEQ ID NO: 40314 - protein, 223 aa, Orbus hercynius
  REGION 1..223: note = tr|A0A495RCQ8|A0A495RCQ8_9GAMM 7-cyano-7-deazaguanine synthase OS=Orbus hercynius; OX = 593135 GN=queC PE=3 SV=1
MMTQNKKALVIFSGGQDSTTCLIQAIKHYGANQVEAISFNYGQRHKVELECAVAITKHFGVGHTIIDTVTLQQTTHNALLDNTCQVSAAKDDEKYPNTFVDGRNALFLLLAGCHAKQKGIHDIILGVCETDYSGYPDCRDIFVKSMNVTMNLAMDYPFNLITPLMYLTKAQTWALADDLGYLDYVKHNTHTCYNGTINGCGHCPSCLLRQQGLSEYLQQKRNN

SEQ ID NO: 40315 - protein, 224 aa, Orenia marismortui
  REGION 1..224: note = tr|A0A4R8HB75|A0A4R8HB75_9FIRM 7-cyano-7-deazaguanine synthase OS=Orenia marismortui; OX = 46469 GN=queC PE=3 SV=1
MKKAVVLLSGGLDSTTALYLAKSKGYDLYAISFNYGQRHDKELDCAKNIAEMVDVSEHIIVDTNMRAWGGSALTDSNIEVPEGKQDNNEIPVTYVPARNMLFLSYAASYAEVIGAQDIFIGVSEVDYSGYVDCRQEFLDAMENAINKGTVCGAEEGRPIKIHAPFINMTKAEEIKLGMELGVDYSLTWSCYRGEGNACGSCDSCVLRLQAFEEAGYEDPVEYQD

SEQ ID NO: 40316 - protein, 224 aa, unidentified
  source 1..224: note = Orenia metallireducens
  REGION 1..224: note = tr|A0A1C0ACI1|A0A1C0ACI1_9FIRM 7-cyano-7-deazaguanine synthase OS=Orenia metallireducens; OX = 1413210 GN=queC PE=3 SV=1
MKKAVVLLSGGLDSTTALYLAKSKGYEVYAISFDYGQRHDKELQSAKNVAEVAGVKEHIIVETNMGAWGGSALTDQSIDVPEGDEQRKEIPVTYVPARNMIFLSYAASYAEVVGAQDVFIGVSEVDYSGYVDCRQEFINAMEQAINKGTVCGAEEGKPIKIHAPFINMTKAEEIKLGIKLGVDYAQTWSCYCGEEQACGSCDSCVLRLKAFEEAGHIDPLKYQD

SEQ ID NO: 40317 - protein, 223 aa, unidentified
  source 1..223: note = Orenia metallireducens
  REGION 1..223: note = tr|A0A285GVQ7|A0A285GVQ7_9FIRM 7-cyano-7-deazaguanine synthase OS=Orenia metallireducens; OX = 1413210 GN=queC PE=3 SV=1
MKKAVVLLSGGLDSTTALYLAKSKGYEVYAISFNYGQRHDKELESAKKVAEVAGVKEHIIVETNMSAWGGSALTDQRIDVPEGDEKRKEIPVTYVPARNMIFLSYAASYAEVVGAQDVFIGVSEVDYSGYVDCRQEFIDAMEEAINKGTVCGAEEGKPIKIHAPFINMTKAEEIKLGMKLGVDYSQTWSCYRGEEQACGSCDSCVLRLKAFKEAGYDDPVIYK

SEQ ID NO: 40318 - protein, 228 aa, Oribacterium sp.
  REGION 1..228: note = tr|A0A1H3XMI3|A0A1H3XMI3_9FIRM 7-cyano-7-deazaguanine synthase OS=Oribacterium sp. KHPX15; OX = 1855342 GN=queC PE=3 SV=1
MKAMVLLSGGVDSTTALGMAVDKYGKDNVIALTVSYGQKHDKEVNAATAVAKHYGVEHLFLDLKKIFEYSNCSLLKQSTEEIPEESYAKQIEETGGKVPVSTYVPFRNGLFLSSAASLALSKDCGVIYYGAHSDDAAGSAYPDCSPVFNEHMSAAIWEGSGHQLKIEAPFVNITKKDVVKIGLDLKVPYELTWSCYEGGDKPCRKCGTCIDREAAFEANGVVDPLLAE

SEQ ID NO: 40319 - protein, 227 aa, Oribacterium sp.
  REGION 1..227: note = tr|A0A1S9BSW2|A0A1S9BSW2_9FIRM 7-cyano-7-deazaguanine synthase OS=Oribacterium sp. C9; OX = 1943579 GN=queC PE=3 SV=1
MQVMVLLSGGVDSTTALGIAVDKYGKENVIALSVMYGQKHDKEIGAAEAVAKHYGVEHLYLDLSKIFQYSDCSLLKQSDEAIPEISYAEQIKETKGEVPVSTYVPFRNGLFLSSAASIALSKGCSLIYYGAHADDAAGFAYPDCSDAFVNAMNEAIWEGSGHQLKIEAPFVKVNKSNIVKMGLDLKVPYELTWSCYEGGEKPCGKCGTCIDRAAAFAANGVEDPALK

SEQ ID NO: 40320 - protein, 232 aa, unidentified
  source 1..232: note = Oricola cellulosilytica
  REGION 1..232: note = tr|A0A4R0PFD9|A0A4R0PFD9_9RHIZ 7-cyano-7-deazaguanine synthase OS=Oricola cellulosilytica; OX = 1429082 GN=queC PE=3 SV=1
MKTVVVCSGGLDSVALAHRIAAENELAGLVSFDYGQRHRKELGFAALCAERLGAPHQIVDIGDIGRSLSGSALTDDVAVPDGHYAEETMRSTVVPNRNAIMLAITFGIASARGLDAVATAVHGGDHFIYPDCRPGFINAFQKMQDHALDGYSEITLLAPYVHQPKSAIVLDGARHGTPFALTWSCYKGGERHCGRCGTCVERREAFHLAGVPDETDYADPDFWRAAIDARSA

SEQ ID NO: 40321 - protein, 241 aa, unidentified
  source 1..241: note = Orrella dioscoreae
  REGION 1..241: note = tr|A0A1C3K491|A0A1C3K491_9BURK 7-cyano-7-deazaguanine synthase OS=Orrella dioscoreae; OX = 1851544 GN=queC PE=3 SV=1
MSAPSPAVLSAERRALVLFSGGQDSSTCLAWALSRYAHVETVAFDYGQRHRIELDARLEVLAGVRAQFPEWAARLGEDHLLDLGVLGQVSDTALTQDRAIEMQANGLPNTFVPGRNLLFLTLAAALGYRRGLDVLVGGMCETDFSGYPDCRDDTIKAQQVALGLGMGTRVLIETPLMWLDKAQTWALARALGGDALVDLIVERSHTCYLGERGARHGWGYGCGTCPACALRAQGWLKWRQA

SEQ ID NO: 40322 - protein, 241 aa, unidentified
  source 1..241: note = Oryzisolibacter propanilivorax
  REGION 1..241: note = tr|A0A1G9UF61|A0A1G9UF61_9BURK 7-cyano-7-deazaguanine synthase OS=Oryzisolibacter propanilivorax OX=1527607 GN=queC PE=3 SV=1
MTAAGAASAPGARRALVLLSGGQDSATCLAWALARYAEVETIGFDYGQRHRVELQARQVLRARLQEMPWPGRLGPDHLLPVDVLRHLGATAMTEDIAIAVQHDGLPNTFVPGRNLLFFTLAAALAYRRGLQVLVGGMSETDFSGYPDCRDNTLKALQVALSLGVDRPLVIETPLMWRDKAQAWELAHELGGDALVELIRAETHTCYIGRHDALHDWGHGCGACPACELRARGWQAWQAGPT

SEQ ID NO: 40323 - protein, 234 aa, unidentified
  source 1..234: note = Oryzomicrobium terrae
  REGION 1..234: note = tr|A0A5C1E4B3|A0A5C1E4B3_9RHOO 7-cyano-7-deazaguanine synthase OS=Oryzomicrobium terrae; OX = 1735038 GN=exsB PE=3 SV=1
MIDSASPATPPKAVILLSGGLDSATVLAIAREQGYACYCLSVDYGQKHRAELDAAVRVAKALGAIEHRVAKIDIGQFGGSALTDPTLAVPTDGVQPGIPITYVPARNTILLALSLAWAEVLDARHVFVGVNAVDYSGYPDCRPAFVQAFENLANLATKAAVEGAKLTVHAPLIDLSKADIVRAGTRLGVDYGLTVSCYQADDAGRACGSCDACRLRREGFAAAGLADPTHYQNA

SEQ ID NO: 40324 - protein, 228 aa, Oscillatoria acuminata
  REGION 1..228: note = tr|K9THK0|K9THK0_9CYAN 7-cyano-7-deazaguanine synthase OS=Oscillatoria acuminata PCC 6304 OX=56110; GN = queC PE=3 SV=1
MKAVILLSGGLDSSTVLYQAKADGCTCYAMSFDYQQRHRRELEAARAIAQSAGVAEHQIVSFDLRQWGGSALTDDKIDLPCDRSVEEMGQSIPITYVPARNTIFLSFALAYAEATDAHRVYIGVNAIDYSGYPDCRPDYIQAMQNVFRLGTKQGRESEATEIVTPLIELKKTEIIQLGNRLGVPWEKTWSCYAGGDRPCGVCDSCQLRLAAFAELGLTDPLPYLQRGS

SEQ ID NO: 40325 - protein, 224 aa, unidentified
  source 1..224: note = Oscillatoria nigroviridis
  REGION 1..224: note = tr|K9VRL6|K9VRL6_9CYAN 7-cyano-7-deazaguanine synthase OS=Oscillatoria nigro-viridis PCC 7112 OX=179408; GN = queC PE=3 SV=1
MKAVILLSGGLDSSTVLYQAKADGCECYAISFDYKQRHRRELESARAIALSAGVKAHQIVNFDLTLWGGSALTDNEMELPIDRNLAEMSQNIPITYVPARNTIFLSFALAYAETLEADRIYIGVNALDYSGYPDCRLDYIQAMQEVFRLGTKQGREGEPIKIITPLIELKKTEIIQLGNKLGVPWEQTWSCYAGGENACGVCDSCRLRLAAFEELGLKDPVPYA

SEQ ID NO: 40326 - protein, 484 aa, unidentified
  source 1..484: note = [Oscillatoria] sp.
  REGION 1..484: note = tr|D8FT54|D8FT54_9CYAN Uncharacterized protein; OS = [Oscillatoria] sp. PCC 6506 OX=272129 GN=OSCI_10011; PE = 4 SV=1
MNYEPSIEQNFHDSDRRVYTLHFEPVVNSNGSVHFIDHSQGKELSVGINVDDEEFQYRVKADFPSVIADLIDLAVAIHAADRLAGQDLHREQRCLYVILPVRHPELLSAEPFRIKLEELLEWTTGSEWVFDFQKRIVPGRSVEQHSAIPTVPRGCEVALWSGGLDALAGLYTRLQMYPEKSFVLFGTGSSNTVYARQERVAKKVQSIFPGRCHLFRVPIRFHDSDVQQKNKCSRARGVVFTLLGAACAYLMEQRILCVYENGIGAINLPYRASAVGLDHSRSVHPLTLLMVGDVVSELLGEEFCVQNPFLFWTKAQMCKALAKDRRHDLPSLTMSCDSPHRQRPVQCGYCSSCLLRRQALAAADIKDKTRYVVLHGKRSVKEPSLYFLNMLEQVRTFRRLPRFSDEPGLQWEAMTREFSVLDDIVDRSAVAENLLPADMRSRLIQLYHTYVSEWEAVESKIAAGLLNKCSDQQISGSLVAAQQG

SEQ ID NO: 40327 - protein, 231 aa, unidentified
  source 1..231: note = [Oscillatoria] sp.
  REGION 1..231: note = tr|D8G007|D8G007_9CYAN 7-cyano-7-deazaguanine synthase OS=[Oscillatoria] sp. PCC 6506 OX=272129 GN=queC; PE = 3 SV=1
MKAVVLLSGGLDSSTVLYQAQADGCESYTISFDYQQRHLRELESAKAIALSAGVVKHQVVSFDLSLWGGSALTDNKIDFPRDRTLAQMSESIPITYVPARNTIFLSFALAWAETLNADRIYIGVNALDYSGYPDCRPDYIQAMQEVFRLGTKQGREGNPISILTPLIDLKKTEIIKLGNHLGVPWEKTWSCYAGGELACGLCDSCRLRVAAFEELGLTDPLPYVENYNTQK

SEQ ID NO: 40328 - protein, 229 aa, unidentified
  source 1..229: note = Oscillatoriales cyanobacterium
  REGION 1..229: note = tr|A0A1C0V2X0|A0A1C0V2X0_9CYAN 7-cyano-7-deazaguanine synthase OS=Oscillatoriales cyanobacterium USR001 OX=1880991 GN=queC PE=3 SV=1
MKAVILLSGGLDSSTVLYQAQADGWESYAISFDYQQRHRRELESAKAIAHSAGINQHQIVSFDLTLWGGSALTDRKIDYPRDRTLDRMSETIPITYVPARNTIFLSFALAWAETLNAQRIYIGVNALDYSGYPDCRPDYIQAMQEVFRLGTKQGIEGNPISIVAPLINLKKTEIIKLGNKLGVPWEKTWSCYAGGEIACGLCDSCRLRLAAFEELGLKDPLSYAQNTNT

SEQ ID NO: 40329 - protein, 237 aa, unidentified
  source 1..237: note = Oscillatoriales cyanobacterium
  REGION 1..237: note = tr|A0A1J5GKE8|A0A1J5GKE8_9CYAN 7-cyano-7-deazaguanine synthase OS=Oscillatoriales cyanobacterium CG2_30_40_61 OX=1805291 GN=queC PE=3 SV=1
MKAVILLSGGLDSSTVLYQAKADGCECYAISFDYQQRHRKELESARKIAEFAGVVEHQVVTFDLSLWGGSALTDNRLDLPQNRSSEIMAKTIPITYVPARNTIFLSFALAYAEAIAASKIYIGVNALDYSGYPDCRPDYIQAIEEVFRLGTKQGREGDPITIESPLIHLKKTEIIKLGNRLGVPWEFTWSCYAGEEQACGVCDSCRLRLAAFAELELIDPIAYIADGNREQGTGNRE

SEQ ID NO: 40330 - protein, 45 aa, Oscillibacter sp.
  REGION 1..45: note = tr|A0A316T722|A0A316T722_9FIRM Uncharacterized protein OS=Oscillibacter sp. OX=1945593 GN=DBX95_02885; PE = 4 SV=1
MKAFILLSGGIDSMACVNFYKALNYEVECIFCDYGQPASISEKQV

SEQ ID NO: 40331 - protein, 229 aa, unidentified
  source 1..229: note = Osedax symbiont
  REGION 1..229: note = tr|S6GLE0|S6GLE0_9GAMM 7-cyano-7-deazaguanine synthase OS=Osedax symbiont Rs2 OX=1330035 GN=queC PE=3; SV = 1
MNKAKNRRAVVLLSGGLDSATVLAMATRQGYDCYVLSFDYGQRSVVELDAAKELAKSAGAIEHKVLRMPLEDFGGSALTDTSIDMPADGPQESEIPVTYVPARNTVFLSLALGWAEVLEADAIFIGVNSVDYSGYPDCRPAFIEAFEVLANLATRAGVEGNKLSIETPLMDMTKGQIIEQGIALGIDYKQTVSCYQADQRGYACNKCDSCKLRREGFEQVGIEDQTNYF

SEQ ID NO: 40332 - protein, 231 aa, unidentified
  source 1..231: note = Osedax symbiont
  REGION 1..231: note = tr|S6GKI6|S6GKI6_9GAMM 7-cyano-7-deazaguanine synthase OS=Osedax symbiont Rs1 OX=1330036 GN=queC PE=3; SV = 1
MMNSKKQKAVILLSGGLDSATVLAMATAQGYACYVLSFDYGQRSIVELQAAIKLAKIAAAVEHKILHMPLEDFGGSALTDTSIAMPSAEKVSTSEIPVTYVPARNTVFLSLALGWAEVIEANCIFIGVNSVDYSGYPDCRPDFIDAFEKMANLATRAGVEGNKLTIETPLMHLTKGQIITKGLALGVDYKATVSCYQADSQGNACDNCASCKLRKEGFIQAGIDDQTNYFK

SEQ ID NO: 40333 - protein, 229 aa, unidentified
  source 1..229: note = Osedax symbiont
  REGION 1..229: note = tr|A0A1Y5HG40|A0A1Y5HG40_9BACT 7-cyano-7-deazaguanine synthase OS='Osedax' symbiont bacterium Rs2_46_30_T18 OX=1856298 GN=queC PE=3 SV=1
MNKVKKPRAVVLLSGGLDSATVLAMATRQNYDCYVLSFDYGQRSVVELDAAKELAKGAGAIEHKVLRMPLEDFGGSALTDTSIDMPEDGPQESEIPVTYVPARNTVFLSLALGWAEVLEADAIFIGVNSVDYSGYPDCRPAFIQAFEAVANLATRAGVEGSKLTIETPLMDMTKAQIIEQGIALGIDYKQTVSCYQADQRGYACNNCDSCKLRREGFEQAGIDDQTNYF

SEQ ID NO: 40334 - protein, 219 aa, unidentified
  source 1..219: note = Otariodibacter oris
  REGION 1..219: note = tr|A0A420XGU0|A0A420XGU0_9PAST 7-cyano-7-deazaguanine synthase OS=Otariodibacter oris; OX = 1032623 GN=queC PE=3 SV=1
MNEIKKAAVIFSGGQDSTTCLFLAIQEFGVENVEVITFQYGQRHAIELEKAAWIAQDLGVKQTLIDTSVIKSITTNALMDSSATIKQEGDKPNTFVDGRNALFLLYAAIYAKSQNIHTIFTGVCETDFSGYPDCRDVFIKSMNVTLNLAMDYNFNIRTPLMYLTKKETWKLADDLGAFEYIKNHTHTCYLGVEGGCHTCPSCVLREKGLNEYLQERDNV

SEQ ID NO: 40335 - protein, 251 aa, unidentified
  source 1..251: note = Ottowia oryzae
  REGION 1..251: note = tr|A0A2S0MDZ7|A0A2S0MDZ7_9BURK 7-cyano-7-deazaguanine synthase OS=Ottowia oryzae; OX = 2109914 GN=queC PE=3 SV=1
MHDSALVLFSGGQDSTTCLADALSRYRRVETVGFDYGQRHHVEMRQRLMVRRVLQARFPEWRARLGEDHVIDLNVLGQISETALTRDSAIALAGSGLPNTFVPGRNLVFLAFAGALAYRRGLQVIVAGVCETDYSGYPDCRDDTMKAMQLALSLGMDRRLVIETPLMWIDKAATWAMAHALGQAADPHGGGDALVDILLEHTHTCYHAERDQRHEWGYGCGQCPACALRAAGWKGWRQALGGASAAPAARA

SEQ ID NO: 40336 - protein, 243 aa, Ottowia sp.
  REGION 1..243: note = tr|A0A5C7VLL7|A0A5C7VLL7_9BURK 7-cyano-7-deazaguanine synthase OS=Ottowia sp. OX=1898956; GN = queC PE=3 SV=1
MHTRALVLFSGGQDSTTCLADALTRFEHVETIGFDYGQRHHVELAQRTVVLREMRSRFADWAARLGDDHLIDVGVLGQISETSLTRELAFEMQASGLPNTFVPGRNLVFLTLAGALAYRRGLDTLVTGVCETDYSGYPDCRDDTMKAMQLALSLGMDRRLLIDTPLMWRDKAQTWQLAHALGQQADAQGGGDALVDLIVEHTHTCYVGDRAQRHAWGYGCGACPACELRAAGWARWQAGRGAR

SEQ ID NO: 40337 - protein, 245 aa, Ottowia sp.
  REGION 1..245: note = tr|A0A5C8J240|A0A5C8J240_9BURK 7-cyano-7-deazaguanine synthase OS=Ottowia sp. GY511; OX = 2603274 GN=queC PE=3 SV=1
MHDSALVLFSGGQDSTTCLADALSRFRRVETVGFDYGQRHNAELAQRAVVRHELQARFPAWRERLGDDHVIDLQVLGQISDTALTRDTAIAMADSGLPNTFVPGRNLVFLTFAGALAYRRGLQVIVTGVCEADYSGYPDCRDDTMKAMQLALSLGMDRRVVIDTPLMWIDKAATWQLAHALGQQADPAGGGEALVDVIVEHSHTCYAGDRSQRHAWGYGCGVCPACELRAAGWQRWRAGPAPSAV

SEQ ID NO: 40338 - protein, 246 aa, Oxalobacter formigenes
  REGION 1..246: note = tr|C3X5N3|C3X5N3_OXAFO 7-cyano-7-deazaguanine synthase OS=Oxalobacter formigenes HOxBLS OX=556268; GN = queC PE=3 SV=1
MNIPSLPPPVTRDKNALVLFSGGQDSTTCLAWALTHYNHVETVGFSYGQRHAVELEGRPRILEKLRQFSEKWNRRLGADHIVDLSLISHLSETAMTTEMEIRVMENGLPNTFVPGRNLMFLTAAAMLAYRRDLNTLVGGMCETDFSGYPDCRDDAVKALQVALNIGMDTRLALLTPLMWKNKKETWQMAFDLGGQKLIELIVSETHTCYIGEHNRLHEWGYGCGKCPACLLRKRGFMEYQSEKKPI

SEQ ID NO: 40339 - protein, 246 aa, Oxalobacter formigenes
  REGION 1..246: note = tr|C3XBV8|C3XBV8_OXAFO 7-cyano-7-deazaguanine synthase OS=Oxalobacter formigenes OXCC13 OX=556269; GN = queC PE=3 SV=1
MNTTRQNHSIESTKKALVLFSGGQDSTTCLAWALNHYDKVETIGFSYGQRHAVELTVRPGILQKIRNFSEEWNKKLGEDHVCDLSLISSLSETAMTSDVEIRMMENGLPNTFVPGRNLMFLMVAAMLAYRRDLNVLVGGMCETDFSGYPDCRDDAIKAMQLALNIGMDARLNLVTPLMWKNKKETWQLAAELGGQGLVDLIVNETHTCYVGEHDKLNTWGFGCGECPACLLRKKGFEEFISRGKPE

SEQ ID NO: 40340 - protein, 238 aa, Oxalobacter sp.
  REGION 1..238: note = tr|A0A3A6P053|A0A3A6P053_9BURK 7-cyano-7-deazaguanine synthase OS=Oxalobacter sp.; OX = 2093374 GN=queC PE=3 SV=1
MTDHARALVLFSGGQDSTTCLAWALSRYAHVETIGFDYGQRHIVELTVRPTILEKLRELSPDWARKLGEDHLIALPVISTVSECALTRDVAIAIQDNGLPNTFVPGRNLLFLTVAAMLAYRRGLTVLVGGMCETDFSGYPDCRDGTLKALQVALNLGMATDLALETPLMWLGKAQTWQLAQEVGGEALVNLIRDETHTCYLGERHWHDWGRGCGECPACALRMKGYREFMQHLTEDLT

SEQ ID NO: 40341 - protein, 235 aa, unidentified
  source 1..235: note = Oxalobacteraceae bacterium
  REGION 1..235: note = tr|F1W321|F1W321_9BURK 7-cyano-7-deazaguanine synthase OS=Oxalobacteraceae bacterium IMCC9480 OX=937450; GN = queC PE=3 SV=1
MTLPNGALVLFSGGQDSTTCVAWALQRYARVETIGFDYGQRHAIEMTVRPDVLASLRTQSPDWDHRLGEDHVIDLSLIGKISDTALTSNVEIAMLENGLPNTFVPGRNLLFMMVAATLAYRRGLDVLVGGMCETDFSGYPDCRDDTMKALQVTLNLGMATRLKLETPLMWIDKAATWALAESLGGDTLVDLIRTGTHTCYLGERGALHDWGYGCGTCPACALRAKGYAGYRQREG

SEQ ID NO: 40342 - protein, 198 aa, unidentified
  source 1..198: note = Oxalobacteraceae bacterium
  REGION 1..198: note = tr|A0A4Q3IJ04|A0A4Q3IJ04_9BURK 7-cyano-7-deazaguanine synthase (Fragment); OS = Oxalobacteraceae bacterium OX=1871070 GN=EOO80_17290; PE = 3 SV=1
FDYGQRHAIELAVRPGVLAKLRALNPDWDTRLGEDHMIDLSLISKISDTALTSNVAIEMQENGLPNTFVPGRNLMFMTVAATVAYRRGLNVLVGGMCETDFSGYPDCRDDTMKALQVALNLGMATRLKVETPLMWIDKAQTWELAEQEGGAALVDLIRFDTHTCYLGERGEAHAWGHGCGTCPACALRARGYAQYVAR

SEQ ID NO: 40343 - protein, 233 aa, Pacificibacter maritimus
  REGION 1..233: note = tr|A0A3N4UVC8|A0A3N4UVC8_9RHOB 7-cyano-7-deazaguanine synthase OS=Pacificibacter maritimus OX=762213 GN=queC PE=3 SV=1
MKTIVICSGGLDSVSLAHMVAQEHQLTRLVSFDYGQRHRKELDFAALCAERLGVPHNIIDLRSIGAVLTGSALTDDIDVPDGHYEEDSMRVTVVPNRNAIMLTVAFGFAAAQGDEAVATAVHGGDHFIYPDCRPAFTESFEKMQKFALDGYANVALHTPFVHQSKADIVTAGARYNTPFDLTWSCYKGGAQQCGRCGTCVERREAFHLAGVTDPTSYADPDFWTAALARQAGV

SEQ ID NO: 40344 - protein, 223 aa, unidentified
  source 1..223: note = Pacificimonas flava
  REGION 1..223: note = tr|M2SCM3|M2SCM3_9SPHN 7-cyano-7-deazaguanine synthase OS=Pacificimonas flava OX=1234595 GN=queC PE=3; SV = 1
MLLSGGLDSTTCAASARADGFDVLALTIDYNQRHRVELEAAARAAAACDAVRHVVLPLDLSVFGGSSLTSDMPVPKGDGKMSDSVIPPTYVPARNTVFLSVALAWAEAAGARDIYIGVNALDYSGYPDCRPEFIRGFESLAEKATKAGDEGEAFRIRTPLLDLDKAGIARLADRLGVDAGATWTCYDPVMRGGEALHCGRCDACRLRHKGFVEAGLPDPTRYA

SEQ ID NO: 40345 - protein, 229 aa, unidentified
  source 1..229: note = Pacificimonas flava
  REGION 1..229: note = tr|A0A219B662|A0A219B662_9SPHN 7-cyano-7-deazaguanine synthase OS=Pacificimonas flava; OX = 1234595 GN=queC PE=3 SV=1
MTRQAVVLLSGGLDSTTCAAQARADGFELLALTIDYNQRHRVELDAAARAAERFEARRHVVLPLDLSAFGGSALTSDMEVPKGEGEVDDSQIPSTYVPARNTVFLSVALAFAEASRARDIYIGVNALDYSGYPDCRPAFIKAFEDLAAQATKAGTEGDRFQVHTPLIDLDKAGIATLARQLGVDAGETWTCYDPVEKGGQVLHCGRCDACRLRHKGFVEAGLPDPTAYA

SEQ ID NO: 40346 - protein, 241 aa, unidentified
  source 1..241: note = Paenibacillaceae bacterium
  REGION 1..241: note = tr|A0A2A6DY25|A0A2A6DY25_9BACL 7-cyano-7-deazaguanine synthase OS=Paenibacillaceae bacterium JTherm OX=1906605 GN=queC PE=3 SV=1
MKKAVVVLSGGLDSTTCAALAREAGYELYPLTFDYGQRHRVELGAARKIAAYYGAADRHKIVRLDFFRDFGGSALTDDSIAVPERPDGAVPDDEIPVTYVPGRNLIFLSVAVSYAETIAAEAVYIGVNALDYSGYPDCRPEFVRSFEQTAALATKAGVGGRPVRIETPLVRMTKADIVREGVRLGVPFELTWSCYKGGDAPCGVCDSCLLRRKGFAEAGVRDPLEDKAGASYGVGDSGLRP

SEQ ID NO: 40347 - protein, 117 aa, unidentified
  source 1..117: note = Paenibacillaceae bacterium
  REGION 1..117: note = tr|A0A354DFH9|A0A354DFH9_9BACL 7-cyano-7-deazaguanine synthase (Fragment); OS = Paenibacillaceae bacterium OX=2003592 GN=DDY49_03185; PE = 3 SV=1
MKKKAVVVLSGGLDSTTCMGIARAEGYELYPLTFDYGQRHNREVEQAKKVASFFEVQDHRVVSLNFLNQIGGSALTDLNVDVPVNRDIDDEIPVTYVPARNLIFLSLATAFAEVVGA

SEQ ID NO: 40348 - protein, 222 aa, Paenibacillus agaridevorans
  REGION 1..222: note = tr|A0A2R5F028|A0A2R5F028_9BACL 7-cyano-7-deazaguanine synthase OS=Paenibacillus agaridevorans OX=171404 GN=queC PE=3 SV=1
MKLEKAVVVFSGGQDSTTCLFWAMSRFSEVEAITFDYGQRHKLELDCAAEIAGTLGIKHHILDMSLLNQLAPNALTRDDIAIEQKEGELPTTFVDGRNLLFLTFAAVLAKGIGAKHIVTGVCETDFSGYPDCRDVFIKSLNVTLNLSMDYGFVIDTPLMWLNKAETWELADELGAFDFVRERTLTCYNGMLADGCGECPACKLRRKGLADYLAIRGSREAGR

SEQ ID NO: 40349 - protein, 237 aa, Paenibacillus algorifonticola
  REGION 1..237: note = tr|A0A1I2IQ13|A0A1I2IQ13_9BACL 7-cyano-7-deazaguanine synthase OS=Paenibacillus algorifonticola OX=684063 GN=queC PE=3 SV=1
MTATQKAQQNQAASGGQAVKKAVVVFSGGQDSTTCLFWALKRYDVVEAVTFNYGQRHKLELDSAAQIAEELGVKHHVLDMSLLNQLAPNALTRDDIAIEQKEGGLPTTFVDGRNLLFLSFAAILAKQIGAHTVVTGVCETDFSGYPDCRDIFIKSTNVTLNLAMDYPFVIETPLMWLNKAQTWQLADELGAFDFVRNKTLTCYNGIIADGCGECPACKLRSQGLQQYLSSRKEDVAE

SEQ ID NO: 40350 - protein, 254 aa, Paenibacillus alvei
  REGION 1..254: note = tr|K4ZQT9|K4ZQT9_PAEA2 7-cyano-7-deazaguanine synthase OS=Paenibacillus alvei (strain ATCC 6344 / DSM 29 / NBRC 3343 / NCIMB 9371 / NCTC 6352) OX=1206781 GN=queC; PE = 3 SV=1
MKKDQEQMNNNQAASADGRHWDASNRRHAQSERKQGKAVVVFSGGQDSTTCLFWALQRFEEVETITFDYGQRHKSELEHAKAIAGKLGVPHRILDMSLLNQLAPNALTRDDIAIEQEEGELPSTFVEGRNLLFFSFAAVYAKQIGARHIVTGVCETDFSGYPDCRDVFVKSLNVTLNLAMDYGFVLHTPLMWLDKADTWRLADQLGAFDFVRTETVTCYNGLPGDGCGECPSCKLRQAGLERYLADREQEGGIS

SEQ ID NO: 40351 - protein, 255 aa, Paenibacillus alvei
  REGION 1..255: note = tr|A0A383RJ14|A0A383RJ14_PAEAL 7-cyano-7-deazaguanine synthase OS=Paenibacillus alvei; OX = 44250 GN=queC PE=3 SV=1
MKQANEQVCNNHVSSAGEAAWNADSHSQAHAGRKQGKAVVVFSGGQDSTTCLFWALQRFEEVETITFDYGQRHKSELEHAKAIAGKLGVPHRILDMSLLNQLAPNALTRDDIAIEQEEGELPSTFVEGRNLLFFSFAAVYAKQIGARHIVTGVCETDFSGYPDCRDVFVKSLNVTLNLAMDYGFVLHTPLMWLDKADTWRLADELGAFDFVRTETVTCYNGLPGDGCGECPSCKLRKAGLERYLMERKQEEGASR

SEQ ID NO: 40352 - protein, 226 aa, Paenibacillus amylolyticus
  REGION 1..226: note = tr|A0A4R5ZCU7|A0A4R5ZCU7_PAEAM 7-cyano-7-deazaguanine synthase OS=Paenibacillus amylolyticus OX=1451 GN=queC PE=3 SV=1
MNEEKAVVVFSGGQDSTTCLFWAKQQFAEVEVVTFDYGQRHKLEIECAAEIARDLGVQQTVLDMSLLNQLAPNALTRTDVEITHEEGELPSTFVDGRNLLFLSFAAIMAKQKGARHLVTGVCETDFSGYPDCRDSFVKSMNVTLNLSMDYPFVIHTPLMWLDKAQTWKMADDLGAFDYVRERTLTCYNGVIGDGCGDCPACKLRKAGLDRYVQQRTAAESAGVDVR

SEQ ID NO: 40353 - protein, 225 aa, Paenibacillus amylolyticus
  REGION 1..225: note = tr|A0A1R1BX80|A0A1R1BX80_PAEAM 7-cyano-7-deazaguanine synthase OS=Paenibacillus amylolyticus OX=1451 GN=queC PE=3 SV=1
MNEEKAVVVFSGGQDSTTCLFWAKQQFAEVEVVTFDYGQRHKLEIECAAEIARDLGVQQTVLDMSLLNQLAPNALTRTDVEITHEEGELPSTFVDGRNLLFLSFAAIMAKQKGARHLVTGVCETDFSGYPDCRDSFVKSMNVTLNLSMDYPFVIHTPLMWLDKAQTWKMADDLGAFDYVRERTLTCYNGVIGDGCGECPACKLRKAGLDRYVQQRTAAESAGVDV

SEQ ID NO: 40354 - protein, 225 aa, Paenibacillus antarcticus
  REGION 1..225: note = tr|A0A162QFW1|A0A162QFW1_9BACL 7-cyano-7-deazaguanine synthase OS=Paenibacillus antarcticus OX=253703 GN=queC PE=3 SV=1
MTNDKAVVVFSGGQDSTTCLFWALKNFSEVETITFDYGQRHKLEIECATSIAADLGVKQTILDMSLLNQLAPNALTRHDVDITHDEGQLPNTTVDGRNLLFMSFAAIVAKQVGARHLITGVCETDFSGYPDCRDVFIKSLNVTLNLSMDYGFVIHTPLMWLNKAQTWQMSDELDAFNYIQERTLTCYNGIIGVGCGECPACKLRQAGLDQYLDTRKDSSSTQGGA

SEQ ID NO: 40355 - protein, 220 aa, unidentified
  source 1..220: note = Paenibacillus aquistagni
  REGION 1..220: note = tr|A0A1X7LZV1|A0A1X7LZV1_9BACL 7-cyano-7-deazaguanine synthase OS=Paenibacillus aquistagni OX=1852522 GN=queC PE=3 SV=1
MKQEKAVVVFSGGQDSTTCLFWALERFAHVEAISFDYGQRHRTELEHASRIAEELHIPHCILDMSLLNQLAPNALTRADMEIKEEEGKLPNTFVDGRNMVFFTFAAIYAKQMGARHIVVGVCETDFSGYPDCRDVFIKSLDVTLNLAMDYPFVIHTPLMWLDKAATWKLADELGALSFVREKTVTCYNGIAGDGCGECPACRLRMAGLEKYLLEREEVQQ

SEQ ID NO: 40356 - protein, 221 aa, unidentified
  source 1..221: note = Paenibacillus baekrokdamisoli
  REGION 1..221: note = tr|A0A3G9IYW3|A0A3G9IYW3_9BACL 7-cyano-7-deazaguanine synthase OS=Paenibacillus baekrokdamisoli OX=1712516 GN=queC PE=3 SV=1
MQSNKAIVVFSGGQDSTTCLFKAMKEFDTVEAVTFDYGQRHKLELECAARIAAEFNIQQHVLDMSLINQLAPNALTRTDIAIEQKEGELPSTFVDGRNLLFLSFAAVLAKQKGAKHIITGVSQSDFSGYPDCRDVFIKSLNVTINLAMDYEFVIDTPLMWLTKAQTWQLADDLGAYDYVKNNTLTCYEGIIADGCGECPACLLRARGVDQYEAARREGRRL

SEQ ID NO: 40357 - protein, 231 aa, Paenibacillus barcinonensis
  REGION 1..231: note = tr|A0A2V4VQD6|A0A2V4VQD6_PAEBA 7-cyano-7-deazaguanine synthase OS=Paenibacillus barcinonensis OX=198119 GN=queC PE=3 SV=1
MLNEEKAVVVFSGGQDSTTCLFWAKQQFAEVEVVTFDYGQRHKLEIECAAAIAKDLGVQQTVLDMSLLNQLAPSALTRSDVEITHEEGELPSTFVDGRNLLFLSFAAILAKQKGARHLVTGVCETDFSGYPDCRDSFVKSMNVTLNLSMDYPFVIHTPLMWLDKAATWKMADELGAFDYVRERTLTCYNGVIGDGCGECPACKLRQAGLDRYVQERMSALEAASSIGVDVR

SEQ ID NO: 40358 - protein, 222 aa, Paenibacillus barengoltzii
  REGION 1..222: note = tr|R9L9J5|R9L9J5_9BACL 7-cyano-7-deazaguanine synthase OS=Paenibacillus barengoltzii G22 OX=1235795; GN = queC PE=3 SV=1
MLKKEKAVVVFSGGQDSTTCLFWAIQQFGEVEAVTFDYGQRHKLEIECAKSITAELGIKHTVLDMSLLGQLTANALTRSDIAIEHQEGELPSTFVDGRNHLFLSFAAVLAKGVGAKHIVTGVCETDFSGYPDCRDVFVKSLNVTLNLAMDYEFVIHTPLMWIDKAETWKLADELGAFDFVRERTLTCYNGIIGDGCGECPACKLRKAGLDKYLQERQEANSR

SEQ ID NO: 40359 - protein, 234 aa, unidentified
  source 1..234: note = Paenibacillus beijingensis
  REGION 1..234: note = tr|A0A0D5NJX1|A0A0D5NJX1_9BACL 7-cyano-7-deazaguanine synthase OS=Paenibacillus beijingensis OX=1126833 GN=queC PE=3 SV=1
MKEQKEKDKAIVVFSGGQDSTTCLFWAKERFRDIEAVTFNYGQRHAQELEVAAGIASDLGVKHHVLDMSLLNQLAPSALTREDIKVADAPKEGGLPSTFVDGRNLLFLSFAAVLAKGVGAKRIVTGVCETDFSGYPDCRNSFIQSLNVTLNLAMDYPFVIETPLMWLDKEQTWELADQLGAFDYVRERTLTCYNGVIADGCGECPACKLRRRGLDAYVSRRGAASAAGGSEGSR

SEQ ID NO: 40360 - protein, 220 aa, Paenibacillus borealis
  REGION 1..220: note = tr|A0A1R0YG63|A0A1R0YG63_9BACL 7-cyano-7-deazaguanine synthase OS=Paenibacillus borealis; OX = 160799 GN=queC PE=3 SV=1
MNKKALVVFSGGQDSTTCLVWAIQHFEEVQVVTFNYNQRHAAEIEVAKEIAAKFNVKQHILDLGLLNQLAPNALTRDDIEIVSGEGDELPSTFVDGRNLLFLSFAAILAKQLGYANIVTGVCQTDFSGYPDCRDVFVKSLNVTLNLSMDYEFVIHTPLMWLDKKETWKMADELGQFDYIRQHTLTCYNGIIGSGCGTCPACLLRKRGLEQYVAERKKVGL

SEQ ID NO: 40361 - protein, 220 aa, Paenibacillus borealis
  REGION 1..220: note = tr|A0A089LFS1|A0A089LFS1_9BACL 7-cyano-7-deazaguanine synthase OS=Paenibacillus borealis; OX = 160799 GN=queC PE=3 SV=1
MNKKALVVFSGGQDSTTCLVWALQQFQEVQVVTFNYNQRHAAEIEVAKEIAAKFGVKQHILDLGLLNQLAPNALTRDDIEIAAGEGEELPSTFVDGRNLLFLSFAAILAKQLGYSNIITGVCQTDFSGYPDCRDVFVKSLNVTLNLSMDYEFVIHTPLMWLDKKETWKMADELGYFDYIREQTLTCYNGIIGSGCGTCPACLLRQRGLEQYEAERQGAGL

SEQ ID NO: 40362 - protein, 242 aa, unidentified
  source 1..242: note = Paenibacillus bovis
  REGION 1..242: note = tr|A0A172ZE87|A0A172ZE87_9BACL 7-cyano-7-deazaguanine synthase OS=Paenibacillus bovis; OX = 1616788 GN=queC PE=3 SV=1
MLKNEKAVVVFSGGQDSTTCLFWAKQTFAEVEVVTFNYGQRHSAEIEVAKQIAEELGVQQTILDMSLLNQLAPNALTRSDIEITQEEGELPSTFVDGRNLLFLSFAAILAKQKGARHLITGVCETDFSGYPDCRDIFVKSLNVTLNLSMDYDFVIHTPLMWLDKSETWKMADDLGAFQYIRENTLTCYNGIIGDGCGECPACKLRKAGLDKYVQERNAAPAARRIMIELDESDTSAARGGQQ

SEQ ID NO: 40363 - protein, 221 aa, unidentified
  source 1..221: note = Paenibacillus catalpae
  REGION 1..221: note = tr|A0A1I1Z9M9|A0A1I1Z9M9_9BACL 7-cyano-7-deazaguanine synthase OS=Paenibacillus catalpae; OX = 1045775 GN=queC PE=3 SV=1
MKKGKAVVVFSGGQDSTTCLFWALDRYEEVEAVTFNYGQRHALELECAAQIAAELGVRHHVLDMSLLNQLAPNALTRSDIEIEEKEGGLPTTFVDGRNLLFLSFAAVLAKQIGARAIVTGVCETDFSGYPDCRDIFIKSLNVTLNLSMDYPFVIETPLMWLDKAETWELADQLGAFEYVRTKTLTCYNGVIADGCGECPACKLRSQGLNRYLASKEEGKAE

SEQ ID NO: 40364 - protein, 236 aa, Paenibacillus cellulosilyticus
  REGION 1..236: note = tr|A0A2V2YEE7|A0A2V2YEE7_9BACL 7-cyano-7-deazaguanine synthase OS=Paenibacillus cellulosilyticus OX=375489 GN=queC PE=3 SV=1
MSETKKAVIILSGGLDSTTCMGFAKEAGYELYPITFDYGQRHRIELEKSQQVADFYSVSDRYKVIKLDFLRGIGGNALTDDSIAVPTATGIEQKDAEEAGNDIPVTYVPGRNFMFLAIATSFAEAVGAEAIYIGVNALDYSGYPDCRPDFIAKVQEAMALATKVGVEGKPITIETPLISLSKADIVREGMRMGVPYELTTSCYNGKEEACGECDSCMLRLKGFKEAGHKDPIPYAI

SEQ ID NO: 40365 - protein, 221 aa, Paenibacillus chitinolyticus
  REGION 1..221: note = tr|A0A410WRX3|A0A410WRX3_9BACL 7-cyano-7-deazaguanine synthase OS=Paenibacillus chitinolyticus OX=79263 GN=queC PE=3 SV=1
MKQEKAVVVFSGGQDSTTCLFWTLKHFGEVETLTFDYGQRHKLEIECAARIARELGVKNTVLDMSLLNQLAPNALTRGDIEIEEKEGELPSTFVEGRNLLFLSFAGVYAKVAGSRHLVTGVCETDFSGYPDCRDAFVKSLNVTLNLSMDYPFVIHTPLMWLNKAETWKLSDELGAFDFVRTKTLTCYNGIVGDGCGECPACKLRSAGLQNYLLEREGADAR

SEQ ID NO: 40366 - protein, 221 aa, Paenibacillus contaminans
  REGION 1..221: note = tr|A0A329MUB4|A0A329MUB4_9BACL 7-cyano-7-deazaguanine synthase OS=Paenibacillus contaminans OX=450362 GN=queC PE=3 SV=1
MNQSKAVVVFSGGQDSTTCLFWALERYVEVEAVTFDYGQRHKLEVECAAAIADELRAKHRIIDMSLLGQLAPNALTRNDIAIEQQEGALPTTFVDGRNMLFLTFAAVLGKQIGAKHIVSGVCETDFSGYPDCRDVFVKSLNVTLNLAMDYPFVLETPLMWLNKKETWELADRLGAFDFVRERTLTCYNGIMADGCGECPACVLRRKGLDDYSAVRIRGVLS

SEQ ID NO: 40367 - protein, 227 aa, unidentified
  source 1..227: note = Paenibacillus crassostreae
  REGION 1..227: note = tr|A0A167GR35|A0A167GR35_9BACL 7-cyano-7-deazaguanine synthase OS=Paenibacillus crassostreae OX=1763538 GN=queC PE=3 SV=1
MKNEKAIVVFSGGQDSTTCLFWAKKNYSEVETITFDYGQRHKLEIECAASIAQDVGVQQTVLDMSLLNQLAPNALTRHDVEISHEEGQLPNTFVDGRNLLFLSFAAIFAKQRGARHLITGVCETDFSGYPDCRDLFIKSLNVTLNLSMDYDFVIHTPLMWLNKAETWQLSDELGAFEYIQNRTLTCYNGIIGSGCGECPACKLRKTGLDQYLAMPKDGLSTQGGAQI

SEQ ID NO: 40368 - protein, 240 aa, Paenibacillus curdlanolyticus
  REGION 1..240: note = tr|E0IGC0|E0IGC0_9BACL 7-cyano-7-deazaguanine synthase OS=Paenibacillus curdlanolyticus YK9 OX=717606; GN = queC PE=3 SV=1
MADNKNKKAVIILSGGLDSTTCMGFAKEAGYELFPLTFDYGQRHRIELEKSRQVAEHYGVIDRYKVIKLDFLRNIGGSALTDEAIAVPKGTGVEQMDVEQAESEIPVTYVPGRNFMFLAIATSYAEAVGAEAIYIGVNALDYSGYPDCRPEFIAKVEEVMALATKVGVEGKPISIETPLIALSKADIVREGVRMGVPYELTTSCYNGEEEACGECDSCVLRLKGFSEAGHTDPIPYHKHG

SEQ ID NO: 40369 - protein, 111 aa, unidentified
  source 1..111: note = Paenibacillus darwinianus
  REGION 1..111: note = tr|A0A015M979|A0A015M979_9BACL 7-cyano-7-deazaguanine synthase (Fragment); OS = Paenibacillus darwinianus OX=1380763 GN=BG52_07380 PE=3; SV = 1
MTDKREKAVVVFSGGQDSTTCLFWALERFAAVEAVTFNYGQRHSRELECAAQIAQELSVKHHILDMSLLNQLAPNALTRDDIDIATGEGGLPTTFVDGRNLLFLSFAAVLA

SEQ ID NO: 40370 - protein, 109 aa, unidentified
  source 1..109: note = Paenibacillus darwinianus
  REGION 1..109: note = tr|A0A015KIK1|A0A015KIK1_9BACL 7-cyano-7-deazaguanine synthase (Fragment); OS = Paenibacillus darwinianus OX=1380763 GN=BG52_07385 PE=3; SV = 1
ARHIVTGVCETDFSGYPDCRDIFIKSLNVTLNLAMDYPFVVDTPLMWLDKAQTWELADRLGAFDFVRSRTLTCYNGIIADGCGECPACRLRRGGLEAYLERRGGNSGKA

SEQ ID NO: 40371 - protein, 241 aa, Paenibacillus dendritiformis
  REGION 1..241: note = tr|A0A2W4GN14|A0A2W4GN14_9BACL 7-cyano-7-deazaguanine synthase OS=Paenibacillus dendritiformis OX=130049 GN=queC PE=3 SV=1
MNRKEAAADRAAGAAVQGKPQEKAVVVFSGGQDSTTCLFWALERFDAVETVTFDYGQRHRSELEHAKRIAAKLQVPNRVLDMSLLNQLAPNALTRADIDIAQEEGELPNTFVEGRNLLFFSFAAIYAKQIGARHIVTGVCETDFSGYPDCRDVFVKSLNVTLNLAMDYGFVLHTPLMWLNKAETWRLADELGAFEFVRTETVTCYNGLPGDGCGECPSCKLRRAGLESYLAERAQKAGAGA

SEQ ID NO: 40372 - protein, 241 aa, Paenibacillus dendritiformis; identical to SEQ ID NO: 40371
  REGION 1..241: note = tr|H3SNA2|H3SNA2_9BACL 7-cyano-7-deazaguanine synthase OS=Paenibacillus dendritiformis C454 OX=1131935; GN = queC PE=3 SV=1

SEQ ID NO: 40373 - protein, 433 aa, unidentified
  source 1..433: note = Paenibacillus donghaensis
  REGION 1..433: note = tr|A0A2Z2KS49|A0A2Z2KS49_9BACL ATPase; OS = Paenibacillus donghaensis OX=414771 GN=B9T62_22730 PE=4; SV = 1
MNIVCKLSEADDFVIDSHFIEYNVNNSGQYTYTFWSKESIKKLINLPNFISNIGLDFLYISLFVFGADRISDRNSTYDSWTRVYNLYIPVLELDKWNNNKELLEQMLNYLSGDKWNIIFRSREYTQMEIRAREKYKKRSVEKELDVKKICMFSGGLDSFIGAIDALEECCDNVLFVSHYGGGKGVKEYQDLLKAKLYKKYTVNEDQFFSFHAAARDGKEDTTRTRSFMFFCHAIALATSINTSIELLIPENGLISLNIPLTNSRLGSSSTRTTHPYYLDMLQTLIQKLGLSISIRNPYQFKTKGEMILECKNMNFLKRNISNTMSCSHPDHGRMLGEKEACHCGNCLPCVIRRAAILKSGFKDYTVYRDIDFKSGETAKVNFNSYMLGLNKYQEKTAFLSVQKSGPIKADIDKYAQIYIRGMEELGEVLNRIK

SEQ ID NO: 40374 - protein, 221 aa, unidentified
  source 1..221: note = Paenibacillus donghaensis
  REGION 1..221: note = tr|A0A2Z2KF48|A0A2Z2KF48_9BACL 7-cyano-7-deazaguanine synthase OS=Paenibacillus donghaensis OX=414771 GN=queC PE=3 SV=1
MNKKALVVFSGGQDSTTCLVWALKQFEEVQVVTFNYNQRHSAEIEVATAIAHKFNVKQHILDLGLLNQLAPNALTRDDIEITPGEGQQPPNTFVDGRNLLFLSFAAILAKQLRFAHLVTGVCQTDFSGYPDCRDVFVKSLNVTLNLSMDVEFVIHTPLMWLDKKETWKMADELGVFDYIREHTLTCYNGITGSGCGTCPACLLRQRGLEQYEAERGSASHA

SEQ ID NO: 40375 - protein, 220 aa, Paenibacillus durus
  REGION 1..220: note = tr|A0A089HMB1|A0A089HMB1_PAEDU 7-cyano-7-deazaguanine synthase OS=Paenibacillus durus; OX = 44251 GN=queC PE=3 SV=1
MNKKAMVVFSGGQDSTTCLVWALKQFEEVQVVTFNYNQRHAAEIEVAKEIAAHFNVKQHILDLGLLNQLAPNALTRGDIEIKAGEDGELPSTFVDGRNLLFLSFSAILAKQFSYNHIVTGVCQTDFSGYPDCRDVFVKSLNVTLNLSMDYEFVIHTPLMWLDKKETWQMADELGQFDYIREHTLTCYNGIKGSGCGECPACQLRNRGLKQYEAIRKTVGR

SEQ ID NO: 40376 - protein, 220 aa, Paenibacillus durus
  REGION 1..220: note = tr|A0A0F7F9D1|A0A0F7F9D1_PAEDU 7-cyano-7-deazaguanine synthase OS=Paenibacillus durus ATCC 35681 OX=1333534 GN=queC PE=3 SV=1
MNKKALVVFSGGQDSTTCLAWALKQFEEVQVVTFNYNQRHAAEIEVAKEIAAHFNVKQHILDLGLLNQLAPNALTRGDIEISAGEDGELPSTFVDGRNLLFLSFAAILAKQLSYNHIVTGVCQTDFSGYPDCRDVFVKSLNVTLNLSMDYEFVIHTPLMWLDKKETWQLADELGQFEYIREHTLTCYNGIKGSGCGECPACQLRNRGLKQYEEVRKTVGR

SEQ ID NO: 40377 - protein, 227 aa, Paenibacillus elgii
  REGION 1..227: note = tr|A0A2T6G503|A0A2T6G503_9BACL 7-cyano-7-deazaguanine synthase OS=Paenibacillus elgii; OX = 189691 GN=queC PE=3 SV=1
MKKAVVILSGGLDSTTCMGMAQDAGYDVYPITFDYGQRQRREIENARQVAEFYKTASRHKVIALGFLKEFGGSALTDESIEVPPAGESGAVDSDIPVTYVPGRNLLFLSIATSYAETIGAEAIYIGVNALDYSGYPDCRPEFIRKVEEVMALATRVGVEGGPIRIETPLIHWTKAEIIREGMRLDVPYHLTTSCYNGQEEACGVCDSCRLRLKGFDEAGTADPIAYQ

SEQ ID NO: 40378 - protein, 227 aa, Paenibacillus elgii
  REGION 1..227: note = tr|A0A163YX16|A0A163YX16_9BACL 7-cyano-7-deazaguanine synthase OS=Paenibacillus elgii; OX = 189691 GN=queC PE=3 SV=1
MKKAVVILSGGLDSTTCMGMAQDAGYDVYPITFDYGQRQRREIENARQVAEFYKTASRHKVIALGFLKEFGGSALTDESIEVPPAGESGAVDSDIPVTYVPGRNLLFLSIATSYAETIGAEAIYIGVNALDYSGYPDCRPEFIRKVEEVMALATRVGVEGGPIRIETPLIHWTKAEIIREGMRLGVPYHLTTSCYNGQEEACGVCDSCRLRLKGFDEAGTADPIAYQ

SEQ ID NO: 40379 - protein, 220 aa, unidentified
  source 1..220: note = Paenibacillus etheri
  REGION 1..220: note = tr|A0A0W1AZ81|A0A0W1AZ81_9BACL 7-cyano-7-deazaguanine synthase OS=Paenibacillus etheri; OX = 1306852 GN=queC PE=3 SV=1
MNKKALVVFSGGQDSTTCLVWALKQFEEVQVVTFNYNQRHAAEIEVATEIAAKFNVRQHILDLGLLNQLAPNALTRQDIDIVAGEGDELPSTFVDGRNLLFLSFAAILAKQLGYSHIVTGVCQTDFSGYPDCRDVFVKSLNVTLNLSMDYEFAIHTPLMWLDKKETWKMADELGYFDYVREHTLTCYNGIIGSGCGTCPACLLRQRGLEQYEAERTGVSS

SEQ ID NO: 40380 - protein, 237 aa, unidentified
  source 1..237: note = Paenibacillus faecis
  REGION 1..237: note = tr|A0A5D0D1T1|A0A5D0D1T1_9BACL 7-cyano-7-deazaguanine synthase OS=Paenibacillus faecis; OX = 862114 GN=queC PE=3 SV=1
MLKNEKALVVFSGGQDSTTCLFWALREFREVEAVTFDYGQLHRQEIECAEKIAGELGVKWTRLDMSLLGQLTQNALTRNDIPISHEEGALPSTFVEGRNHLFLSFAAVLAKGIGARHLVTGVCETDFSGYPDCRDAFIKSLNVTLNLAMDHPFVIHTPLMWIDKAETWKLADDLGAFDFIRERTLTCYNGILGDGCGTCPACKLRRAGMETYLERRNAAQDALSAGAAPAGPREEAQ

SEQ ID NO: 40381 - protein, 1219 aa, unidentified
  source 1..1219: note = Paenibacillus ferrarius
  REGION 1..1219: note = tr|A0A1V4HHG4|A0A1V4HHG4_9BACL Carrier domain-containing protein OS=Paenibacillus ferrarius; OX = 1469647 GN=BC351_28820 PE=4 SV=1
MSDQVLSGELVLAANQRTREEPYWLEKMSGEVAAAAFPTDHSAFRNGDHTTAGLRFELTGSLYEKVSVLSKGSDHTLHIILTAALNLLLAKYTGERDLVVGTPIYRPETDGQFLNTVLPLRTRMEAGNSFRDLLLQVRSTMLEAVEHQEYPMEVLLTKLNRPHLYEVSLVMENIQSPQHLDRLPAALNFVFTHRNDVVEATVEYNNSRYHEESVECIVSHFITLLEKVLGDINADFTTLSLLSQSEEEALVVAYNATTTEYPADKTVAQLFEQQVENNPANLAVAAGNVSLTYQELNAKANRLARVLQSRGVSADSLVALLVENSADTIVGMLAVLKAGGAYVPIDPDNPVERKKFLLEDSQAVVILTQQHLLATQAELFEAVESERLLLIDDLDVYADHDETNLAPVAGPSNLAYVIYTSGTTGKPKGVLIENKGAVNYLTFAAKHYVQGEKADFPLFTSIAFDLTVTSIFTPLLTGNAAIVYQEEHKERLLERVLEEDRVGVVKATPAHLKLIKHRDWSNSSVKRLVVGGEDLKAELARELIAAFGGNVEIYNEYGPTETVVGCMIHRFDESSDTRDSVPIGVPADNTDIFVLDADRNSVPVGVVGEIFIGGDGVARGYLNRPELTSERFVTLPQGRVYKSGDLAKFLPSGQLEYLGRADNQVKINGYRIELGEIETQLLHLHEKYTPKDSVFHDITQQAHPEGVTYCSRCVLPSNYPKITFDEHGVCSVCRDYATYQPHTEKYFKTMDDFRELVDVNKGTDYDVLLLFSGGKDSTYVLYRLVNMGYKVLTFTFDNGFISEGAFTNIKNITKQLGVDHRVLTADQMKSVFVKSLKTFSNVCNGCWNAINGLGAQLAEETGCKVIISGLSRGQIFDMRLWGLFQLGIFDEQEIEEKLLLFRKGFHTRVNIFSKTLDVDLDGGFVESLHFVDFFRYDNTPTHQIREYLYEQGWVPPKDTGFCSSNCRINDIGIYVHLMNEGYHNYAAPSSWDIRFGIISREEGMQEITYKGDVNHVERVLKYIGYFQAPKIDDVVVVPIRDDSRREKLCAYVVAKDELEADWLREALAEELPTYMVPTYFVQLPSLPLTANGKVDTMALPLPVVTGTANVEYLTPSNDVELEIRKIWASVLSIDEEKIGFNDRFFDLGGDSYNMVQVNIRVNEMFSKSIPVVTMYNYPTIHSLAEYLPSEESIEVQELPDEQLEILDDSLSLFGEVFND

SEQ ID NO: 40382 - protein, 238 aa, unidentified
  source 1..238: note = Paenibacillus ferrarius
  REGION 1..238: note = tr|A0A1V4HKZ8|A0A1V4HKZ8_9BACL 7-cyano-7-deazaguanine synthase OS=Paenibacillus ferrarius; OX = 1469647 GN=queC PE=3 SV=1
MSSNEVTKKRAVIILSGGLDSTTCMGLAKEAGYELYPLSFDYGQRHKIEIENAKQVAEHYGVSKRHKIIKLDFLRDFGGSALTDDTIEVPNVMDSEQPDAGESEIPVTYVPGRNLLFLSIATSYAEVTGSEAIYIGVNALDYSGYPDCRPEFIHKVEEVIALATKVGVEGKGITIETPLMDWTKAKIIEEGLKIGVPYELTTSCYNGKAEACGVCDSCRLRLKGFEEAGSKDPIPYLI

SEQ ID NO: 40383 - protein, 222 aa, Paenibacillus ginsengarvi
  REGION 1..222: note = tr|A0A3B0BKD0|A0A3B0BKD0_9BACL 7-cyano-7-deazaguanine synthase OS=Paenibacillus ginsengarvi OX=400777 GN=queC PE=3 SV=1
MQKEKAVVVFSGGQDSTTCLIWAMQRFEEVTAVTFDYGQRHKLEVEVAAAIAEELKVEHRVLDMSLLGQLAPNALTRGDIAIEQQEGSLPTTFVDGRNLLFLSFAAVIAKQIGAKHIVTGVCETDFSGYPDCRDVFVKSANVTLNLAMDYPFVIDTPLMWLSKAETWELADRLGAFDFVRQRTLTCYNGIVADGCGECPACKLRRKGLDEYAASLPKEADRP

SEQ ID NO: 40384 - protein, 220 aa, Paenibacillus glacialis
  REGION 1..220: note = tr|A0A168NN03|A0A168NN03_9BACL 7-cyano-7-deazaguanine synthase OS=Paenibacillus glacialis; OX = 494026 GN=queC PE=3 SV=1
MTNDKAVVVFSGGQDSTTCLFWALKNFSEVETITFDYGQRHKLEIECATSIATDLGVKQTILDMSLLNQLAPNALTRHDVDIAHEEGQLPNTFVDGRNLLFLSFAAIVAKQAGARHLITGVCETDFSGYPDCRDVFVKSLNVTLNLSMDYDFVIHTPLMWLNKAETWHMSDQLDAFNYIRERTLTCYNGVIGDGCGECPACKLRKAGLDQYLATSIQGGA

SEQ ID NO: 40385 - protein, 209 aa, Paenibacillus glucanolyticus
  REGION 1..209: note = tr|A0A163GRN2|A0A163GRN2_9BACL 7-cyano-7-deazaguanine synthase OS=Paenibacillus glucanolyticus OX=59843 GN=AWU65_03800 PE=3 SV=1
MKKKAIVMVSGGPDSSTLLYHLKTEFELVPVYFDYGQNASDYEIVAARKISEELNLHLEIIDISSLRRTFLGLNRRDNISLSINGNCPVALLSIAGLYATERNIDTLLLGVHKEDFPEIKNITSTLNKYSEVLEEFNNKHVEVSAPFITKKKKEVFELAKQLNVPFELTRSCERNSYIHCGECNPCKERKHSFLEAEIQDPTKYLAQHC

SEQ ID NO: 40386 - protein, 225 aa, Paenibacillus glucanolyticus
  REGION 1..225: note = tr|A0A163KNF6|A0A163KNF6_9BACL 7-cyano-7-deazaguanine synthase OS=Paenibacillus glucanolyticus OX=59843 GN=queC PE=3 SV=1
MLKNEKAVVVFSGGQDSTTCLFWGKERFAEVETVTFDYGQRHKLEIECAAQIAKEQGVKQTVLDMSLLNQLAPNALTRSDIEIAEGDGLPTTFVDGRNLLFLSFAAVLAKGAGAKHLITGVCETDFSGYPDCRDSFIKSLNVTLNLAMDYPFVIHTPLMWLDKSETWELADQMNALEYVRDHTLTCYNGIKGDGCGECPACKLRKAGLDNYMLRRNRVSEGGRLV

SEQ ID NO: 40387 - protein, 220 aa, Paenibacillus graminis
  REGION 1..220: note = tr|A0A089NJ58|A0A089NJ58_9BACL 7-cyano-7-deazaguanine synthase OS=Paenibacillus graminis; OX = 189425 GN=queC PE=3 SV=1
MNKKALVVFSGGQDSTTCLVWALKNYEEVQVVTFNYNQRHAAEIEVAKAIAKKFNVKQHILDLSLLNQLAPNALTRDDIEIAAGEGKELPSTFVDGRNLLFLSFAAILAKQLGFANIITGVCQTDFSGYPDCRDVFVKSLNVTLNLSMDYEFIIHTPLMWLDKKETWKLADELGYFEYIREHTLTCYNGIIGSGCGTCPACLLRQRGLDQYEAERNEVGS

SEQ ID NO: 40388 - protein, 222 aa, unidentified
  source 1..222: note = Paenibacillus hemerocallicola
  REGION 1..222: note = tr|A0A5C4T977|A0A5C4T977_9BACL 7-cyano-7-deazaguanine synthase OS=Paenibacillus hemerocallicola OX=1172614 GN=queC PE=3 SV=1
MNNTKAVVVFSGGQDSTTCLFWAMERFDEVETVTFDYGQRHKLEVEVAAAIAGELNVKHHVLDMSLLGQLAPNALTRNDIAIEQREGSLPTTFVDGRNLLFLSFAAIAAKQIGAKHIVTGVCETDFSGYPDCRDVFVKSLNVTLNLAMDYPFVIDTPLMWLNKAETWELADRLGAFDFVRNRTLTCYNGIVADGCGECPACRLRRKGLDDYSALSGREACSP

SEQ ID NO: 40389 - protein, 243 aa, unidentified
  source 1..243: note = Paenibacillus herberti
  REGION 1..243: note = tr|A0A229NZ20|A0A229NZ20_9BACL 7-cyano-7-deazaguanine synthase OS=Paenibacillus herberti; OX = 1619309 GN=queC PE=3 SV=1
MEQQQVRVNPLDKRQGKAVVVFSGGQDSTTCLFWAQQRYEEVEAVTFRYGQRHELELDCAASIAAELGVKHHMLDMSLLGQLAPSALTRADVAVADAPAEGGLPNTFVPGRNLLFMSFAAVLAQGVGARTIVTGVCETDFSGYPDCRNVFIQSLNVSINLAMDSSFVIETPLMWLDKEQTWELADQLGAFDFVRERTLTCYNGIPSDGCGECPACKLRSSGLERYLARRDGGGVSASLQGGAR

SEQ ID NO: 40390 - protein, 226 aa, unidentified
  source 1..226: note = Paenibacillus ihbetae
  REGION 1..226: note = tr|A0A1B2DXP7|A0A1B2DXP7_9BACL 7-cyano-7-deazaguanine synthase OS=Paenibacillus ihbetae; OX = 1870820 GN=queC PE=3 SV=1
MLKHEKAVVVFSGGQDSTTCLFWAKERFADVETVTFDYGQRHKLEIECASQIAKEQGVKQTVLDMSLLNQLAPNALTRTDIEIKEGDQGLPTTFVEGRNLLFLSFAAVLAKGIGAKHLVTGVCETDFSGYPDCRDSFIKSLNVTLNLAMDYPFVIHTPLMWLDKAETWELADQMNALEYIRDHTLTCYNGIKGDGCGECPACKLRKAGLDKYLSRRNASVEGGRSV

SEQ ID NO: 40391 - protein, 227 aa, Paenibacillus illinoisensis
  REGION 1..227: note = tr|A0A2W0CVX4|A0A2W0CVX4_9BACL 7-cyano-7-deazaguanine synthase OS=Paenibacillus illinoisensis OX=59845 GN=queC PE=3 SV=1
MLNEEKAVVVFSGGQDSTTCLFWAKQQFAEVEVVTFDYGQRHKLEIECAAAIARDLNVQQTVLDMSLLNQLAPNALTRTDVEITHEEGELPSTFVDGRNLLFLSFAAILAKQKGARHLVTGVCETDFSGYPDCRDSFVKSMNVTLNLSMDYPFVIHTPLMWLDKAQTWKMADDLGAFDYVRERTLTCYNGVIGDGCGECPACKLRKAGLDRYVEQRSAGASVGADVR

SEQ ID NO: 40392 - protein, 220 aa, Paenibacillus jilunlii
  REGION 1..220: note = tr|A0A1G9KBI1|A0A1G9KBI1_9BACL 7-cyano-7-deazaguanine synthase OS=Paenibacillus jilunlii; OX = 682956 GN=queC PE=3 SV=1
MNKKALVVFSGGQDSTTCLIWALKNYEEVQVVTFNYNQRHAAEIEVAKEIAKKFNVKQHILDLGLLNQLAPNALTRDDIEIAAGDGEELPSTFVDGRNLLFLSFAAILAKQLQFANIITGVCQTDFSGYPDCRDVFVKSLNVTLNLSMDYEFVIHTPLMWLDKKETWKLADELGYFEYIREHTLTCYNGIIGSGCGTCPACLLRQRGLDQYAAERNEVVS

SEQ ID NO: 40393 - protein, 229 aa, Paenibacillus kribbensis
  REGION 1..229: note = tr|A0A222WRS9|A0A222WRS9_9BACL 7-cyano-7-deazaguanine synthase OS=Paenibacillus kribbensis OX=172713 GN=queC PE=3 SV=1
MFANEKAVVVFSGGQDSTTCLFWAKKHFAEVETVTFDYGQRHKQEIEVAAGIARKLGVPQTVLDMSLLNQLAPNALTRTDIDITQEEGELPSTFVDGRNLLFLSFAAVLAKQKGARHIITGVCETDFSGYPDCRDSFIKSLNVTLNLSMDYPFVIHTPLMWLNKAETWKMADELEAFEFVRTRTLTCYNGVIGDGCGECPACKLRRAGLEQYLAVRGHGASSQGAEGHA

SEQ ID NO: 40394 - protein, 226 aa, Paenibacillus lactis
  REGION 1..226: note = tr|G4HI39|G4HI39_9BACL 7-cyano-7-deazaguanine synthase OS=Paenibacillus lactis 154 OX=743719 GN=queC; PE = 3 SV=1
MLKHEKAVVVFSGGQDSTTCLFWAKERFAEVETVTFDYGQRHKLEIECAAQIAKDQGVKQTVLDMSLLNQLAPNALTRTDIEIKEGDQGLPTTFVEGRNLLFLSFAAVLAKGIGAKHLVTGVCETDFSGYPDCRDSFIKSLNVTLNLAMDYPFVIHTPLMWLDKAETWELADQMNALEYIRDHTLTCYNGIKGNGCGECPACKLRKAGLDKYLSRRNASVEGGRTV

SEQ ID NO: 40395 - protein, 223 aa, Paenibacillus larvae
  REGION 1..223: note = tr|A0A2A5K0L1|A0A2A5K0L1_PAELB 7-cyano-7-deazaguanine synthase OS=Paenibacillus larvae subsp. larvae (strain NRRL B-3650 / LMG 16245) OX=741161; GN = queC PE=3 SV=1
MKQEKAIVVFSGGQDSTTCLFWALRQFGEVETVTFDYGQRHSLEMKVAKSIAEELGLKHTVLDMSLLNQLAPSALTRKDMAIEEKEGEPPSTFVDGRNMLFLTFAAVMAKQAGARHLVTGVCETDFSGYPDCRDAFIKSLNVTLNLAMDYPFVIHTPLMWLNKAQTWELADQLGAYEFVKEKTLTCYNGVMGSGCGECPACKLRNAGLKQYEQQLAVKGAVIQ

SEQ ID NO: 40396 - protein, 223 aa, Paenibacillus larvae
  REGION 1..223: note = tr|A0A2L1UJ50|A0A2L1UJ50_9BACL 7-cyano-7-deazaguanine synthase OS=Paenibacillus larvae subsp. larvae OX=147375 GN=queC PE=3 SV=1
MKQEKAIVVFSGGQDSTTCLFWALRQFGEVETVTFDYGQRHSLEMKVAKSIAEELGLKHTVLDMSLLNQLAPSALTRKDMAIEEKEGGPPSTFVDGRNMLFLTFAAVMAKQAGARHLVTGVCETDFSGYPDCRDAFIKSLNVTLNLAMDYPFVIHTPLMWLNKAQTWELADQLGAYEFVKEKTLTCYNGVMGSGCGECPACKLRNAGLKQYEQQLAVKGAVIQ

SEQ ID NO: 40397 - protein, 225 aa, Paenibacillus lautus
  REGION 1..225: note = tr|A0A385TQC3|A0A385TQC3_PAELA 7-cyano-7-deazaguanine synthase OS=Paenibacillus lautus; OX = 1401 GN=queC PE=3 SV=1
MLKNEKAVVVFSGGQDSTTCLFWAKERFAEVETVTFDYGQRHKLEIECAAQIAKEQGVKQTVLDMSLLNQLAPNALTRSDIEIAEGDGLPTTFVDGRNLLFLSFAAVMAKGVGAKHLITGVCETDFSGYPDCRDSFIKSLNVTLNLAMDYPFVIHTPLMWLDKSETWELADQMNALEYIRDHTLTCYNGIKGDGCGECPACKLRKAGLDKYMQRRNGSSEGGRLV

SEQ ID NO: 40398 - protein, 223 aa, Paenibacillus lautus
  REGION 1..223: note = tr|A0A328WSY3|A0A328WSY3_PAELA 7-cyano-7-deazaguanine synthase OS=Paenibacillus lautus; OX = 1401 GN=queC PE=3 SV=1
MLKNEKAVVVFSGGQDSTTCLFWAKERFAEVETVTFDYGQRHKLEIECAAQIAKEQGVKQTVLDMSLLNQLAPNALTRSDIEIAEGDGLPTTFVEGRNLLFLSFAAVLAKGIGAKHLVTGVCETDFSGYPDCRDSFIKSLNVTLNLAMDYPFVIHTPLMWLDKSETWELADQMNALEYVRDHTLTCYNGIKGDGCGECPACKLRKAGLDNYMQRRNRVSEGGV

SEQ ID NO: 40399 - protein, 222 aa, unidentified
  source 1..222: note = Paenibacillus lentus
  REGION 1..222: note = tr|A0A3S8RZC5|A0A3S8RZC5_9BACL 7-cyano-7-deazaguanine synthase OS=Paenibacillus lentus; OX = 1338368 GN=queC PE=3 SV=1
MLQHEKSVVVFSGGQDSTTCLFWALKQFREVEVVTFDYGQRNKQEIECARGIAEELGVKFHLLDMSLLAQLSPNAMTRHDMDIVHEDGELPNTFVEGRNHLFLSFAAVLAKGVGARHIITGVCETDFSGYPDCRDAFVKSLNVTLNLAMDHNFVIHTPLMWLDKAATWQLADELGAFDYIRERTLTCYNGVIGDGCGECPSCKLRLAGMNAYLDKRAKGESS

SEQ ID NO: 40400 - protein, 222 aa, Paenibacillus macerans
  REGION 1..222: note = tr|A0A090ZUV5|A0A090ZUV5_PAEMA 7-cyano-7-deazaguanine synthase OS=Paenibacillus macerans; OX = 44252 GN=queC PE=3 SV=1
MLKNEKAVVVFSGGQDSTTCLFWAKKQFGEVEAVTFDYGQRHAREIECAKDIAQELDIKHTILDMSLLGQLTQNALTRSDIAIVQKDGELPSTFVDGRNHLFLSFAAVLAKGIGAKHIVTGVCETDFSGYPDCRDVFVKSLNVTLNLAMDYEFVIHTPLMWIDKAETWKLADELGAFDFVRERTLTCYNGVIGDGCGECPACKLRKAGLDKYLLERQGADKQ

SEQ ID NO: 40401 - protein, 220 aa, Paenibacillus macquariensis
  REGION 1..220: note = tr|A0A1N6UXF4|A0A1N6UXF4_9BACL 7-cyano-7-deazaguanine synthase OS=Paenibacillus macquariensis OX=948756 GN=queC PE=3 SV=1
MTNDKAVVVFSGGQDSTTCLFWALKNFSEVETITFDYGQRHKLEIECAASIASDLGVKQTILDMSLLNQLAPNALTRHDVDITHDEGQLPNTTVDGRNLLFMSFAAIVAKQAGARHLITGVCETDFSGYPDCRDIFIKSLNVTLNLSMDYDFVIHTPLMWLNKAETWHMSDELGAFNYIQERTLTCYNGIIGDGCGECPACKLRKAGLDQYLATSIQGGA

SEQ ID NO: 40402 - protein, 220 aa, Paenibacillus macquariensis; identical to SEQ ID NO: 40401
  REGION 1..220: note = tr|A0A168FML5|A0A168FML5_PAEMC 7-cyano-7-deazaguanine synthase OS=Paenibacillus macquariensis OX=1468 GN=queC PE=3 SV=1

SEQ ID NO: 40403 - protein, 230 aa, unidentified
  source 1..230: note = Paenibacillus montanisoli
  REGION 1..230: note = tr|A0A328UAQ1|A0A328UAQ1_9BACL 7-cyano-7-deazaguanine synthase OS=Paenibacillus montanisoli OX=2081970 GN=queC PE=3 SV=1
MKKAVIILSGGLDSTTCMGYAKEAGYELYPITFNYGQRHIIELNNARAVAEFYGVSDRFKVIELGFLREFGGSALTDDTIAVPKTGADPVPEEAGEIPVTYVPGRNLLFLSIATSFAETVGAEAIYIGVNALDYSGYPDCRPEFIAKVEEVIAIATKIGVEGKPISIETPLIHLTKAGIVAEGMRMGVPYQLTTSCYNGELEACGECDSCRLRLKGFAEAGLTDPIAYKK

SEQ ID NO: 40404 - protein, 232 aa, Paenibacillus mucilaginosus
  REGION 1..232: note = tr|F8FPI9|F8FPI9_PAEMK 7-cyano-7-deazaguanine synthase OS=Paenibacillus mucilaginosus (strain KNP414); OX = 1036673 GN=queC PE=3 SV=1
MTTSKKAVVILSGGLDSTTCMGLAREAGYDLYPITFDYGQRQKREIENARKVAEFYGVSDRHKVISLGFLKEFGGSALTDESIEVPAAGETGLEGSEIPVTYVPGRNLLFLSIATSYAEVTGAEAIYIGVNALDYSGYPDCRPEFIRKVEEVMALATRVGVEGGPIRIETPLIDWTKAEIVRQGNRIGVPYHLTTSCYNGQEEACGECDSCRLRLKGFEEAGSTDPIPYREA

SEQ ID NO: 40405 - protein, 232 aa, Paenibacillus mucilaginosus
  REGION 1..232: note = tr|H6NA14|H6NA14_9BACL 7-cyano-7-deazaguanine synthase OS=Paenibacillus mucilaginosus 3016 OX=1116391; GN = queC PE=3 SV=1
MTTSKKAVVILSGGLDSTTCMGLAREAGYDLYPITFDYGQRQKREIENARKVTEFYGVSDRHKVISLGFLKEFGGSALTDESIEVPAAGETGLEGSEIPVTYVPGRNLLFLSIATSYAEVKGAEAIYIGVNALDYSGYPDCRPEFIRKVEEVMALATRVGVEGGPIRIETPLIDWTKAEIVRQGNRIGVPYHLTTSCYNGQEEACGECDSCRLRLKGFEEAGSTDPIPYREA

SEQ ID NO: 40406 - protein, 223 aa, Paenibacillus nanensis
  REGION 1..223: note = tr|A0A3A1V2F3|A0A3A1V2F3_9BACL 7-cyano-7-deazaguanine synthase OS=Paenibacillus nanensis; OX = 393251 GN=queC PE=3 SV=1
MLKKEKAVVVFSGGQDSTTCLFWAIERFAEVEAVTFNYGQRHSLELECAAEIAKELGVKHHVLDMSLLNQLAPNALTRDDIAIEQKEGGLPTTFVDGRNLLFLSFAAVLAKGIGAKHIVTGVCETDFSGYPDCRDVFVKSLNVTLNLSMDYNFVIDTPLMWLNKAETWALADELGAFEFVRERTLTCYNGIKADGCGECPACKLRRKGLEDYVAERGARGAER

SEQ ID NO: 40407 - protein, 256 aa, Paenibacillus naphthalenovorans
  REGION 1..256: note = tr|A0A0U2VJT0|A0A0U2VJT0_9BACL 7-cyano-7-deazaguanine synthase OS=Paenibacillus naphthalenovorans OX=162209 GN=queC PE=3 SV=1
MSAAGLFGLKGPTNDTRVKAGIVLHMKKAVVILSGGLDSTTCMGIAQEAGYELYPITFDYGQRQRREIENARQVAEFYGVSDRHRVISLGFLKEFGGSALTDESIEVPPAGESGAVDSEIPITYVPGRNLLFLSIATSYAEVSGAEAIYIGVNALDYSGYPDCRPEFIRKVQEVMALATRVGVEGGPIRIETPLIHWTKAEIIREGMRLGVPYQLTTSCYNGQEEACGVCDSCRLRLKGFADAQATDPVPYRTGKE

SEQ ID NO: 40408 - protein, 256 aa, Paenibacillus naphthalenovorans
  REGION 1..256: note = tr|A0A480BCQ1|A0A480BCQ1_9BACL 7-cyano-7-deazaguanine synthase OS=Paenibacillus naphthalenovorans OX=162209 GN=queC PE=3 SV=1
MSAAGLFGLKGPTNDTRVKAGIVLHMKKAVVILSGGLDSTTCMGIAQEAGYELYPITFDYGQRQRREIENARQVAEFYGVSDRHRVISLGFLKEFGGSALTDESIEVPLAGESGAVDSEIPITYVPGRNLLFLSIATSYAEVSGAEAIYIGVNALDYSGYPDCRPEFIRKVQEVMALATRVGVEGGPIRIETPLIHWTKAEIIREGMRLGVPYQLTTSCYNGQEEACGVCDSCRLRLKGFADAQATDPVPYRTGKE

SEQ ID NO: 40409 - protein, 228 aa, unidentified
  source 1..228: note = Paenibacillus nuruki
  REGION 1..228: note = tr|A0A1E3KZR3|A0A1E3KZR3_9BACL 7-cyano-7-deazaguanine synthase OS=Paenibacillus nuruki; OX = 1886670 GN=queC PE=3 SV=1
MLKNQKAVVVFSGGQDSTTCLFWAKEQFAEVEVVTFNYGQRHSAEIEVATQIAQELGVEQTILDMSLLNQLAPNALTRSDIDITHEEGELPSTFVDGRNLLFLSFASIMAKQKGARHIITGVCETDFSGYPDCRDIFVKSLNVTLNLSMDHQFVIHTPLMWLDKAQTWEMADQLGAFDYVREKTLTCYNGIVGSGCGECPACKLRQAGLDRYLAEREQSNDSTEGARR

SEQ ID NO: 40410 - protein, 192 aa, Paenibacillus odorifer
  REGION 1..192: note = tr|A0A1R0Y9R3|A0A1R0Y9R3_9BACL 7-cyano-7-deazaguanine synthase OS=Paenibacillus odorifer; OX = 189426 GN=BSK52_00430 PE=3 SV=1
MNKRNYKVLVLLSGGLDSTCLVHYHLSQGNKVTALFFDYGQQSCEREFQSAKEISEYYDIQLSRQKLGFNIKNNDGEFYCRNALFVLAACSFLGESSSLISLGIHSGTPYYDSTAAFVTDTQMLLNGYFGGVIRIITPFLDYAKEQIIDYSVQEKIPVHLTYSCEIGGQKPCGLCKSCIDRRRLYEQSPGKD

SEQ ID NO: 40411 - protein, 220 aa, Paenibacillus odorifer
  REGION 1..220: note = tr|A0A1R0WR97|A0A1R0WR97_9BACL 7-cyano-7-deazaguanine synthase OS=Paenibacillus odorifer; OX = 189426 GN=queC PE=3 SV=1
MNKKALVVFSGGQDSTTCLVWALQQYEEVQVVTFNYNQRHAAEIEVATEIAAKFNVKQHILDLGLLNQLAPNALTRQDIDIVAGEGDELPSTFVDGRNLLFLSFAAILAKQLGYSHIVTGVCQTDFSGYPDCRDVFVKSLNVTLNLSMDYEFAIHTPLMWLDKKETWKMADQLGYFDYVREHTLTCYNGIIGSGCGTCPACLLRQRGLEQYEAERMEAGS

SEQ ID NO: 40412 - protein, 227 aa, unidentified
  source 1..227: note = Paenibacillus oryzae
  REGION 1..227: note = tr|A0A1A5YP24|A0A1A5YP24_9BACL 7-cyano-7-deazaguanine synthase OS=Paenibacillus oryzae; OX = 1844972 GN=queC PE=3 SV=1
MRNEKAVVVFSGGQDSTTCLFWAIKTFREVEAVTFNYGQRHVLELDCAADIAAELGIRHHVLDMGLLNQLAPNALTRNDIEIKQEDGGLPSTFVDGRNLLFLTFAAVLAKGIGARHIVTGVCETDFSGYPDCRDVFIKSLNVTLNLSMDYRFVIDTPLMWLNKAQTWALADELGAFQFVRERTLTCYNGIKADGCGECPACQLRRRGLEEYLDSGASLEGTQLEGTS

SEQ ID NO: 40413 - protein, 231 aa, unidentified
  source 1..231: note = Paenibacillus oryzisoli
  REGION 1..231: note = tr|A0A198AMU4|A0A198AMU4_9BACL 7-cyano-7-deazaguanine synthase OS=Paenibacillus oryzisoli; OX = 1850517 GN=queC PE=3 SV=1
MSENTKRAVIILSGGLDSTTCMGLAKEAGYELFPISFDYGQRHKIEIENAKQVAEHYGVGARHKIIKLDFLRDFGGSALTDDSIAVPNVTNAPETEEIPVTYVPGRNLLFLSIATSYAEVTGSSAIYIGVNALDYSGYPDCRPEFIHKVEEVIALATKVGVEGKGITIETPLINWTKAKIVEEGLKIGVPYELTTSCYNGKAEACGECDSCRLRLKGFEEAGSKDPIAYLP

SEQ ID NO: 40414 - protein, 230 aa, Paenibacillus pabuli
  REGION 1..230: note = tr|A0A327PRV5|A0A327PRV5_9BACL 7-cyano-7-deazaguanine synthase OS=Paenibacillus pabuli; OX = 1472 GN=queC PE=3 SV=1
MLNEEKAVVVFSGGQDSTTCLFWAKQQFAEVEVVTFDYGQRHKLEIECAAEIARDLGVQQTVLDMSLLNQLAPNALTRTDVEITHEEGELPSTFVDGRNLLFLSFAAIMAKQKGARHLVTGVCETDFSGYPDCRDSFVKSMNVTLNLSMDYPFVIHTPLMWLDKAQTWKMADELGAFDYVRERTLTCYNGIIGDGCGECPACKLRKAGLDRYLEQRTDSATVGATGADVR

SEQ ID NO: 40415 - protein, 223 aa, unidentified
  source 1..223: note = Paenibacillus paeoniae
  REGION 1..223: note = tr|A0A371PMV0|A0A371PMV0_9BACL 7-cyano-7-deazaguanine synthase OS=Paenibacillus paeoniae; OX = 2292705 GN=queC PE=3 SV=1
MLKNEGAVVVFSGGQDSTTCLFWALEQFAEVEAITFNYGQRHKLELDCAAEIAVELGVKHHILDMSLLNQLAPNALTRDDIAIEQKDGELPTTFVDGRNLLFLSFAAVLAKGIGARHIVTGVCETDFSGYPDCRDVFIKSLNVTLNLSMDYNFVIDTPLMWLNKAETWALADELGAFDFVRERTLTCYNGIIADGCGDCPACGLRRRGLEEYVASRETRGAGL

SEQ ID NO: 40416 - protein, 236 aa, Paenibacillus pasadenensis
  REGION 1..236: note = tr|A0A2N5N121|A0A2N5N121_9BACL 7-cyano-7-deazaguanine synthase OS=Paenibacillus pasadenensis OX=217090 GN=queC PE=3 SV=1
MVDRLEGGSLDKRKGKAVVVFSGGQDSTTCLFWALQRYEEVEAVTFRYGQRHALELECAASIAAELGVRHHVLDMSLLGQLAPSSLTRSDVAVADAAEEGGLPNTFVPGRNLLFLSFAAVLAQGVGAKTIVTGVCETDFSGYPDCRNVFIQSLNVSLNLAMDETFVIETPLMWLDKEQTWELADRLGAFEFVRERTLTCYNGIPADGCGECPACKLRRAGLDKYMARRGAKEAARG

SEQ ID NO: 40417 - protein, 231 aa, Paenibacillus pectinilyticus
  REGION 1..231: note = tr|A0A1C0ZV73|A0A1C0ZV73_9BACL 7-cyano-7-deazaguanine synthase OS=Paenibacillus pectinilyticus OX=512399 GN=queC PE=3 SV=1
MSENNKKRAVIILSGGLDSTTCMGLAQEAGYDLFPISFDYGQRHKIEIENAKQVAEHYGVSARHKIIKLDFLRDFGGSALTDDTIDVPNVVNGPESEEIPVTYVPGRNLLFLSIATSYAEVTGSQAIYIGVNALDYSGYPDCRPEFIHKVEEVIALATKVGVEGKGITIETPLISWSKAKIVEEGLKIGVPYELTTSCYNGKAEACGECDSCRLRLKGFEEAGSKDPIAYL

SEQ ID NO: 40418 - protein, 227 aa, Paenibacillus peoriae
  REGION 1..227: note = tr|A0A0K2F5G6|A0A0K2F5G6_9BACL 7-cyano-7-deazaguanine synthase OS=Paenibacillus peoriae; OX = 59893 GN=queC PE=3 SV=1
MFANEKAVVVFSGGQDSTTCLFWAKKHFAEVETVTFDYGQRHKQEIEVAAGIARELGVPQTVLDMSLLNQLAPNALTRTDIDITQQEGELPSTFVDGRNLLFLSFAGVLAKQKGARHLITGVCETDFSGYPDCRDSFIKSLNVTLNLSMDYPFVIHTPLMWLNKAETWHMADELKAFEFVRTRTLTCYNGVIGDGCGECPACKLRRAGLEQYLAVRGASSQGVEGHA

SEQ ID NO: 40419 - protein, 222 aa, Paenibacillus pini
  REGION 1..222: note = tr|W7YJ86|W7YJ86_9BACL 7-cyano-7-deazaguanine synthase OS=Paenibacillus pini JCM 16418 OX=1236976; GN = queC PE=3 SV=1
MLKNEKAVVVFSGGQDSTTCLFWALQNFSEVETVTFDYGQRHKLEIECAQQIAEELGVKNTILDMSLLNQLAPNALTRSDIDITHEDGELPSTFVEGRNHLFLSFAAVLGKQSGARHLITGVCETDFSGYPDCRDVFVKSLNVTLNLAMDYEFVIHTPLMWLDKAETWAMAHKLSAYEFVRERTLTCYNGIIGDGCGECPACLLRKAGLDKFLLTRSEESHL

SEQ ID NO: 40420 - protein, 222 aa, unidentified
  source 1..222: note = Paenibacillus pinisoli
  REGION 1..222: note = tr|A0A3A6PEJ1|A0A3A6PEJ1_9BACL 7-cyano-7-deazaguanine synthase OS=Paenibacillus pinisoli; OX = 1276110 GN=queC PE=3 SV=1
MKNEKAVVVFSGGQDSTTCLFWALERFAEVEAVTFNYGQRHKLELDCAAEIAAELGVKHHVLDMSLLNQLAPNALTRDDIDIEQKDGELPTTFVDGRNLLFLSFAAVLAKGIGARHIVTGVCETDFSGYPDCRDVFVKSLNVTLNLSMDYNFVIDTPLMWLNKAETWALADELGAFAFVRERTLTCYNGIKADGCGECPACVLRRRGLEEYIASRGAEGAAL

SEQ ID NO: 40421 - protein, 227 aa, Paenibacillus polymyxa
  REGION 1..227: note = tr|A0A378XTC8|A0A378XTC8_PAEPO 7-cyano-7-deazaguanine synthase OS=Paenibacillus polymyxa; OX = 1406 GN=thiI1 PE=3 SV=1
MFTKEKAVVVFSGGQDSTTCLFWAKKHFAEVETVTFDYGQRHKQEIEVAAGIASELGVPQTVLDMSLLNQLAPNALTRTDIDITQEEGELPSTFVDGRNLLFLSFAAVLAKQKGARHIITGVCETDFSGYPDCRDSFIKSLNVTLNLSMDYPFVIHTPLMWLNKAETWQMADELKAFEFVRTRTLTCYNGIIGDGCGECPACNLRRAGLEQYLAVRGASSQGAEGHA

SEQ ID NO: 40422 - protein, 227 aa, Paenibacillus polymyxa; identical to SEQ ID NO: 40418
  REGION 1..227: note = tr|E0RL58|E0RL58_PAEP6 7-cyano-7-deazaguanine synthase OS=Paenibacillus polymyxa (strain E681) OX=349520; GN = queC PE=3 SV=1

SEQ ID NO: 40423 - protein, 231 aa, unidentified
  source 1..231: note = Paenibacillus polysaccharolyticus
  REGION 1..231: note = tr|A0A1G5GJ92|A0A1G5GJ92_9BACL 7-cyano-7-deazaguanine synthase OS=Paenibacillus polysaccharolyticus OX=582692 GN=queC PE=3 SV=1
MLNKEKAVVVFSGGQDSTTCLFWAKQQFAEVEVVTFDYGQRHKLEIECAAAIAKDLGVQQTVLDMSLLNQLAPNALTRDDVEITHEEGELPSTFVDGRNLLFLSFAAIMAKQKGARHLVTGVCETDFSGYPDCRDSFVKSMNVTLNLSMDYPFVIHTPLMWLDKAATWKMADELGAFDYVRERTLTCYNGVIGDGCGECPACKLRKAGLDRYVEERAVALTATPSTGVDAR

SEQ ID NO: 40424 - protein, 241 aa, Paenibacillus popilliae
  REGION 1..241: note = tr|M9LHR6|M9LHR6_PAEPP 7-cyano-7-deazaguanine synthase OS=Paenibacillus popilliae ATCC 14706 OX=1212764; GN = queC PE=3 SV=1
MNRKEAAADRAAGTAVRGKPQEKAVVVFSGGQDSTTCLFWALERFDTVETVTFDYGQRHRSELEHAKRIAAKLQVPNRVLDMTLLNQLAPNALTRVDIDIAQEEGELPNTFVEGRNLLFFSFAAIYAKQIGARHIVTGVCETDFSGYPDCRDVFVKSLNVTLNLAMDYGFVLHTPLMWLNKAETWRMADELGAFDFVRTETLTCYNGFPGDGCGQCPSCKLRRAGLEDYLAERAQKAGARA

SEQ ID NO: 40425 - protein, 221 aa, Paenibacillus prosopidis
  REGION 1..221: note = tr|A0A368VUT6|A0A368VUT6_9BACL 7-cyano-7-deazaguanine synthase OS=Paenibacillus prosopidis OX=630520 GN=queC PE=3 SV=1
MKKEKAVVVFSGGQDSTTCLFWAMERFAEVEAVTFNYGQRHKLELECAADIAKELNVKHHILDMSLLNQLAPNALTRDDIAIEQKEGELPSTFVDGRNLLFLTFAAVLAKQIGAKHIVTGVCETDFSGYPDCRDVFIKSLNVTLNLSMDYPFVIDTPLMWLNKAETWELADKLGAFQFVRERTLTCYNGIMADGCGHCPACLLRKKGLDDYLVKREQGGTR

SEQ ID NO: 40426 - protein, 222 aa, Paenibacillus rhizosphaerae
  REGION 1..222: note = tr|A0A1R1F2C4|A0A1R1F2C4_9BACL 7-cyano-7-deazaguanine synthase OS=Paenibacillus rhizosphaerae OX=297318 GN=queC PE=3 SV=1
MLKNEKAVVVFSGGQDSTTCLFWALRQFKEVETVTFDYGQRHRLEIECAQSIAAELGVKNTVLDMSLLNQLAPNALTRSDIEITQEEGELPSTFVDGRNHLFLSFAAVLGKQSGARHLVTGVCETDFSGYPDCRDAFVKSLNVTLNLAMDYDFVIHTPLMWLDKAETWKLADDLGAFPFVRERTLTCYNGIIGDGCGECPACRLRKAGLDKYLQSKAEALQP

SEQ ID NO: 40427 - protein, 241 aa, Paenibacillus rigui
  REGION 1..241: note = tr|A0A229UL96|A0A229UL96_9BACL 7-cyano-7-deazaguanine synthase OS=Paenibacillus rigui; OX = 554312 GN=queC PE=3 SV=1
MTTNQGKKAVIILSGGLDSTTCMGIAQAEGYELYPITFDYGQRHKIELENARQVAAHYGVADRHKVIQLGFLKEFGGSALTDESLEVPDMTKPKPEQASSADGAQESEVPITYVPGRNLLFLSIATSYAEVTEAEVIYIGVNALDYSGYPDCRPEFIRKVEEVMALATRVGVEGGPIRIATPLSEWTKAEIIREGMKLNVPYHLTTSCYNGQEEACGVCDSCRLRLKGFAEAGSQDPIAYK

SEQ ID NO: 40428 - protein, 220 aa, Paenibacillus riograndensis
  REGION 1..220: note = tr|A0A0E4HAY1|A0A0E4HAY1_9BACL 7-cyano-7-deazaguanine synthase OS=Paenibacillus riograndensis SBR5 OX=1073571 GN=queC PE=3 SV=1
MNNKALVVFSGGQDSTTCLVWALKNYEEVQAVTFNYNQRHAAEIEVAKEIAKKFNVKQHILDLGLLHQLAPNALTRDDIEIAAGEGEELPSTFVDGRNLLFLSFAAILAKQLEFTNIVTGVCQTDFSGYPDCRDVFVKSLNVTLNLSMDYEFVIHTPLMWLDKKETWKLADELGCFEYIREHTLTCYNGIIGSGCGTCPACLLRQRGLDQYEAERNEVGS

SEQ ID NO: 40429 - protein, 223 aa, Paenibacillus riograndensis
  REGION 1..223: note = tr|A0A132TM65|A0A132TM65_9BACL 7-cyano-7-deazaguanine synthase OS=Paenibacillus riograndensis OX=483937 GN=queC PE=3 SV=1
MEQKNRKAVVVFSGGQDSTTCLFWAMKHFDEVEAVTFNYGQRHALEIECAKQIADELGVKWTLLDMSLLGQLTQNALTRKDLEIVHNDGELPSTFVEGRNHLFLSFAAVFAKGVDARHIVTGVCETDFSGYPDCRDDFIKSLNVTLNLAMDHNFIIHTPLMWINKAETWEMADQLGAFEFVRQKTLTCYNGIIGDGCGTCPACQLRKAGLDKFLQGKNSEQML

SEQ ID NO: 40430 - protein, 220 aa, Paenibacillus sabinae
  REGION 1..220: note = tr|X4ZJU8|X4ZJU8_9BACL 7-cyano-7-deazaguanine synthase OS=Paenibacillus sabinae T27 OX=1268072 GN=queC; PE = 3 SV=1
MNKKALVVFSGGQDSTTCLAWALKQFEEVQVVTFNYNQRHAAEIEVAKEIAAHFNVKQHILDLGLLNQLAPNALTRGDIEIKAGEDGELPSTFVDGRNLLFLSFAAILAKQLSYNHIVTGVCQTDFSGYPDCRDVFVKSLNVTLNLSMDYEFVIHTPLMWLDKKETWQLADELGQFEYIREHTLTCYNGIKGSGCGECPACQLRNRGLQQYEEVRKTVGR

SEQ ID NO: 40431 - protein, 222 aa, unidentified
  source 1..222: note = Paenibacillus selenitireducens
  REGION 1..222: note = tr|A0A1T2X3Y6|A0A1T2X3Y6_9BACL 7-cyano-7-deazaguanine synthase OS=Paenibacillus selenitireducens OX=1324314 GN=queC PE=3 SV=1
MLKNEKAVVVFSGGQDSTTCLFWALQQFREVEAVTFDYGQRHRLEIDCAKDIAAELKVQLTVLDMSLLGQLTQNALTRSDIPIVHEEGELPSTFVEGRNHLFLSFAAVLAKGVSARHLVTGVCETDFSGYPDCRDSFVKSLNVTLNLAMDYNFVIHTPLMWIDKAETWKLADELGAFEFVRERTLTCYNGVIGDGCGECPACKLRRAGMESYLQSRQEALQP

SEQ ID NO: 40432 - protein, 229 aa, unidentified
  source 1..229: note = Paenibacillus silvae
  REGION 1..229: note = tr|A0A2W6N8L9|A0A2W6N8L9_9BACL 7-cyano-7-deazaguanine synthase OS=Paenibacillus silvae; OX = 1325358 GN=queC PE=3 SV=1
MNEEKAVVVFSGGQDSTTCLFWAKKQFAEVEVVTFDYGQRHKLEIECAAAIAKELGVQQTVLDMSLLNQLAPNALTRSDVEITHKEGELPSTFVDGRNLLFLSFAAILAKQKGARHLVTGVCETDFSGYPDCRDSFVKSMNVTLNLSMDYPFVIHTPLMWLDKAATWKMADELGAFDYVRERTLTCYNGVIGDGCGECPACKLRKAGLDRYLQERTTALEAAPSTGADA

SEQ ID NO: 40433 - protein, 225 aa, unidentified
  source 1..225: note = Paenibacillus solani
  REGION 1..225: note = tr|A0A0M1P1F6|A0A0M1P1F6_9BACL 7-cyano-7-deazaguanine synthase OS=Paenibacillus solani; OX = 1705565 GN=queC PE=3 SV=1
MLKDEKAVVVFSGGQDSTTCLFWAKERFAEVQTVTFDYGQRHKLEIECAAQIAKEQGVKQTVLDMSLLNQLAPNALTRSDIEIAEGEGMPTTFVEGRNLLFLSFAAVLAKGIGAKHLITGVCETDFSGYPDCRDSFIKSLNVTLNLAMDYPFVIHTPLMWLDKSETWELADQMNALEYVRDHTLTCYNGIKGDGCGECPACKLRKAGLDKYLQRRNRMTEGGRLV

SEQ ID NO: 40434 - protein, 220 aa, Paenibacillus sophorae
  REGION 1..220: note = tr|A0A1H8FND1|A0A1H8FND1_9BACL 7-cyano-7-deazaguanine synthase OS=Paenibacillus sophorae; OX = 1333845 GN=queC PE=3 SV=1
MNKKALVVFSGGQDSTTCLVWALQQFEEVQVVTFNYNQRHAAEIEVAKEIAAHFNVKQHILDLGLLNQLAPNALTRGDIEIKAGEDGELPSTFVDGRNLLFLSFAAILAKQFSYNHIVTGVCQTDFSGYPDCRDVFVKSLNVTLNLSMDYEFVIHTPLMWLDKKETWQMADELGQFDYIREHTLTCYNGIKGSGCGECPACQLRNRGLKQYEAARKTVGR

SEQ ID NO: 40435 - protein, 220 aa, Paenibacillus sp.
  REGION 1..220: note = tr|A0A1Q5XLB6|A0A1Q5XLB6_9BACL 7-cyano-7-deazaguanine synthase OS=Paenibacillus sp. P46E; OX = 1349436 GN=queC PE=3 SV=1
MNKKALVVFSGGQDSTTCLVWALQQFEEVQVVTFNYNQRHAAEIEVAKEIAKKFNVKQHILDLGLLNQLAPNALTRDDIEIAAGDGEDLPSTFVDGRNLLFLSFAAILAKQLGYANIITGVCQTDFSGYPDCRDVFVKSLNVTLNLSMDYEFVIHTPLMWLDKKETWKLADELGYFDYIREHTLTCYNGIMGSGCGTCPACLLRKRGLDQYEAERNEVVS

SEQ ID NO: 40436 - protein, 238 aa, Paenibacillus sp.
  REGION 1..238: note = tr|A0A0Q7J794|A0A0Q7J794_9BACL 7-cyano-7-deazaguanine synthase OS=Paenibacillus sp. Root444D2 OX=1736538 GN=queC PE=3 SV=1
MSVSNEDKKRAVIILSGGLDSTTCMGLAKEAGYELYPISFDYGQRHKIEIENAKQVAEHYGVSGRHKIIKLDFLRDFGGSALTDDSIDVPNVVDGLTEGSEESEIPVTYVPGRNLLFLSIATSYAEVTGSQAIYIGVNALDYSGYPDCRPEFIHKVEEVIALATKVGVEGKGITIETPLIDWTKARIVEEGLKIGVPYELTTSCYNGKAEACGVCDSCRLRLKGFEEAGSKDPIPYLA

SEQ ID NO: 40437 - protein, 220 aa, Paenibacillus stellifer
  REGION 1..220: note = tr|A0A089LY56|A0A089LY56_9BACL 7-cyano-7-deazaguanine synthase OS=Paenibacillus stellifer; OX = 169760 GN=queC PE=3 SV=1
MNKKALVVFSGGQDSTTCLAWALKQFEEVQVVTFNYNQRHAAEIEVAKEIAGHFGVKQHILDLGLLNQLAPNALTRSDIEISAGEEGELPSTFVDGRNLLFLSFAAILAKQLGYHHIVTGVCQTDFSGYPDCRDVFVKSLNVTLNLSMDYEFVIHTPLMWLDKKETWQMADELGQFEYIREHTLTCYNGIKGSGCGECPACQLRNRGLQQYEAVRKTVNG

SEQ ID NO: 40438 - protein, 225 aa, unidentified
  source 1..225: note = Paenibacillus swuensis
  REGION 1..225: note = tr|A0A172TQ13|A0A172TQ13_9BACL 7-cyano-7-deazaguanine synthase OS=Paenibacillus swuensis; OX = 1178515 GN=queC PE=3 SV=1
MKKAVIILSGGLDSTTCMGYAKEQGYELYPITFDYGQRHRIELENARKVAAFYGAEGRHKVVQLGFLKEFGGSALTDESIAVPEGAEAEDEIPVTYVPARNLLFLSIAASYAEVNGAEALYIGVNAMDYSGYPDCRPEFISKVEEVIALGTKAGVEGKSMSIETPLLLLTKADIIREGTRMEVPYELTTSCYNGKAEACRTCDSCRLRLKGFAEAGLQDPIAYEE

SEQ ID NO: 40439 - protein, 230 aa, Paenibacillus taichungensis
  REGION 1..230: note = tr|A0A2V3S919|A0A2V3S919_9BACL 7-cyano-7-deazaguanine synthase OS=Paenibacillus taichungensis OX=484184 GN=queC PE=3 SV=1
MLNEEKAVVVFSGGQDSTTCLFWAKQQFAEVEVVTFDYGQRHKLEIECAAEIARDLGVQQTVLDMSLLNQLAPNALTRTDVEITHEEGELPSTFVDGRNLLFLSFAAIMAKQKGARHLVTGVCETDFSGYPDCRDSFVKSMNVTLNLSMDYPFVIHTPLMWLDKAQTWKMADDLGAFDYVRERTLTCYNGIIGDGCGECPACKLRKAGLDRYLEQRTDSATVGATGADVR

SEQ ID NO: 40440 - protein, 229 aa, Paenibacillus taichungensis
  REGION 1..229: note = tr|A0A329R728|A0A329R728_9BACL 7-cyano-7-deazaguanine synthase OS=Paenibacillus taichungensis OX=484184 GN=queC PE=3 SV=1
MNEEKAVVVFSGGQDSTTCLFWAKQQFAEVEVVTFDYGQRHKLEIECAAEIARDLGVQQTVLDMSLLNQLAPNALTRTDVEITHEEGELPSTFVDGRNLLFLSFAAIMAKQKGARHLVTGVCETDFSGYPDCRDSFVKSMNVTLNLSMDYPFVIHTPLMWLDKAQTWKMADKLGAFDYVRERTLTCYNGIIGDGCGECPACKLRKAGLDRYLEQRNDSAIVGTAGADVR

SEQ ID NO: 40441 - protein, 229 aa, unidentified
  source 1..229: note = Paenibacillus taihuensis
  REGION 1..229: note = tr|A0A3D9S778|A0A3D9S778_9BACL 7-cyano-7-deazaguanine synthase OS=Paenibacillus taihuensis OX=1156355 GN=queC PE=3 SV=1
MKKAVVILSGGLDSTTCMGYAKEAGYELYPITFNYGQRHKIELNNARAVAEHYGVSDRFRLVELGFLRDFGGSALTDDSIDVPKVGTDPVPDEAGEIPVTYVPGRNLLFLSIATSFAETVGAEAIYIGVNALDYSGYPDCRPEFIAKVEEVIAIATKIGVEGKPISIETPLISLTKADIVKEGMRMDVPYHLTTSCYNGEPEACGECDSCRLRLKGFAEAGMKDPIPYK

SEQ ID NO: 40442 - protein, 227 aa, Paenibacillus terrae
  REGION 1..227: note = tr|G7VYT5|G7VYT5_PAETH 7-cyano-7-deazaguanine synthase OS=Paenibacillus terrae (strain HPL-003); OX = 985665 GN=queC PE=3 SV=1
MFANEKAVVVFSGGQDSTTCLFWAKKHFAEVETVTFDYGQRHKQEIEVAAGIAHELGVPQSVLDMSLLNQLAPNALTRTDIDITQQEGELPSTFVDGRNLLFLSFAAVLAKQKGARHIITGVCETDFSGYPDCRDSFIKSLNVTLNLSMDYPFVIHTPLMWLNKAETWQMADELEAFEFVRTRTLTCYNGVIGDGCGECPACKLRRAGLEQYLAVRGASSQGVEGHA

SEQ ID NO: 40443 - protein, 227 aa, Paenibacillus terrae
  REGION 1..227: note = tr|A0A0D7X912|A0A0D7X912_9BACL 7-cyano-7-deazaguanine synthase OS=Paenibacillus terrae; OX = 159743 GN=queC PE=3 SV=1
MFANEKAVVVFSGGQDSTTCLFWAKKHFAEVETVTFDYGQRHKQEIEVAAGIAHELGVPQSVLDMSLLNQLAPNALTRTDIDITQQEGELPSTFVDGRNLLFLSFAAVLAKQKGARHMITGVCETDFSGYPDCRDSFIKSLNVTLNLSMDYPFVIHTPLMWLNKAETWQMADELEAFEFVRTRTLTCYNGIIGDGCGECPACKLRRAGLEQYLAVRGASSPGVEGHA

SEQ ID NO: 40444 - protein, 222 aa, unidentified
  source 1..222: note = Paenibacillus thermophilus
  REGION 1..222: note = tr|A0A388MNP5|A0A388MNP5_9BACL 7-cyano-7-deazaguanine synthase OS=Paenibacillus thermophilus OX=1181891 GN=queC PE=3 SV=1
MLKNEKAVVVFSGGQDSTTCLFWAKKQFGEVEAVTFDYGQRHAREIECAKDIAQELDIKHTILDMSLLGQLTQNALTRSDIAIAQKDGELPSTFVDGRNHLFLSFAAVLAKGIGAKHIVTGVCETDFSGYPDCRDVFVKSLNVTLNLAMDYEFVIHTPLMWIDKAETWKLADELGAFDFVRERTLTCYNGVIGDGCGECPACKLRKAGLDKYLLERQEAGKQ

SEQ ID NO: 40445 - protein, 245 aa, Paenibacillus thiaminolyticus
  REGION 1..245: note = tr|A0A378ZHK3|A0A378ZHK3_PANTH 7-cyano-7-deazaguanine synthase OS=Paenibacillus thiaminolyticus OX=49283 GN=thiI1 PE=3 SV=1
MNDAMNRKEAAAERAGDRAVQGKPQEKAVVVFSGGQDSTTCLFWAMERFDAVETVTFDYGQRHRSELEHAKRIAAKLQVPNRVLDMTLLNQLAPNALTRADIDIAQEEGELPNTFVEGRNLLFFSFAAIYAKQIGARHIVTGVCETDFSGYPDCRDVFVKSLNVTLNLAMDYGFVLHTPLMWLNKAETWRLADELGAFDFVRTETVTCYNGLPGDGCGECPSCKLRRAGMESYLAERAQKSGAGA

SEQ ID NO: 40446 - protein, 241 aa, Paenibacillus thiaminolyticus
  REGION 1..241: note = tr|A0A3A3GCB2|A0A3A3GCB2_PANTH 7-cyano-7-deazaguanine synthase OS=Paenibacillus thiaminolyticus OX=49283 GN=queC PE=3 SV=1
MNRKEAAADRAGGRADQGKPQEKAVVVFSGGQDSTTCLFWALERFDAIETVTFDYGQRHRSELEHAKRIAAKLQVPNRVLDMTLLNQLAPNALTRADIDIAQEEGELPNTFVEGRNLLFFSFAAIYAKQIGARHIVTGVCETDFSGYPDCRDVFVKSLNVTLNLAMDYGFVLHTPLMWLNKAETWRLADELGAFDFVRTETVTCYNGLPGDGCGECPSCKLRRDGLESYLAERAQKAGAGA

SEQ ID NO: 40447 - protein, 227 aa, Paenibacillus tianmuensis
  REGION 1..227: note = tr|A0A1G4RQC0|A0A1G4RQC0_9BACL 7-cyano-7-deazaguanine synthase OS=Paenibacillus tianmuensis OX=624147 GN=queC PE=3 SV=1
MKKAVVILSGGLDSTTCMGMAQDAGYDVYPITFDYGQRQRREIENARQVAEFYNTANRHKVIALGFLKEFGGSALTDESIDVPPAGESGAVDSDIPVTYVPGRNLLFLSIATSYAETIGAEAIYIGVNALDYSGYPDCRPEFIRKVEEVMALATRVGVEGGPIRIETPLIHWTKAEIIREGMRLGVPYHLTTSCYNGQEEACGVCDSCRLRLKGFDEAGTADPIVYQ

SEQ ID NO: 40448 - protein, 220 aa, unidentified
  source 1..220: note = Paenibacillus typhae
  REGION 1..220: note = tr|A0A1G8GW32|A0A1G8GW32_9BACL 7-cyano-7-deazaguanine synthase OS=Paenibacillus typhae; OX = 1174501 GN=queC PE=3 SV=1
MNKKALVVFSGGQDSTTCLVWALKHFEEVQVVTFNYNQRHAAEIEVAKEIAANFGVKQHILDLGLLNQLAPNALTRDDIAIEAGEDGELPSTFVDGRNLLFLSFAAIMAKQLGYANIITGVCQTDFSGYPDCRDVFVKSLNVTLNLSMDYEFVIHTPLMWLDKKETWKLADELGQFDYVREHTLTCYNGIIGSGCGTCPACLLRQRGLEQYVAERKQGDL

SEQ ID NO: 40449 - protein, 217 aa, unidentified
  source 1..217: note = Paenibacillus tyrfis
  REGION 1..217: note = tr|A0A081NU69|A0A081NU69_9BACL 7-cyano-7-deazaguanine synthase OS=Paenibacillus tyrfis; OX = 1501230 GN=queC PE=3 SV=1
MTKNNNKAVVVFSGGQDSTTCLFWAKQHFSEIEAVTFNYGQRHSAELECAARITKDLSIKHHVQDMSLLNQLAPNALTRSDIDIASEEGKLPTTFVDGRNLLFLSFAAILAKQIGAKHIITGVCETDFSGYPDCRDVFIKSLNVTLNLSMDYQFVIETPLMWLNKAQAWKLADELGAFEYIRNNTLTCYNGILADGCGECPACILRKRGLEEYLLSK

SEQ ID NO: 40450 - protein, 227 aa, unidentified; identical to SEQ ID NO: 40378
  source 1..227: note = Paenibacillus tyrfis
  REGION 1..227: note = tr|A0A081P6G1|A0A081P6G1_9BACL 7-cyano-7-deazaguanine synthase OS=Paenibacillus tyrfis; OX = 1501230 GN=queC PE=3 SV=1

SEQ ID NO: 40451 - protein, 225 aa, Paenibacillus uliginis
  REGION 1..225: note = tr|A0A1X7HMR2|A0A1X7HMR2_9BACL 7-cyano-7-deazaguanine synthase OS=Paenibacillus uliginis N3/975 OX=1313296 GN=queC PE=3 SV=1
MLKNEKAVVVFSGGQDSTTCLFWAKEQFAEVETVTFDYGQRHKYEIQCAAQIAEEQGVKQTVLDMSLLNQLAPNALTRSDMEIKEGDDGVPNTFVDGRNLLFLSFAAVLAKQVGARHLVTGVCETDFSGYPDCRDNFIKSLNVTLNLAMDYPFVIHTPLMWLDKADTWELADQMNALDYVRQNTLTCYNGIKGDGCGECPACQLRKAGLDKYLSRRTLQIKGGVQ

SEQ ID NO: 40452 - protein, 225 aa, unidentified
  source 1..225: note = Paenibacillus vortex
  REGION 1..225: note = tr|A0A2R9SYF2|A0A2R9SYF2_9BACL 7-cyano-7-deazaguanine synthase OS=Paenibacillus vortex V453 OX=715225 GN=queC PE=3 SV=1
MLKNEKAVVVFSGGQDSTTCLFWTKERFAEVETVTFDYGQRHKLEIECAAQIAKEQGVKQTVLDMSLLNQLAPNALTRSDIEIAEGDGLPTTFVDGRNLLFLSFAAVLAKGAGAKHLITGVCETDFSGYPDCRDSFIKSLNVTLNLAMDYPFVIHTPLMWLDKSETWELADQMNALEYVRDHTLTCYNGIKGDGCGECPACKLRKAGLDNYMLRRNRVSEGGRLV

SEQ ID NO: 40453 - protein, 223 aa, unidentified
  source 1..223: note = Paenibacillus vortex
  REGION 1..223: note = tr|A0A2R9SZ60|A0A2R9SZ60_9BACL 7-cyano-7-deazaguanine synthase OS=Paenibacillus vortex V453 OX=715225 GN=queC PE=3 SV=1
MDKKNKKAVVVFSGGQDSTTCLFWAMKQFDEVEAVTFNYGQRHALEIECANQIADELGVKWTLLDMSLLGQLTQNALTRDDVEIVHNDGEFPSTFVEGRNHLFLSFAAVFAKGVGARHIVTGVCETDFSGYPDCRDDFVKSLNVTLNLAMDHNFIIHTPLMWINKAETWEMADQLGAFEFVRKKTLTCYNGVIGDGCGNCPACQLRKAGLDTFLQTRNLEQMS

SEQ ID NO: 40454 - protein, 232 aa, unidentified
  source 1..232: note = Paenibacillus whitsoniae
  REGION 1..232: note = tr|A0A430J6P1|A0A430J6P1_9BACL 7-cyano-7-deazaguanine synthase OS=Paenibacillus whitsoniae OX=2496558 GN=queC PE=3 SV=1
MSAQVSVKRAVVILSGGLDSTTCMGIAKEAGYELYPISFDYGQRHKIEIENAKQVAAHYGVAQRHKIIKLDFLRDFGGSALTDDSIDVPNVTESEQTDEIPVTYVPGRNLLFLSIATSYAEVTGSSAIYIGVNALDYSGYPDCRPEFIHKVEEVIELATKVGVEGKGIKIETPLIDWTKARIIEEGLKIGVPYELTTSCYNGKAEACGVCDSCRLRLKGFEEAGAKDPIPYL

SEQ ID NO: 40455 - protein, 220 aa, Paenibacillus wynnii
  REGION 1..220: note = tr|A0A098M6N7|A0A098M6N7_9BACL 7-cyano-7-deazaguanine synthase OS=Paenibacillus wynnii; OX = 268407 GN=queC PE=3 SV=1
MNKKALVVFSGGQDSTTCLIWAMQQFEEVQVVTFNYNQRHAAEIEVATAIANKFNVKQHILDLGLLNQLAPNALTRNDIEIAAGEGEELPSTFVDGRNLLFLSFAAIMAKQFDYNHIVTGVCQTDFSGYPDCRDVFVKSLNVTLNLSMDYEFVIHTPLMWLDKKETWQMADQLGYFDYVREHTLTCYNGIIGSGCGTCPACELRSRGLQQYEAERKKVDS

SEQ ID NO: 40456 - protein, 241 aa, unidentified
  source 1..241: note = Paenibacillus xerothermodurans
  REGION 1..241: note = tr|A0A2W1P097|A0A2W1P097_9BACL 7-cyano-7-deazaguanine synthase OS=Paenibacillus xerothermodurans OX=1977292 GN=queC PE=3 SV=1
MSNHNQGGRKAVIILSGGLDSTTCMGIAQAKGYKLYPITFDYGQRHRIELDNARAVAEHYGAQGRHKVIQLGFLKEFGGSALTDDSIAVPDTTKAAEHTAQPESDIPVTYVPGRNLLFLSIATSYAEAIGAEAIFIGVNALDYSGYPDCRPEFIRKVEEVMAVATRVGVEGGPIRIETPLTEWTKAEIIRQGNMLQVPYHLTTSCYNGQAEACGVCDSCRLRLKGFAEAGSADPIAYRARH

SEQ ID NO: 40457 - protein, 226 aa, Paenibacillus xylanexedens
  REGION 1..226: note = tr|A0A1L5LXP4|A0A1L5LXP4_9BACL 7-cyano-7-deazaguanine synthase OS=Paenibacillus xylanexedens OX=528191 GN=queC PE=3 SV=1
MNEEKAVVVFSGGQDSTTCLFWAKQQFAEVEVVTFDYGQRHKLEIECAAEIARDLGVQQTVLDMSLLNQLAPNALTRTDVEITHEEGELPSTFVDGRNLLFLSFAAIMAKQKGARHLVTGVCETDFSGYPDCRDSFVKSMNVTLNLSMDYPFVIHTPLMWLDKAQTWKMADDLGAFDYVRERTLTCYNGVIGDGCGECPACKLRKAGLDRYVQQRSAAESAGADVR

SEQ ID NO: 40458 - protein, 226 aa, Paenibacillus xylanexedens
  REGION 1..226: note = tr|A0A3N6CIZ9|A0A3N6CIZ9_9BACL 7-cyano-7-deazaguanine synthase OS=Paenibacillus xylanexedens OX=528191 GN=queC PE=3 SV=1
MLNEEKAVVVFSGGQDSTTCLFWAKQQFAEVEVVTFDYGQRHKLEIECAAEIARDLGVQQTVLDMSLLNQLAPNALTRTDVEITHEEGELPSTFVDGRNLLFLSFAAIMAKQKGARHLVTGVCETDFSGYPDCRDSFVKSMNVTLNLSMDYPFVIHTPLMWLDKAQTWKMADDLGAFDYVRERTLTCYNGVIGDGCGECPACKLRKAGLDRYVQQRDAGSTGVDVR

SEQ ID NO: 40459 - protein, 222 aa, unidentified
  source 1..222: note = Paenibacillus yonginensis
  REGION 1..222: note = tr|A0A1B1MWM6|A0A1B1MWM6_9BACL 7-cyano-7-deazaguanine synthase OS=Paenibacillus yonginensis OX=1462996 GN=queC PE=3 SV=1
MLKDEKAVVVFSGGQDSTTCLYWAIQQFREVETVTFMYGQRHSLEIECAKSISKELGIKNTVLDMSLLGQLTENALTRSDIDIAQEEGSLPNTFVDGRNHLFLSFAAVMAKQVGARHLVTGVCETDFSGYPDCRDTFVKSLNVTLNLAMDYQFVIHTPLMWLDKAQTWQLADDLNAFDFVRERTLTCYNGVIGDGCGECPACKLRKAGLDRYLSARAEGVRL

SEQ ID NO: 40460 - protein, 233 aa, unidentified
  source 1..233: note = Paenimaribius caenipelagi
  REGION 1..233: note = tr|A0A547PUM8|A0A547PUM8_9RHOB 7-cyano-7-deazaguanine synthase OS=Paenimaribius caenipelagi OX=2489174 GN=queC PE=3 SV=1
MKTLVICSGGLDSVSLAHIVSAEHQLTRLVSFDYGQRHRKELDYAASAAVRLGVPHHLIDMRTIGAALTGSALTDDIDVPDGHYAEDTMRITVVPNRNAIMLAIGFGIAAANGDDAVATAVHGGDHFIYPDCRPEFTTAFDAMQRQALDGYADVQLYTPFVTRSKADIVADGAKHGTPFAETWSCYKGGAVHCGRCGTCVERREAFHLAGVEDPTSYADPDYWTTAIEAKEAS

SEQ ID NO: 40461 - protein, 222 aa, unidentified
  source 1..222: note = Paenisporosarcina antarctica
  REGION 1..222: note = tr|A0A4V1AMP8|A0A4V1AMP8_9BACL 7-cyano-7-deazaguanine synthase OS=Paenisporosarcina antarctica OX=417367 GN=queC PE=3 SV=1
MKQDKAVVVFSGGQDSTTCLLWALTQYQEVYTVTFDYGQRHIEEITCAEEIAKELNVPFKVLDMKLINQLAANALTRSDIAVTEGTSEELPSTFVPGRNHLFLSFAAVYAQSIGARHIITGVCETDFSGYPDCRDVFVKALNVSINLAMDSSLEFQTPLMWLNKAETWKMADDLDALDFVRTRTLTCYEGIRGDGCGKCPSCVLRQNGLTTYLEEKQGSGAK

SEQ ID NO: 40462 - protein, 223 aa, Paenisporosarcina quisquiliarum
  REGION 1..223: note = tr|A0A1H8B0Z5|A0A1H8B0Z5_9BACL 7-cyano-7-deazaguanine synthase OS=Paenisporosarcina quisquiliarum OX=365346 GN=queC PE=3 SV=1
MKQEKAIIVFSGGQDSTTCLFWAKERFRAIEAVTFDYGQRHSLEIECAKEIAKELGVKHHILDMSLLNQLAPNALTRDDIKVEDGGKGELPSTFVPGRNLLFLSFAGVLASQVGAKHIVTGVCETDFSGYPDCRDIFVKSLNVTLNLSMDSTFVIETPLMWLNKAQTWELADQLGALEFVQKKTLTCYNGVIADGCGKCPACKLRNKGLNEYLSSKSTKGVIA

SEQ ID NO: 40463 - protein, 222 aa, Paenisporosarcina sp.
  REGION 1..222: note = tr|A0A2T6KGD9|A0A2T6KGD9_9BACL 7-cyano-7-deazaguanine synthase OS=Paenisporosarcina sp. OV554 OX=2135694 GN=queC PE=3 SV=1
MKKGKAVVVFSGGQDSTTCLLWALTKYEEVFTVTFDYGQRHIEEITCAEEIAHELNVPFKVLDMTLINQLSANALTRSDIAVTDATDGNLPSTFVPGRNHLFLSFAAVYAQSIGARDIITGVCETDFSGYPDCRDVFVKALNVSINLAMDTSLQFQTPLMWLDKAQTWKLADDLGALEFVRTRTLTCYEGIRGDGCGTCPSCVLRQKGLLTYLEQKQGSESK

SEQ ID NO: 40464 - protein, 218 aa, Paenisporosarcina sp.
  REGION 1..218: note = tr|A0A385YS13|A0A385YS13_9BACL 7-cyano-7-deazaguanine synthase OS=Paenisporosarcina sp. K2R23-3 OX=2320858 GN=queC PE=3 SV=1
MKNKKAVVVFSGGQDSTTCLLWAVQQFDEVHAVTFDYGQRHKEEIRCATEIAQTLHIPHKILDMRLINQLTENALTRDDIPLTEGDGETLPSSFVPGRNQLFLSFAAVYAHSIGADHLITGVSQTDYSGYPDCRDTFIKSLNVSLNLAMEKDFVIHTPLMWLDKAATWKLADDLGGLDFVRSKTLTCYNGIRADGCGECPACVLRKNGLDTYLEGARA

SEQ ID NO: 40465 - protein, 456 aa, unidentified
  source 1..456: note = Palleronia abyssalis
  REGION 1..456: note = tr|A0A2R8BRI9|A0A2R8BRI9_9RHOB 7-cyano-7-deazaguanine synthase OS=Palleronia abyssalis; OX = 1501240 GN=queC PE=4 SV=1
MIIDAPHPSISRKLSVEIVESDAKRASADHTLVLGCDIRFSTRNLESYANANWEPVVFDAMVVAAAVEYCDRSLRRSVREWARDYRLRLPVHEPDRWNTPEVLDALHDVLGFLTGDRWHFTFVARVHAEPSPRQQSFDLPPDAKATLAFSDGMDSRAVAGLVGANARQALVRVRLGTKRCDRPRRGQPFTGIPYKLGKSVPNPEPSARNRGFRFALVSGLASYICRAEQIIIPESGQGALGPVLVPVAHAYPDYRNHPAFLRRMERFLGALLGRSVEYTFPRIWHTKGQTLAAYLGLGIDHGEWKRTRSCWKGPQWSSVDGEYRQCGACAACMLRRLSVHSAGQMEADDTYIAADLSAPELEASVPATFRKANRSFREYAIAGALHLDHLADLTKEDGRPVLRRQALVLAEALGMSAIQTEHNLKAMIAEHAGEWRAFVASLGDGSFLHNWVRGSR

SEQ ID NO: 40466 - protein, 402 aa, Palleronia marisminoris
  REGION 1..402: note = tr|A0A1Y5RZ17|A0A1Y5RZ17_9RHOB 7-cyano-7-deazaguanine synthase OS=Palleronia marisminoris; OX = 315423 GN=queC PE=4 SV=1
MGEAIVRVDGSQTPIIVRINGQRPTFNLGTDALQAKALRELDPVLLDLMEIASTVFAADGAIARGGATRPDMGAGWYRQFDFEIPVRNPELWQRPDVTAALCEVVETLTEDSVRFRFTQSNADPILQPYLDLDPNGASFDADEVVLFSGGLDSFAGALELLATTSSRVILVTHRSAQKAIPRQVELGQYLAKRFPGRVLHVNILARRTDQEARDSTQRSRTLLFAAFGQAVAHAFGAGRVSFFENGIVSHNLPLSPQIVGTMATRTTHPLTLRTINRLMQVVLSEPVGIENKYQWLTKSEVVSRIEQYGAAKQIVRAVSCTSIREQNSLHTHCGACTQCFDRRFAILHAGLADYDPEEIYGTDILFGERTTHRAITMAVEWTSHALRLGDLDEQAFMTAFGH

SEQ ID NO: 40467 - protein, 236 aa, unidentified
  source 1..236: note = Paludibacter jiangxiensis
  REGION 1..236: note = tr|A0A170YB10|A0A170YB10_9BACT 7-cyano-7-deazaguanine synthase OS=Paludibacter jiangxiensis OX=681398 GN=queC PE=3 SV=1
MQPKPAPAYFHRPFIFYRNILFTMNALIVYSGGLDSSTLLHQYKDDIRLAVSFHYGSKHNDREISYARQNCEELGIRHIVINLGFMNEYFRSDLLQSGGDIPEGHYEADNMRKTIVPFRNGIMLSIAVGLAESNDLDAVLIGNHFGDHAIYPDCRRSFIDAFTAAAKAGTEVGIQILSPYCDISKREIALIGQELGIDYNKTYSCYKGGEKHCGKCGTCVERKEALEGFDPTEYEA

SEQ ID NO: 40468 - protein, 214 aa, Paludibacter propionicigenes
  REGION 1..214: note = tr|E4T8A6|E4T8A6_PALPW 7-cyano-7-deazaguanine synthase OS=Paludibacter propionicigenes (strain DSM 17365 / JCM 13257 / WB4) OX=694427 GN=queC PE=3 SV=1
MKDIVILYSGGMDSSVALYEHADRIRRALTFNYGSKHNLREMEYAARNCKRLGIEHHVIELDMNKMGFVSDLLQSGGDIPNGHYEDQNMIKTVVPFRNGIMLSIAAGIAESIGCDKLMISNHAGDHAIYPDCREEFIQTMNKAISLGTYNHCEILAPYTNLTKREIALIGKEIGVPFEDTYSCYNGLETHCGTCGTCTERKEGLEGFDPTVYLH

SEQ ID NO: 40469 - protein, 230 aa, unidentified
  source 1..230: note = Paludibacterium purpuratum
  REGION 1..230: note = tr|A0A4R7AZA1|A0A4R7AZA1_9NEIS 7-cyano-7-deazaguanine synthase OS=Paludibacterium purpuratum OX=1144873 GN=queC PE=3 SV=1
MEQNNEKALVVLSGGQDSTTCLFWAIRRFGLANVSAVTFDYGQRHRIELDSARKVAAIAGVEQIELPIDTFGAIGGNALTDAAIAPQTGDTPDSAALPNTFVPGRNLIFLTFATALAYTRGIRHIVTGVAQTDYSGYPDCRENTLKALELAIRLGMDAPLSLHAPLMYLTKAQTVHLAQEVGAMEAMAWSHTCYNGAVPPCGQCDSCRLRAKGFADAGIADPLVVRTARS

SEQ ID NO: 40470 - protein, 225 aa, unidentified
  source 1..225: note = Paludifilum halophilum
  REGION 1..225: note = tr|A0A235B589|A0A235B589_9BACL 7-cyano-7-deazaguanine synthase OS=Paludifilum halophilum; OX = 1642702 GN=queC PE=3 SV=1
MAEKRAVVVLSGGLDSTTCMGIAREQGYELYPLTFHYGQRHSREVEQAKQVAAFYRIREHRIVDIQFLNQIGGSALTDSSMEVPTDGAEETIPDTYVPARNMIFLSLAAAYAEVIGAEAVYIGVSAVDYSGYPDCRPSFIESMTRTVNLATKAGATGSELAIETPLIRWSKAETIREGLRLGVPYHLTTSCYLGGEIACGHCDSCRLRLKGFAEAGAEDPIVYAE

SEQ ID NO: 40471 - protein, 234 aa, unidentified
  source 1..234: note = Paludisphaera borealis
  REGION 1..234: note = tr|A0A1U7CV61|A0A1U7CV61_9BACT 7-cyano-7-deazaguanine synthase OS=Paludisphaera borealis; OX = 1387353 GN=queC_2 PE=3 SV=1
MIEGHQNRPAVVLLSGGLDSATTLAEAKAAGFTPYALSVAYGQRHAVEIEAARRVARSMGVARHVELTIDLRAFGGSALTAEIEVPKDRSADAMAEGIPITYVPARNTVFLSLALAWAETLGAYDLFVGVNCVDYSGYPDCRPEFLQGFEYLADLATRAGVEGRGRYRVHAPLLTMTKNEIIRRGIELGVDYGLTHSCYDPTPEGLSCGRCDSCRLRLAAFESLGLTDPIAYAG

SEQ ID NO: 40472 - protein, 217 aa, unidentified
  source 1..217: note = Paludisphaera borealis
  REGION 1..217: note = tr|A0A1U7CKX5|A0A1U7CKX5_9BACT 7-cyano-7-deazaguanine synthase OS=Paludisphaera borealis; OX = 1387353 GN=queC_1 PE=3 SV=1
MIAVLISGGIESAVLCGEFVRSRRRVQPIYIRCGLDWEDVELAAARAYLKAIACDRLEPLVVLDEPIRDVYGPHWSTDGGVDVPGAETPDEAVYLPGRNLLLTVKSALWCRLRNVHELALGSLGSNPFSDSTPEFFQGLETVLGQALSGSPRLIRPFSRLHKSDVVARGDGLPLHLTFSCIRPDAGLHCGVCNKCAERRDGFRDANRPDRTRYADEQ

SEQ ID NO: 40473 - protein, 230 aa, Panacagrimonas perspica
  REGION 1..230: note = tr|A0A4S3K8D0|A0A4S3K8D0_9GAMM 7-cyano-7-deazaguanine synthase OS=Panacagrimonas perspica; OX = 381431 GN=queC PE=3 SV=1
MSTVMSGAKPRAVVLLSGGLDSATVLAIAKTQGFDAYALSVAYGQRHLIELEAAARVATQLGASAHQVMHVDLDVVGGSALTDRNIAVPQSPSTGIPVTYVPARNTLFLSLALGWAEVLGASDLFIGVNAVDYSGYPDCRPEFIQAFERLADLATRAGVEGRGFRIHAPLQYWSKKQIVEKGTELGVDFAQTVSCYSADDEGRACGRCDSCRLRVEGFIAAGIADPTRYA

SEQ ID NO: 40474 - protein, 245 aa, Pandoraea apista
  REGION 1..245: note = tr|A0A427IWK7|A0A427IWK7_9BURK 7-cyano-7-deazaguanine synthase OS=Pandoraea apista; OX = 93218 GN=queC PE=3 SV=1
MIMTTSTDSALVLFSGGQDSTTCLAWALSRYARVETLGFDYGQRHGVELECRTDVLAKLRERFPQWAPRLGDDHMIDLSILGQISETSLTRDTTIAMAANNLPNTFVPGRNLLFLTIGATIAYRRGLRVLVGGMCETDFSGYPDCRDDTMKALQVALNLGMDQRFVVETPLMWIDKADTWQMAQDLGGELLVETVREDTHTCYLGERSVLHPWGYGCGECPACQLRQRGYEQWRARSNDQDRGAA

SEQ ID NO: 40475 - protein, 243 aa, Pandoraea apista
  REGION 1..243: note = tr|A0A0G4JER4|A0A0G4JER4_9BURK 7-cyano-7-deazaguanine synthase OS=Pandoraea apista; OX = 93218 GN=queC PE=3 SV=1
MTTSTDSALVLFSGGQDSTTCLAWALSRYARVETLGFDYGQRHGVELECRTDVLAKLRERFPQWAPRLGDDHMIDLSILGQISETSLTRDTTIAMAANNLPNTFVPGRNLLFLTIGATIAYRRGLRVLVGGMCETDFSGYPDCRDDTMKALQVALNLGMDQRFVVETPLMWIDKADTWQMAQDLGGELLVETVREDTHTCYLGERSVLHPWGYGCGECPACQLRQRGYEQWRARSNDQDRGAA

SEQ ID NO: 40476 - protein, 240 aa, Pandoraea faecigallinarum
  REGION 1..240: note = tr|A0A0H3WVS2|A0A0H3WVS2_9BURK 7-cyano-7-deazaguanine synthase OS=Pandoraea faecigallinarum OX=656179 GN=queC PE=3 SV=1
MTTSTDSALVLFSGGQDSTTCLAWALSRYARVETLGFDYGQRHSVELECRTDVLAKLRERFAQWAPRLGDDHMIDLSILGQISETSLTRETTIAMAANNLPNTFVPGRNLLFLTIGATIAYRRGLRVLVGGMCETDFSGYPDCRDDTMKALQVALNLGMDQRFIVETPLMWIDKADTWQMAQDLGGDLLVETVREDTHTCYLGERSVLHAWGYGCGECPACQLRQRGYEQWRARSDGSAA

SEQ ID NO: 40477 - protein, 245 aa, unidentified
  source 1..245: note = Pandoraea fibrosis
  REGION 1..245: note = tr|A0A0B3TRY2|A0A0B3TRY2_9BURK 7-cyano-7-deazaguanine synthase OS=Pandoraea fibrosis; OX = 1891094 GN=queC PE=3 SV=1
MIMTTSTDSALVLFSGGQDSTTCLAWALSRYARVETLGFDYGQRHSVELECRTDVLAKLRERFPQWAPRLGDDHMIDLSILGQISETSLTRETTIAMAANNLPNTFVPGRNLLFLTIGATIAYRRGLRVLVGGMCETDFSGYPDCRDDTMKALQVALNLGMDQRFIVETPLMWIDKADTWQMAQDLGGELLVETVREDTHTCYLGERSVLHPWGYGCGECPACQLRQRGYEQWRARSNDQDRGAA

SEQ ID NO: 40478 - protein, 243 aa, unidentified
  source 1..243: note = Pandoraea fibrosis
  REGION 1..243: note = tr|A0A5E4VZV9|A0A5E4VZV9_9BURK 7-cyano-7-deazaguanine synthase OS=Pandoraea fibrosis; OX = 1891094 GN=queC PE=3 SV=1
MTTSTDSALVLFSGGQDSTTCLAWALSRYARVETLGFDYGQRHSVELECRTDVLAKLRERFPQWAPRLGDDHMIDLSILGQISETSLTRETTIAMAANNLPNTFVPGRNLLFLTIGATIAYRRGLRVLVGGMCETDFSGYPDCRDDTMKALQVALNLGMDQRFIVETPLMWIDKADTWQMAQDLGGELLVETVREDTHTCYLGERSVLHPWGYGCGECPACQLRQRGYEQWRARSNDQDRGAA

SEQ ID NO: 40479 - protein, 247 aa, Pandoraea norimbergensis
  REGION 1..247: note = tr|A0A0U2NCU8|A0A0U2NCU8_9BURK 7-cyano-7-deazaguanine synthase OS=Pandoraea norimbergensis OX=93219 GN=queC PE=3 SV=1
MTTSTDSALVLFSGGQDSTTCLAWALSRYARVETLGFDYGQRHSVELECRTDVLAKMRQRFPHWAPRMGDDHMIDLSILGQISETSLTRETTIAMAANNLPNTFVPGRNILFLTIGATIAYRRGLRVLVGGMCETDFSGYPDCRDDTMKALQVALNLGMDQRFIVETPLMWIDKADTWQMAQDLGGNLLVETVREDTHTCYLGERSVLHPWGYGCGECPACQLRQRGYEQWRARGNDADNHQTHGAA

SEQ ID NO: 40480 - protein, 246 aa, Pandoraea oxalativorans
  REGION 1..246: note = tr|A0A0E3Y9E0|A0A0E3Y9E0_9BURK 7-cyano-7-deazaguanine synthase OS=Pandoraea oxalativorans; OX = 573737 GN=queC PE=3 SV=1
MIMTTSTDSALVLFSGGQDSTTCLAWALSRYARVETLGFDYGQRHSVELECRTDVLAKLRERFPQWAPRLGDDHMIDLSILGQISETSLTRETTIAMAANNLPNTFVPGRNLLFLTIGATIAYRRGLRVLVGGMCETDFSGYPDCRDDTMKALQVALNLGMDQRFIVETPLMWIDKADTWQMAQDLGGDVLVETVREDTHTCYLGERSVLHPWGYGCGECPACQLRQRGYEQWRARDNPNQGRQAV

SEQ ID NO: 40481 - protein, 243 aa, Pandoraea pnomenusa
  REGION 1..243: note = tr|A0A378YPA1|A0A378YPA1_9BURK 7-cyano-7-deazaguanine synthase OS=Pandoraea pnomenusa; OX = 93220 GN=queC PE=3 SV=1
MTTSTDSALVLFSGGQDSTTCLAWALSRYARVETLGFDYGQRHSVELECRTDVLAKLRQRFPDWSPRLGDDHMIDLSILGQISETSLTRETTIAMAADNLPNTFVPGRNLLFMTIGATIAYRRGLRVLVGGMCETDFSGYPDCRDDTMKALQVALNLGMDRRFIVETPLMWIDKADTWQMAQDLGGQALVETVREDTHTCYLGERSVLHPWGYGCGECPACQLRQRGYEQWRARGHDQDRGAA

SEQ ID NO: 40482 - protein, 245 aa, Pandoraea pnomenusa
  REGION 1..245: note = tr|A0A514AS70|A0A514AS70_9BURK 7-cyano-7-deazaguanine synthase OS=Pandoraea pnomenusa; OX = 93220 GN=queC PE=3 SV=1
MIMTTSTDSALVLFSGGQDSTTCLAWALSRYARVETLGFDYGQRHSVELECRTDVLAKLRQRFPDWSPRLGDDHMIDLSILGQISETSLTRETTIAMAADNLPNTFVPGRNLLFMTIGATIAYRRGLRVLVGGMCETDFSGYPDCRDDTMKALQVALNLGMDRRFIVETPLMWIDKADTWQMAQDLGGQALVETVREDTHTCYLGERSVLHPWGYGCGECPACQLRQRGYEQWRARGHDQDRGAA

SEQ ID NO: 40483 - protein, 243 aa, Pandoraea pulmonicola
  REGION 1..243: note = tr|A0A378Z5L3|A0A378Z5L3_9BURK 7-cyano-7-deazaguanine synthase OS=Pandoraea pulmonicola; OX = 93221 GN=queC PE=3 SV=1
MTTSTDSALVLFSGGQDSTTCLAWALSRYARVETLGFDYGQRHSVELECRTDVLAKLRERFPQWAPRLGDDHMIDLSILGQISETSLTRETTIAMAANNLPNTFVPGRNLLFLTIGATIAYRRGLRVLVGGMCETDFSGYPDCRDDTMKALQVALNLGMDQRFIVETPLMWIDKADTWQMAQDLGGDKLVETVREDTHTCYLGERSVLHPWGYGCGECPACQLRQRGYEQWRARTGDQDRGAA

SEQ ID NO: 40484 - protein, 245 aa, Pandoraea sp.
  REGION 1..245: note = tr|A0A1Q4CH28|A0A1Q4CH28_9BURK 7-cyano-7-deazaguanine synthase OS=Pandoraea sp. 64-18; OX = 1895806 GN=queC PE=3 SV=1
MIMTTSTDSALVLFSGGQDSTTCLAWALSRYARVETLGFDYGQRHRVELECRTDVLAKLRARFAQWAPRLGDDHMIDLSILGQISETSLTRETTIAMAANHLPNTFVPGRNLLFLTIGATIAYRRGLRVLVGGMCETDFSGYPDCRDDTMKALQVALNLGMDQRFIVETPLMWIDKADTWQMAQDLGGDALVETVREDTHTCYLGERSVLHAWGYGCGECPACQLRQRGFEQWRARGHDHDRSAV

SEQ ID NO: 40485 - protein, 237 aa, Pandoraea sp.
  REGION 1..237: note = tr|A0A522JLD7|A0A522JLD7_9BURK 7-cyano-7-deazaguanine synthase OS=Pandoraea sp.; OX = 1883445 GN=queC PE=3 SV=1
MTISEDAALVLFSGGQDSTTCLAWALARYARVETLGFDYGQRHRVELDCRTDVLARLRAEFPAWTPRLGEDHMIDLSVLGQISDTALTREVSIAMSADHLPNTFVPGRNLLFMTIGATIAYRRGLRVLVGGMCETDFSGYPDCRDDTMKALQVALNLGMDRRFIVETPLMWIDKTQTWRLAHSLGGAPLVELVREATHTCYLGERGELHAWGYGCGECPACELRRRGYEGYIAQGGQ

SEQ ID NO: 40486 - protein, 246 aa, Pandoraea sputorum
  REGION 1..246: note = tr|A0A239S689|A0A239S689_9BURK 7-cyano-7-deazaguanine synthase OS=Pandoraea sputorum; OX = 93222 GN=queC_2 PE=3 SV=1
MIMTTSTDSALVLFSGGQDSTTCLAWALSRYARVETLGFDYGQRHSVELECRTDVLAKLRERFPQWAPRLGDDHMIDLSILGQISETSLTRETTIAMAANNLPNTFVPGRNLLFLTIGATIAYRRGLRVLVGGMCETDFSGYPDCRDDTMKALQVALNLGMDQRFIVETPLMWIDKADTWQMAQDLGGDVLVETVREDTHTCYLGERSVLHPWGYGCGECPACQLRQRGYEQWRARDNRNQGRQAV

SEQ ID NO: 40487 - protein, 206 aa, Pandoraea sputorum
  REGION 1..206: note = tr|A0A239S888|A0A239S888_9BURK 7-cyano-7-deazaguanine synthase OS=Pandoraea sputorum; OX = 93222 GN=queC_1 PE=3 SV=1
MKEVLLLASGGLDSTTVAYQLASERVDVVPMFFDYGQHCAEVEWNRVNEVLPASMRRPERNDISDLFRGSQSRLIREADLWNEEIKDDDLYIPYRTMLFFAAAAARAQTIGILDVYTGFINSNHAKEIDCTTAFMNSLDGLTSSIGSVRFHSPFRYSSKADVARAALQLGVPIGRTYSCQASGQFPCGACPNCVERLNALKDAGLV

SEQ ID NO: 40488 - protein, 262 aa, unidentified
  source 1..262: note = Pandoraea terrae
  REGION 1..262: note = tr|A0A5E4TB18|A0A5E4TB18_9BURK 7-cyano-7-deazaguanine synthase OS=Pandoraea terrae; OX = 1537710 GN=queC PE=3 SV=1
MTPATDTALVLFSGGQDSTTCLAWALSRYSRVETLGFDYGQRHRIELECRTDVLAKLRERFGQWRDRLGEDHMVDLSILGQISDTALTREVSIAMEADRLPNTFVPGRNLLFMTIGATIAYRRGLRVLVGGMCETDFSGYPDCRDDTMKALQVALNLGMDSRFVVETPLMWIDKANTWAMAQDLGGDALVELIREDTHTCYLGERSVLHAWGYGCGECPACQLRRRGFEAWRAGTTVAEFMASPALAGKDADDNAGKSGKAK

SEQ ID NO: 40489 - protein, 239 aa, Pandoraea thiooxydans
  REGION 1..239: note = tr|A0A0G3EXU9|A0A0G3EXU9_9BURK 7-cyano-7-deazaguanine synthase OS=Pandoraea thiooxydans; OX = 445709 GN=queC PE=3 SV=1
MIMTISEDTALVLFSGGQDSTTCLAWALARYARVETLGFDYGQRHRVELDCRTDVLARLRAEFPAWSPRLGEDHMIDLSVLGQISDTALTREVSIAMSADHLPNTFVPGRNLLFMTIGATIAYRRGLRVLVGGMCETDFSGYPDCRDDTMKALQVALNLGMDRRFIVETPLMWIDKTQTWQLAHSLGGAALVELVREATHTCYLGERGELHAWGYGCGECPACELRRRGYEGYRAQGGQ

SEQ ID NO: 40490 - protein, 233 aa, Pandoraea thiooxydans
  REGION 1..233: note = tr|A0A0G3ERN8|A0A0G3ERN8_9BURK 7-cyano-7-deazaguanine synthase OS=Pandoraea thiooxydans; OX = 445709 GN=queC PE=3 SV=1
MKTRAMVLFSGGQDSTTCLAWALDRYEHVETVGFDYGQRHSVELECRPRVLSHFREQFPEWGGKLGDDHMLDLSILGQISDTALTQGKSIEMEESGLPNTFVPGRNLLFFTLAAAIAYRRGLEVLVGGMCETDYSGYPDCRDSTLKALQVAIALGMDQPLIIETPLMWLDKGDTWRMAEHLGGEVLVELIRTETHTCYVGNRTAQHEWGYGCGECPACELRRKGFKSFREVAV

SEQ ID NO: 40491 - protein, 251 aa, Pandoraea vervacti
  REGION 1..251: note = tr|A0A1J0LYU0|A0A1J0LYU0_9BURK 7-cyano-7-deazaguanine synthase OS=Pandoraea vervacti; OX = 656178 GN=queC PE=3 SV=1
MIMTTSTDSALVLFSGGQDSTTCLAWALSRYARVETLGFDYGQRHSVELECRTDVLAKLRERFAQWAPRLGDDHMIDLSILGQISETSLTRETTIAMAANQLPNTFVPGRNLLFLTIGATIAYRRGLRVLVGGMCETDFSGYPDCRDDTMKALQVALNLGMDQRFIIETPLMWIDKADTWQMAQDLGGDVLVETVREDTHTCYLGERSVLHAWGYGCGECPACQLRQRGYEQWRARGNDGAGGAGGTGGAV

SEQ ID NO: 40492 - protein, 229 aa, unidentified
  source 1..229: note = Pannonibacter indicus
  REGION 1..229: note = tr|A0A0K6HS36|A0A0K6HS36_9RHOB 7-cyano-7-deazaguanine synthase OS=Pannonibacter indicus; OX = 466044 GN=queC PE=3 SV=1
MKTLVVCSGGMDSVTLAHKVAQENELVGLVSFNYGQRHLKELDFARACADDLGVEHIVIDISGIGRQLSGSALTDDVAVPDGHYAEETMRITVVPNRNAIMLAIAFGIAAARGAEAVATAVHGGDHFIYPDCRPGFTEAFETMQRQALAGVADVRLYTPYVHTDKAAIAAEGVRLGVDYTRSWSCYKGGEIHCGRCGTCVERREAFHMAGAEDPTTYADPDFWKEACGV

SEQ ID NO: 40493 - protein, 219 aa, Pannonibacter phragmitetus
  REGION 1..219: note = tr|A0A0U3PD77|A0A0U3PD77_9RHOB 7-cyano-7-deazaguanine synthase OS=Pannonibacter phragmitetus OX=121719 GN=queC PE=3 SV=1
MDSVTLAHKVAQEHELVGLVSFNYGQRHLKELDFARACAEDLGVEHIVIDISGIGRQLSGSALTDDVAVPDGHYAEETMRITVVPNRNAIMLAIAFGIAAARGAEAVATAVHGGDHFIYPDCRPGFTEAFETMQRQALAGVADVRLYTPYVHTDKAAIAAEGVRLGVDYTRSWSCYKGGEIHCGRCGTCVERREAFHMAGAEDPTTYADPDFWKEACGV

SEQ ID NO: 40494 - protein, 229 aa, Pannonibacter phragmitetus
  REGION 1..229: note = tr|A0A379A1F2|A0A379A1F2_9RHOB 7-cyano-7-deazaguanine synthase OS=Pannonibacter phragmitetus OX=121719 GN=queC PE=3 SV=1
MKTLVVCSGGMDSVTLAHKVAQEHELIGLVSFNYGQRHLKELDFARTCADDLGVEHIVIDISGIGRQLSGSALTDDVAVPDGHYAEETMRITVVPNRNAIMLAIAFGIAAARGAEAVATAVHGGDHFIYPDCRPGFTEAFEIMQRQALAGVADVRLYTPYVHTDKAAIAAEGVRLGVDYTRSWSCYKGGETHCGRCGTCVERREAFHLAGAEDPTTYADPDFWKEACGV

SEQ ID NO: 40495 - protein, 231 aa, unidentified
  source 1..231: note = Pantoea alhagi
  REGION 1..231: note = tr|A0A1W6B199|A0A1W6B199_9GAMM 7-cyano-7-deazaguanine synthase OS=Pantoea alhagi; OX = 1891675 GN=queC PE=3 SV=1
MKRAVVVFSGGQDSTTCLIQALAQYDEVHCVTFDYGQRHRQEIDVARELAMRLGARAHKVLDVTLLNELAISSLTRDNIPVPQYDASASGLPSTFVPGRNILFLTLASIYAYQVEAEAVITGVCETDFSGYPDCRDEFVKALNHAVELGMARAVRFETPLMWLNKAETWALADYWQQLPLVRQDTLTCYNGIKGDGCGECAACHLRANGLKSYQDDPAAVMLSMQQKTGLG

SEQ ID NO: 40496 - protein, 231 aa, Pantoea allii
  REGION 1..231: note = tr|A0A4S3BIS9|A0A4S3BIS9_9GAMM 7-cyano-7-deazaguanine synthase OS=Pantoea allii OX=574096; GN = queC PE=3 SV=1
MKRAVVVFSGGQDSTTCLIQALQQYDEVHCVTFDYGQRHREEIDVARDLAIKLGARAHKVLDVTMLNELAVSSLTRDNIPVPAYNPEASGLPSTFVPGRNILFLTLASVYAYQVEAEAVITGVCETDFSGYPDCRDEFVKALNHAVSLGMAREVRFETPLMWLNKAETWALADYWQQLMLVREQTLTCYNGVKGDGCGECAACHLRANGLQVYLNDRAGVMAAMKAKNGLN

SEQ ID NO: 40497 - protein, 231 aa, Pantoea allii
  REGION 1..231: note = tr|A0A2V2BI07|A0A2V2BI07_9GAMM 7-cyano-7-deazaguanine synthase OS=Pantoea allii OX=574096; GN = queC PE=3 SV=1
MKRAVVVFSGGQDSTTCLVQALQLYDEVHCVTFDYGQRHREEIEVARELALKLGARAHKVLDVTMLNALAVSSLTRDNIPVPAYDPQATGLPSTFVPGRNILFLTLASVYAYQVEAEAVITGVCETDFSGYPDCRDEFVKALNHAVTLGMARNIRFETPLMWLDKAETWALADYWQQLTLIREETLTCYNGVKGDGCGECAACHLRAKGLKAYLQDSPGIMSAMKAKTGLE

SEQ ID NO: 40498 - protein, 231 aa, unidentified
  source 1..231: note = Pantoea ananas
  REGION 1..231: note = tr|A0A2S8A0R5|A0A2S8A0R5_PANAN 7-cyano-7-deazaguanine synthase OS=Pantoea ananas OX=553; GN = queC PE=3 SV=1
MKRAVVVFSGGQDSTTCLIQALEQYDEVHCVTFDYGQRHREEIEVARDLASKLGARAHKVLDVTMLNELAVSSLTRDNIPVPAYNPEASGLPSTFVPGRNILFLTLASVYAYQVEAEAVITGVCETDFSGYPDCRDEFVKALNHAVSLGMAREVRFETPLMWLNKAETWALADYWQQLSLVREQTLTCYNGVKGDGCGECAACNLRANGLQGYLNDRDSVMAAMKAKSGLS

SEQ ID NO: 40499 - protein, 231 aa, unidentified
  source 1..231: note = Pantoea ananas
  REGION 1..231: note = tr|A0A2V1ZGC5|A0A2V1ZGC5_PANAN 7-cyano-7-deazaguanine synthase OS=Pantoea ananas OX=553; GN = queC PE=3 SV=1
MKRAVVVFSGGQDSTTCLVQALQHYDEVHCVTFDYGQRHREEIDVARDLSLKLGARAHKVLDVTMLNELAVSSLTRDSIPVPAYDPKASGLPSTFVPGRNILFLTLASVYAYQVEAEAVITGVCETDFSGYPDCRDEFVKALNHAIGLGMARDVRFETPLMWLNKAETWALADYWQQLTLIREETLTCYNGIKGDGCGECAACHLRSNGLNAYLQDRPGIMAAMKAKTGLP

SEQ ID NO: 40500 - protein, 231 aa, Pantoea ananatis
  REGION 1..231: note = tr|A0A0H3L0Z2|A0A0H3L0Z2_PANAA 7-cyano-7-deazaguanine synthase OS=Pantoea ananatis (strain AJ13355) OX=932677 GN=ybaX PE=3 SV=1
MKRAVVVFSGGQDSTTCLVQALQHYDEVHCVTFDYGQRHREEIDVARDLSLKLGARAHKVLDVTMLNELAVSSLTRDSIPVPAYDPEASGLPSTFVPGRNILFLTLASVYAYQVEAEAVITGVCETDFSGYPDCRDEFVKALNHAIGLGMARDVRFETPLMWLNKAETWALADYWQQLTLIREETLTCYNGIKGDGCGECAACHLRSNGLNAYLQDRPGIMAAMKAKTGLP

SEQ ID NO: 40501 - protein, 255 aa, Pantoea ananatis
  REGION 1..255: note = tr|D4GLQ0|D4GLQ0_PANAM 7-cyano-7-deazaguanine synthase OS=Pantoea ananatis (strain LMG 20103) OX=706191; GN = ybaX PE=3 SV=1
MPLQLFSRAFRYYHKHQFLLLGRAMKRAVVVFSGGQDSTTCLVQALQHYDEVHCVTFDYGQRHREEIDVARDLSLKLGARAHKVLDVTMLNELAVSSLTRDSIPVPAYDPKASGLPSTFVPGRNILFLTLASVYAYQVEAEAVITGVCETDFSGYPDCRDEFVKALNHAIGLGMARDVRFETPLMWLNKAETWALADYWQQLTLIREETLTCYNGIKGDGCGECAACHLRSNGLNAYLQDRPGIMAAMKAKTGLP

SEQ ID NO: 40502 - protein, 231 aa, Pantoea anthophila
  REGION 1..231: note = tr|A0A506P6L1|A0A506P6L1_9GAMM 7-cyano-7-deazaguanine synthase OS=Pantoea anthophila; OX = 470931 GN=queC PE=3 SV=1
MKRAVVVFSGGQDSTTCLVQALALYDEVHCVTFDYGQRHREEIEVARELAIRLGARAHKVLDVTMLNELAVSSLTRDSIPVPAYNPDATGLPSTFVPGRNILFLTLASVYAYQVEAEAVITGVCETDFSGYPDCRDEFVKAMNQAVTLGMARTLRFETPLMWLNKAETWALADYWQQLPLIREETLTCYNGVKGDGCGECAACHLRANGLQGYLSDRAGVMAAMKAKSGLN

SEQ ID NO: 40503 - protein, 231 aa, unidentified
  source 1..231: note = Pantoea coffeiphila
  REGION 1..231: note = tr|A0A2S9IHD4|A0A2S9IHD4_9GAMM 7-cyano-7-deazaguanine synthase OS=Pantoea coffeiphila; OX = 1465635 GN=queC PE=3 SV=1
MKRAVVVFSGGQDSTTCLIQALKQYDEVHCVTFDYGQRHRAEIDVAQRLSLSLGARAHKVLDVTLLNELAVSSLTRDNIPVPDWDPTSSGLPSTFVPGRNILFLTLAAIYAYQVEAEAVITGVCETDFSGYPDCRDEFVKALNHAVSLGMARDIRFETPLMWLNKAETWALADYWQQLKLVREQTLTCYNGIQGDGCGECAACHLRANGLQEYQHNADTVMQAMKTKTGLV

SEQ ID NO: 40504 - protein, 231 aa, Pantoea conspicua
  REGION 1..231: note = tr|A0A1X1BYK1|A0A1X1BYK1_9GAMM 7-cyano-7-deazaguanine synthase OS=Pantoea conspicua; OX = 472705 GN=queC PE=3 SV=1
MKRAVVVFSGGQDSTTCLIQALQQYDEVHCVTFDYGQRHREEIDVARDLAIRLGARAHKVLDVTMLNDLAVSSLTRDNIPVPTWDPNASGLPSTFVPGRNILFLTLASVYAYQVEAEAVITGVCETDFSGYPDCRDEFVKALNHAVSLGMAREVRFETPLMWLNKAETWALADYWQQLPLVREQTLTCYNGIKGDGCGDCAACHLRANGLQGYLNDRSGVMASLKAKSGLK

SEQ ID NO: 40505 - protein, 231 aa, Pantoea cypripedii
  REGION 1..231: note = tr|A0A1X1ERT8|A0A1X1ERT8_PANCY 7-cyano-7-deazaguanine synthase OS=Pantoea cypripedii; OX = 55209 GN=queC PE=3 SV=1
MKRAVVVFSGGQDSTTCLIQALQQYDEVHCVTFDYGQRHREEIEVAAELAHKLGARAHKVLDVTLLNELAVSSLTRDNIPVPAYDPEASGLPSTFVPGRNILFLTLASIYAYQVEAEAVITGVCETDFSGYPDCRDEFVKALNNAVSLGMARNIRFETPLMWLNKAETWALADYWQQLPLVRAETLTCYNGVKGDGCGECAACHLRARGLADYQANTAAIMAQMKQKSALA

SEQ ID NO: 40506 - protein, 231 aa, Pantoea deleyi
  REGION 1..231: note = tr|A0A506Q2Q7|A0A506Q2Q7_9GAMM 7-cyano-7-deazaguanine synthase OS=Pantoea deleyi; OX = 470932 GN=queC PE=3 SV=1
MKRAVVVFSGGQDSTTCLIQALQLYDEVHCVTFDYGQRHREEIEVAQALAITLGARAHKVLDVTMLNELAVSSLTRDNIPVPAYDPAASGLPSTFVPGRNILFLTLASVYAYQVEAEAVITGVCETDFSGYPDCRDEFVKALNQAVTLGMARTIRFETPLMWLNKAETWALADYWQQLTLVREQTLTCYNGVKGDGCGECAACHLRARGLQAYLDDRPGVMAAMKAKSGLN

SEQ ID NO: 40507 - protein, 231 aa, Pantoea dispersa
  REGION 1..231: note = tr|A0A437T8K1|A0A437T8K1_9GAMM 7-cyano-7-deazaguanine synthase OS=Pantoea dispersa; OX = 59814 GN=queC PE=3 SV=1
MKRAVVVFSGGQDSTTCLIQALQQYDEVHCVTFDYGQRHREEISVAAELAHQLGARAHKVLDVTLLNELAVSSLTRDNIPVPAYNPQASGLPSTFVPGRNILFLTLASIYAYQVEAEAVITGVCETDFSGYPDCRDEFVKALNNAVTLGMAREVRFETPLMWLNKAETWALADYWQQLPLVRSETLTCYNGVKGDGCGECAACHLRARGLADYQANAASVMAAMKQKSGLR

SEQ ID NO: 40508 - protein, 231 aa, Pantoea dispersa
  REGION 1..231: note = tr|A0A518XAK0|A0A518XAK0_9GAMM 7-cyano-7-deazaguanine synthase OS=Pantoea dispersa; OX = 59814 GN=queC PE=3 SV=1
MKRAVVVFSGGQDSTTCLVQALQHYDEVHCVTFDYGQRHREEIEVAAALAHKLGARAHKVLDVTLLNELAVSSLTRDNIPVPAYDPQASGLPSTFVPGRNILFLTLAAIYAYQVEAEAVITGVCETDFSGYPDCRDEFVKALNQAVSLGMARHIRFETPLMWLNKAETWALADYWQQLPLVRAETLTCYNGIRGDGCGECAACHLRARGLADYQANAAAVMAAMKQKSGLR

SEQ ID NO: 40509 - protein, 231 aa, Pantoea eucalypti
  REGION 1..231: note = tr|A0A506PSB9|A0A506PSB9_9GAMM 7-cyano-7-deazaguanine synthase OS=Pantoea eucalypti; OX = 470933 GN=queC PE=3 SV=1
MKRAVVVFSGGQDSTTCLIQALEQYDEVHCVTFDYGQRHREEIEVARDLAIKLGARAHKVLDVTMLNELAVSSLTRDNIPVPAYNPEASGLPSTFVPGRNILFLTLASVYAYQVEAEAVITGVCETDFSGYPDCRDEFVKALNNAVSLGMAREVRFETPLMWLNKAETWALADYWQQLSLVREQTLTCYNGVKGDGCGECAACNLRANGLQGYLNDRDRVMAAMKAKSGLS

SEQ ID NO: 40510 - protein, 231 aa, unidentified
  source 1..231: note = Pantoea latae
  REGION 1..231: note = tr|A0A1V9DIK6|A0A1V9DIK6_9GAMM 7-cyano-7-deazaguanine synthase OS=Pantoea latae; OX = 1964541 GN=queC PE=3 SV=1
MKRAVVVFSGGQDSTTCLIQALQQYDEVHCVTFDYGQRHREEIDVARELALKLGARAHKVLDVTLLNELAVSSLTRDNIPVPSYDPAASGLPSTFVPGRNILFLTLASVYAYQVEAEAVITGVCETDFSGYPDCRDEFVKALNHAVTLGMAREVRFETPLMWLNKAETWALADYWQSLTLVREETLTCYNGVKGDGCGECAACHLRARGLNDYLADRDGVMAAMKSKSGLA

SEQ ID NO: 40511 - protein, 231 aa, unidentified
  source 1..231: note = Pantoea rodasii
  REGION 1..231: note = tr|A0A0B1R7D6|A0A0B1R7D6_9GAMM 7-cyano-7-deazaguanine synthase OS=Pantoea rodasii; OX = 1076549 GN=queC PE=3 SV=1
MKRAVVVFSGGQDSTTCLIQALQQYDEVHCVTFDYGQRHREEIEVAAELAHKLGARAHKVLDVTLLNELAVSSLTRDNIPVPTYDPNASGLPSTFVPGRNILFLTLASIYAYQVEAEAVITGVCETDFSGYPDCRDEFVKALNNAVSLGMARNIRFETPLMWLNKAETWALADYWQQLPLVRAETLTCYNGVKGDGCGECAACHLRARGLADYQANASAVMAAMKQKSGLR

SEQ ID NO: 40512 - protein, 231 aa, unidentified
  source 1..231: note = Pantoea rodasii
  REGION 1..231: note = tr|A0A2M9WAK7|A0A2M9WAK7_9GAMM 7-cyano-7-deazaguanine synthase OS=Pantoea rodasii; OX = 1076549 GN=queC PE=3 SV=1
MKRAVVVFSGGQDSTTCLIQALQQYDEVHCVTFDYGQRHREEIEVAAELAQKLGARAHKVLDVTLLNELAVSSLTRDNIPVPAYDPDASGLPSTFVPGRNILFLTLASIYAYQVEAESVITGVCETDFSGYPDCRDEFVKALNNSVILGMARNIRFETPLMWLNKAETWALADYWQQLPLVRAETLTCYNGVKGDGCGECAACHLRARGLADYQANTAAVMTAMKQKSGLN

SEQ ID NO: 40513 - protein, 231 aa, unidentified
  source 1..231: note = Pantoea rwandensis
  REGION 1..231: note = tr|A0A1X1CTZ4|A0A1X1CTZ4_9GAMM 7-cyano-7-deazaguanine synthase OS=Pantoea rwandensis; OX = 1076550 GN=queC PE=3 SV=1
MKRAVVVFSGGQDSTTCLIQALQQYDEVHCVTFDYGQRHREEIEVAAELSQKLGARAHKVLDVTLLNELAVSSLTRDNIPVPTYDPNASGLPSTFVPGRNILFLTLAAIYAYQVEAEAVITGVCETDFSGYPDCRDEFVKALNHAVSLGMARDVRFETPLMWLNKAETWALADYWQQLPLVRAETLTCYNGVKGDGCGECAACHLRARGLADYQANAAAVMSVMKQKSGLN

SEQ ID NO: 40514 - protein, 231 aa, unidentified; identical to SEQ ID NO: 38097
  source 1..231: note = Pantoea sesami
  REGION 1..231: note = tr|A0A1M5LNZ5|A0A1M5LNZ5_9GAMM 7-cyano-7-deazaguanine synthase OS=Pantoea sesami; OX = 1881110 GN=queC PE=3 SV=1

SEQ ID NO: 40515 - protein, 231 aa, Pantoea sp.; identical to SEQ ID NO: 40498
  REGION 1..231: note = tr|E0LTT5|E0LTT5_9GAMM 7-cyano-7-deazaguanine synthase OS=Pantoea sp. aB OX=517433 GN=queC PE=3 SV=1

SEQ ID NO: 40516 - protein, 231 aa, Pantoea sp.
  REGION 1..231: note = tr|A0A2P5IRU6|A0A2P5IRU6_9GAMM 7-cyano-7-deazaguanine synthase OS=Pantoea sp. PSNIH6; OX = 2080494 GN=queC PE=3 SV=1
MKRAVVVFSGGQDSTTCLIQALQQYDEVHCVTFDYGQRHREEIDVARALALKLGARAHKVLDVTLLNELAVSSLTRDNIPVPSYDPAASGLPSTFVPGRNILFLTLASVYAWQVEAEAVITGVCETDFSGYPDCRDEFVKALNHAVSLGMAREVRFETPLMWLNKAETWALADYWQSLTLVREETLTCYNGVKGDGCGECAACHLRARGLNDYLADRDAVMAAMKRKSGLA

SEQ ID NO: 40517 - protein, 231 aa, Pantoea stewartii
  REGION 1..231: note = tr|H3R9A5|H3R9A5_PANSE 7-cyano-7-deazaguanine synthase OS=Pantoea stewartii subsp. stewartii DC283; OX = 660596 GN=queC PE=3 SV=1
MKRAVVVFSGGQDSTTCLVQALQRYDEVHCVTFDYGQRHREEIDVARDLALKLGARAHKVLDVTMLNALAVSSLTRDSIPVPSYDPTATGLPSTFVPGRNILFLTLASVYAYQVEAEAVITGVCETDFSGYPDCRDEFVKALNHAVSLGMARNIRFETPLMWLNKAETWALADYWQQLTLIREDTLTCYNGIKGDGCGDCAACHLRANGLKAYQQDRAGIMAAMKAKTGLE

SEQ ID NO: 40518 - protein, 231 aa, Pantoea vagans
  REGION 1..231: note = tr|E1SFA3|E1SFA3_PANVC 7-cyano-7-deazaguanine synthase OS=Pantoea vagans (strain C9-1) OX=712898 GN=queC; PE = 3 SV=1
MKRAVVVFSGGQDSTTCLIQAVQLYDEVHCVTFDYGQRHREEIEVARDLAMILGVRAHKVLDVTMLNELAVSSLTRDNIPVPAYNPEASGLPTTFVPGRNILFLTLASVYAYQVEAEAVITGVCETDFSGYPDCRDEFVKALNHAVSLGMAREVRFETPLMWLNKAETWALADYWQQLALVREQTLTCYNGVKGDGCGECAACHLRANGLQGYLNDRAGVMAAMKAKSGLN

SEQ ID NO: 40519 - protein, 231 aa, Pantoea vagans; identical to SEQ ID NO: 40511
  REGION 1..231: note = tr|A0A0U3T5U7|A0A0U3T5U7_9GAMM 7-cyano-7-deazaguanine synthase OS=Pantoea vagans; OX = 470934 GN=queC PE=3 SV=1

SEQ ID NO: 40520 - protein, 221 aa, unidentified
  source 1..221: note = Parabacteroides acidifaciens
  REGION 1..221: note = tr|A0A3D8HDA4|A0A3D8HDA4_9BACT 7-cyano-7-deazaguanine synthase OS=Parabacteroides acidifaciens OX=2290935 GN=queC PE=3 SV=1
MKHQEAALVCFSGGQDSTTCLFWAKKHFSRVEAVCFTYGQKHSLEIEVARKIAADAHVPFQVLDVSLISQLDASCSLTHTDIAMDQEKPADSYPNTFVPGRNMVFLTFAAILARSKGIFNLVTGVSEADYSGYPDCRDTFVRSLNVTLNLAMDEQFVIHTPLMNRDKSEVWELSDQLGVFDLVRTQTLTCYNGVIAEGCGHCPACKLRNEGLKKYIERKGK

SEQ ID NO: 40521 - protein, 220 aa, unidentified
  source 1..220: note = Parabacteroides chinchillae
  REGION 1..220: note = tr|A0A1H5YE97|A0A1H5YE97_9BACT 7-cyano-7-deazaguanine synthase OS=Parabacteroides chinchillae OX=871327 GN=queC PE=3 SV=1
MKQQEAALVCFSGGQDSTTCLFWAKKHFPRVEAVCFTYGQKHSLEIEVARKIASEASIPFHLLDVSLISQLAPNSLTDTSIPMDQDKPSDSYPNTFVPGRNMVFLTFAAIMARSKGIFNLVTGVSEADFSGYPDCRDTFIRSLNVTLNLAMDEQFVIHTPLMKRDKSDVWELSDKLGVFNLVRTQTLTCYNGILADGCGHCPACKLRKEGLNKYLQRKKQ

SEQ ID NO: 40522 - protein, 224 aa, Parabacteroides distasonis
  REGION 1..224: note = sp|A6LIS9|QUEC_PARD8 7-cyano-7-deazaguanine synthase; OS = Parabacteroides distasonis (strain ATCC 8503 / DSM 20701 / CIP 104284 / JCM 5825 / NCTC 11152) OX=435591 GN=q ueC PE=3 SV=1
MKQQDAALVCFSGGQDSTTCLFWAKKHFSRVEAVCFTYGQKHSLEIEVARKIAADADVPFQLLDVSLISQLDPNCSLTNASIEMDQEKPEDSYPNTFVPGRNMVFLTFAAILARGKGIYHLVTGVSEADYSGYPDCRDTFVRSLNVTLNLAMDEQFVIHTPLMDRDKSEVWELSDELGVFDLVRTQTLTCYNGVMAEGCGHCPACKLRKDGLEKYLKRKEENQK

SEQ ID NO: 40523 - protein, 224 aa, Parabacteroides distasonis; identical to SEQ ID NO: 40522
  REGION 1..224: note = tr|A0A069S7C9|A0A069S7C9_9BACT 7-cyano-7-deazaguanine synthase OS=Parabacteroides distasonis str. 3776 Po2 i OX=1339341 GN=queC PE=3 SV=1

SEQ ID NO: 40524 - protein, 223 aa, Parabacteroides goldsteinii
  REGION 1..223: note = tr|A0A0F5JFN3|A0A0F5JFN3_9BACT 7-cyano-7-deazaguanine synthase OS=Parabacteroides goldsteinii DSM 19448 = WAL 12034 OX=927665 GN=queC PE=3; SV = 1
MKHQDAALVCFSGGQDSTTCLFWAKKHFKRVEAVCFSYGQKHSLEIDIARKIAADADVPFQLLDVSLISQLAPNSLTDTSIEMDEDKPADSYPNTFVPGRNMVFLTFAAIMARSKGIFHLVTGVSEADFSGYPDCRDTFVRSLNVTLNLAMDEQFVIHTPLMDRDKSEVWQLSDELGVFDLVHTQTLTCYNGVPADGCGHCPACKLRREGLEKYLKRKLTANK

SEQ ID NO: 40525 - protein, 233 aa, Parabacteroides goldsteinii
  REGION 1..233: note = tr|S0GJT8|S0GJT8_9BACT Uncharacterized protein; OS = Parabacteroides goldsteinii dnLKV18 OX=1235789; GN = C803_01622 PE=4 SV=1
MQNNTYNKKVLLYSGGMDSWLIDKLWKPDIRLYIDMNTRYSKEEMKRLPDDTIIEKLDLSKWEREDKIIPLRNMYLIGIATNYGDEICLGATAGDRVLDKSPVFAELYEELLGYLYQKQHWTEKRTIRINLDYKAYTKTELLKQYIIQGGSISEAFSSSFSCYAPVDGHECWSCKPCFRKFIAFALNGYPFSEEVIERNISYIKREILPLIESGEYGRKREEEEIRQVLTLYR

SEQ ID NO: 40526 - protein, 224 aa, Parabacteroides gordonii
  REGION 1..224: note = tr|A0A0F5JKV8|A0A0F5JKV8_9BACT 7-cyano-7-deazaguanine synthase OS=Parabacteroides gordonii MS-1 = DSM 23371 OX=1203610 GN=queC PE=3 SV=1
MKHQEAALVCFSGGQDSTTCLFWAKKHFKRVEAVCFTYGQKHSLEIDIARKIAADAHVPFQLLDVSLISQLAPNSLTDTSITMDEDKPADSYPNTFVPGRNMVFLTFAAIMARSKGIFHLVTGVSEADFSGYPDCRDTFVRSLNVTLNLAMDEQFVIHTPLMDRDKSEVWQLSDELGVFDLVRTQTLTCYNGVPADGCGHCPACKLRKEGLEKYLKKKSTVDKQ

SEQ ID NO: 40527 - protein, 73 aa, Parabacteroides johnsonii
  REGION 1..73: note = tr|B7BEF9|B7BEF9_9BACT 7-cyano-7-deazaguanine synthase (Fragment) OS=Parabacteroides johnsonii DSM 18315; OX = 537006 GN=PRABACTJOHN_03438 PE=3 SV=1
MKHQEAALVCFSGGQDSTTCLFWAKKHFSRVEAVCFTYGQKHSLEIEVARKIAADADVPFQLLDVSLISQLDP

SEQ ID NO: 40528 - protein, 220 aa, Parabacteroides johnsonii
  REGION 1..220: note = tr|K6ACA8|K6ACA8_9BACT 7-cyano-7-deazaguanine synthase OS=Parabacteroides johnsonii CL02T12C29 OX=999419; GN = queC PE=3 SV=1
MKHQEAALVCFSGGQDSTTCLFWAKKHFSRVEAVCFTYGQKHSLEIEVARKIAADADVPFQLLDVSLISQLDPNCSLTNTDISMDQEKPADSYPNTFVPGRNMVFLTFAAILARSKGIFHLVTGVSEADFSGYPDCRDTFVRSLNVTLNLAMDEQFVIHTPLMDRDKSEVWELSDTLGVFDLVRTQTLTCYNGIMAEGCGHCPACTLRREGLENYLKRRR

SEQ ID NO: 40529 - protein, 233 aa, Parabacteroides merdae
  REGION 1..233: note = tr|A0A4Q5CA08|A0A4Q5CA08_9BACT Uncharacterized protein OS=Parabacteroides merdae OX=46503 GN=EAJ15_16450; PE = 4 SV=1
MQNNTYNKKVLLYSGGMDSWLIDKLWKPDIRLYIDMNTRYSKEEMKRLPDDIVIEKLDLSKWEREDKIIPLRNMYLIGIATNYGDEICLGATAGDRVLDKSPVFAELYEELLGYLYQKQHWTEKRTIRINLDYKAYTKTELLKQYIIQGGSINEAFSSSFSCYAPVDGHECWNCKPCFRKFIAFALNGYPFPREVIDMNISYIKREILPLIESGEYGRKREEEEIRQILTLYR

SEQ ID NO: 40530 - protein, 221 aa, Parabacteroides merdae
  REGION 1..221: note = tr|A0A351DZA5|A0A351DZA5_9BACT 7-cyano-7-deazaguanine synthase OS=Parabacteroides merdae; OX = 46503 GN=queC PE=3 SV=1
MKHKKEAALVCFSGGQDSTTCLFWAKKHFSRVEAVCFTYGQKHSLEIEVARKIAADADVPFQLLDVSLISQLDPNCSLTNTGISMDQEKPADSYPNTFVPGRNMVFLTFAAILARSKGIFNLVTGVSEADFSGYPDCRDTFVRSLNVTLNLAMDERFVIHTPLMDRDKSEVWELADELGVFDLVRTQTLTCYNGIMAEGCGHCPACKLRREGLEKYLKRRR

SEQ ID NO: 40531 - protein, 224 aa, Parabacteroides sp.; identical to SEQ ID NO: 40522
  REGION 1..224: note = tr|E1Z005|E1Z005_9BACT 7-cyano-7-deazaguanine synthase OS=Parabacteroides sp. 20_3 OX=469591 GN=queC; PE = 3 SV=1

SEQ ID NO: 40532 - protein, 236 aa, Parabacteroides sp.
  REGION 1..236: note = tr|C7X6I2|C7X6I2_9BACT 7-cyano-7-deazaguanine synthase OS=Parabacteroides sp. D13 OX=563193 GN=queC PE=3; SV = 1
MLAKPRIKNKKDMKQQDAALVCFSGGQDSTTCLFWAKKHFSRVEAVCFTYGQKHSLEIEVARKIAADANVPFQLLDVSLISQLDPNCSLTNASIEMDQEKPEDSYPNTFVPGRNMVFLTFAAILARGKGIYHLVTGVSEADYSGYPDCRDTFVRSLNVTLNLAMDEQFVIHTPLMDRDKSEVWELSDELGVFDLVRTQTLTCYNGVMAEGCGHCPACKLRKDGLEKYLKRKEENQK

SEQ ID NO: 40533 - protein, 243 aa, unidentified
  source 1..243: note = Paraburkholderia aromaticivorans
  REGION 1..243: note = tr|A0A248VEU8|A0A248VEU8_9BURK 7-cyano-7-deazaguanine synthase OS=Paraburkholderia aromaticivorans OX=2026199 GN=queC PE=3 SV=1
MIRNDAKRSALVLFSGGQDSATCLAWALERYETVETLGFDYGQRHRVELECREGFRNAVARAFPAWAERLGDDHMIDLSVLGAISDTAMTREIEIEATANGLPNTFVPGRNLMFMTIAAAIAYRRGLQVLVGGMCETDFSGYPDCRDDTMKALQVALNLGMDTRLLLETPLMWLDKADTWRLAHELGGAELVELVRVETHTCYVGERAELHAWGFGCGECPACRLRKRGYEAYLAGEKVTEPV

SEQ ID NO: 40534 - protein, 243 aa, unidentified
  source 1..243: note = Paraburkholderia aspalathi
  REGION 1..243: note = tr|A0A1I7CGC9|A0A1I7CGC9_9BURK 7-cyano-7-deazaguanine synthase OS=Paraburkholderia aspalathi OX=1324617 GN=queC PE=3 SV=1
MIRKDAKRSALVLFSGGQDSATCLAWALERYETVETLGFDYGQRHRVELECREGFRNAVTRAFPAWADRLGEDHMIDLSVLGSISDTAMTREIEIHATANGLPNTFVPGRNLMFMTIAAAIAYRRGLQVLVGGMCETDFSGYPDCRDDTMKALQVALNLGMDTRFLLETPLMWLDKADTWRLAHELGGDELVELVRVETHTCYVGERAELHAWGFGCGECPACRLRKRGYEAYLAGEKVTEPV

SEQ ID NO: 40535 - protein, 243 aa, unidentified
  source 1..243: note = Paraburkholderia azotifigens
  REGION 1..243: note = tr|A0A5C6VWW5|A0A5C6VWW5_9BURK 7-cyano-7-deazaguanine synthase OS=Paraburkholderia azotifigens OX=2057004 GN=queC PE=3 SV=1
MTRKDAKRSALVLFSGGQDSATCLAWALDRYETVETLGFDYGQRHRVELECREGFRSAVARTFLEWGERLGDDHMIDLSVLGSISDTAMTREIEIHATSNGLPNTFVPGRNLMFMTIAAAIAYRRGLRVLVGGMCETDFSGYPDCRDDTMKALQVALNLGMDSRFVLETPLMWIDKADTWRLAHELGGDELVELIRVETHTCYLGERAELHAWGFGCGECPACRLRKRGYEAYLSGEQVTEPA

SEQ ID NO: 40536 - protein, 388 aa, unidentified
  source 1..388: note = Paraburkholderia bryophila
  REGION 1..388: note = tr|A0A329B840|A0A329B840_9BURK Queuosine biosynthesis protein QueC OS=Paraburkholderia bryophila; OX = 420952 GN=BX591_1552 PE=4 SV=1
MPLQYDSIMNDTDADQALSLGLCGHCSGLQTGRKAEYEKEADYEWLLNAMLDAVKDERKLLRKGASLVKSLPIVNRSGLGIAAGILDSITPRDPQSTYDAMVLYSGGKDSTYMLIKLAEKGLKVCAWMLDPGYQSPQTIDNAKRITDKLGVPLVIEKSDKTLTDDLFRSGFSIDGNSDIELQKGAMTYGSACWPCFSVIAVSASRFANRHRIPLCFIGTQKGQNRLNLDGAGVLSAMELPKVNDLVDKFVKPFRKAIPDHVDQLRADPDEVGFPTVLVPFYELVRKPEKEAQIAYLEGHGWILPKNTGACSSNCMINELGRAVMRSKFGFDLYQVIDANERRLGHRPDEAAYGAPDPKIVKLGAVMLGLSDTEIGELGIDVQRGNRNA

SEQ ID NO: 40537 - protein, 244 aa, unidentified
  source 1..244: note = Paraburkholderia bryophila
  REGION 1..244: note = tr|A0A329C1C0|A0A329C1C0_9BURK 7-cyano-7-deazaguanine synthase OS=Paraburkholderia bryophila OX=420952 GN=queC PE=3 SV=1
MIRKDAKRSALVLFSGGQDSATCLAWALERYDTVETLGFDYGQRHRVELECREGFRGAVTRAFPAWADRLGDDHMIDLSVLGSISDTAMTREIEIEATANGLPNTFVPGRNLMFMTIAAAIAYRRGLQVLVGGMCETDFSGYPDCRDDTMKALQVALNLGMDTRFLLETPLMWLDKADTWRLAHELGGDELVELVRVETHTCYVGERSELHAWGFGCGECPACRLRKRGYEAYLSGEKVTEPPV

SEQ ID NO: 40538 - protein, 243 aa, unidentified
  source 1..243: note = Paraburkholderia caballeronis
  REGION 1..243: note = tr|A0A1H7HE20|A0A1H7HE20_9BURK 7-cyano-7-deazaguanine synthase OS=Paraburkholderia caballeronis OX=416943 GN=queC PE=3 SV=1
MTRTGGKNGALVLFSGGQDSATCLAWALDRYDTVETLGFDYGQRHRVELECREGFRSAVAHAFPDWGKRLGDDHMVDLSVLGAISDTAMTREIQIETAASGLPNTFVPGRNLMFMTIAAAIAYRRGLKVLVGGMCETDFSGYPDCRDDTIKALQVALNLGMDSRFVLETPLMWLDKADTWRLAQQLGGDELVELVRVETHTCYVGERSELHPWGFGCGECPACRLRRRGYDAFLAGEQVSEPV

SEQ ID NO: 40539 - protein, 216 aa, unidentified
  source 1..216: note = Paraburkholderia caledonica
  REGION 1..216: note = tr|A0A2Z5M8M2|A0A2Z5M8M2_9BURK 7-cyano-7-deazaguanine synthase OS=Paraburkholderia caledonica OX=134536 GN=CUJ87_03160 PE=3 SV=1
MVKFTHAVLLSGGLDSTVLLHQFHSQSGQKIRAINVNGGNASWLHQLHYSKANCNELGIPIEPLDLRGFQQLMAGYVPPELAGIDDFDSRCPYDGSILPVVMACAAYHCQISDTPMLLVGLTKEQSNPNTINFLKTLGNALSLFDPQARPVSIEAPFLSLTKSQVVQRGVQLGMDFSKTWSCFMGGSHHCGVCGPCVNRKDAFAAAAVADPTTYIA

SEQ ID NO: 40540 - protein, 243 aa, unidentified
  source 1..243: note = Paraburkholderia caledonica
  REGION 1..243: note = tr|A0A2Z5M740|A0A2Z5M740_9BURK 7-cyano-7-deazaguanine synthase OS=Paraburkholderia caledonica OX=134536 GN=queC PE=3 SV=1
MIRKDAKRSALVLFSGGQDSATCLAWALERYETVETLGFDYGQRHRVELECREGFRNAVVRTFPAWSERLGDDHMIDLSVLGAISDTAMTREIEIEATANGLPNTFVPGRNLMFMTIAAAIAYRRGLQVLVGGMCETDFSGYPDCRDDTMKALQVALNLGMDTRLLLETPLMWLDKADTWRLAHELGGDELVELVRIETHTCYVGERAELHAWGFGCGECPACRLRKRGYEAYLAGEKVTEPV

SEQ ID NO: 40541 - protein, 243 aa, unidentified
  source 1..243: note = Paraburkholderia caribensis
  REGION 1..243: note = tr|A0A0P0R6B9|A0A0P0R6B9_9BURK 7-cyano-7-deazaguanine synthase OS=Paraburkholderia caribensis MBA4 OX=1323664 GN=queC PE=3 SV=1
MTRKDAKSSALVLFSGGQDSATCLAWALDRYETVETLGFDYGQRHRVELECREGFRSAVARTFPEWGERLGDDHMIDLSVLGSISDTAMTREIEIHAASNGLPNTFVPGRNLMFMTIAAAIAYRRGLRVLVGGMCETDFSGYPDCRDDTMKALQVALNLGMDSRFVLETPLMWIDKADTWRLAHELGGEELVELIRVETHTCYLGERAELHAWGFGCGECPACRLRKRGYEAYLNGEQVTEPA

SEQ ID NO: 40542 - protein, 243 aa, unidentified
  source 1..243: note = Paraburkholderia caribensis
  REGION 1..243: note = tr|A0A2T3YLG9|A0A2T3YLG9_9BURK 7-cyano-7-deazaguanine synthase OS=Paraburkholderia caribensis OX=75105 GN=queC PE=3 SV=1
MTRKDAKSSALVLFSGGQDSATCLAWALDRYETVETLGFDYGQRHRVELECREGFRSAVARTFPEWGERLGDDHMIDLSVLGSISDTAMTREIEIHAASNGLPNTFVPGRNLMFMTIAAAIAYRRGLRVLVGGMCETDFSGYPDCRDDTMKALQVALNLGMDSRFVLETPLMWIDKADTWRLAHELGGDELVELIRVETHTCYLGERAELHAWGFGCGECPACRLRKRGYEAYLNGEQVAEPA

SEQ ID NO: 40543 - protein, 243 aa, unidentified
  source 1..243: note = Paraburkholderia diazotrophica
  REGION 1..243: note = tr|A0A1H6R1T9|A0A1H6R1T9_9BURK 7-cyano-7-deazaguanine synthase OS=Paraburkholderia diazotrophica OX=667676 GN=queC PE=3 SV=1
MTRKDAKSSALVLFSGGQDSATCLAWALDRYETVETLGFDYGQRHRVELECREGFRSAVARTFPDWGERLGDDHMIDLSVLGSISDTAMTRDIEIHAASNGLPNTFVPGRNLMFMTIAAAIAYRRGLRVLVGGMCETDFSGYPDCRDDTMKALQVALNLGMDSRFVLETPLMWIDKADTWRLAHTLGGDALVELIRIETHTCYLGERSELHAWGFGCGECPACRLRKRGYEAFLNGEQVTEPA

SEQ ID NO: 40544 - protein, 233 aa, unidentified
  source 1..233: note = Paraburkholderia diazotrophica
  REGION 1..233: note = tr|A0A1H6RLR7|A0A1H6RLR7_9BURK 7-cyano-7-deazaguanine synthase OS=Paraburkholderia diazotrophica OX=667676 GN=queC PE=3 SV=1
MKTRALVLFSGGQDSATCLAWALNRYTYVETVGFDYGQRHSVELDCRLTVLDDLRKVFPIWSERLGCDHLLDLSVLGSVSDTALTQGKAIEIEKSGLPNTFVPGRNLLFFTLAAAIAYRRDLHSLVGGMCETDYSGYPDCRDNTLKSLQVTLALGMDSPLIIETPLMWIDKADTWQMAADLGGSALVDLIRKATHTCYVGDRTQSHDWGYGCGQCPACELRANGYRTFATRNV

SEQ ID NO: 40545 - protein, 244 aa, unidentified
  source 1..244: note = Paraburkholderia dipogonis
  REGION 1..244: note = tr|A0A4Y8N8N2|A0A4Y8N8N2_9BURK 7-cyano-7-deazaguanine synthase OS=Paraburkholderia dipogonis OX=1211383 GN=queC PE=3 SV=1
MIRKDAKRSALVLFSGGQDSATCLAWALERYETVETLGFDYGQRHRVELECREGFRDAVARAFPAWAERLGDDHMIDLSVLGAISDTAMTREIEIEATANGLPNTFVPGRNLMFMTIAAAIAYRRGLQVLVGGMCETDFSGYPDCRDDTMKALQVALNLGMDTRVLLETPLMWLDKGDTWRLAHELGGDELVELVRVETHTCYVGERAELHAWGFGCGECPACRLRKRGYEAYLSGEKVTEAPV

SEQ ID NO: 40546 - protein, 244 aa, unidentified
  source 1..244: note = Paraburkholderia eburnea
  REGION 1..244: note = tr|A0A2S4MNY1|A0A2S4MNY1_9BURK 7-cyano-7-deazaguanine synthase OS=Paraburkholderia eburnea OX=1189126 GN=queC PE=3 SV=1
MTRTETRNGALVLFSGGQDSATCLAWALDRYDTVETLGFDYGQRHRVELECRDGFRAAIAREFPEWAERLGEDHMIDLSVLGSISDTAMTREIEIETAASGLPNTFVPGRNLMFMQIAAAIAYRRGLRVLVGGMCETDFSGYPDCRDDTMKALQVALNLGMDTRFLLETPLMWLDKGDTWRLAEQLGGEALVELVRVETHTCYVGERAELHAWGFGCGECPACKLRKRGYEAYLAGEQVTEAPV

SEQ ID NO: 40547 - protein, 244 aa, unidentified
  source 1..244: note = Paraburkholderia endofungorum
  REGION 1..244: note = tr|A0A2P5KD91|A0A2P5KD91_9BURK 7-cyano-7-deazaguanine synthase OS=Paraburkholderia endofungorum OX=417203 GN=queC PE=3 SV=1
MTRTDAQRGALVLFSGGQDSATCVAWALSRYDRVETIGFDYGQRHRVELECREGFRDALIRAFPQWKPTLGDDHRVDLSVLGAISDTAMTREIQIETQANGLPNTFVPGRNLMFMTIAAAVAYRRGLGVLVGGMCETDFSGYPDCRDDTMKVLQVALNLGMDQRFVLETPLMWLDKADTWRLAESIGGEALVKLIRVDTHTCYVGERAELHDWGFGCGECPACRLRARGYHAFRHGGRVDPASL

SEQ ID NO: 40548 - protein, 243 aa, unidentified
  source 1..243: note = Paraburkholderia fungorum
  REGION 1..243: note = tr|A0A2N8QLI0|A0A2N8QLI0_9BURK 7-cyano-7-deazaguanine synthase OS=Paraburkholderia fungorum OX=134537 GN=queC PE=3 SV=1
MIRKDAKRSALVLFSGGQDSATCLAWALERYETVETLGFDYGQRHRVELECREGFRNAVARAFPAWAERLGEDHMIDLSVLGSISDTAMTREIEIHATANGLPNTFVPGRNLMFMTIAGAIAYRRGLQVLVGGMCETDFSGYPDCRDDTMKALQVALNLGMDTRFLLETPLMWLDKADTWRLAHELGGEELVELVRVETHTCYVGERAELHAWGFGCGECPACRLRKRGYEAYLAGEKVTEPV

SEQ ID NO: 40549 - protein, 244 aa, unidentified
  source 1..244: note = Paraburkholderia fungorum
  REGION 1..244: note = tr|A0A1H0YZ88|A0A1H0YZ88_9BURK 7-cyano-7-deazaguanine synthase OS=Paraburkholderia fungorum OX=134537 GN=queC PE=3 SV=1
MIRNDAKRSALVLFSGGQDSATCLAWALERYETVETLGFDYGQRHRVELECREGFRQAVTRAFPAWADRLGEDHMIDLSVLGSISDTAMTREIEIEATANGLPNTFVPGRNLMFMTIAAAIAFRRGLQVLVGGMCETDFSGYPDCRDDTMKALQVALNLGMDTRFLLETPLMWLDKADTWRLAHQLGGDELVELVRVETHTCYVGERAELHSWGFGCGECPACRLRKRGYEAYLAGENVTESPL

SEQ ID NO: 40550 - protein, 243 aa, unidentified
  source 1..243: note = Paraburkholderia ginsengiterrae
  REGION 1..243: note = tr|A0A1A9NAT2|A0A1A9NAT2_9BURK 7-cyano-7-deazaguanine synthase OS=Paraburkholderia ginsengiterrae OX=1462993 GN=queC PE=3 SV=1
MIRNNAKRSALVLFSGGQDSATCLAWALERYETVETLGFDYGQRHRVELECREGFRHAIVRAFPAWADRLGDDHMIDLSVLGSISDTAMTREIEIEAATNGLPNTFVPGRNLMFMTIAAAIAYRRGLQVLVGGMCETDFSGYPDCRDDTMKALQVALNLGMDARFQLETPLMWLDKADTWRLAHELGGEELVELVRVETHTCYVGERSELHDWGFGCGECPACRLRKRGYEAYLAGEKVTEPV

SEQ ID NO: 40551 - protein, 243 aa, unidentified
  source 1..243: note = Paraburkholderia graminis
  REGION 1..243: note = tr|B1G3M8|B1G3M8_PARG4 7-cyano-7-deazaguanine synthase OS=Paraburkholderia graminis (strain ATCC 700544 / DSM 17151 / LMG 18924 / NCIMB 13744 / C4D1M) OX=396598; GN = q ueC PE=3 SV=1
MIRKDAKRSALVLFSGGQDSATCLAWALERYDTVETLGFDYGQRHRVELECREGFRNAVARTFPAWGERLGDDHMIDLSVLGAISETAMTREIEIEATASGLPNTFVPGRNLMFMTIAAAIAYRRGLEVLVGGMCETDFSGYPDCRDDTMKALQVALNLGMDSRFALETPLMWLDKADTWRLAHELGGDELVELVRVETHTCYVGERAELHAWGFGCGECPACRLRKRGYEAYLAGEKVTEPA

SEQ ID NO: 40552 - protein, 243 aa, unidentified
  source 1..243: note = Paraburkholderia hospita
  REGION 1..243: note = tr|A0A244DG77|A0A244DG77_9BURK 7-cyano-7-deazaguanine synthase OS=Paraburkholderia hospita OX=169430 GN=queC PE=3 SV=1
MTRKDAKSSALVLFSGGQDSATCLAWALDRYETVETLGFDYGQRHRVELECREGFRSAVARTFPEWGERLGDDHMIDLSVLGSISDTAMTREIEIHAASNGLPNTFVPGRNLMFMTIAAAIGYRRGLRVLVGGMCETDFSGYPDCRDDTMKALQVALNLGMDSRFVLETPLMWIDKADTWRLAHELGGEELVELIRVETHTCYLGERAELHAWGFGCGECPACRLRKRGYEAYLNGEQVTEPA

SEQ ID NO: 40553 - protein, 243 aa, unidentified
  source 1..243: note = Paraburkholderia hospita
  REGION 1..243: note = tr|A0A1H6HV07|A0A1H6HV07_9BURK 7-cyano-7-deazaguanine synthase OS=Paraburkholderia hospita OX=169430 GN=queC PE=3 SV=1
MTRKDAKSSALVLFSGGQDSATCLAWALDRFETVETLGFDYGQRHRVELECREGFRSAVARTFPEWGERLGDDHMIDLSVLGSISDTAMTREIEIHAASNGLPNTFVPGRNLMFMTIAAAIGYRRGLRVLVGGMCETDFSGYPDCRDDTMKALQVALNLGMDSRFVLETPLMWIDKADTWRLAHELGGEELVELIRVETHTCYLGERAELHAWGFGCGECPACRLRKRGYEAYLNGEQVTEPA

SEQ ID NO: 40554 - protein, 243 aa, unidentified
  source 1..243: note = Paraburkholderia insulsa
  REGION 1..243: note = tr|A0A2T1B4H2|A0A2T1B4H2_9BURK 7-cyano-7-deazaguanine synthase OS=Paraburkholderia insulsa OX=1441714 GN=queC PE=3 SV=1
MIRKDAKRSALVLFSGGQDSATCLAWALERYETVETLGFDYGQRHRVELECREGFRNAVARAFPAWAERLGEDHMIDLSVLGSISDTAMTREIEIHATANGLPNTFVPGRNLMFMTIAGAIAYRRGLQVLVGGMCETDFSGYPDCRDDTMKALQVALNLGMDTRFLLETPLMWLDKADTWRLAHELGGDELVELVRVETHTCYVGERAELHAWGFGCGECPACRLRKRGYEAYLAGEKVTEPV

SEQ ID NO: 40555 - protein, 243 aa, unidentified
  source 1..243: note = Paraburkholderia megapolitana
  REGION 1..243: note = tr|A0A1I3UUM8|A0A1I3UUM8_9BURK 7-cyano-7-deazaguanine synthase OS=Paraburkholderia megapolitana OX=420953 GN=queC PE=3 SV=1
MTRKDAKSSALVLFSGGQDSATCLAWALERYETVETLGFDYGQRHRVELECREGFRQAIVQRFPAWAARLGDDHTIDLSVLGAISDTAMTREIQIETAANGLPNTFVPGRNLMFMTIAAAIAYRRGLQVLVGGMCETDFSGYPDCRDDTMKALQVTLNLGMATRLLLETPLMWLDKADTWRLAHTLGGDELVELVRVETHTCYVGERAELHAWGFGCGECPACRLRKRGYEAYLVGEKVTAPA

SEQ ID NO: 40556 - protein, 198 aa, unidentified
  source 1..198: note = Paraburkholderia monticola
  REGION 1..198: note = tr|A0A149PXM4|A0A149PXM4_9BURK 7-cyano-7-deazaguanine synthase OS=Paraburkholderia monticola OX=1399968 GN=CI15_06275 PE=3 SV=1
MKTALLLSGGMDSVAIAYWMRPEVGITVAYGQRAAEAEVRAAAAVCEALNIEHHVIDADLSALGSGDMAGSAPAALAPVSEWWPFRNQMLITLAAMKAVSLDVNRLLIGTLRTDGMHADGTQEFIAAINALLRCQEGAISLEAPAIGLTGPELITASGVPADLLAWAHSCHVANEACGMCRGCRKHYETLGELGFEPY

SEQ ID NO: 40557 - protein, 243 aa, unidentified
  source 1..243: note = Paraburkholderia monticola
  REGION 1..243: note = tr|A0A149PY28|A0A149PY28_9BURK 7-cyano-7-deazaguanine synthase OS=Paraburkholderia monticola OX=1399968 GN=queC PE=3 SV=1
MIRKDAKRSALVLFSGGQDSATCLAWALDRYDTVETLGFDYGQRHRVELECREGFRQAITRAFPAWADRLGDDHMIDLSLLGAISDTAMTREIEIQATSNGLPNTFVPGRNLMFMTIAAAIAYRRGLQVLVGGMCETDFSGYPDCRDDTMKALQVALNLGMDTRFALETPLMWLDKADTWRLAHELGGDELVELVRVETHTCYVGERAELHSWGFGCGECPACRLRKRGYEAYLAGEKVTEPV

SEQ ID NO: 40558 - protein, 206 aa, unidentified
  source 1..206: note = Paraburkholderia phenazinium
  REGION 1..206: note = tr|A0A1G8LXQ3|A0A1G8LXQ3_9BURK 7-cyano-7-deazaguanine synthase OS=Paraburkholderia phenazinium OX=60549 GN=SAMN05216466_117167 PE=3 SV=1
MKQALLLASGGLDSTTVGYQLVATGVEVVPIFFDYGQHCVEMEWSRVNEVLPADVQRPERFNMSDIFRGSQSRLIREADLWTEEVKDDDLYIPYRTMLFFAAAAARAQTVGILDVYTGFINSNHAKEIDCSAAFMNSLDGLTSSIGPVRFHSPFRYSSKADVARAAAELGVPIGRTYSCQASAQFPCGACPNCVERLNALKEAKLV

SEQ ID NO: 40559 - protein, 244 aa, unidentified
  source 1..244: note = Paraburkholderia phenazinium
  REGION 1..244: note = tr|A0A4R7RGM3|A0A4R7RGM3_9BURK 7-cyano-7-deazaguanine synthase OS=Paraburkholderia phenazinium OX=60549 GN=queC PE=3 SV=1
MIRKDAKSSALVLFSGGQDSATCLAWALERYETVETLGFDYGQRHRVELECREGFRDAVVRAVPAWADRLGDDHMIDLSVLGSISDTAMTREIQIEATANGLPNTFVPGRNLMFMTIAAAIAYRRGLQVLVGGMCETDFSGYPDCRDDTMKALQVALNLGMDQRFLLETPLMWLDKADTWRLAHELGGDELVELIRVETHTCYLGERAELHAWGFGCGECPACRLRKRGYEAYLAGEKVTEAPV

SEQ ID NO: 40560 - protein, 232 aa, unidentified
  source 1..232: note = Paraburkholderia phenoliruptrix
  REGION 1..232: note = tr|K0DL45|K0DL45_9BURK 7-cyano-7-deazaguanine synthase OS=Paraburkholderia phenoliruptrix BR3459a; OX = 1229205 GN=queC PE=3 SV=1
MLFSGGQDSATCLAWALERYETVETLGFDYGQRHRVELECREGFRNAVARTFPAWGERLGDDHMVDLSVLGAISETAMTREIEIEATANGLPNTFVPGRNLMFMTIAAAIAYRRGLQVLVGGMCETDFSGYPDCRDDTMKALQVALNLGMDSRFVLDTPLMWLDKADTWRLAHALGGDELVELVRVETHTCYVGERAELHAWGFGCGECPACRLRKRGYEAWLAGEKVTGPV

SEQ ID NO: 40561 - protein, 243 aa, unidentified
  source 1..243: note = Paraburkholderia phymatum
  REGION 1..243: note = sp|B2JJV1|QUEC_PARP8 7-cyano-7-deazaguanine synthase; OS = Paraburkholderia phymatum (strain DSM 17167 / CIP 108236 / LMG 21445 / STM815) OX=391038 GN=queC PE=3 SV=1
MTRKDAKSSALVLFSGGQDSATCLAWALDRYETVETLGFDYGQRHRVELECREGFRSAVARTFPEWGERLGDDHMIDLSVLGSISETAMTREIEIHAASNGLPNTFVPGRNLMFMTIAAAIAYRRGLRVLVGGMCETDFSGYPDCRDDTMKALQVALNLGMDSRFVLETPLMWIDKADTWRLAHELGGDELVELIRVETHTCYLGERAELHAWGFGCGECPACRLRKRGYEAYLSGEQVTEPA

SEQ ID NO: 40562 - protein, 244 aa, unidentified
  source 1..244: note = Paraburkholderia phytofirmans
  REGION 1..244: note = sp|B2T1L3|QUEC_PARPJ 7-cyano-7-deazaguanine synthase; OS = Paraburkholderia phytofirmans (strain DSM 17436 / LMG 22146 / PsJN) OX=398527 GN=queC PE=3 SV=1
MIRKDAKRSALVLFSGGQDSATCLAWALERYETVETLGFDYGQRHRVELECREGFRNAVARAFPAWAERLGDDHMIDLSVLGAISDTAMTREIEIEATANGLPNTFVPGRNLMFMTIAAAIAYRRGLQVLVGGMCETDFSGYPDCRDDTMKALQVALNLGMDTRVLLETPLMWLDKGDTWRLAHQLGGDELVELVRVETHTCYVGERAELHAWGFGCGECPACRLRKRGYEAYLSGEKVTEAPV

SEQ ID NO: 40563 - protein, 243 aa, unidentified
  source 1..243: note = Paraburkholderia piptadeniae
  REGION 1..243: note = tr|A0A1N7RKG9|A0A1N7RKG9_9BURK 7-cyano-7-deazaguanine synthase OS=Paraburkholderia piptadeniae OX=1701573 GN=queC PE=3 SV=1
MTRKDAKSSALVLFSGGQDSATCLAWALDRYETVETLGFDYGQRHRVELECREGFRSAVARTFPEWGERLGDDHMIDLSVLGSISETAMTRDIEIHAASNGLPNTFVPGRNLMFMTIAAAIAYRRGLRVLVGGMCETDFSGYPDCRDDTMKALQATLNLGMDSRFVLETPLMWIDKADTWRLAHTLGGDALVELIRIETHTCYLGERSELHAWGFGCGECPACRLRKRGYEAYLNGEQVTEPA

SEQ ID NO: 40564 - protein, 243 aa, unidentified
  source 1..243: note = Paraburkholderia rhizosphaerae
  REGION 1..243: note = tr|A0A4R8LQI7|A0A4R8LQI7_9BURK 7-cyano-7-deazaguanine synthase OS=Paraburkholderia rhizosphaerae OX=480658 GN=queC PE=3 SV=1
MTRKDAKRSALVLFSGGQDSATCVAWALDRYETVETLGFDYGQRHRVELECRGSFRSAIAGAFPEWAARLGEDHLIDLSVLGSISDTAMTREIEIETAASGLPNTFVPGRNLMFMTIAAAIAYRRGLQVLVGGMCETDFSGYPDCRDDTLKALQVALNLGMDSRFVVETPLMWLDKADTWRLAHQLGGDALVDLVRVETHTCYVGERAELHDWGYGCGECPACRLRKRGYEAYLTGEQVSEPV

SEQ ID NO: 40565 - protein, 244 aa, unidentified
  source 1..244: note = Paraburkholderia rhizoxinica
  REGION 1..244: note = tr|E5ANB1|E5ANB1_PARRH 7-cyano-7-deazaguanine synthase OS=Paraburkholderia rhizoxinica (strain DSM 19002 / CIP 109453 / HKI 454) OX=882378 GN=queC PE=3 SV=1
MTRTDAQRGALVLFSGGQDSATCVAWALSRYERVETLGFDYGQRHRVELECRDGFRDALIRAFPQWKQTLGDDHRVDLSVLGAISDTAMTREIQIETQANGLPNTFVPGRNLMFMTIAAAVAYRRGLGVLVGGMCETDFSGYPDCRDDTMKALQVALNLGMDQRFVLETPLMWLDKADTWRLAASIGGEALVELIRVETHTCYVGERAELHDWGFGCGACPACRLRARGYHAFRHGRRVDPASL

SEQ ID NO: 40566 - protein, 243 aa, unidentified
  source 1..243: note = Paraburkholderia rhynchosiae
  REGION 1..243: note = tr|A0A2N7WQ26|A0A2N7WQ26_9BURK 7-cyano-7-deazaguanine synthase OS=Paraburkholderia rhynchosiae OX=487049 GN=queC PE=3 SV=1
MIRKDAKRSALVLFSGGQDSATCLAWALERYETVETLGFDYGQRHRVELECREGFRTAVARTFPAWGERLGDDHMIDLSVLGGISETAMTREIEIEATANGLPNTFVPGRNLMFMTIAAAIAYRRGLQVLVGGMCETDFSGYPDCRDDTMKALQVALNLGMDSRFLLETPLMWLDKADTWRLAHELGGDELVELVRVETHTCYVGERAELHAWGFGCGECPACRLRKRGYEAYLTGQKVTEPV

SEQ ID NO: 40567 - protein, 421 aa, unidentified
  source 1..421: note = Paraburkholderia ribeironis
  REGION 1..421: note = tr|A0A1N7SJB5|A0A1N7SJB5_9BURK 7-cyano-7-deazaguanine synthase OS=Paraburkholderia ribeironis OX=1247936 GN=BN2475_750022 PE=3 SV=1
MRLRCQGPRPLRAADGLHSLEDYYVTSEVVDIGGLVGTLNNRAFLNGIMRRVGTRTVHWRGLTNLSYLKHYRLYMCDSSMWETGARYGALVLYMGHGQSIMLTGASVARCRDPAVLARIRDYGIETSALLQPPHGMAAVRERAAVRRERIGALARHRTQPRRAVVQRRRDQPRGVADLGRVCTPVWSQDMNESRIERKAMVVLSGGQDSTTCLYWAKRRDDNLRGITFDYAGHHRREIDAARTVAALAHLGLNIGPLLAARSRLTDHRREPETYTHLASMHAIVGDCVELTFVPMRNAFFLRLATNQAVALDCFTLVTGVCEADYANYPDCREHFIRSMERTIKEALGVSNFRIETPLVHLSKVLSIRLAQSIPGALDALACSHTCFASKYPRAAHAMPACCAHGFEQAGIEDPLIEAARA

SEQ ID NO: 40568 - protein, 243 aa, unidentified
  source 1..243: note = Paraburkholderia ribeironis
  REGION 1..243: note = tr|A0A1N7RJS4|A0A1N7RJS4_9BURK 7-cyano-7-deazaguanine synthase OS=Paraburkholderia ribeironis OX=1247936 GN=queC PE=3 SV=1
MIRKDAKRSALVLFSGGQDSATCLAWALERYETVETLGFDYGQRHRVELECREGFRQAVMRTFPAWAGRLGDDHMIDLSVLGSISDTAMTREIEIEATASGLPNTFVPGRNLMFMTIAAAIAYRRGLQVIVGGMCETDFSGYPDCRDDTMKALQATLNLGMDTRLLIETPLMWLDKADTWRLAHELGGDELVELVRVETHTCYVGERAELHAWGFGCGECPACRLRKRGFEAYLAGDKVTEPV

SEQ ID NO: 40569 - protein, 244 aa, unidentified
  source 1..244: note = Paraburkholderia sacchari
  REGION 1..244: note = tr|A0A0A6QGN9|A0A0A6QGN9_9BURK 7-cyano-7-deazaguanine synthase OS=Paraburkholderia sacchari OX=159450 GN=queC PE=3 SV=1
MTRTEPRNGALVLFSGGQDSATCLAWALDRYDTVETLGFDYGQRHRVELECREGFRAAIAQTFPEWGERLGDDHMIDLSVLGSISDTAMTREIEIETAANGLPNTFVPGRNLMFMQIAAAIAYRRGLEFLVGGMCETDFSGYPDCRDDTMKALQVALNLGMETRFVIETPLMWLDKADTWRLAQQLGGEALVELVRVETHTCYVGERAELNDWGFGCGECPACKLRKRGYEAYLAGEHVTQAPV

SEQ ID NO: 40570 - protein, 243 aa, unidentified
  source 1..243: note = Paraburkholderia sartisoli
  REGION 1..243: note = tr|A0A1H4FTB1|A0A1H4FTB1_9BURK 7-cyano-7-deazaguanine synthase OS=Paraburkholderia sartisoli OX=83784 GN=queC PE=3 SV=1
MTRTDAKRSALVLFSGGQDSATCLAWALERFETVETLGFDYGQRHRVELECREGFRSAIAREFPAWGERLGDDHMIDLGVLGAISDTAMTREIQIEAAASGLPNTFVPGRNLMFMTIAAAIAYRRGLQVLVGGMCETDFSGYPDCRDDTMKALQVALNLGMDSRFLLETPLMWLDKADTWRLALELGGEALVELIRVETHTCYVGERAELHKWGFGCGECPACKLRKRGYEAYLAGENVTEPV

SEQ ID NO: 40571 - protein, 460 aa, unidentified
  source 1..460: note = Paraburkholderia sediminicola
  REGION 1..460: note = tr|A0A3R7D659|A0A3R7D659_9BURK 7-cyano-7-deazaguanine synthase in queuosine biosynthesis; OS = Paraburkholderia sediminicola OX=458836 GN=DFJ54_2269; PE = 4 SV=1
MTGARSGYLELKELTVDVVEPGSRPRRGAHVCELERHIRFDTEILETFSSTNWQPVVYDALVVAAAVEFCDRSLGRSSMNWGRRFHIHIPVHDPARWSEFTVSRALVEALNFLTGDDWHFIFRARKAQAAKPAQNRMEFPSDGEAVIAYSEGMDSRAVAGLERKRLGQRLVRVRVGTKQRDIPRKAQLSTPFAALPYEVKLGCDNSENSARSRGFKFSLVAAIAAYMISAPYAIVPESGQGALAPAILPVGQGYADYRNHPAFTVLMERFVYALFGHRLRYRFPRLWMTKGETLREFVDNCGDSANWATTRSCWQKQRQVSVSKSWRQCGICAACMLRRLSVHAARLDEPKENYVWETLKASTFEAGVAEGFNLITEALREYAIAGVLHFEHFSSIRESPTYEMLKRRTATELARALTESPDIVVNGLDRLLQQHGREWAAFTDDLGPESFVRKWIDTAS

SEQ ID NO: 40572 - protein, 243 aa, unidentified
  source 1..243: note = Paraburkholderia sediminicola
  REGION 1..243: note = tr|A0A3R7FM88|A0A3R7FM88_9BURK 7-cyano-7-deazaguanine synthase OS=Paraburkholderia sediminicola OX=458836 GN=queC PE=3 SV=1
MIRKDAKRSALVLFSGGQDSATCLAWALERYETVETLGFDYGQRHRVELECREGFRNAVTRAFPAWADRLGEDHMIDLSVLGSISDTAMTREIEIHATANGLPNTFVPGRNLMFMTIAAAIAYRRGLQVLVGGMCETDFSGYPDCRDDTMKALQVALNLGMDTRFLLETPLMWLDKADTWRLAHELGGDELVELVRVETHTCYVGERAELHSWGFGCGECPACRLRKRGYEAYLTGEKVTEPV

SEQ ID NO: 40573 - protein, 243 aa, unidentified
  source 1..243: note = Paraburkholderia silvatlantica
  REGION 1..243: note = tr|A0A2U1AKB4|A0A2U1AKB4_9BURK 7-cyano-7-deazaguanine synthase OS=Paraburkholderia silvatlantica OX=321895 GN=queC PE=3 SV=1
MTRTEAKGALVLFSGGQDSATCLAWALDRYESVETLGFDYGQRHRVELECREGFRAAIARAFPEWGERLGDDHMIDLSVLGSISDTAMTREIEIETAASGLPNTFVPGRNLMFMQIAAAIAYRRGLKVLVGGMCETDFSGYPDCRDDTMKALQVALNLGMDTRFVLETPLMWLDKADTWRLAEQLGGAALVDMIRVETHTCYVGERAELHAWGFGCGECPACKLRKRGYEAYLAGGNVTEAPV

SEQ ID NO: 40574 - protein, 244 aa, unidentified
  source 1..244: note = Paraburkholderia sp.
  REGION 1..244: note = tr|A0A4R1J0L8|A0A4R1J0L8_9BURK 7-cyano-7-deazaguanine synthase OS=Paraburkholderia sp. BL8N3 OX=1938808 GN=queC PE=3 SV=1
MTRTDAKDSALVLFSGGQDSATCLAWALERYRTVETLGFDYGQRHRVELECRDGFRAAVSRAFPQWAERLGEDHMIDLSVLGAISDTAMTREIEIEATANGLPNTFVPGRNLMFMTIAAAIAYRRGLQVLVGGMCETDFSGYPDCRDDTMKALQVTLNLGMQTRYSLETPLMWLDKADTWRLAEQLGGETLVELIRVETHTCYVGERAELHEWGFGCGQCPACKLRKRGFEAYRAGEQVTTEPV

SEQ ID NO: 40575 - protein, 243 aa, unidentified
  source 1..243: note = Paraburkholderia sp.
  REGION 1..243: note = tr|A0A372K5S4|A0A372K5S4_9BURK 7-cyano-7-deazaguanine synthase OS=Paraburkholderia sp. DHOC27 OX=2303330 GN=queC PE=3 SV=1
MIRKDAKRSALVLFSGGQDSATCLAWALERYETVETLGFNYGQRHRVELECREGFRSAVARGFPQWAERLGDDHMIDLSVLGSISETAMTREIQIEAAASGLPNTFVPGRNLMFMTIAAAIAYRRGLQVLVGGMCETDFSGYPDCRDDTMKALQVALNLGMDTRLLLETPLMWLDKADTWRLAHELGGDELVELIRVETHTCYVGERAELHAWGFGCGECPACRLRKRGYEAYLSGEKVTEPV

SEQ ID NO: 40576 - protein, 243 aa, unidentified
  source 1..243: note = Paraburkholderia sprentiae
  REGION 1..243: note = tr|A0A1I9YIH0|A0A1I9YIH0_9BURK 7-cyano-7-deazaguanine synthase OS=Paraburkholderia sprentiae WSM5005 OX=754502 GN=queC PE=3 SV=1
MIRKDAKRSALVLFSGGQDSATCLAWALDRYDTVETLGFDYGQRHRVELECREGFRQAIVRAFPAWADRLGDDHMIDLSLLGAISDTAMTREIEIEATASGLPNTFVPGRNLMFMTIAAAIAYRRGLQVLVGGMCETDFSGYPDCRDDTMKALQVALNLGMDTRFALETPLMWLDKADTWRLAHELGGDELVELVRVETHTCYVGERAELHSWGFGCGECPACRLRRRGYEAYLAGEKVTEPV

SEQ ID NO: 40577 - protein, 243 aa, unidentified
  source 1..243: note = Paraburkholderia susongensis
  REGION 1..243: note = tr|A0A1X7K7T9|A0A1X7K7T9_9BURK 7-cyano-7-deazaguanine synthase OS=Paraburkholderia susongensis OX=1515439 GN=queC PE=3 SV=1
MIRKDAKRSALVLFSGGQDSATCLAWALERYDTVETLGFDYGQRHRVELECREGFREAVTRAFPAWADRLGDDHMIDLSLLGTISDTAMTREIEIRATANGLPNTFVPGRNLMFMTIAAAIAYRRGLQVLVGGMCETDFSGYPDCRDDTMKALQVALNLGMDTRFALETPLMWLDKADTWRLAHELGGDELVELVRVETHTCYVGERAELHAWGFGCGECPACRLRKRGYEAYLAGEKVSEPV

SEQ ID NO: 40578 - protein, 198 aa, unidentified
  source 1..198: note = Paraburkholderia terrae
  REGION 1..198: note = tr|I5D349|I5D349_9BURK 7-cyano-7-deazaguanine synthase OS=Paraburkholderia terrae BS001 OX=1171375; GN = WQE_03272 PE=3 SV=1
MKQALLLSGGQDSIALAYWLRPSIAVTVDYGQVPAEAEERAAGAVCLALGIQHEVIKADCSAVGSGDLSGTRPLSIAPVPEWWPYRNQLILTLAATSAIRHGASELVIGTVVTDCSHTDGTSAFVEKMSEVFMLQEGRLKLCAPAIGMTSSELVKTANVPMEILAWAHSCHRSNHACGQCRGCIKHKNVIYELGHTPY

SEQ ID NO: 40579 - protein, 243 aa, unidentified; identical to SEQ ID NO: 40552
  source 1..243: note = Paraburkholderia terrae
  REGION 1..243: note = tr|I5CWM7|I5CWM7_9BURK 7-cyano-7-deazaguanine synthase OS=Paraburkholderia terrae BS001 OX=1171375; GN = queC PE=3 SV=1

SEQ ID NO: 40580 - protein, 243 aa, unidentified
  source 1..243: note = Paraburkholderia terricola
  REGION 1..243: note = tr|A0A1M6SF43|A0A1M6SF43_9BURK 7-cyano-7-deazaguanine synthase OS=Paraburkholderia terricola OX=169427 GN=queC PE=3 SV=1
MIRKDAKRSALVLFSGGQDSATCLAWALERYETVETLGFDYGQRHRVELECREGFRQAVARAFPAWAKRLGDDHMIDLSVLGSISDTAMTREIAIEATANGLPNTFVPGRNLMFMTIAAAIAYRRGLQVLVGGMCETDFSGYPDCRDDTMKALQVALNLGMDSRFLLETPLMWLDKADTWRLAHELGGDELVELVRVETHTCYVGERAELHAWGFGCGECPACRLRKRGYEAYLAGEKVTEPV

SEQ ID NO: 40581 - protein, 244 aa, unidentified
  source 1..244: note = Paraburkholderia tropica
  REGION 1..244: note = tr|A0A1A5X8E5|A0A1A5X8E5_9BURK 7-cyano-7-deazaguanine synthase OS=Paraburkholderia tropica OX=92647 GN=queC PE=3 SV=1
MTRTETRNGALVLFSGGQDSATCLAWALDRYDTVETLGFDYGQRHRVELECREGFRAAVASRFPEWGERLGDDHMIDLSVLGSISDTAMTREIEIETAANGLPNTFVPGRNLMFMQIAAAIAYRRGLKVLVGGMCETDFSGYPDCRDDTMKALQVALNLGMDSRFVLETPLMWLDKADTWRLAETLGGEALVELVRVETHTCYVGERAELHAWGFGCGECPACKLRKRGYEAYLAGEKVTEAPV

SEQ ID NO: 40582 - protein, 243 aa, unidentified
  source 1..243: note = Paraburkholderia tuberum
  REGION 1..243: note = tr|A0A1H1CW78|A0A1H1CW78_9BURK 7-cyano-7-deazaguanine synthase OS=Paraburkholderia tuberum OX=157910 GN=queC PE=3 SV=1
MIRKDAKRSALVLFSGGQDSATCLAWALDRYDTVETVGFDYGQRHRVELECREGFRQAVVRAFPAWADRLGDDHTIDLSLLGAISDTAMTREIEIEATANGLPNTFVPGRNLMFMTIAAAIAYRRGLQVLVGGMCETDFSGYPDCRDDTMKALQVALNLGMDARFALETPLMWLDKADTWRLARALGGDALVELVRVETHTCYVGERAELHSWGFGCGECPACRLRKRGYEAYLAGEKVTEPV

SEQ ID NO: 40583 - protein, 243 aa, unidentified
  source 1..243: note = Paraburkholderia unamae
  REGION 1..243: note = tr|A0A328Y3X1|A0A328Y3X1_9BURK 7-cyano-7-deazaguanine synthase OS=Paraburkholderia unamae; OX = 219649 GN=queC PE=3 SV=1
MTRTEAKGALVLFSGGQDSATCLAWALERYETVETLGFDYGQRHRVELECREGFRAAIASTFPAWGERLGEDHMIDLSVLGSISDTAMTREIEIETAASGLPNTFVPGRNLMFMQIAAAIAYRRGLKVLVGGMCETDFSGYPDCRDDTMKALQVALNLGMDTRFVLETPLMWLDKADTWRLAEQLGGEALVDMVRVETHTCYVGERAELHAWGFGCGECPACKLRKRGYEAYLAGENVTEAPV

SEQ ID NO: 40584 - protein, 243 aa, unidentified
  source 1..243: note = Paraburkholderia xenovorans
  REGION 1..243: note = sp|Q146Z6|QUEC_PARXL 7-cyano-7-deazaguanine synthase; OS = Paraburkholderia xenovorans (strain LB400) OX=266265; GN = queC PE=3 SV=2
MIRKDAKRSALVLFSGGQDSATCLAWALERYETVETLGFDYGQRHRVELECREGFRNAVVRAFPAWADRLGEDHMIDLSVLGAISDTAMTREIEIEATANGLPNTFVPGRNLMFMTIAAAIAYRRGLQVLVGGMCETDFSGYPDCRDDTMKALQVALNLGMDTRFLLETPLMWLDKADTWRLAHELGGAELVELVRVETHTCYLGERAELHAWGFGCGECPACRLRKRGYEAYLAGENVTEPV

SEQ ID NO: 40585 - protein, 458 aa, unidentified
  source 1..458: note = Paraburkholderia xenovorans
  REGION 1..458: note = tr|Q13XN6|Q13XN6_PARXL Uncharacterized protein; OS = Paraburkholderia xenovorans (strain LB400) OX=266265; GN = Bxe_A1806 PE=4 SV=1
MSTIPKKPARSDKRLVVLENGQKRGRAVPKDAVIAEVGQHICFNASALDSFDVEGCKPIHFNMLVLCAAVEFADRYWKRPMGWRRILHVTLPVADPRNWQKSEVLQSLHDVLNHLTGDTWQFTFVQAKAPSPIGTRQLPLDFGKTKTFAVAYSNGLDSRAVSALSGDEGEALCIRVAGNRQPRKDGDSYFTHIPFNISGYRGNESSFRSRGFQFAAVTAIAAQLSNVTRIVVPESGQGALGPVLLPLYGVYADYRNYPTFFRKMERFIKALQGYQVRFEQPRLWFTKGQTLSAFLRIPGKSGEHLKSTRSCWQTRRVVNVGSRKQCGLCAACLLRRLSLHAAGVSEAPDTYVVSDLAASNVDDALSVIPQKADRDIMVEYGSVGMRHLQHLADMADLSDDVLRAYASQIAAATENTYEETLKKLKLMLASHAKEWRAFLSAQGQQSFLNNWMDGGRYG

SEQ ID NO: 40586 - protein, 275 aa, unidentified
  source 1..275: note = Paracandidimonas soli
  REGION 1..275: note = tr|A0A4R3UT56|A0A4R3UT56_9BURK 7-cyano-7-deazaguanine synthase OS=Paracandidimonas soli; OX = 1917182 GN=queC PE=3 SV=1
MLKQHVRITLGIDKQTPSLFHSSPFRMAPLKQRHLSKMGKIMERKALVLFSGGQDSTTCLAWALDRYSHVETISFDYGQRHSVELECRKVVLGQIRAKFPSWAARLGADHILDLASLGQISDTALTQEQEIVFEKSGLPSTFVPARNLLFFTYASAVAYRRGLTALVGGMCETDYSGYPDCRDNTLKALQVAMSLGLDAPMVVETPLMWLDKAQTWKLAEQLGGQPLIDLIRAETHTCYLGDRTHLHSWGYGCGECPACELRRNGHEAYTRTTAA

SEQ ID NO: 40587 - protein, 233 aa, Parachlamydia acanthamoebae
  REGION 1..233: note = tr|A0A0C1CA36|A0A0C1CA36_9BACT 7-cyano-7-deazaguanine synthase OS=Parachlamydia acanthamoebae OX=83552 GN=queC PE=3 SV=1
MVMKLQKKAVVIHSGGMDSSICLALAIRTFSVENVLSLSFIYDQRHSSELEQAKKICQSWNVDHIILSIPCLKEITTNALTDTSLPIQCGNGEAPNTLVVGRNGLMAQLGAIHAHELGAHCIYMGIIGVEGNHSGYRDCSRAYMDLKQTLLRLDLDDHLFTIETPLVDMSKKKTLELAQEMGVLEFLLNETITCYEGLEKLGCQKCPACILRNEGIRQFSAENPSFKLPYPVT

SEQ ID NO: 40588 - protein, 95 aa, Parachlamydia acanthamoebae
  REGION 1..95: note = tr|A0A0C1CA61|A0A0C1CA61_9BACT 7-cyano-7-deazaguanine synthase OS=Parachlamydia acanthamoebae OX=83552 GN=queC-A PE=3 SV=1
MDFLSYPDCRPGYFEAAQELFNRATKQSVEGKAPQIVTPLLKWTKEEIVKEGYRLKVPFELTSSCYDPTANGQPCQQCDACTLRQDAFLSISEVN

SEQ ID NO: 40589 - protein, 232 aa, Parachlamydia sp.
  REGION 1..232: note = tr|A0A2H9SPJ9|A0A2H9SPJ9_9BACT 7-cyano-7-deazaguanine synthase OS=Parachlamydia sp.; OX = 2052048 GN=queC PE=3 SV=1
MTNNLKKQTIVIHSGGMDSSICLALAIKKFSVENVLSLSFTYEQRHSTELEQAKKICRTWGVDHVILAIPCLKQITTNALTHNSIEIVHEAGSPPNTLVMGRNGLMARLGAIHAQELGAESIYMGIINVEGSHSGYRDCSRAYMDLMQTILRIDLDNEKFLIETPLVAMSKKETLMLAHELKVLDFLLEETITCYEGFPRQGCQKCPACRLRNEGIRQFLAENPSFTMKYAV

SEQ ID NO: 40590 - protein, 228 aa, Parachlamydia sp.
  REGION 1..228: note = tr|A0A2H9SPH9|A0A2H9SPH9_9BACT 7-cyano-7-deazaguanine synthase OS=Parachlamydia sp.; OX = 2052048 GN=queC PE=3 SV=1
MKAIVLLSGGLDSAVILARVCAEAKSCTAISFDYGQRHRIELEYAKKIADYYQVPHEIIPIDPLIFQGASSLTSNMVPQKDKSFEEILLQKTPSTYVPARNTLFLAFALVKAEIYQAQEIYFGANAMDYGSYPDCRPLYFEALQELFNQATKQSIDYQPPRVIIPWLHSTKEQIIQEGIRLGVPFEYTSSCYDPTLSGHPCQCCDACTLRNKAFKSFTESKQERLAES

SEQ ID NO: 40591 - protein, 234 aa, Paracoccus aestuarii
  REGION 1..234: note = tr|A0A418ZS40|A0A418ZS40_9RHOB 7-cyano-7-deazaguanine synthase OS=Paracoccus aestuarii; OX = 453842 GN=queC PE=3 SV=1
MKTALVCSGGLDSVSLAHVLAAQGRLARIVSFDYGQRHRKELDFARDCAARLAVPFHLVDLSGLGAALSGSALTDDVAVPDGHYAEETMRVTVVPNRNAIMLSVAFGIAAAQGDDAVAAAVHGGDHFIYPDCRPGFTDAFAAMQRAALEGYAEIALEVPFVHATKADIVTAGAAAGTPFARTWSCYKGGDRHCGRCGTCVERREAFHLAGVADPTDYADPDYWRAALAAHAGGA

SEQ ID NO: 40592 - protein, 233 aa, Paracoccus alcaliphilus
  REGION 1..233: note = tr|A0A1H8LXD1|A0A1H8LXD1_9RHOB 7-cyano-7-deazaguanine synthase OS=Paracoccus alcaliphilus; OX = 34002 GN=queC PE=3 SV=1
MKATLVCSGGLDSVSLAHILAADHALSRIVSFDYGQRHRKELDFARAVSARLAVPFHLIDMRPVGAALTGSALTDAIDVPDGHYAEETMRVTVVPNRNAIMLTIAFGIAAAAGDDAVAAAVHGGDHFIYPDCRPGFTDAFAAMQRAALDGYADVALHVPFVRKSKADIVAEGARAGTPFAETWSCYKGSVIHCGRCGTCVERREAFDLAGVADPTAYADPDYWRAAITARGVV

SEQ ID NO: 40593 - protein, 233 aa, Paracoccus bengalensis
  REGION 1..233: note = tr|A0A3D9XP39|A0A3D9XP39_9RHOB 7-cyano-7-deazaguanine synthase OS=Paracoccus bengalensis; OX = 302403 GN=queC PE=3 SV=1
MKTTVVCSGGLDSVSLAHMVAAQGSLTRLISFDYGQRHRKELDFAAAAARRLGVPHHVIDMRGVGAVLTGSALTGGAEVPDGHYAEETMRITVVPNRNAIMLTIAFGMAAAMGDEAVATAVHGGDHFIYPDCRPAFTEAFQHMQDAALDGYAQLRLLTPFVHRTKADIVAEGARHGTPFAETWSCYKGGAVHCGRCGTCVERREAFHLAGIPDPTAYEDADFWRQAIAERGRA

SEQ ID NO: 40594 - protein, 233 aa, Paracoccus denitrificans
  REGION 1..233: note = sp|A1B9Q5|QUEC_PARDP 7-cyano-7-deazaguanine synthase; OS = Paracoccus denitrificans (strain Pd 1222) OX=318586; GN = queC PE=3 SV=1
MKTIVVCSGGLDSVSLAHMVAAQGGLTRLISFDYGQRHRKELDYAALAARRLGVPHHVIDMRGVGAVLTGSALTGGAEVPDGHYAEETMRITVVPNRNAIMLTVAFGMAAAMGDQAVATAVHGGDHFIYPDCRPAFTQAFQQMQDAALDGYAQARLLTPFVHRTKADIVTEGARHDTPFAETWSCYKGGALHCGRCGTCVERREAFHLAGIPDPTAYEDADFWRQAIAERERA

SEQ ID NO: 40595 - protein, 235 aa, unidentified
  source 1..235: note = Paracoccus gahaiensis
  REGION 1..235: note = tr|A0A4U0RDX5|A0A4U0RDX5_9RHOB 7-cyano-7-deazaguanine synthase OS=Paracoccus gahaiensis; OX = 1706839 GN=queC PE=3 SV=1
MNTTLVCSGGLDSVSLAHVLAGQGRLSRIVSFDYGQRHRKELDFAELCARRLEVRFHLVDLSGLGAALGGSALTDDLAVPDGHYAEETMRVTVVPNRNAIMLTVAFGIAAAQGDAAVAAAVHGGDHFIYPDCRPAFTDAFAAMQDAALDGYAQIALHVPFVHATKADIVTAGAKAGTPFAQTWSCYKGGAHHCGRCGTCVERREAFDLAGIADPTEYEDPDFWRKAVAAHAAGGA

SEQ ID NO: 40596 - protein, 235 aa, Paracoccus haeundaensis
  REGION 1..235: note = tr|A0A5C4R6I0|A0A5C4R6I0_9RHOB 7-cyano-7-deazaguanine synthase OS=Paracoccus haeundaensis; OX = 225362 GN=queC PE=3 SV=1
MHTALVCSGGLDSVSLAHVLASQGRLSRIVSFDYGQRHRKELDFARACALRLGVPFHLVDLSGLGAALSGSALTDDLAVPDGHYAEETMRVTVVPNRNAIMLTMAFGIAAANGDSAVAAAVHGGDHFIYPDCRPGFTDAFAAMQRAALEGYADVVLDVPFVHRTKADIVTAGAAAGTPFAQTWSCYKGGARHCGRCGTCVERREAFHLARVADPTEYDDADFWQAAVAAHAVGGA

SEQ ID NO: 40597 - protein, 235 aa, unidentified
  source 1..235: note = Paracoccus hibiscisoli
  REGION 1..235: note = tr|A0A4U0QSC8|A0A4U0QSC8_9RHOB 7-cyano-7-deazaguanine synthase OS=Paracoccus hibiscisoli; OX = 2023261 GN=queC PE=3 SV=1
MNTTLVCSGGLDSVSLAQVLAAQGRLSRIVSFDYGQRHRKELDFARACATRLAVPFHLVDLSGLGAALSGSALTDDLAVPDGHYAEETMRVTVVPNRNAIMLTVAFGIAAANGDTAVAAAVHGGDHFIYPDCRPAFTDAFAAMQRAALDGYADVALEVPFVHATKADIVAAGAGAGTPFAQTWSCYKGGARHCGRCGTCVERREAFHLAGVADPTDYDDADFWQAAVAAHAAGGA

SEQ ID NO: 40598 - protein, 233 aa, Paracoccus homiensis
  REGION 1..233: note = tr|A0A1I0EPZ1|A0A1I0EPZ1_9RHOB 7-cyano-7-deazaguanine synthase OS=Paracoccus homiensis; OX = 364199 GN=queC PE=3 SV=1
MKTLVICSGGLDSVSLAHVIAATGNLSRLVSFDYGQRHRKEIDSAAATATRLGVPHHVIDLRPVGAVLTGSALTDAIDVPDGHYAEDTMRVTVVPNRNAIMLTVGFGLAAAQGDQAVAAAVHGGDHFIYPDCRPAFTDAFQVMQNAALDGYADIRLLTPFVHQTKADIVRAGAAHGTPFQDTWSCYKGGALHCGRCGTCVERREAFHLAGIPDPTAYADPDYWQAAVARKAGA

SEQ ID NO: 40599 - protein, 233 aa, unidentified
  source 1..233: note = Paracoccus laeviglucosivorans
  REGION 1..233: note = tr|A0A521B5K6|A0A521B5K6_9RHOB 7-cyano-7-deazaguanine synthase OS=Paracoccus laeviglucosivorans OX=1197861 GN=queC PE=3 SV=1
MKTLVVCSGGLDSVSLAHMVAAEHELTRLVSFDYGQRHRKELAFAAEAAGRLGVPHHLIDMRGIGAALTGSALTDDLDVPDGHYAEETMRVTVVPNRNAIMLAIAFGIAAANGDQAVATAVHGGDHFIYPDCRPAFTNAFNAMQAAALDGYADVHLFTPFVDRDKAAIVTAGARHATPFARTWSCYKGGDLHCGRCGTCVERREAFDLAGVSDPTTYADADFWRHAIAAKGAA

SEQ ID NO: 40600 - protein, 233 aa, Paracoccus pantotrophus
  REGION 1..233: note = tr|A0A495P5T8|A0A495P5T8_PARPN 7-cyano-7-deazaguanine synthase OS=Paracoccus pantotrophus; OX = 82367 GN=queC PE=3 SV=1
MKTTVVCSGGLDSVSLAHMIAAQGGLSRLISFDYGQRHRKELDFAAAAARRLGVPHHVIDMRGVGAVLTGSALTGGAEVPDGHYAEETMRITVVPNRNAIMLTVAFGMAAAMGDRAVATAVHGGDHFIYPDCRPAFTEAFQHMQDAALDGYAQVRLLTPFVHRSKADIVTEGARHGTPFAETWSCYKGGTLHCGRCGTCVERREAFHLAGIPDPTAYEDGDFWRQAIAERGRA

SEQ ID NO: 40601 - protein, 425 aa, Paracoccus pantotrophus
  REGION 1..425: note = tr|A0A495NWV5|A0A495NWV5_PARPN 7-cyano-7-deazaguanine synthase in queuosine biosynthesis; OS = Paracoccus pantotrophus OX=82367 GN=BDE18_3880 PE=4 SV=1
MRLACGPDGADLPGGEGIMRVVLYGQPRAEGQGSAGDAARSEIQRRRFDPAPRAWDLLSIALSVVTADFAVLRDKSPDGWTREIELDIAVADAPFWNGQARALAEALAFLTTDRWTLRFHEGGMLPTPPREPVRPPESCVVLLSGGLDSLIGAIDLTAAGHKPFAISQTVRGDADKQVDFAAKIGGGLGHLQLNHNAHTPGVQEASQRARSLVFITFGVIAATALKAYREVAEVPLFVCENCFIAINPPLTGGRLGSLSTRTAHPEFLARLQKVLDAAGLRVKITNPYATKTKGEMLQACADQNLLGAEAARSTSCGRFQRFNYRQCGRCVPCQVRRAAFLAWDASQDTTDYVYEPIGKDDADHSGFDDVRSVAIALAAIKADGIEAWLGHALASPFIADRPALVGMLERGLEELRALHQAYGVK

SEQ ID NO: 40602 - protein, 233 aa, Paracoccus saliphilus
  REGION 1..233: note = tr|A0A1N7PHL2|A0A1N7PHL2_9RHOB 7-cyano-7-deazaguanine synthase OS=Paracoccus saliphilus; OX = 405559 GN=queC PE=3 SV=1
MKAIVICSGGLDSVSLAHMLAARGELSRLVSFDYGQRHRKELDYAVACAERLDVPHHVIDLRSVGAALTGSALTGDIGVPDGHYAEETMKITVVPNRNAIMLTIAYGIAAANGDRAVATAVHGGDHFIYPDCRPEFTTAFDRMQRAALDGYADVTLLTPFVHRSKADIVAEGARAGTPFAETWSCYKGGADHCGRCGTCVERREAFHLAGIDDPTVYEDPEFWQQAISSKAEA

SEQ ID NO: 40603 - protein, 233 aa, Paracoccus seriniphilus
  REGION 1..233: note = tr|A0A239PVM3|A0A239PVM3_9RHOB 7-cyano-7-deazaguanine synthase OS=Paracoccus seriniphilus; OX = 184748 GN=queC PE=3 SV=1
MKTLVICSGGLDSVSLAHITANEHQLTRLVSFDYGQRHRKELGFAQAAAARLGVPFHLIDMRGIGAALSGSALTDEIDVPDGHYAEETMRITVVPNRNAIMLSIGFGIAAAQGDEAVATAVHGGDHFIYPDCRPGFTRAFEAMQQAALQGYADVRLHTPFVRESKAEIVRQGAAHGTPFAETWSCYKGGEIHCGRCGTCVERREAFHLAGVSDPTPYADPDYWITALTTRENG

SEQ ID NO: 40604 - protein, 235 aa, unidentified
  source 1..235: note = Paracoccus siganidrum
  REGION 1..235: note = tr|A0A419A5X4|A0A419A5X4_9RHOB 7-cyano-7-deazaguanine synthase OS=Paracoccus siganidrum; OX = 1276757 GN=queC PE=3 SV=1
MKTLVICSGGLDSVSLAHMVAARRELTGLLSFDYGQRHRKELDFAARCAARLGVPHQLIDISGIGAALSGSALTDALEVPDGHYAEETMRVTVVPNRNAIMLAIAFGIAAAKGDEAVAAAVHGGDHFIYPDCRPAFTDSFAAMQKAALDGYAEIELFVPFVHRSKADIVTEGARHATPFAETWSCYKGGANHCGRCGTCVERREAFALAGIADPTSYDDADFWRRALAGHAAGGA

SEQ ID NO: 40605 - protein, 233 aa, Paracoccus sp.
  REGION 1..233: note = tr|A0A3A3DCQ1|A0A3A3DCQ1_9RHOB 7-cyano-7-deazaguanine synthase OS=Paracoccus sp. JM45; OX = 2283626 GN=queC PE=3 SV=1
MKTTLVCSGGIDSVSLAHSLAGQGHLSRLVSFDYGQRHRKELDFAAACARRLSVPFHLVDLSGLGSALSGSALTDDIDVPDGHYAEETMRVTVVPNRNAIMLTIAFGIAAANGDDAVAAAVHGGDHFIYPDCRPAFTDAFGAMQKAALDGYADIDLHVPFVHATKADIVTEGARHNTPFAETWSCYKGSDRHCGRCGTCVERREAFHLAGVTDPTDYADPDFWQAAIAAHEGP

SEQ ID NO: 40606 - protein, 232 aa, Paracoccus sp.
  REGION 1..232: note = tr|A0A2K9F152|A0A2K9F152_9RHOB 7-cyano-7-deazaguanine synthase OS=Paracoccus sp. BM15; OX = 1529068 GN=queC PE=3 SV=1
MKAIVVCSGGLDSVSLAHVLANQGALSRLVSFDYGQRHLKELDFAARCAQRLSVPHHIIDMRSIGAALSGSALTDDIDVPDGHYAEETMKITVVPNRNAIMLTIAYGIAAAQGDTAVATAVHGGDHFIYPDCRPAFTRAFEAMQHAALDGYANVTLLTPFVDQSKADIVTAGAQAGTPFAQTWSCYKGGALQCGRCGTCIERREAFHLAGIPDPTVYADPDFWIAATQGTQA

SEQ ID NO: 40607 - protein, 233 aa, Paracoccus versutus
  REGION 1..233: note = tr|A0A369U2V6|A0A369U2V6_PARVE 7-cyano-7-deazaguanine synthase OS=Paracoccus versutus; OX = 34007 GN=queC PE=3 SV=1
MKTTVVCSGGLDSVSLAHMVAVQGSLTRLISFDYGQRHRKELDFAAAAARRLGVPHHVIDMRGVGAVLTGSALTGGAEVPDGHYAEETMRITVVPNRNAIMLTIAFGMAAAMGDEAVATAVHGGDHFIYPDCRPAFTQAFQQMQDAALDGYAQVRLLTPFVHRTKADIVTEGARHGTPFAETWSCYKGGAVHCGRCGTCVERREAFHLAGIPDPTAYEDADFWRQAIAERGRA

SEQ ID NO: 40608 - protein, 233 aa, Paracoccus versutus
  REGION 1..233: note = tr|A0A3E0BPH7|A0A3E0BPH7_PARVE 7-cyano-7-deazaguanine synthase OS=Paracoccus versutus; OX = 34007 GN=queC PE=3 SV=1
MKTTVVCSGGLDSVSLAHMVAAQGSLTRLISFDYGQRHRKELDFAAAAARRLGVPHHVIDMRGVGAVLTGSALTGGAEVPDGHYAEETMRITVVLNRNAIMLTIAFGMAAAMGDEAVATAVHGGDHFIYPDCRPAFSEAFQHMQDAALDGYAQLRLLTPFVHRTKADIVAEGARHGTPFAETWSCYKGGAVHCGRCGTCVERREAFHLAGIPDPTAYEDADFWRQAIAERGRA

SEQ ID NO: 40609 - protein, 620 aa, Paracoccus yeei
  REGION 1..620: note = tr|A0A2D2C2M1|A0A2D2C2M1_9RHOB 7-cyano-7-deazaguanine synthase OS=Paracoccus yeei; OX = 147645 GN=PYTT13_13795 PE=3 SV=1
MKQHLIECGVTAASCEEAIAMNVHGPSKNVNLRIDYISRTMLSNLPDLLIDLLEVAAYVYCADQRLVRGSEQLSKFGENWRRSLRFSIPVRELEVWQDPEVQDALIDTLGFLSDDSYTFDFRQADTPVQPKELYFKDLIDPADEHDGVALFSGGVDSFAGAVTDLVVNGRSLTLVGHYSSTKVRSVQEGLIAELKRKGFDRHLSYVPVWVSNEGVRAREFTQRTRSFLFACLGFVVARMSGKDSFSFYENGVVSINLPLAGDVVGGRATRTTHPRVLRGLEHLFSLLLDRQIQIHTPLQWLTKTEVTEKIAAAGMPDLLSRTVSCTRPRKWTEGQKHCGVCSQCIDRRFGILAAGLGEHDPSARYMHDLLLDDRSGGDDLRMALAYVSLFKKILATPKARFLVDFPEIVSAVGHFPGVPTSEAGDRLYDLFQRHAKSVEEVIASAVKEHSTALFRNELPAASLLAACYNRSHIEVAPPSNYDADAKAFMDRLSAPMLEFAFDDDRKRVNFRGDLALEGANFKLVAALIEAFRTAKKRQTDVPYLPAPDLAQRIGVSDQSMRQQLKRLREALEPLNVSMGIPMDQDSFVQTKERAGYRLNPQCREISVADIVDGIPSGSAN

SEQ ID NO: 40610 - protein, 234 aa, Paracraurococcus sp.
  REGION 1..234: note = tr|A0A4R4DTR1|A0A4R4DTR1_9PROT 7-cyano-7-deazaguanine synthase OS=Paracraurococcus sp. NE82 OX=2527868 GN=queC PE=3 SV=1
MNPDSALVLFSGGQDSATCLAWALQRFAHVETIGFDYGQRHRVELEVRDAFRARLARDFPAWAAKLGEDHLLTLDALRAVSDTALTRETTIAMQADGLPNTFVPGRNLIFLTFAAALAYRRGLKHLVAGMCETDYSGYPDCRDDALKALQVAINLGMERRFVLHTPLMWRDKRATWELADQLGGAPLVEAIRADTHSCYLGDRAHQHDWGFGCGTCPACELRRRGWEAWRAAHV

SEQ ID NO: 40611 - protein, 221 aa, unidentified; identical to SEQ ID NO: 38415
  source 1..221: note = Parageobacillus caldoxylosilyticus
  REGION 1..221: note = tr|A0A023DCJ3|A0A023DCJ3_9BACI 7-cyano-7-deazaguanine synthase OS=Parageobacillus caldoxylosilyticus NBRC 107762 OX=1220594 GN=queC PE=3 SV=1

SEQ ID NO: 40612 - protein, 221 aa, unidentified; identical to SEQ ID NO: 38415
  source 1..221: note = Parageobacillus caldoxylosilyticus
  REGION 1..221: note = tr|A0A150L507|A0A150L507_9BACI 7-cyano-7-deazaguanine synthase OS=Parageobacillus caldoxylosilyticus OX=81408 GN=queC PE=3 SV=1

SEQ ID NO: 40613 - protein, 221 aa, unidentified
  source 1..221: note = Parageobacillus genomosp.
  REGION 1..221: note = tr|A0A023CT53|A0A023CT53_9BACI 7-cyano-7-deazaguanine synthase OS=Parageobacillus genomosp. 1 OX=1295642 GN=queC PE=3 SV=1
MKKEKAVVVFSGGQDSTTCLFWALKQFAEVEAVTFDYGQRHRLEIEVASAIAKELHVPHTVLDMSLLHQLAPNALTRSEIAIEQKEGQLPSTFVDGRNLLFLSFAAVLAKQKGARHLVTGVCETDFSGYPDCRDIFIKSLNVTLNLAMDYQFVIHTPLMWLSKADTWKLADELGAFEFVRTKTLTCYNGIIADGCGECPACVLRKRGLEQYLQEKEGVGRR

SEQ ID NO: 40614 - protein, 221 aa, unidentified
  source 1..221: note = Parageobacillus thermantarcticus
  REGION 1..221: note = tr|A0A1I0TBE5|A0A1I0TBE5_9BACI 7-cyano-7-deazaguanine synthase OS=Parageobacillus thermantarcticus OX=186116 GN=queC PE=3 SV=1
MKKEKAVVVFSGGQDSTTCLFWALKQFDEVEAVTFDYGQRHRLEIEVAASIAKELGISHTVLDMSLLNQLAPNALTRSDIAIEQKEGQLPSTFVDGRNLLFLSFAAVLAKQKGARHLVTGVCETDFSGYPDCRDIFIKSLNVTLNLAMDYQFVIHTPLMWLTKAQTWKLADELGAFEFVRTKTLTCYNGIIADGCGECPACVLRRRGLEEYMKEKEGANQL

SEQ ID NO: 40615 - protein, 222 aa, unidentified
  source 1..222: note = Parageobacillus thermoglucosidasius
  REGION 1..222: note = tr|A0A178TXF5|A0A178TXF5_PARTM 7-cyano-7-deazaguanine synthase OS=Parageobacillus thermoglucosidasius OX=1426 GN=queC PE=3 SV=1
MGKKEKAVVVFSGGQDSTTCLFWALKQFDEVEAVTFDYGQRHRLEIEVAASIAKELGISHTVLDMSLLNQLAPNALTRSDIAIEQKDGQLPSTFVDGRNLLFLSFAAVLAKQKGARHLVTGVCETDFSGYPDCRDIFIKSLNVTLNLAMDYQFVIHTPLMWLTKAQTWKLADELGAFEFVRTKTLTCYNGIIADGCGECPACVLRRRGLEEYMKEKEGANQL

SEQ ID NO: 40616 - protein, 222 aa, unidentified
  source 1..222: note = Parageobacillus thermoglucosidasius
  REGION 1..222: note = tr|A0A1B7KU06|A0A1B7KU06_PARTM 7-cyano-7-deazaguanine synthase OS=Parageobacillus thermoglucosidasius OX=1426 GN=queC PE=3 SV=1
MMKKEKAMVVFSGGQDSTTCLFWALKQFDEVEAVTFDYGQRHRLEIEVAASIAKELGIPHTVLDMSLLNQLAPNALTRSDIAIEQKEGQLPSTFVDGRNLLFLSFAAVLAKQKGARHLVTGVCETDFSGYPDCRDIFIKSLNVTLNLAMDYQFVIHTPLMWLTKAQTWKLADELGAFEFVRTKTLTCYNGIIADGCGECPACVLRRRGLEEYMKEKEGANQL

SEQ ID NO: 40617 - protein, 221 aa, unidentified; identical to SEQ ID NO: 38409
  source 1..221: note = Parageobacillus toebii
  REGION 1..221: note = tr|A0A3D8LXU1|A0A3D8LXU1_9BACI 7-cyano-7-deazaguanine synthase OS=Parageobacillus toebii; OX = 153151 GN=queC PE=3 SV=1

SEQ ID NO: 40618 - protein, 221 aa, unidentified; identical to SEQ ID NO: 38409
  source 1..221: note = Parageobacillus toebii
  REGION 1..221: note = tr|A0A3M0F538|A0A3M0F538_9BACI 7-cyano-7-deazaguanine synthase OS=Parageobacillus toebii NBRC 107807 OX=1223503 GN=queC PE=3 SV=1

SEQ ID NO: 40619 - protein, 218 aa, unidentified
  source 1..218: note = Paraglaciecola agarilytica
  REGION 1..218: note = tr|K6XH62|K6XH62_9ALTE 7-cyano-7-deazaguanine synthase OS=Paraglaciecola agarilytica NO2 OX=1125747; GN = queC1 PE=3 SV=1
MVQKVVVIFSGGMDSFTVLNMAVKDGYEVHALSFNYGQRHSKELDYASRACKILGVAHKIIDISAINELIGGSSLTSDVDIPEGHYAEESMKSTVVPNRNMILLSMAVGYAVSLDANKVYYGAHSGDHDIYPDCRPEFVERMNDVCAIANYEKIEIVSPFLYQSKIDILTAGLNMRLDYGLTWTCYNGREKACGKCGACQERLEAFEKNDCIDPLSYE

SEQ ID NO: 40620 - protein, 219 aa, unidentified
  source 1..219: note = Paraglaciecola arctica
  REGION 1..219: note = tr|K6Z4V3|K6Z4V3_9ALTE 7-cyano-7-deazaguanine synthase OS=Paraglaciecola arctica BSs20135 OX=493475; GN = queC1 PE=3 SV=1
MSQKVVVIFSGGMDSFTVLNLAVKQGLEVFSLSFDYGQRHKKELDYADRACKTLNVHHKIVDISAINQLIGGSSLTSDIDVAEGHYEEQSMKSTVVPNRNMILLSMAVGYAVSIEANQVYYGAHSGDHAIYPDCRPEFVHKMNDVCAIANYEAVEIVTPYLEVSKTAILTAGLAMGLDYNQTWTCYNGREKACGKCGACQERLEAFSENGVSDPLDYEG

SEQ ID NO: 40621 - protein, 219 aa, unidentified
  source 1..219: note = Paraglaciecola hydrolytica
  REGION 1..219: note = tr|A0A136A0I0|A0A136A0I0_9ALTE 7-cyano-7-deazaguanine synthase OS=Paraglaciecola hydrolytica OX=1799789 GN=queC PE=3 SV=1
MTAAKAVVIFSGGMDSFTVLNMAVNQGYEVYALSFNYGQRHKKELDYAARACANLQVQHKIIDISAINELIGGSSLTSDIDVAEGHYEQESMLTTVVPNRNMILLSMAVGYAVSLKASKVFYGAHSGDHAIYPDCRPEFVIKMNDVCAIANYEAVEIVTPFLYDSKIAILKTGLNIGLDYGQTWTCYNGRAKACGKCGACQERLEAFAENGVNDPLEYE

SEQ ID NO: 40622 - protein, 218 aa, unidentified
  source 1..218: note = Paraglaciecola mesophila
  REGION 1..218: note = tr|K6Z927|K6Z927_9ALTE 7-cyano-7-deazaguanine synthase OS=Paraglaciecola mesophila KMM 241 OX=1128912; GN = queC1 PE=3 SV=1
MVQKVVVIFSGGMDSFTVLNMAVKEGYEVHALSFNYGQRHSKELDYASRACKTLGVAHKIIDISAINELIGGSSLTSDVDIPEGHYAEESMKSTVVPNRNMILLSMAVGYAVSLDANKVYYGAHSGDHDIYPDCRPEFVERMNDVCAIANYEKVEIVSPFLYQSKIDILTAGLNMGLDYNLTWTCYNGREKACGKCGACQERLEAFEKNNAKDPLEYE

SEQ ID NO: 40623 - protein, 218 aa, unidentified
  source 1..218: note = Paraglaciecola polaris
  REGION 1..218: note = tr|K7AJI2|K7AJI2_9ALTE 7-cyano-7-deazaguanine synthase OS=Paraglaciecola polaris LMG 21857 OX=1129793; GN = queC PE=3 SV=1
MVQKVVVIFSGGMDSFTVLNMAANDGYEVYALSFNYGQRHSKELDYASRACQNLGVSHKIIDISAINELIGGSSLTSDIDIPEGHYAEESMKQTVVPNRNMILLSMAVGYAVSLDASKVYYGAHSGDHAIYPDCRPEFVERMNDVCAIANYEKVEIVSPFLYQSKIDILTAGLKMGLDYNLTWTCYNGREKACGKCGACQERLEAFEKNNTQDPLTYE

SEQ ID NO: 40624 - protein, 219 aa, unidentified
  source 1..219: note = Paraglaciecola psychrophila
  REGION 1..219: note = tr|K6Z686|K6Z686_9ALTE 7-cyano-7-deazaguanine synthase OS=Paraglaciecola psychrophila 170 OX=1129794; GN = queC PE=3 SV=1
MSQKVVVIFSGGMDSFTVLNLAVKQGLEVFALSFNYGQKHKKELDYAARACQELSVHHKIVDISAINQLIGGSSLTSDIEVAEGHYEEESMKSTVVPNRNMILLSMAVGYAVSIDANKVYFGAHSGDHAIYPDCRPEFVHKMNDVCAIANYEAVEIVTPYLEVSKTAILTAGLKMGLDYNLSWTCYNGREKACGKCGACQERLEAFTENGVTDPLEYEG

SEQ ID NO: 40625 - protein, 219 aa, unidentified
  source 1..219: note = Paraglaciecola sp.
  REGION 1..219: note = tr|A0A2N1DG95|A0A2N1DG95_9ALTE 7-cyano-7-deazaguanine synthase OS=Paraglaciecola sp. MB-3u-78 OX=2058332 GN=queC PE=3 SV=1
MSQKVVVIFSGGMDSFTVLNLAVKQGLEVFALSFDYGQRHKKELDYAARACKALHVHHKIVDISAINQLIGGSSLTSDIDVAEGHYAENSMKSTVVPNRNMILLSMAVGYAVSMHANKVYFGAHSGDHAIYPDCRPEFVHKMNDVCAIANYEAVEIVTPYLAVSKTAILTAGLKMELDYNLTWTCYNGREKSCGKCGACQERLEAFTENGVSDPLEYEG

SEQ ID NO: 40626 - protein, 227 aa, unidentified
  source 1..227: note = Parahaliea aestuarii
  REGION 1..227: note = tr|A0A5C9A3U9|A0A5C9A3U9_9GAMM 7-cyano-7-deazaguanine synthase OS=Parahaliea aestuarii; OX = 1852021 GN=queC PE=3 SV=1
MESEKRAVILVSGGLDSTTVLAMARSEGYQCYTLSFDYGQRHRAELLAAERVSEALGDVEHKVVKLNLDSIGGSALTDTRIAVPEEETSGIPVTYVPARNTVFLSIALGWAEVLGASDIFIGVNAVDYSGYPDCRPEYVAAFETMANLATRAGVEGSKLTIHAPLMNMGKDEIIATGLALGVDYALTVSCYQATEAGLACGKCDSCRLRKEGFSGAGVADPTRYLDS

SEQ ID NO: 40627 - protein, 225 aa, unidentified
  source 1..225: note = Parahaliea aestuarii
  REGION 1..225: note = tr|A0A5C9A922|A0A5C9A922_9GAMM 7-cyano-7-deazaguanine synthase OS=Parahaliea aestuarii; OX = 1852021 GN=queC PE=3 SV=1
MNNKRAVILVSGGLDSTTVLAMARSEGYQCYTLSFDYGQRHRAELVAADRVSEALGDVEHKVVKLNLDSIGGSALTDTSIDVPEEETGGIPITYVPARNTVFLSIALGWAEVLGANDIFIGVNAVDYSGYPDCRPEYVAAFEAMANLATRAGVEGNKLTIHAPLMDMGKDEIITAGVALGVDYSLTVSCYQATEEGLACGRCDSCRLRREGFVAAGVEDPTRYLP

SEQ ID NO: 40628 - protein, 235 aa, Paralcaligenes ureilyticus
  REGION 1..235: note = tr|A0A4R3MA63|A0A4R3MA63_9BURK 7-cyano-7-deazaguanine synthase OS=Paralcaligenes ureilyticus OX=627131 GN=queC PE=3 SV=1
MHTKALVLFSGGQDSTTCLAWALKHYAHVETVGFDYGQRHSVELECRRTILSKIRTDYPEWASRLADDHLIDLHVLGDISDTALTREAGIAFEKNGLPNTFVPGRNLLFFTFAATIAYRRDLSVLVGGMCETDYSGYPDCRDTTLKSLQASLNLGMDKPLVIETPLMWLDKRQTWLMAEQLGGKEFVGLICEDTHTCYLGDRSTRHAWGYGCGICPACELRANGFKAYAAEPAPD

SEQ ID NO: 40629 - protein, 217 aa, Paraliobacillus ryukyuensis
  REGION 1..217: note = tr|A0A366E191|A0A366E191_9BACI 7-cyano-7-deazaguanine synthase OS=Paraliobacillus ryukyuensis OX=200904 GN=queC PE=3 SV=1
MQNNKAIVVFSGGQDSTTCLFWALERFEHVEVVTFDYQQRHQEEIEVAQRIAEKLSVKQTILDMSLLNQLAPNALTRSDQAIEEGKGGELPSTFVPGRNLLFLSFATILGRQIDAKHIVTGVCETDFSGYPDCRDIFIKSLNVSLNLSMDDQFVIHTPLMWLNKAETWELADELDAFEFVREETLTCYNGIKGDGCGECPACKLRKRGLEQYLAKRT

SEQ ID NO: 40630 - protein, 218 aa, Paraliobacillus sp.
  REGION 1..218: note = tr|A0A0U1KQV6|A0A0U1KQV6_9BACI 7-cyano-7-deazaguanine synthase OS=Paraliobacillus sp. PM-2 OX=1462524 GN=queC PE=3 SV=1
MKNNKAIVVFSGGQDSTTCLFWALERFNEVEVVTFDYQQRHDKEIEIAKHIAEKLEVKQTILDMSLLNQLAPNALTRSNQAITDGENGELPSTFVPGRNLLFLSFATILGRQIGAKHIITGVSETDFSGYPDCRDIFIKSLNVSLNLSMEDQFVIHTPLMWLDKAETWELADQLGAFDFIREETLTCYNGIQADGCGECPACKLRKNGLEQFLATRSQ

SEQ ID NO: 40631 - protein, 225 aa, unidentified
  source 1..225: note = Paramaledivibacter caminithermalis
  REGION 1..225: note = tr|A0A1M6QZB3|A0A1M6QZB3_9CLOT 7-cyano-7-deazaguanine synthase OS=Paramaledivibacter caminithermalis DSM 15212 OX=1121301 GN=queC PE=3 SV=1
MRKAIVIFSGGQDSTTCLFWAIKKFDFVKAVTFDYDQRHIKEVEVAKSITEKLKVPHQIIKLPEIKNIITTSSLTNIDIPIGKIHEKEYPNSFVPGRNLLFITYASIVAYQENIGDLVLGASEADYSGYPDCRESFIKNSQETLKKAMDRNFKIHVPLIHLDKSEVWELAYDLGAYDFVIENTLTCYNGIMSDGCGTCPACKLRNKGLLEFEKRRYRYEIKKSSV

SEQ ID NO: 40632 - protein, 236 aa, unidentified
  source 1..236: note = Paramesorhizobium deserti
  REGION 1..236: note = tr|A0A135HZ57|A0A135HZ57_9RHIZ 7-cyano-7-deazaguanine synthase OS=Paramesorhizobium deserti OX=1494590 GN=queC PE=3 SV=1
MKTLVICSGGLDSVSLAHKVAAEHELVGLLSFDYGQRHKKELDFAAACAKRLKVPHRIIDIGAIGRALSGSALTDNVDVPDGHYAEETMRITVVPNRNAIMLAIAFGVAAAENADAVAVAVHGGDHFIYPDCRPGFIDAFQTMQQHALDGYADIKLLAPYVNISKADIVTDGAKHGTPFAETWSCYKGGERHCGRCGTCVERREAFHLAGIEDPTVYEDHDYWLEAVRKGPGPQGG

SEQ ID NO: 40633 - protein, 214 aa, unidentified
  source 1..214: note = Paramuribaculum intestinale
  REGION 1..214: note = tr|A0A2V1ISN4|A0A2V1ISN4_9BACT 7-cyano-7-deazaguanine synthase OS=Paramuribaculum intestinale OX=2094151 GN=queC PE=3 SV=1
MEKDTLLIYSGGLDSTTLLWEYAPRIALAVNFSYGANQNEREAECARWQCRKAGIELIEIPLAFMKQYFKSSLLEGPDAVPDGQYAGDNMSSTVVPFRNGIMLSIAAGIAESRGLHHVMMANHSGDHEVYPDCRPQFVEAINAAISAGTYAGITLTAPYTGLTKNEIALRGMRLGVDYDHTYSCYRGTPQHCGSCATCRERQQALRYAREALED

SEQ ID NO: 40634 - protein, 222 aa, Paraperlucidibaca baekdonensis
  REGION 1..222: note = tr|A0A3E0H101|A0A3E0H101_9GAMM 7-cyano-7-deazaguanine synthase OS=Paraperlucidibaca baekdonensis OX=748120 GN=queC PE=3 SV=1
MSHAVVLLSGGLDSVTCLALAQSQGYTITALSFDYGQRHNAELNAARAIATHYGVKDHRVLRIDLGAMGGSALTDAALAVPESHSEGIPITYVPARNTVFLAFALGVAEVTGAEAIFIGVNAVDYSGYPDCRPAFIDAFQTLANLATKTGVEGVSVRIETPLIALPKSEIIHTGLALGVDYGLTVSCYQADTHGHACGRCDACRLRRDGFQVAGVTDPTRYQ

SEQ ID NO: 40635 - protein, 278 aa, unidentified
  source 1..278: note = Paraphotobacterium marinum
  REGION 1..278: note = tr|A0A220VHH7|A0A220VHH7_9GAMM 7-cyano-7-deazaguanine synthase OS=Paraphotobacterium marinum OX=1755811 GN=CF386_10105 PE=3 SV=1
MKKFAVLSFSGGMDSSSLLLKLLAQGFHVTTISIDYGQKHKIELEKASQLIQLLQSKNLNVEHQNITISGISELLESSLVEGGDEIPTGHYSEENMKSTVVPNRNKIFSSIIQSIALSISLKTDSEVLIAMGAHAGDHDTYPDCRPIFRDKDYEAFITGNYNEAKKVKYYLPYIELDKSQVLKDGLNSCNILALDFKEVYNLTHTSYSTVKINNELISDYSSSASVSRIEAFINNHIQDPIPYADPLTNKILDWDNVSQKVQKIIHDFEMRNNISKND

SEQ ID NO: 40636 - protein, 231 aa, Paraprevotella clara
  REGION 1..231: note = tr|G5SQF8|G5SQF8_9BACT 7-cyano-7-deazaguanine synthase OS=Paraprevotella clara YIT 11840 OX=762968; GN = queC PE=3 SV=1
MTMNKETALVVFSGGQDSTTCLFWAKKHFKKVVALSFVYGQKHVKEVELAKAIASRADVDWDCMDVSFVGSLGRNSLTDATMQMDEEKPEGHCPNTFVPGRNLFFISIAAVYARERGINHIVTGVSQTDFSGYPDCRDAFIKSLNVTLNLAMDEQFVLHTPLMWIDKCQTWALADELGVLDLVRHDTLTCYNGVQGDGCGHCPACKLRNEGLHKYLAEKECKSHVEENIEP

SEQ ID NO: 40637 - protein, 231 aa, Paraprevotella clara
  REGION 1..231: note = tr|R5NV65|R5NV65_9BACT 7-cyano-7-deazaguanine synthase OS=Paraprevotella clara CAG:116 OX=1263095; GN = queC PE=3 SV=1
MTMNKETALVVFSGGQDSTTCLFWAKKHFKKVVALSFVYGQKHVKEVELAKAIASRADVDWDCMDVSFVGSLGRNSLTDATMQMDEEKPEGHCPNTFVPGRNLFFISIAAVYARERGINHIVTGVSQTDFSGYPDCRDAFIKSLNVTLNLAMDEQFVLHTPLMWIDKCQTWALADELGVLDLVRHDTLTCYNGVQGDGCGHCPACKLRNEGLHKYLAEKECKSHVKENTEP

SEQ ID NO: 40638 - protein, 231 aa, Paraprevotella xylaniphila
  REGION 1..231: note = tr|F3QSJ5|F3QSJ5_9BACT 7-cyano-7-deazaguanine synthase OS=Paraprevotella xylaniphila YIT 11841 OX=762982; GN = queC PE=3 SV=1
MTMNKETALVVFSGGQDSTTCLFWAKKHFKKVVALSFVYGQKHVKEVELAKAIASRAGVDWDCMDVSFVGSLGRNSLTDSTMQMDEEKPEGSCPNTFVPGRNLFFISIAAVYARERGVNHIVTGVSQTDFSGYPDCRDAFIKSLNVTLNLAMDEQFVLHTPLMWIDKCQTWALADELGVLDLVRHDTLTCYNGVQGDGCGHCPACKLRNEGLHKYLAEKECKLHVEENIEP

SEQ ID NO: 40639 - protein, 225 aa, unidentified
  source 1..225: note = Pararheinheimera mesophila
  REGION 1..225: note = tr|A0A3P3QRW0|A0A3P3QRW0_9GAMM 7-cyano-7-deazaguanine synthase OS=Pararheinheimera mesophila OX=1547515 GN=queC PE=3 SV=1
MPQKVVVIYSGGMDSFTVLHKAIAEGHHVYALSFNYGQRHVKELICAKSVCEELGISHKVVDISAINQLLAGSSLMAPDSTHEDIQVPEGHYAADNMKSTVVPNRNMILLSLAVGYAVSLNARAVYYGAHSGDHFIYPDCRPEFVHKMNDVCQVANYEPVDIVSPYLSQTKIEILRDGLAMGLDYSKTWTCYNGREKACGKCGSCQERLEAFELNNATDPLIYEG

SEQ ID NO: 40640 - protein, 225 aa, unidentified
  source 1..225: note = Pararheinheimera tangshanensis
  REGION 1..225: note = tr|A0A5C8LUP7|A0A5C8LUP7_9GAMM 7-cyano-7-deazaguanine synthase OS=Pararheinheimera tangshanensis OX=400153 GN=queC PE=3 SV=1
MPQKVVVIYSGGMDSFTVLHKAIADGHEVYALSFNYGQRHVKELLCAKNVCEELGVPHKVVDISAINQLLAGSSLMAPDSTHEDIQIPEGHYAADTMKSTVVPNRNMILLSLAVGYAVSLNARAVYYGAHSGDHFIYPDCRPEFVHKMNDVCQVANYEPVDIVSPYLSQTKIEILRDGLAMGLDYSKTWTCYNGREKACGKCGSCQERLEAFELNQATDPLAYEG

SEQ ID NO: 40641 - protein, 236 aa, unidentified
  source 1..236: note = Pararhizobium polonicum
  REGION 1..236: note = tr|A0A1C7P043|A0A1C7P043_9RHIZ 7-cyano-7-deazaguanine synthase OS=Pararhizobium polonicum; OX = 1612624 GN=queC PE=3 SV=1
MKTIVICSGGLDSVSLAHKVAAEHQLIGLLSFDYGQRHRKELDYAAACAKRLGVAHQIIDISAIGSHLTGSALTDDIEVPDGHYAEETMKATVVPNRNAIMLAIAFGLAAAQQADAVAVAVHGGDHFIYPDCRPGFIDAFQAMQNQALDGYANVLLLAPYVTISKADIVTDGVKYGTPFAETWSCYKGGARHCGRCGTCVERREAFHLAGVDDPTDYDDPDFWVGATTGFSAAEVK

SEQ ID NO: 40642 - protein, 246 aa, unidentified
  source 1..246: note = Parasaccharibacter apium
  REGION 1..246: note = tr|A0A2S4PDC2|A0A2S4PDC2_9PROT 7-cyano-7-deazaguanine synthase OS=Parasaccharibacter apium OX=1510841 GN=queC PE=3 SV=1
MTTPASPSASHQAARNRRALVLFSGGQDSATCLAWALHHFDHVETVGFAYGQRHAVELECRTTLRQSISAQNPAWAEKLGEDHTIDLASLGALSDTALTRDAEISMGENGLPNTFVPGRNLIFLTFAAALAFRRSIRHIITGVCETDYSGYPDCRDDTIKALQVALNLGMEQRFVLHTPLMWINKAQTWRLCHDLGGADLTETIRHESHSCYKGDRTHEHAWGFGCGDCPACALRAEGWRQYQEGA

SEQ ID NO: 40643 - protein, 245 aa, unidentified
  source 1..245: note = Parasaccharibacter apium
  REGION 1..245: note = tr|A0A2C6J3R7|A0A2C6J3R7_9PROT 7-cyano-7-deazaguanine synthase OS=Parasaccharibacter apium OX=1510841 GN=queC PE=3 SV=1
MPNAPLSASHQAAQNRRALVLFSGGQDSATCLAWALQHFEHVETVGFAYGQRHAIELECRNTLRHGLTEQNPLWAKKLGEDHMIDLASLGALSDTALTRDAEISMGENGLPNTFVPGRNLIFLTFAAALAFRRSLRHIVTGVCETDYSGYPDCRDDTIKALQVALNLGMEQRFVLHTPLMWINKAQTWQLCHELGGDSLVDIIRHESHSCYKGERSHEHPWGFGCGDCPACALRAEGWRHYQEGL

SEQ ID NO: 40644 - protein, 235 aa, unidentified
  source 1..235: note = Parashewanella curva
  REGION 1..235: note = tr|A0A3L8PU64|A0A3L8PU64_9GAMM 7-cyano-7-deazaguanine synthase OS=Parashewanella curva; OX = 2338552 GN=queC PE=3 SV=1
MSSISKAVIVFSGGQDSTTCLFQAMAHYDEVHAITFDYGQRHKQEINQAQFLAKKLNVASHKIMDVSLLNELAISALTRDSIPVSHTLMENGLPNTFVPGRNILFLTLAGIYAYQLGAETVITGVCETDFSGYPDCRNDFVKAMNSALVQGMDYKLNIVTPLMWLDKAETWALADKYQALETVRNDSLTCYNGIVGDGCGDCPACDLRLKGLYHYLHNKEEVMHSLEEKIRAEMA

SEQ ID NO: 40645 - protein, 233 aa, unidentified
  source 1..233: note = Parashewanella spongiae
  REGION 1..233: note = tr|A0A3A6UIX3|A0A3A6UIX3_9GAMM 7-cyano-7-deazaguanine synthase OS=Parashewanella spongiae; OX = 342950 GN=queC PE=3 SV=1
MSKALVVFSGGQDSTTCLIQALTQYDEVHAITFDYGQRHDEEIERAKALAKQFNIASHKVMDVTLLNELAISALTRDSIPVSHTLMDNGLPNTFVPGRNILFLTLAGIYAYQLGADSVITGVCETDFSGYPDCRNDFVKAMESALVQGMDRKLDIVTPLMWLNKAETWALADKYDSLDVVRNQTLTCYNGIIGDGCGDCPACDLRSKGLHDYLENKQKVMHSLDEKNRAKNIN

SEQ ID NO: 40646 - protein, 230 aa, unidentified
  source 1..230: note = Parasphingopyxis lamellibrachiae
  REGION 1..230: note = tr|A0A3D9FDW2|A0A3D9FDW2_9SPHN 7-cyano-7-deazaguanine synthase OS=Parasphingopyxis lamellibrachiae OX=680125 GN=queC PE=3 SV=1
MAHDTSKFAVLLLSGGLDSMVTGGLAREAGYRLFALTIDYNQRHRIELEAAANVAAALEVERHIVMPLDLSKFGGSALTADIDVPKTGVGDDIPVTYVPARNTIFLSLCLGWAEAADARDIFIGVNALDYSGYPDCRPDFIASFEAMANLATKAGVEGDGFTVHTPLLDMSKADIAAEAVRLGLDAGISWSCYDPTPDHKHCGLCDSCRLRSKGFAEAGLTDPTIYATAP

SEQ ID NO: 40647 - protein, 231 aa, Parasutterella excrementihominis
  REGION 1..231: note = tr|R5DY44|R5DY44_9BURK 7-cyano-7-deazaguanine synthase OS=Parasutterella excrementihominis CAG:233; OX = 1263099 GN=queC PE=3 SV=1
MKAIVLSSGGVDSTTCLAMAVHELGKENVVTLSFEYGQRHCKELESAQKVADYYGVRHVVFNLTQIFSFSNCSLLSTSTEKPVHESYAEQISKNGEGKVSTYVPFRNGLMLSAGAALAQSLFPEEKCEIWIGAHADDAAGNAYADCSVGFNNAMNEAINIGTYGLVSLRAPLNRWNKAQVVAKGLELKVPYELTWSCYDGGEKACGECGTCIDRKAAFEANGVKDPIEYLK

SEQ ID NO: 40648 - protein, 231 aa, Parasutterella excrementihominis
  REGION 1..231: note = tr|F3QLC4|F3QLC4_9BURK 7-cyano-7-deazaguanine synthase OS=Parasutterella excrementihominis YIT 11859; OX = 762966 GN=queC PE=3 SV=1
MKAIVLSSGGVDSTTCLAMAVHELGKENVVTLSFEYGQRHCKELESAQKVADYYGVRHVVFNLTQIFSFSNCSLLSTSTEKPVHESYAEQISKNGEGKVSTYVPFRNGLMLSAGAALAQSLFPEEKCEIWIGAHADDAAGNAYADCSVGFNNAMDQAINIGTYGLVSLRAPLNRWNKAQVVAKGLELKVPYELTWSCYDGGEKACGECGTCIDRKAAFEANGVKDPIEYVK

SEQ ID NO: 40649 - protein, 282 aa, unidentified
  source 1..282: note = Parcubacteria bacterium
  REGION 1..282: note = tr|A0A101G4E2|A0A101G4E2_9BACT 7-cyano-7-deazaguanine synthase OS=Parcubacteria bacterium 33_209 OX=1635290 GN=XD75_0201 PE=3 SV=1
MRKPVKIMGNWDELSAKKKVNEDLLLLKIIEDLFIKKRGYIVKMPKPGNSVVACLSGGQDSVANIGILLKDFKLNVYPFFINRGQSNYKYEKKAVNYFNNFYKKKFPSIYHDCKEIKINTPGLEYKNLLRETQKNANKTFLERNIAYPARGSVIFLTGMEYGYSLKCKGIKIKTLFASNMSSDPAFHCSQTWIRIMNLLFCQTLNDWSWQFISIPIEKEFKNCYDKDVFIKWAYENDIPLHKARTCMKSFNLECGTCFACQCRRNGYARAGIKDPTKYISKI

SEQ ID NO: 40650 - protein, 305 aa, unidentified
  source 1..305: note = Parcubacteria group
  REGION 1..305: note = tr|A0A2D6FNP3|A0A2D6FNP3_9BACT 7-cyano-7-deazaguanine synthase OS=Parcubacteria group bacterium OX=2026774 GN=CMI54_08930 PE=3 SV=1
MTIKKPQLTNSHQLSPTFTNSHQLSPTLTNSHQLSPKMSDKKRIPVLSLSGGMDSSALLLHSIAGFGEEPVYSLSFDYGQKHKIELEKLQSNLVLLRSKGFQIRHAVVDLSVLGTLFHSSLTTGSWSSPEGHYAEDSMKETVVPNRNAIFSSIIYGYALSLAKENECETSICLGVHSGDHAIYPDCRPEFYSAISQAFRVGNWDNELVDFYLPYLDGDKESILRDAMNCCLQLGVDFDEYFANTNTSYSPDEQGRASGKTGSDIERILAFDALGKKDPVEYQEPWEVVVQRARELEKKQAEVEDE

SEQ ID NO: 40651 - protein, 223 aa, unidentified; identical to SEQ ID NO: 37290
  source 1..223: note = Parcubacteria group
  REGION 1..223: note = tr|A0A0G0T3G9|A0A0G0T3G9_9BACT Uncharacterized protein OS=Parcubacteria group bacterium GW2011_GWF2_39_8b; OX = 1618963 GN=UT65_C0002G0028 PE=4 SV=1

SEQ ID NO: 40652 - protein, 235 aa, unidentified
  source 1..235: note = Parendozoicomonas haliclonae
  REGION 1..235: note = tr|A0A1X7AJX6|A0A1X7AJX6_9GAMM 7-cyano-7-deazaguanine synthase OS=Parendozoicomonas haliclonae OX=1960125 GN=queC PE=3 SV=1
MTNKETGSSKKAVVIYSGGMDSFTVLHKARQQGYELFALSFNYGQRHSKELEYAARVCEQLQIPHKVVDITAINQLVGGSALTSDEIAVPEGHYAEENMKATVVPNRNMILLSLATGYALSIGADKVFYGAHSGDHTIYPDCRPEFVEAVNKVTQICDWTPVTIEAPYLYASKIEILRDGLAMGLDYGQTWTCYNGREHACGKCGSCAERLEAFTLNNATDPLAYETREAQGESA

SEQ ID NO: 40653 - protein, 230 aa, unidentified
  source 1..230: note = Parvibacter caecicola
  REGION 1..230: note = tr|A0A3N0ACS8|A0A3N0ACS8_9ACTN 7-cyano-7-deazaguanine synthase OS=Parvibacter caecicola; OX = 747645 GN=queC PE=3 SV=1
MDSEKALVLCSGGVDSTTLLAMAVRQFGAANVVTLSISYGQRHSREIEAAKAVAAHYGVQQRFLDLAAIFAESDCSLLAHSTQAVPESSYAQQRSEADGAPVGTYVPFRNGLFLSSAASMALSLGCSAVYYGAHHDDWAGDAYPDCSQAFVDAMGAAIAEGTGGQLQLRAPFVQMTKADIVRTGLELEVPYELTWSCYEGGEAPCGKCATCIDRIAAFRANGTEDPLIMA

SEQ ID NO: 40654 - protein, 216 aa, unidentified
  source 1..216: note = Parvibacter caecicola
  REGION 1..216: note = tr|A0A3N0AAL9|A0A3N0AAL9_9ACTN ExsB family transcriptional regulator OS=Parvibacter caecicola; OX = 747645 GN=DMP11_04470 PE=4 SV=1
MAADGPDTGPGQQLEAEPLDQFLARERRFAVAFSGGTDSALLLAAAKQAGCTVAAYMVKTAFQPQFELEDARTVAQALEVPLAVVEADVLAQADICANPQDRCYLCKRFIFQTVANAAAADGFALVADGTNGTDNPARRPGFKALAEAGVVSPLRRAGLSKAEVRRRLREQERTRGLAPNALKSAKPSFPCLAVFVPEGCQINEASLAAAREARGL

SEQ ID NO: 40655 - protein, 197 aa, Parvibaculum lavamentivorans
  REGION 1..197: note = tr|A7HPX5|A7HPX5_PARL1 7-cyano-7-deazaguanine synthase OS=Parvibaculum lavamentivorans (strain DS-1 / DSM 13023 / NCIMB 13966) OX=402881 GN=Plav_0335 PE=3 SV=1
MKALLLSGGIDSSALAHWTRPDICVTLDYGQQAALGEAAASRAICSELHLEHKLISVDLSSLGSGSMAGRETALGGAAPEFWPYRNQMLVTLAAMLLQPIGLRELMIGTVATDLHADGSVRFIQTLNALMRLQEGCVTVTAPAQNLTSTELLKLSSFPRELIGVTFSCHLHRYACGQCSGCIKHREVVDEAFPQGTS

SEQ ID NO: 40656 - protein, 236 aa, Parvibaculum lavamentivorans
  REGION 1..236: note = sp|A7HXX1|QUEC_PARL1 7-cyano-7-deazaguanine synthase; OS = Parvibaculum lavamentivorans (strain DS-1 / DSM 13023 / NCIMB 13966) OX=402881 GN=queC PE=3 SV=1
MATTEKTKALVLFSGGQDSTVCLASVLARYDEVETVGFDYGQAHAVELGCRAKLRDALTRFPGWGAKLGPDHMIALPELGRISETALTRDVEIEMGENGLPTTFVPGRNLLFFTYAAALGYRRGASVIVGGMCETDYSGYPDCRADTIAALERAICLGMDRAFTLETPLMRIDKAATWALAHELGGDALVDLIIEETHSCYRGDRSKRHDWGYGCGTCPACELRARGYTAYLAGKA

SEQ ID NO: 40657 - protein, 242 aa, Parvibaculum sp.
  REGION 1..242: note = tr|A0A2D4VFS1|A0A2D4VFS1_9RHIZ 7-cyano-7-deazaguanine synthase OS=Parvibaculum sp.; OX = 2024848 GN=queC PE=3 SV=1
MAQTPQKPDKALVLFSGGQDSTVCLAWALARYEKVETIGFDYGQSHKVELECRERVRERLCELFPDWAARLGPDHMLDLTTLGAISDTALTREAEIEMGEDGLPTTFVPGRNLLFLTYAAALGYRRGAFTLVGGMCETDYSGYPDCRDETMRSLQQSLSLGMAKPYTIETPLMWIDKAATWALAEELGGKALVELIIEDTHTCYRGNRRQRHDWGYGCGTCPACELRASGYEKWRAAQAAGR

SEQ ID NO: 40658 - protein, 239 aa, Parvibaculum sp.
  REGION 1..239: note = tr|A0A2D8XBS0|A0A2D8XBS0_9RHIZ 7-cyano-7-deazaguanine synthase OS=Parvibaculum sp.; OX = 2024848 GN=queC PE=3 SV=1
MKSTDTAMVLFSGGQDSTVCLAWALDRFTAVETIGFDYGQSHKIELDCRLSIRSKLIEAFPQWKDRLGPDHLLHLNALGEISETGLTRDQEIVMGNNGLPTSFVPGRNLLFLTYAAAVGYRRGASHLVGGMCETDFSGYPDCRDDTLKALTHAISLGMDRPFMLHTPLMWIDKQETWAMADRLGGQALVDLVIEETHTCYKGDRTHRHPWGYGCDDCPACELRATGFNNWTQRASGAAD

SEQ ID NO: 40659 - protein, 236 aa, unidentified
  source 1..236: note = Parvibium lacunae
  REGION 1..236: note = tr|A0A368L3E6|A0A368L3E6_9BURK 7-cyano-7-deazaguanine synthase OS=Parvibium lacunae; OX = 1888893 GN=queC PE=3 SV=1
MNAAPSSPQRAVVLLSGGLDSTTVLAIARAAGYDCACLSFDYGQRHRAELQAAKRIANALGAYRHQVVQLDLRPFAGFGGSALTDESIAVPTAGLSSGIPVTYVPARNTIMLAIALGFAEVNQAQHIFFGANAVDYSGYPDCRPAYVQAFSAMANLATKAAIEGQLLEIHTPIIHATKAEIIQQGHALGVDYGLTVSCYQANDAGEACGVCDSCRLRKIGFQQAGLADPTRYQSAQ

SEQ ID NO: 40660 - protein, 243 aa, Parvularcula bermudensis
  REGION 1..243: note = tr|E0TC97|E0TC97_PARBH 7-cyano-7-deazaguanine synthase OS=Parvularcula bermudensis (strain ATCC BAA-594 / HTCC2503 / KCTC 12087) OX=314260 GN=queC PE=3 SV=1
MKTKNADRPAIKPVDAGALVLLSGGQDSATCLAWALGRYRVVETLGFDYGQRHRVELDARERVRAWWADRPEGGALGADHRLPVPAFGEIGDTAMTAEVEIEMAANGLPTTFVPGRNLAFLVFAGALALRRGLSVVVGGMCQTDAAGYPDCRWETIKAQADALSLGIDPSLSVATPLMFRSKAETWALAQELGGDDLVSMIVEDTHTCYRGDREHRHPWGYGCGDCPACHERARGWATWQESR

SEQ ID NO: 40661 - protein, 456 aa, Parvularcula sp.
  REGION 1..456: note = tr|A0A2E1XGA4|A0A2E1XGA4_9PROT ATPase; OS = Parvularcula sp. OX=1979207 GN=CMI63_14130 PE=4 SV=1
MRKTPYICALDVQVMHPEDNVLGNATPCIIGRHITFDADGLQTYYTDGWRPIIYDAMLVAAAVEACDHSRARASMDWGRQFRVTVPVHDPQLWSSRRVQETLVRALKMLTGDNWTFQFTKTSAPQLGPVQGHFGFPAQADAVMPFSDGLDSRAVSAVVEETTKDQLIRVRVGSNKITRVKSGDPRQPFANVPFRVTKIKNGNGEASGRSRGFKFAMLSGIAAYLIGAKRIIVPESGQGALGPVLVNLGQSYFDRRTHPQYTSLMSDFFEALFGVRIAFDHPVLWNTKGESLTACRALKHGDEIWRETRSCWKDARHASLNGDHRQCGVCAACMLRRSSLHAAKYQEDPAMYIWENLSASDFWEGAHKDHTNRANAQRDYAVAGVLHMDHLAALARADDRDILISRQALILANVLGISFEDAAARIVRLLKAHAEEWSSFVQSLSKSSFIRDWAQAA

SEQ ID NO: 40662 - protein, 238 aa, Parvularcula sp.
  REGION 1..238: note = tr|A0A2E1XFI6|A0A2E1XFI6_9PROT 7-cyano-7-deazaguanine synthase OS=Parvularcula sp.; OX = 1979207 GN=queC PE=3 SV=1
MRKLDHKRALVLFSGGQDSSISLAWALDRYAHVETVGFIYGQRHSVELGARLSVRKAMTDAFPRWAGKLGEDTLVDARGLKDLGETAMTHETAIVLGNDGLPTTFVPGRNLVFLSLSGGLAYRRNLGVLVAGMCEADYSGYPDCRETALAAQTEALRLGMDANFMLETPLMHIDKAESWRLAERTGGEKLVALINEHSHTCYRGVRAARHDWGYGCGECPACELRARGWAGYRGREAS

SEQ ID NO: 40663 - protein, 241 aa, unidentified
  source 1..241: note = Parvularculaceae bacterium
  REGION 1..241: note = tr|A0A520R8L6|A0A520R8L6_9PROT 7-cyano-7-deazaguanine synthase OS=Parvularculaceae bacterium OX=2510335 GN=queC PE=3 SV=1
MRQLNRNRALVLFSGGQDSSIALAWALQQFDSVETIGFAYGQRHKVELDARQNVRQILIQHDPDWKQRLGPDHIVDLAGFGEISETALTRDTEIVMTEAGLPNTFVPGRNLVFLSVAAGLAYRRDIAVLVAGMCEEDATGYPDCRADTLKAQLGALRLGLDADMRLETPVLHITKAQSWAFAQTLGGTRLVDAIRIHSHTCYKGVRDVHAWGAGCGACPACQLRAEGWQAYVSALSPMDLD

SEQ ID NO: 40664 - protein, 230 aa, Pasteurella aerogenes
  REGION 1..230: note = tr|A0A448K5B5|A0A448K5B5_PASAE 7-cyano-7-deazaguanine synthase OS=Pasteurella aerogenes; OX = 749 GN=queC PE=3 SV=1
MQISKILNPNNNRKAVVIFSGGQDSTTCLLLAIQEYGLENVHAMTFQYGQRHHIELQKAQWICQDLGVKQHILDMTAMQIFAPNAMMSETDIVKNEKGVPNTVVDGRNALFLLYAAIYAKSKGMTDIITGVCETDFSGYPDCRDVFIKSMNVTLNLSMDYHFNIRTPLMYLTKAQTWQLADELDRLDYVREHTHTCYLGVEGGCGKCPSCILREKGLAEYLAQKSAVENV

SEQ ID NO: 40665 - protein, 438 aa, Pasteurella bettyae
  REGION 1..438: note = tr|I3DH90|I3DH90_9PAST 7-cyano-7-deazaguanine synthase OS=Pasteurella bettyae CCUG 2042 OX=1095749; GN = HMPREF1052_1844 PE=3 SV=1
MTQLVFHHDIEQLKNLPNGVIPVHLYGVGNKKLQIANIGNKVLDEVKRLGIEPSDVVMDFLTIALAVTAADTFVLRKDAANGWCRSLSITLPLCQPDIWQANKTHLEQILHFLSGDIWQFNFQAGGKLPPQPHKLNSRAKLVDLRNKDCICLFSGGLDSAIGAVDLLEQGYSPVLVSHSYKGDKSRQQMIIEKFNQSRYANQFSQFNAIAQPHLNNGRTTEITMRTRSLNFLAFAVVSAYALQEVVQEEIDIFVPENGVISINAPLTPRRVGTLSTRTTHPYFIQELQKLFTAVNIPFTLKNPYQFKTKGQMIAECANLPLLQQIIPDTVSCSHWKRKNQQCGVCVPCLIRRASLHYAGITNDAEYEFNDIRQILTHQDRKDDLFALMSAIGQKKHRNINQWVLQSGSLPAQQLNQFADVFRNGLNEVEQLLIVNQIL

SEQ ID NO: 40666 - protein, 222 aa, Pasteurella bettyae
  REGION 1..222: note = tr|I3D698|I3D698_9PAST 7-cyano-7-deazaguanine synthase OS=Pasteurella bettyae CCUG 2042 OX=1095749; GN = queC PE=3 SV=1
MNILNPNDNRKAVVIFSGGQDSTTCLIKAIADYGVANVEVITFQYGQRHAIELEKAQWIAEDLGVKQTLIDTSVIKAITTNAMMENIEITKDKNNMPNTFVDGRNAIFLLYAAIYAKGQGITDIITGVCETDFSGYPDCRDVFVKSMNVTLNLAMDYQFNIITPLMYLTKAQTWQLADELGALDYIREHTHTCYLGVEGGCGSCPSCLLRENGLNEYLSSKQ

SEQ ID NO: 40667 - protein, 228 aa, unidentified
  source 1..228: note = Pasteurella caecimuris
  REGION 1..228: note = tr|A0A4S2E549|A0A4S2E549_9PAST 7-cyano-7-deazaguanine synthase OS=Pasteurella caecimuris; OX = 1796644 GN=queC PE=3 SV=1
MNISNPNHNRKAVVIFSGGQDSTTCLFQAIADYGKENVETITFQYGQRHAVELEKAQWIAQDLGIKQTLVDTSVIKAITHNALIDQQTKIEQKNHELPNTFVDGRNALFLLYAAIYAKGQGIQDIITGVCETDFSGYPDCRDVFVKSMNVTLNLAMDYQFNIKTPLMYLTKAQTWQLADELGVLDYVQQHSHTCYEGVEGGCGNCPSCELRNKGLQQYLRQKGGEKNV

SEQ ID NO: 40668 - protein, 224 aa, Pasteurella canis
  REGION 1..224: note = tr|A0A379EUY3|A0A379EUY3_9PAST 7-cyano-7-deazaguanine synthase OS=Pasteurella canis; OX = 753 GN=queC PE=3 SV=1
MNITNPNNNRKAVVIFSGGQDSTTCLIQAIQEYGVENVETITFQYGQRHTIELEKAQWIAQDLGIKQTLIDTSVIKAITQNALMDDNAKIEQQGHTPNTFVDGRNALFLLYAAIYAKGQGIQDIITGVCETDFSGYPDCRDIFIKSMNVTLNLAMDYQFNLKTPLMYLTKTQTWQLADELGALDYIRQHTHTCYIGVEQGCGECPSCILREKGLQEYLSMKSAV

SEQ ID NO: 40669 - protein, 224 aa, Pasteurella dagmatis
  REGION 1..224: note = tr|C9PRY4|C9PRY4_9PAST 7-cyano-7-deazaguanine synthase OS=Pasteurella dagmatis ATCC 43325 OX=667128; GN = exsB PE=3 SV=1
MNITNPNGNRKAVVIFSGGQDSTTCLIQAIQEYGAENVEAVTFQYGQRHAIELEKAQWIAKDLGVKQILIDTSVIKAITQNALMDKNATIEQQGSTPNTFVDGRNALFLLYAAIYAKGQGITDIITGVCETDFSGYPDCRDVFIKSMNVTLNLAMDYSFNIKTPLMYLTKAHTWQLADELGALDYIRQHTHTCYMGVEKGCGECPSCILRENGLTEYLAIKRAV

SEQ ID NO: 40670 - protein, 227 aa, Pasteurella langaaensis
  REGION 1..227: note = tr|A0A2U0SKH8|A0A2U0SKH8_9PAST 7-cyano-7-deazaguanine synthase OS=Pasteurella langaaensis DSM 22999 OX=1122935 GN=queC PE=3 SV=1
MKISNPNHDRKAIVIFSGGQDSTTCLIQAIQEYGVSNVEAVTFQYGQRHAIELEKAQWIARDLGIKQTLIDTSVMKSITTNGMMSETEIKPNENGMPNTFVDGRNALFLLYAAIYAKGQGATDIITGVCETDFSGYPDCRDVFIKSMNVTLNLAMDYQFNIRTPLMYLTKAQTWQLADELGALDYVREHTHTCYMGVEGGCGECLSCLLREKGLKEYLQQKSAVKNV

SEQ ID NO: 40671 - protein, 230 aa, unidentified
  source 1..230: note = [Pasteurella] mairii
  REGION 1..230: note = tr|A0A379B6Q9|A0A379B6Q9_9PAST 7-cyano-7-deazaguanine synthase OS=[Pasteurella] mairii; OX = 757 GN=queC PE=3 SV=1
MQISKILNPNNDRKAVVIFSGGQDSTTCLLLAIQEYGVENVHAMTFQYGQRHHIELQKAKWICQDLGVKQHILDMTAMQVFAPNAMMSETDIVKNEKGVPNTVVDGRNALFLLHAAIYAKSQGMTDIITGVCETDFSGYPDCRDVFIKSMNVTLNLSMDYNFNIRTPLMYLTKAQTWQLADDLGRLDYVREHTHTCYMGVEGGCGECPSCILREKGLAEYLAQKSAVKNV

SEQ ID NO: 40672 - protein, 70 aa, Pasteurella multocida
  REGION 1..70: note = tr|J4SPR6|J4SPR6_PASMD 7-cyano-7-deazaguanine synthase (Fragment) OS=Pasteurella multocida subsp. multocida str. Anand1_buffalo OX=1032868 GN=AAUPMB_01899; PE = 3 SV=1
FHLKTPLMYLTKAQTWQLADELGVLDYIRQHTHTCYMGVEQGCGECPSCVLREKGLREYLSSKSEGEIDV

SEQ ID NO: 40673 - protein, 228 aa, Pasteurella multocida
  REGION 1..228: note = sp|Q9CP69|QUEC_PASMU 7-cyano-7-deazaguanine synthase; OS = Pasteurella multocida (strain Pm70) OX=272843 GN=queC; PE = 3 SV=1
MQLTNPNRDRKAVVIFSGGQDSTTCLFQAIQDYGVENVEVVTFQYGQRHAIELEKAKWIAQDLGVKQTLIDTSVIKAITQNALMDEQARIEQHGSTPNTFVDGRNALFLLYTAIYAKGQGIQDIITGVCETDFSGYPDCRDVFIKSMNVTLNLAMDYQFHLKTPLMYLTKAQTWQLADELGVLDYIRQHTHTCYMGVEQGCGECPSCVLREKGLREYLSSKSEAEIDV

SEQ ID NO: 40674 - protein, 223 aa, Pasteurella skyensis
  REGION 1..223: note = tr|A0A1H7UGZ2|A0A1H7UGZ2_9PAST 7-cyano-7-deazaguanine synthase OS=Pasteurella skyensis; OX = 97481 GN=queC PE=3 SV=1
MLQEPQKAVVIFSGGQDSTTCLFLAIREFGLKNVEVVTFQYGQRHSIELKKAEWIAQDLGIKQTVIDTSVIKAITTNALMDNAAKIELDGDKPNTFVDGRNALFLLYTAIYAKGQGIKTLYTGVCETDFSGYPDCRDVFIKSMNVTLNLAMDYNFNIRTPLMYLDKKQTWALADELGAFDYIREHTYTCYIGVEGGCGKCPSCELRERGLMQYLAERSSLSSN

SEQ ID NO: 40675 - protein, 228 aa, Pasteurella sp.
  REGION 1..228: note = tr|A0A4Y9GUP2|A0A4Y9GUP2_9PAST 7-cyano-7-deazaguanine synthase OS=Pasteurella sp. WM03; OX = 2558280 GN=queC PE=3 SV=1
MNISNPNHNRKAVVIFSGGQDSTTCLFQAISDYGKENVETITFQYGQRHAIELEKAQWIAQDLGIKQTLVDTSVIKAITHNALIDQQTKIEQKNNELPNTFVDGRNALFLLYAAIYAKGQGIQDIITGVCETDFSSYPDCRDVFVKSMNVTLNLAMDYQFNIKTPLMYLTKAQTWQLADELGVLDYVQQHSHTCYEGVEGGCGGCPSCELRNKGLQQYLRQKCGEKNV

SEQ ID NO: 40676 - protein, 221 aa, Pasteurella testudinis
  REGION 1..221: note = tr|A0A1W1UM55|A0A1W1UM55_9PAST 7-cyano-7-deazaguanine synthase OS=Pasteurella testudinis DSM 23072 OX=1122938 GN=queC PE=3 SV=1
MQQTPKALVIFSGGQDSTTCLLQAIQHYGKENVEVVTFQYGQRHAIELEKAQWIARDLGVKQTLIDTSVIKAITTNALMDQSAVIEENDDMPNTFVDGRNALFLLYAAIYAKGQGIRNIVTGVCETDFSGYPDCRDVFVKSMNVTLNLAMDYNFNIQTPLMYLDKKQTWALADQLGGLDYVRQHTHTCYLGVEGGCHECPSCKLREKGLNEYLAEKEAHHV

SEQ ID NO: 40677 - protein, 223 aa, unidentified
  source 1..223: note = Pasteurellaceae bacterium
  REGION 1..223: note = tr|A0A5C4QR94|A0A5C4QR94_9PAST 7-cyano-7-deazaguanine synthase OS=Pasteurellaceae bacterium BK431 OX=2585026 GN=queC PE=3 SV=1
MQNNTKKALVIFSGGQDSTTCLLQAIHYYGRENVEAVTFQYGQRHAIELEKAQWIAQDLGVKQTLIDTSVIKAITTNALMDQSAVISQNADEMPNTFVDGRNALFLLYAAIYAKGQGIHDIITGVCETDFSGYPDCRDVFIKSMNVTLNLAMDYNFNIQTPLMYLDKKQTWALADQLDGLDYVQRHTHTCYLGVEGGCHKCPSCKLREKGLNEYLAEKEAQNV

SEQ ID NO: 40678 - protein, 222 aa, unidentified; identical to SEQ ID NO: 39450
  source 1..222: note = Pasteurellaceae bacterium
  REGION 1..222: note = tr|A0A3Q8GIL0|A0A3Q8GIL0_9PAST 7-cyano-7-deazaguanine synthase OS=Pasteurellaceae bacterium 12565 OX=2093222 GN=queC PE=3 SV=1

SEQ ID NO: 40679 - protein, 266 aa, unidentified
  source 1..266: note = Patescibacteria group
  REGION 1..266: note = tr|A0A5C7JAU7|A0A5C7JAU7_9BACT 7-cyano-7-deazaguanine synthase OS=Patescibacteria group bacterium OX=2052139 GN=E6P97_01235 PE=3 SV=1
MENKLIVPTNNDEQPYVLEDLDRLLARRRGYTFHTPTPDDSVVFIISGGLDSTIALHRVLNEIRCTVYPLYIKRGARSEDSELNAIKHYMSLYSELFPEKLRPLTIIASEVPPKILKTNITKDRLSTIGHPMRNAVLQSISIQFAVAKSHEDQAEIKTVFTAISPDDMLPHCSLVALRAQTLLACIDNGDWAWQITSPNLEPELWGDISKSDSIKYATQHKIPLDMTYTCTQGPTTACGICPECHLRIEAFQQAGVPDPTEYGHTS

SEQ ID NO: 40680 - protein, 251 aa, unidentified
  source 1..251: note = Patescibacteria group
  REGION 1..251: note = tr|A0A5C7J8R8|A0A5C7J8R8_9BACT 7-cyano-7-deazaguanine synthase OS=Patescibacteria group bacterium OX=2052139 GN=E6P97_01245 PE=3 SV=1
MINTYEKILLDKRGYVSKFPENKKAVMIISGGLDSVVTSARLMHEHDIELFPLHVERGQTNFEAEKRSVEHFEKLFKKQYLGKFHTPEYIKLNVPPKEVKQDLLPYTKSHGHPLRDTMLQMAAVQYAASLLSKGHDIDTIFCAVMPEDYFPHSNMESIRATTIAICQNMGNWKWVVSSPNTDPNLTPSPITKKDEITWAMTHQIPVGATVSCNVATKDTSLLNCGTCSSCGRRKDAFREAGFDDPTQYFSP

SEQ ID NO: 40681 - protein, 245 aa, unidentified
  source 1..245: note = Paucibacter aquatile
  REGION 1..245: note = tr|A0A2N8KY87|A0A2N8KY87_9BURK 7-cyano-7-deazaguanine synthase OS=Paucibacter aquatile; OX = 2070761 GN=queC PE=3 SV=1
MNLPTPPQAHTERKALVLFSGGQDSTACLAWALNRYAAVETLGFDYGQRHRVELECRQTVRRELAAQFPAWAAKLGEDHVLDLSLLSQISSTALTEDRAIEMQANGLPNTFVPGRNLLFLTFAATLAYRRGASVLVGGMCETDYSGYPDCRDNTLKALQVALSLGLDTPMTLETPLMFITKAQTWALTESLGGAALNELVVEHTHTCYLGERSQRHAWGYGCGSCPACELRARGHDEFLALKAGA

SEQ ID NO: 40682 - protein, 245 aa, Paucibacter sp.
  REGION 1..245: note = tr|A0A3N7BPZ8|A0A3N7BPZ8_9BURK 7-cyano-7-deazaguanine synthase OS=Paucibacter sp. KBW04; OX = 2153361 GN=queC PE=3 SV=1
MSSPNTVPPQANSQRRALVLFSGGQDSTACLAWALDRFASVETLGFDYGQRHRVELECRQTVRRELQAQFPQWAAKLGEDHMLDLSLLGQISDTALTESRAIEMQANGLPNTFVPGRNLLFLSFAATLAYRRGASVLVGGMCETDYSGYPDCRDNTLKSLQVALSLGLDTPMTVETPLMFLTKAQTWALSERLGGAALNELIIEHTHTCYLGERMQRHAWGYGCGTCPACELRARGHAEFVAGVL

SEQ ID NO: 40683 - protein, 245 aa, Paucibacter sp.
  REGION 1..245: note = tr|A0A0U3F104|A0A0U3F104_9BURK 7-cyano-7-deazaguanine synthase OS=Paucibacter sp. KCTC 42545 OX=1768242 GN=queC PE=3 SV=1
MTMPPPQANSQRKALVLFSGGQDSTACLAWALDRFAQVETLGFDYGQRHRVELDCRQVVRRELMAQFPQWAAKLGEDHLLDLSLLGQISDTALTESRAIEMQANGLPNTFVPGRNLLFLSFAATLAYRRGASVLVGGMCETDYSGYPDCRDNTLKSLQVALSLGLDTPMTIETPLMFLTKAQTWALSEQLGGAALNELIVDHTHTCYLGERTQRHAWGYGCGSCPACELRARGHAEFIGSGSAGA

SEQ ID NO: 40684 - protein, 244 aa, Paucibacter toxinivorans
  REGION 1..244: note = tr|A0A4R6QP85|A0A4R6QP85_9BURK 7-cyano-7-deazaguanine synthase OS=Paucibacter toxinivorans OX=270368 GN=queC PE=3 SV=1
MKPNPEANSNRRALVLFSGGQDSTACLAWALERYAEVETVGFDYGQRHRIELACRQTVRREIAAQFPAWAAKLGEDHLLDLRLLGQISDTALTESRAIEMQANGLPNTFVPGRNLLFLGFAATLAYRRGASVLVGGMCETDYSGYPDCRDNTLKAMQVALSLGLDTAMTIETPLMFITKAETWSLSEQLGGPALNELIIEHTHTCYLGDRGLRHAWGYGCGSCPACELRRKGHDEYLAAKATCA

SEQ ID NO: 40685 - protein, 233 aa, Paucimonas lemoignei
  REGION 1..233: note = tr|A0A2X4CU27|A0A2X4CU27_PAULE 7-cyano-7-deazaguanine synthase OS=Paucimonas lemoignei; OX = 29443 GN=queC_2 PE=3 SV=1
MHTKALVLFSGGQDSTTCLAWALERYEHVETIGFDYGQRHRIELECRLNILQEVRNRFPNWTQRLGEDHVLDLKLLGQISDTAMTAEKTIEFEKNGLPNTFVPGRNLLFLTFAATIAYRRGLTVLVGGMCETDYSGYPDCRDNTLKATQVALSLGMDTPVIIETPLMWLDKAQTWRLAENLGGQDFVSLIQEESHTCYLGTRQQKHEWGYGCGTCPACELRKTGYEQYFQERD

SEQ ID NO: 40686 - protein, 224 aa, Paucimonas lemoignei
  REGION 1..224: note = tr|A0A2X4ARD5|A0A2X4ARD5_PAULE 7-cyano-7-deazaguanine synthase OS=Paucimonas lemoignei; OX = 29443 GN=queC_1 PE=3 SV=1
MTEKKAVILLSGGLDSATVVAMAREQGYACYTMSFDYGQRHRAELEAAARVARDLGAVEHKVIGLDLNGIGGSALTDSSIDVPETPGEGIPVTYVPARNTVFLSLALGWAEVLGARDIFIGVNAVDYSGYPDCRPEFIESFERMANLATKAGVEGNGFTIQAPLQNLSKADIVKAGVRLGVDYSLTVSCYQADDQGRACAKCDSCRLRAEGFAAAGISDPTRYF

SEQ ID NO: 40687 - protein, 223 aa, Pectinatus cerevisiiphilus
  REGION 1..223: note = tr|A0A4R3K2E6|A0A4R3K2E6_9FIRM 7-cyano-7-deazaguanine synthase OS=Pectinatus cerevisiiphilus OX=86956 GN=queC PE=3 SV=1
MKAVILLSGGLDSTACMAVAKSKNYDLYPISFNYQQRHSIELSSAKKVAKFYGVKKHLIIDTNMNSIGGSALTDKNIDVPDRDPDGTDVPVTYVPARNLIFLSYALGYAEVLGAAYVYIGVNAVDYSGYPDCRPEFIEKFQDLADYATKATAAEHKKIEIVAPLQNLSKKDIVLLGTKLGAPFALTRSCYNGGEKACGHCDSCKLRLRGFAEAGLKDPIEYME

SEQ ID NO: 40688 - protein, 231 aa, unidentified
  source 1..231: note = Pectobacterium actinidiae
  REGION 1..231: note = tr|A0A1V2R7B5|A0A1V2R7B5_9GAMM 7-cyano-7-deazaguanine synthase OS=Pectobacterium actinidiae OX=1507808 GN=queC PE=3 SV=1
MKRAVVVFSGGQDSTTCLIQALQDYDDVHCITFDYGQRHRAEIDVARELSQRLGATAHKVLDVGLLNELATSSLTRDNIPVPDYDANSQGIPNTFVPGRNILFLTLASIYAYQVGAEAVITGVCETDFSGYPDCRDEFVKALNQAIVLGIARDIRFETPLMWLNKAETWALADYYQQLDTVRYHTLTCYNGIKGDGCGQCAACHLRANGLAQYQNDAAAVMALLKQKTGLR

SEQ ID NO: 40689 - protein, 231 aa, unidentified
  source 1..231: note = Pectobacterium aquaticum
  REGION 1..231: note = tr|A0A426IQP1|A0A426IQP1_9GAMM 7-cyano-7-deazaguanine synthase OS=Pectobacterium aquaticum OX=2204145 GN=queC PE=3 SV=1
MKRAVVVFSGGQDSTTCLIQALQDYDDVHCITFDYGQRHRAEIDVARELSQKLGATAHKVLDAGLLNELATSSLTRDSIPVPDYDANAQGIPNTFVPGRNILFLTLAAIYAYQVGAEAVITGVCETDFSGYPDCRDEFVKALNQAIVLGIARDIRFETPLMWLNKAETWALADYYQQLDTVRYHTLTCYNGIKGDGCGQCAACHLRANGLAQYQHDSVAVMASLKQKAGLR

SEQ ID NO: 40690 - protein, 231 aa, Pectobacterium atrosepticum
  REGION 1..231: note = sp|Q6D820|QUEC_PECAS 7-cyano-7-deazaguanine synthase; OS = Pectobacterium atrosepticum (strain SCRI 1043 / ATCC BAA-672) OX=218491 GN=queC PE=1 SV=1
MKRAVVVFSGGQDSTTCLIQALQDYDDVHCITFDYGQRHRAEIEVAQELSQKLGAAAHKVLDVGLLNELATSSLTRDSIPVPDYDANAQGIPNTFVPGRNILFLTLASIYAYQVGAEAVITGVCETDFSGYPDCRDEFVKALNQAIVLGIARDIRFETPLMWLNKAETWALADYYQQLDTVRYHTLTCYNGIKGDGCGQCAACHLRANGLAQYQKDAATVMASLKQKVGLR

SEQ ID NO: 40691 - protein, 231 aa, Pectobacterium betavasculorum
  REGION 1..231: note = tr|A0A093SZ55|A0A093SZ55_9GAMM 7-cyano-7-deazaguanine synthase OS=Pectobacterium betavasculorum OX=55207 GN=queC PE=3 SV=1
MKRAVVVFSGGQDSTTCLIQALQHYDDVHCITFDYGQRHRAEIDVAQELSQKLGATAHKVLDVGLLNELATSSLTRDSIPVPDYDANAQGIPNTFVPGRNILFLTLASIYAYQVGAEAVITGVCETDFSGYPDCRDEFVKALNQAIVLGIARDIRFETPLMWLNKAETWALADYYQQLDTVRYHTLTCYNGIKGDGCGQCAACHLRANGLEQYQKDAAAVMASLKLKVGLR

SEQ ID NO: 40692 - protein, 231 aa, unidentified
  source 1..231: note = Pectobacterium brasiliense
  REGION 1..231: note = tr|A0A086F0B6|A0A086F0B6_9GAMM 7-cyano-7-deazaguanine synthase OS=Pectobacterium brasiliense OX=180957 GN=queC PE=3 SV=1
MKRAVVVFSGGQDSTTCLIQALQDYDDVHCITFDYGQRHRAEIDVAQELSQKLGATAHKVLDVGLLNELATSSLTRDNIPVPDYDANAQGIPNTFVPGRNILFLTLASIYAYQVGAETVITGVCETDFSGYPDCRDEFVKALNQAIVLGIARDIRFETPLMWLNKAETWALADHYQQLDTVRYHTLTCYNGIKGDGCGQCAACHLRANGLAQYQNDSVAIMASLKQKAELR

SEQ ID NO: 40693 - protein, 231 aa, unidentified
  source 1..231: note = Pectobacterium brasiliense
  REGION 1..231: note = tr|A0A0M2F6E1|A0A0M2F6E1_9GAMM 7-cyano-7-deazaguanine synthase OS=Pectobacterium brasiliense OX=180957 GN=queC PE=3 SV=1
MKRAVVVFSGGQDSTTCLIQALQDYDDVHCITFDYGQRHRAEIDVARELSQKLGATAHKVLDVGLLNELATSSLTRDSIPVPDYDANAQGIPNTFVPGRNILFLTLAAIYAYQVGAEAVITGVCETDFSGYPDCRDEFVKALNQAIVLGIARDIRFETPLMWLNKAETWALADHYQQLDTVRYHTLTCYNGIKGDGCGQCAACHLRANGLAQYQNDSVAIMASLKQKAGLR

SEQ ID NO: 40694 - protein, 231 aa, Pectobacterium carotovorum
  REGION 1..231: note = sp|C6DB62|QUEC_PECCP 7-cyano-7-deazaguanine synthase; OS = Pectobacterium carotovorum subsp. carotovorum (strain PC1) OX=561230 GN=queC PE=3 SV=1
MKRAVVVFSGGQDSTTCLIQALQHYDDVHCITFDYGQRHRAEIDIARELSLKLGATAHKVLDVGLLNELATSSLTRDSIPVPDYDANAQGIPNTFVPGRNILFLTLASIYAYQVGAEAVITGVCETDFSGYPDCRDEFVKALNQAIVLGIARDIRFETPLMWLNKAETWALADYYQQLDTVRYHTLTCYNGIKGDGCGQCAACHLRANGLAQYQNDSAAVMASLKQKAGLR

SEQ ID NO: 40695 - protein, 231 aa, Pectobacterium carotovorum
  REGION 1..231: note = tr|A0A518VMU2|A0A518VMU2_PECCC 7-cyano-7-deazaguanine synthase OS=Pectobacterium carotovorum subsp. carotovorum OX=555 GN=queC PE=3 SV=1
MKRAVVVFSGGQDSTTCLIQALQHYDDVHCITFDYGQRHRAEIDVARELSQKLGATAHKVLDVGLLNELATSSLTRDSIPVPDYDANAQGIPNTFVPGRNILFLTLASIYAYQVGAEAVITGVCETDFSGYPDCRDEFVKALNQAIVLGIARDIRFETPLMWLNKAETWALADYYQQLDTVRYHTLTCYNGIKGDGCGQCAACHLRANGLAQYQNDAAAVMALLKQKTGLR

SEQ ID NO: 40696 - protein, 231 aa, unidentified
  source 1..231: note = Pectobacterium odoriferum
  REGION 1..231: note = tr|A0A094RZ93|A0A094RZ93_9GAMM 7-cyano-7-deazaguanine synthase OS=Pectobacterium odoriferum OX=78398 GN=queC PE=3 SV=1
MKRAVVVFSGGQDSTTCLIQALQDYDDVHCITFDYGQRHRAEIDVARELSQKLGATAHKVLDVGLLNELATSSLTRDSIPVPDYDANAQGIPNTFVPGRNILFLTLASIYAYQVGAEAVITGVCETDFSGYPDCRDEFVKALNQAIVLGIARDIRFETPLMWLNKAETWALADYYQQLDTVRYHTLTCYNGIKGDGCGQCAACHLRANGLAQYQNDSAAITASLKQKTGLR

SEQ ID NO: 40697 - protein, 231 aa, unidentified
  source 1..231: note = Pectobacterium parmentieri
  REGION 1..231: note = tr|A0A0H3IBL7|A0A0H3IBL7_PECPM 7-cyano-7-deazaguanine synthase OS=Pectobacterium parmentieri OX=1905730 GN=queC PE=3 SV=1
MKRAVVVFSGGQDSTTCLIQALQHYDDVHCITFDYGQRHRAEIEVAQELSQKLGATAHKILDVGLLNELATSSLTRDSIPVPDYDANAQGIPNTFVPGRNILFLTLASIYAYQVGAEAVITGVCETDFSGYPDCRDEFVKALNQAIVLGIARNIRFETPLMWLNKAETWALADYYQQLDTVRYHTLTCYNGIQGDGCGQCAACHLRANGLAQYQNDAEIVMASLKQKVGLR

SEQ ID NO: 40698 - protein, 231 aa, unidentified
  source 1..231: note = Pectobacterium peruviense
  REGION 1..231: note = tr|A0A0J5XPH0|A0A0J5XPH0_9GAMM 7-cyano-7-deazaguanine synthase OS=Pectobacterium peruviense OX=2066479 GN=queC PE=3 SV=1
MKRAVVVFSGGQDSTTCLIQALQHYDDVHCITFDYGQRHRAEIDVAQELSQKLGATAHKVLDVGLLNELATSSLTRDSIPVPDYDANAQGIPNTFVPGRNILFLTLASIYGYQVGAEAVITGVCETDFSGYPDCRDEFVKALNQAIVLGIARDIRFETPLMWLNKAETWALADYYQQLDTVRYHTLTCYNGIKGDGCGQCAACHLRANGLEQYQKDAVAVMASLKQKVGLR

SEQ ID NO: 40699 - protein, 231 aa, unidentified
  source 1..231: note = Pectobacterium polaris
  REGION 1..231: note = tr|A0A093SBJ7|A0A093SBJ7_9GAMM 7-cyano-7-deazaguanine synthase OS=Pectobacterium polaris; OX = 2042057 GN=queC PE=3 SV=1
MKRAVVVFSGGQDSTTCLIQALQDYDDVHCITFDYGQRHRAEIDVARELSQKLGATAHKVLDVGLLNELATSSLTRDSIPVPDYDANAQGIPNTFVPGRNILFLTLAAIYAYQVGAEAVITGVCETDFSGYPDCRDEFVKALNQAIVLGIARDIRFETPLMWLNKAETWALADHYQQLDTVRYHTLTCYNGIKGDGCGQCAACHLRANGLAQYQNDSVAVMASLKQKAGLR

SEQ ID NO: 40700 - protein, 231 aa, unidentified
  source 1..231: note = Pectobacterium polonicum
  REGION 1..231: note = tr|A0A4U7KJP0|A0A4U7KJP0_9GAMM 7-cyano-7-deazaguanine synthase OS=Pectobacterium polonicum OX=2485124 GN=queC PE=3 SV=1
MKRAVVVFSGGQDSTTCLIQALQHYDDVHCITFDYGQRHRAEIDVARELSQKLGTTAHKVLDVGLLNELATSSLTRDSIPVPDYDANAQGIPNTFVPGRNILFLTLASIYAYQVGAEAVITGVCETDFSGYPDCRDEFVKSLNQAIVLGIARNIRFETPLMWLNKAETWALADYYQQLDTVRYHTLTCYNGIKGDGCGQCAACHLRANGLAQYQEDPVAVMASLKQKVGLR

SEQ ID NO: 40701 - protein, 219 aa, unidentified
  source 1..219: note = Pectobacterium polonicum
  REGION 1..219: note = tr|A0A4U7KGC0|A0A4U7KGC0_9GAMM Uncharacterized protein (Fragment) OS=Pectobacterium polonicum OX=2485124; GN = EDI29_09655 PE=4 SV=1
RGRSLIFISYGILAATTLNKDKSIDLFIPENGFISLNIPLNEGRFGSLSTKTTHPVFLGILQEIFDAVKIKVSIKRPYQGFTKGQMIKNCKNKETLATFIGNTTSCGRFGYYNYKHCGRCVPCLVRRAAFLSAGINDSTEKQYVFEDLGNSKSAREKGANDIGAVARACLLFRKNGINDVIGGALAFSNQTIEGRKFYADVVENGLIELESLLKKYKVL

SEQ ID NO: 40702 - protein, 231 aa, unidentified
  source 1..231: note = Pectobacterium punjabense
  REGION 1..231: note = tr|A0A2T3VV57|A0A2T3VV57_9GAMM 7-cyano-7-deazaguanine synthase OS=Pectobacterium punjabense OX=2108399 GN=queC PE=3 SV=1
MKRAVVVFSGGQDSTTCLIQALQHYDDVHCITFDYGQRHRAEIDVARELSLKLGATAHKVLDVGLLNELATSSLTRDSIPVPDYDANAQGIPNTFVPGRNILFLTLASIYAYQVGAEAVITGVCETDFSGYPDCRDEFVKSLNQAIVLGIARDIRFETPLMWLNKAETWALADYYQQLDTVRYHTLTCYNGIKGDGCGQCAACHLRANGLTQYQNDSAAVMASLKQKAGLR

SEQ ID NO: 40703 - protein, 231 aa, Pectobacterium wasabiae
  REGION 1..231: note = tr|A0A1D7Z3I1|A0A1D7Z3I1_9GAMM 7-cyano-7-deazaguanine synthase OS=Pectobacterium wasabiae CFBP 3304 OX=1175631 GN=queC PE=3 SV=1
MKRAVVVFSGGQDSTTCLIQALQHYDDVHCITFDYGQRHRAEIDVARELSQKLGATAHKVLDVGLLNELATSSLTRDSIPVPDYDANAHGIPNTFVPGRNILFLTLASIYAYQVGAEAIITGVCETDFSGYPDCRDEFVKALNQAIVLGIARNIRFETPLMWLNKAETWALADYYQQLNTVRYHTLTCYNGIKGDGCGQCAACHLRANGLAQYQNDAETVMASLKQKVGLR

SEQ ID NO: 40704 - protein, 627 aa, Pedobacter africanus
  REGION 1..627: note = tr|A0A1W2B6F4|A0A1W2B6F4_9SPHI Queuosine biosynthesis protein QueC OS=Pedobacter africanus; OX = 151894 GN=SAMN04488524_1918 PE=4 SV=1
MINSNSHIVLCGGVSPSPHKTKKYASNHIHRLIIDPSNPGHNINLELPHFIQLVNCHFPDRIKDLLEIAGYVYAADRMIGRGANNSLEYHSWSRQLNFIIRVRDVSFWSNPEITKRLSDALTFVSGDQGYSFIFKDGGADIGQKSLYDHEAIQLQKRENSIIGLFSGGLDSLAGALEILTTTDKNLILVSHRSNTTGVSKIQKGIHRLLETDFPGRIQYFAFYCNLHGERAVEETQRTRIFLYTAIAYSLSTLASEKEIHVFENGVTSLNFSKRADLVNARASRTTHPQTLKLLENFYSAVGEEQRPIVHPFLYNTKTDIFNKIKAAGKVNYINSTISCTKTFLSFENNSQATHCGGCSQCVDRRLAAFASDLQDFDAIYDIDIAKDPITSPESRTHLNDYIRAIVKYNNFTEMNFQYEMLAALTDIIPYLEGQRPSEKAMRIYDLLKTHTSQVLNAIRNIQLLQDPLKPKIANTLNAYIDERMHLKPPIECLIETIKAKLTIAIPQAFEHEKPKHENALNDVIHALIQGESIDYGREYPTIKFSIARVIPDHSFLEIYDLLIEAKYLRGNTSKAAITDQIGADITKYPKEKYKLFIIYDPERKIANDVNFSKDIEKQPNCKVFIIR

SEQ ID NO: 40705 - protein, 367 aa, unidentified
  source 1..367: note = Pedobacter luteus
  REGION 1..367: note = tr|A0A1T5FB11|A0A1T5FB11_9SPHI N-acetyl sugar amidotransferase OS=Pedobacter luteus OX=572036; GN = SAMN05661099_3563 PE=4 SV=1
MKNSSAAYQQCNRCVMDTSDPLIEFDEIGNCNHCNKYIEQLPNTIIRGPEGLAELDKLLERARQSGQGKKYDVIMGVSGGMDSSYVAYRAKHFGLRILAVHLDNGWNSELSVKNIENCIKYAGADLFTHVIDWEEFKSMQVAYLKAGVIDIEALTDHAIRSIIYKLTDKYKIEYNLSGSNYTTEGILPNSWVYNKLDYKNIRSISRRFGARRHRTFPGMSLGKYIYYRAFAKIKPIDVLNLIDYKVDTAIQDMENDMGWKYYGGKHHESIFTKFYQGYILPEKFGVDKRKAHYSTLICSGNMTREDALLKLRSDIYTANELDNDMEYVLKKLGITESAFKKIMQEPVRSHLDYPNNNALFQFFKRFS

SEQ ID NO: 40706 - protein, 447 aa, unidentified
  source 1..447: note = Pedobacter nutrimenti
  REGION 1..447: note = tr|A0A318U813|A0A318U813_9SPHI 7-cyano-7-deazaguanine synthase in queuosine biosynthesis; OS = Pedobacter nutrimenti OX=1241337 GN=B0O44_1089 PE=4 SV=1
MGKIALIALVGNEDTGVNLPEGTYLRQANLSLFRNYDQYDVSLHAFLKSLKKLKLEPSELSMDLLVIAAVMYGADTRINRKDFAEDGWTRIIDLFIPVSDVSVWNNQKENLERIFKFLTGDIWTVIFRPRAGTDLQLSPRGKLKRYKMPYETDTVCLFSGGMDSFIGAIDLLESNVRPLLVGHKKSGDVSKFQKICGDALVAAYPLLSPQQISTHIAIPKTNLFDSQEDTERGRSFLFLTLGAICASVLNANSTLVVPENGMISLNIPLTPLRTGSHSTRTTHPFYFSKMQQLFNALNLGVKISNPYQYQTKGEMLTNCKNKSLVVNTETMSCSHPSGRYEGLGNLHCGYCVPCIIRKAAFLASEQQDKYPYRTEIIGHQGLSIAKAEGADILAFKFMVEKVKKNPNFLTAAIRLTGPLGEDVLPFIDLYSRSLIEVNNLIKQVKLI

SEQ ID NO: 40707 - protein, 199 aa, Pedobacter sp.
  REGION 1..199: note = tr|A0A0Q4LSE4|A0A0Q4LSE4_9SPHI 7-cyano-7-deazaguanine synthase OS=Pedobacter sp. Leaf41; OX = 1736218 GN=ASE92_06560 PE=3 SV=1
MEFVKKATLLSGGVDSICLTYGLMPDIAYTIDYGQTVAEREIYVSKYICELLNIEHKVIQINCRSLGTGTLADSDNLSFAPSEEWWPYRNQLLITFAAMIGIKDGVSDIYLASVKSDKFHKDGTEEFYKLINDTVSYQEGRLKVHCPTLNYYSHELVSKYNVPIDMLTIAHSCHISNLACGKCSGCLKQLKVRYELKIE

SEQ ID NO: 40708 - protein, 371 aa, Pedobacter sp.
  REGION 1..371: note = tr|A0A520CYQ1|A0A520CYQ1_9SPHI N-acetyl sugar amidotransferase OS=Pedobacter sp. OX=1411316; GN = EOP00_04730 PE=4 SV=1
MYKEKKCQQCIECVMDTTDSEIVFDTNGVCNYCLEAKPLIKNYKFAPDQEKNNLDKLKNLISKGKIGKYDCVVGLSGGVDSSYVAYMAKKMGLNPLCVHFDNGWNSEIAVSNIKKIVDKCGFDLETYVIDWPEFKDLQRSFFKAGVVDIEMLSDHAIMATMFKLRKQHNIKYILSGSNYVTEHGMPLTWLWRKQDLTNIKDIQKKFGSKKLKNFPTLNSIQYQISRIFGLGGVYIELLNNINYSKNEAMKVLEREFDWKYYGGKHYESVFTKFYQAYYLPEKFNIDKRKVHLSAQIRNKEITKEDALKELEKPLYSEMEIKNDLEYVLKKLSFSANEFEAIMKEKPKKHLDYASDEWIFNLWRRGRKLITK

SEQ ID NO: 40709 - protein, 199 aa, Pedobacter suwonensis
  REGION 1..199: note = tr|A0A1I0U1A0|A0A1I0U1A0_9SPHI 7-cyano-7-deazaguanine synthase OS=Pedobacter suwonensis; OX = 332999 GN=SAMN04488511_1188 PE=3 SV=1
MEFVKKATLLSGGVDSICLTYGLMPDIAYTIDYGQTVAEREIYVSKYICELLNIEHKIIQINCRSLGAGTLAGADNLRFAPSEEWWPYRNQLLITFAAMMGIKDGVSDLHLASVKSDKFHKDGTEEFYKLINDTVSYQEGSLKVHCPTLNYYSHELVSKYNVPIDMLTIAHSCHISNLACGKCSGCLKQLKVRHELKID

SEQ ID NO: 40710 - protein, 233 aa, Pelagibaca sp.
  REGION 1..233: note = tr|A0A2D6BA81|A0A2D6BA81_9RHOB 7-cyano-7-deazaguanine synthase OS=Pelagibaca sp.; OX = 1979400 GN=queC PE=3 SV=1
MKTLLICSGGLDSVSLAHITAEEHQLTRLVSFDYGQRHRKELDYAAAAARRLGVPHHLIDMRPIGAALTGSALTDDIDVPDGHYAEETMRITVVPNRNAIMLSIGFGVAAANGDDAVATAVHGGDHFIYPDCRPAFTQAFDAMQRMALDGYADVQLYTPFVNRTKADIVAEGAKYHAPFAETWSCYKGGEVHCGRCGTCVERREAFHLAGVADPTTYADPDFWAGAVAEREAR

SEQ ID NO: 40711 - protein, 228 aa, unidentified
  source 1..228: note = Pelagibacteraceae bacterium
  REGION 1..228: note = tr|A0A424KCK7|A0A424KCK7_9PROT 7-cyano-7-deazaguanine synthase OS=Pelagibacteraceae bacterium TMED195 OX=1986631 GN=queC PE=3 SV=1
MKKRTKKCVILLSGGLDSSVVLSICNQLKYEIYAISFNYKQRHAKELDLAKWQAKKHNVKSHKIFNIDLYGGSALTDDIKVPENKDVTSIPKIIPVTYVAGRNLVFLSIAAGYAESLDINDIYIGVNSVDYSGYPDCRKEFIVSFEKLINKCTKKGLEGRSFRIKTPLINLSKGEIVSVGKKNNVDFSKTSSCYNPKNSKSCGLCDSCLLRKKGFKDAKVKDPLVYDV

SEQ ID NO: 40712 - protein, 228 aa, unidentified
  source 1..228: note = Pelagibacteraceae bacterium
  REGION 1..228: note = tr|A0A1Z8V108|A0A1Z8V108_9PROT 7-cyano-7-deazaguanine synthase OS=Pelagibacteraceae bacterium TMED65 OX=1986644 GN=queC PE=3 SV=1
MTNKSNKALVLLSGGLDSSVVLSICHKKGYKIDAISFDYGQRHKIELENAKWQAKHFNCNKHKIFKIDFYGGSALTDNIEVPVNRSVECIPEKIPITYVPSRNLVFLSYACGYAEVNDIDHIFLGVNALDYSGYPDCRKEFINGFENLINLSTKKGLEGVKFKICTPLIDMTKKEIVMLGKKNNVNFSMTLSCYNPKNSVVCGKCDSCLLRRKGFEEASLIDPLMKSF

SEQ ID NO: 40713 - protein, 231 aa, unidentified
  source 1..231: note = Pelagibacterales bacterium
  REGION 1..231: note = tr|A0A2D7ALI0|A0A2D7ALI0_9PROT 7-cyano-7-deazaguanine synthase OS=Pelagibacterales bacterium OX=2026776 GN=queC PE=3 SV=1
MNKVLLLFSGGQDSTTVLGWCLKKFDEVHLIIFDYGQKHLVEVTAAKQIIQELNYNFEDWKGKIKSDYLYKINNINNFNKNSLTSNIAFKKKKGLPNTFVPGRNILFYTLSAAYAYDKKIENIASGVCQTDYSGYPDCRNKTIKSLEKSINLGMEKNYKFQTPLMWKDKSEIWKMAKNIGGEKYLNFIIKNTHTCYKGDRINFHEWGYGCGKCPACILRAKGWKKFKRDNE

SEQ ID NO: 40714 - protein, 235 aa, unidentified
  source 1..235: note = Pelagibacterales bacterium
  REGION 1..235: note = tr|A0A2E1BWY1|A0A2E1BWY1_9PROT 7-cyano-7-deazaguanine synthase OS=Pelagibacterales bacterium OX=2026776 GN=queC PE=3 SV=1
  VARIANT 61: note = Xaa can be any naturally occurring amino acid
  VARIANT 147: note = Xaa can be any naturally occurring amino acid
  VARIANT 192: note = Xaa can be any naturally occurring amino acid
  VARIANT 200: note = Xaa can be any naturally occurring amino acid
MAKKSALVLFSGGQDSTVSLLWACENFDYIETIGFNYNQRHIIEMNCRDIVLKKIKSISDXWHDIIGKDHIIDIPALGKISETSLTRDSKIFVEDNGLPNTFVPGRNLLFFNYASALGWRRNIFDLVGGMCDTDYSGYPDCRRETIXSLKKTISLGLDKKVQIHTPLMDKNKADIWRLSYDLGGDKFHKIVXEDTHTCYXGDRSNLNDWGYGCGVCPACILRREGYNEWIKQNDI

SEQ ID NO: 40715 - protein, 232 aa, Pelagibacterium luteolum
  REGION 1..232: note = tr|A0A1G7W210|A0A1G7W210_9RHIZ 7-cyano-7-deazaguanine synthase OS=Pelagibacterium luteolum OX=440168 GN=queC PE=3 SV=1
MKTIVICSGGLDSVSLAHKVAAEQTLTGLVSFDYGQRHSKELGFAAACAQRLGVPHQIIDIRDIGRQLSGSALTDDVAVPDGHYAEESMRITVVPNRNAIMLTIAFGVAAARHDEAVGVAVHGGDHFIYPDCRPDFIDAFQAMQNHALDGYADVRLYAPFVNISKADIVTEGARHLTPFDQTWSCYKGGDVHCGRCGTCVERREAFDLARLQDPTEYADSDFWRAAVQARHA

SEQ ID NO: 40716 - protein, 458 aa, Pelagibacterium luteolum
  REGION 1..458: note = tr|A0A1G7Y2I4|A0A1G7Y2I4_9RHIZ Queuosine biosynthesis protein QueC OS=Pelagibacterium luteolum; OX = 440168 GN=SAMN04487974_11216 PE=4 SV=1
MNVHNHSSPTTKTLVVLESGERPPARLHGREELAEIGQQIRFDAGILDSFDVAGCLSRHFDLLVVCAAIELADRRWGRPRAWSRNFNLRIPVIDLERWQKPAVAHGLRRALGFLTGDNWQFTFVRAKNGSPIGMRQIPLGFDKTKKFAIAYSDGLDSRAVTSLSGGEDEALCIRVAGTHQRRQKGDSPFERIPFDTRDYRQNESSFRSRSFKFAAITAMAAQLYQVSRIVVPESGQGALGPAILPLHNIYADYRNHPAFFRRMEQFLHALLDWSVKFEQPRLWYTKGQTLRDFRLLPGKTNLDLTQTHSCWQTRRIVNDGYRRQCGLCAACLLRRQSLHAAGIKEDSGTYVVRDLNEASIAAALTTAVADKADRDIMIAYGSAGARHLQHLADLADQPDKTLHTHASQIAIATGETCDETTRRLSVMLSVHAEEWRAFRSDLGGNSFLNSWMDGGRNG

SEQ ID NO: 40717 - protein, 218 aa, unidentified
  source 1..218: note = Pelagibaculum spongiae
  REGION 1..218: note = tr|A0A2V1GVA1|A0A2V1GVA1_9GAMM 7-cyano-7-deazaguanine synthase OS=Pelagibaculum spongiae; OX = 2080658 GN=queC PE=3 SV=1
MKKAVVIYSGGMDSFTLLHRVIKQGYQPFALSFNYGQRHSKELVVAAEVCQALGVEHKVVDITAINQLLQGSSLTSSDIDVAEGHYEEDNMKSTVVPNRNMILLSLATGYAISLKADEVFYGAHGGDHAIYPDCRPEFVKAVSDVTRICDYHPVEIRAPYLDVSKGQILAEGLEMGLDYGQSWTCYNGREKACGKCGSCVERLEAFSQNQKIDPLTYE

SEQ ID NO: 40718 - protein, 251 aa, unidentified
  source 1..251: note = Pelagicola litorisediminis
  REGION 1..251: note = tr|A0A1Y5RBZ3|A0A1Y5RBZ3_9RHOB 7-cyano-7-deazaguanine synthase OS=Pelagicola litorisediminis OX=1312363 GN=queC PE=3 SV=1
MVRLAVAAYPPIAKTRTGKLNTIVICSGGLDSVSLAHKVAAENTLKGLLSFNYGQRHSKELDYAAACAARLGVPFKAVDIQAVGAALTGSALTDNINVPDGHYAEETMKLTIVPNRNAIMLAIAFGMAAAEKADAVATAVHGGDHFIYPDCRPAFISAFQAMQDQALDGYATVRLYTPYVDGSKADIVIDGARHNTPFAQTWSCYKGGERHCGRCGTCVERREAFHLAGVNDPTEYDDPDFWLTAVNKAGV

SEQ ID NO: 40719 - protein, 236 aa, Pelagicola sp.
  REGION 1..236: note = tr|A0A2U2CUM1|A0A2U2CUM1_9RHOB 7-cyano-7-deazaguanine synthase OS=Pelagicola sp. LXJ1103; OX = 2175247 GN=queC PE=3 SV=1
MKTMVICSGGMDSVALAHKVAAEQTLAGLITFDYGQRHAKEITFAAAAATRLGVAHHVIDIRTIGAALTGSALTDDIDVPDGHYAEDTMKLTIVPNRNAIMLTIAFGLAAAQKADAVATAVHGGDHFIYPDCRPGFIDAFAKMQAEALDGYADITLYTPYVHGSKADIALDGAAHGAPFAETWSCYKGGDVHCGRCGTCVERREAFHIAGLPDPTIYADPDFWKAAIATADKKGAS

SEQ ID NO: 40720 - protein, 227 aa, unidentified
  source 1..227: note = Pelagirhabdus alkalitolerans
  REGION 1..227: note = tr|A0A1G6JNJ1|A0A1G6JNJ1_9BACI 7-cyano-7-deazaguanine synthase OS=Pelagirhabdus alkalitolerans OX=1612202 GN=queC PE=3 SV=1
MRNEKAVVVFSGGQDSTTCLFWALKQFQDVSVVTFDYNQRHKKEIEIATSIAKELGITQKIMDMSLLSQLAPNALTRDSIDVKDGEGGKLPSTFVPGRNLLFLSFAGVYAQQIGAKHLITGVSQTDFSGYPDCRNDFIQSMNTTLNLAMDQTFTIHTPLMWLDKAQTWALSHQLGVLDFIRYNTLTCYEGMIGEGCQVCPACKLRQAGLDTYLNNPNDKAYQTLEES

SEQ ID NO: 40721 - protein, 196 aa, unidentified
  source 1..196: note = Pelagivirga sediminicola
  REGION 1..196: note = tr|A0A2T7G3S2|A0A2T7G3S2_9RHOB 7-cyano-7-deazaguanine synthase OS=Pelagivirga sediminicola OX=2170575 GN=DC366_16075 PE=3 SV=1
MSVVTLVSGGLDSSLVALLAKEEGLEQFPLFVDYGQRARDKELDACRRVLARLDLPAPEVAGLGGFGSLIRSGLTDPTLRVLEDAFTPGRNMLFLLVAASYAFQRDADAVSIGLLHEDASLFPDQTDAFLKDAEAIIGRCMGREIRVLAPLSAFHKIDVVALAQAKGIIGTYSCHLGLDDACGACIACNEFNFEEA

SEQ ID NO: 40722 - protein, 230 aa, unidentified
  source 1..230: note = Pelagivirga sediminicola
  REGION 1..230: note = tr|A0A2T7G7V3|A0A2T7G7V3_9RHOB 7-cyano-7-deazaguanine synthase OS=Pelagivirga sediminicola OX=2170575 GN=queC PE=3 SV=1
MKVIVICSGGMDSVSLAYRYAAAGDLHALLSFDYGQRHAKELEFAALCARRLGVAHHVIDISGVGVALSGSALTDDIDVPDGHYAEDTMKLTVVPNRNAIMLAIAFGMAAAQKVDAVATAVHGGDHFIYPDCRPEFIDAFQAMEDRALDGYADVRLLTPYVTGSKADIAVDGARHGTPFAETWSCYKGGDLHCGRCGTCVERREAFHLAGVDDPTVYADPDFWQGATAKD

SEQ ID NO: 40723 - protein, 217 aa, unidentified
  source 1..217: note = Pelistega indica
  REGION 1..217: note = tr|V8FY06|V8FY06_9BURK 7-cyano-7-deazaguanine synthase OS=Pelistega indica OX=1414851 GN=queC PE=3 SV=1
MTIQEKALVIFSGGQDSTTCLLQAIATYGQQNVQVITFAYGQRHAIELEKAKWIAQDLGVRQTVLDLSLMKQITHNALMDEQADIEQTDQGMPNTFVDGRNALFLLYAAIYAKSQEIKHIIVGVCETDFSGYPDCRDVFIKSMNVSLNLAMDYPFQIHTPLMYLTKAQTWALADQLGGLQYVREHTHTCYMGVEGGCGECPSCLLRNKGLAEYLESK

SEQ ID NO: 40724 - protein, 230 aa, Pelobacter acetylenicus
  REGION 1..230: note = tr|A0A1L3GG31|A0A1L3GG31_PELAE 7-cyano-7-deazaguanine synthase OS=Pelobacter acetylenicus; OX = 29542 GN=queC PE=3 SV=1
MNKKAVVLYSGGLDSTTCLAEARAAGFSPYALSFHYGQRHTVELEKARLYAPRVGAVDHMVIDFDLRRIGGSALTSDQEVPKGRAIDDAIPVTYVPARNTIFLSFALGWAEVLGSFDIFIGVNALDYSGYPDCRPEFVRAFEQLANLATRAGVEGQGKYRVHAPLLHLTKAQIIRRGLDLGVDYALTHSCYDPSPEGLACGLCDSCQLRLKGFAEAGIPDPAAYVREVRR

SEQ ID NO: 40725 - protein, 230 aa, Pelobacter carbinolicus
  REGION 1..230: note = sp|Q3A090|QUEC_PELCD 7-cyano-7-deazaguanine synthase; OS = Pelobacter carbinolicus (strain DSM 2380 / NBRC 103641 / GraBd1) OX=338963 GN=queC PE=3 SV=1
MSKKAVVLYSGGLDSTTCLAEARAAGFTPYALSFHYGQRHTVELEKARLYAPQVGAADHMVIDFDLRRIGGSALTSDEEVPKGREIDDAIPVTYVPARNTIFLSFALGWAEVLGSFDIFIGVNALDYSGYPDCRPEFISAFEQLANLATKAGVEGQGQYRVHAPLLHLTKAQIIKRGLELGVDYSLTHSCYDPTPEGLACGLCDSCQLRLKGFAEAGISDPAAYAREVQR

SEQ ID NO: 40726 - protein, 226 aa, Pelobacter propionicus
  REGION 1..226: note = sp|A1ANI8|QUEC_PELPD 7-cyano-7-deazaguanine synthase; OS = Pelobacter propionicus (strain DSM 2379 / NBRC 103807 / OttBd1) OX=338966 GN=queC PE=3 SV=1
MEKRAVVLYSGGLDSTTCLAMAKADGFAPYAMSFSYGQRHGFELEVAKANARPLGAVEHLVVDFDLRRMGGSALTDDISVPKEGVGSDIPVTYVPARNTIFLSFALGWAEVLGAFDIYIGVNSLDYSGYPDCRPEFVSAFEALANLATKSGVEGQGHFSIRTPLINMTKAEIIKAGVALGVDYSWTHSCYDPESDGTSCGRCDSCRLRLKGFAEAGLVDPLTYSGR

SEQ ID NO: 40727 - protein, 228 aa, Pelobacter sp.
  REGION 1..228: note = tr|A0A1L3GPZ3|A0A1L3GPZ3_9DELT 7-cyano-7-deazaguanine synthase OS=Pelobacter sp. SFB93; OX = 1842532 GN=queC PE=3 SV=1
MSKKAIILYSGGLDSTTCLAIAQSEGFAPYTMSFDYGQRHTVELAKAAQYAPQLGAVEHQLVNIDLRRIGGSALTSDLDVPKNIVDDGIPVTYVPARNTIFLSFALAWAEVLGAFDIFIGVNALDYSGYPDCRPEYIAAYETMANLATKAGVEGEGRYRIHTPLIDLTKAEIIRRGLDLGVDYALTHSCYDPTPDGQACGACDSCRLRLKGFREAGIEDPVPYVQKEQ

SEQ ID NO: 40728 - protein, 227 aa, unidentified
  source 1..227: note = Pelodictyon luteolum
  REGION 1..227: note = sp|Q3B5F4|QUEC_PELLD 7-cyano-7-deazaguanine synthase; OS = Pelodictyon luteolum (strain DSM 273 / 2530) OX=319225; GN = queC PE=3 SV=1
MKAVLLLSGGMDSLVTTAIAHREGYELAAMHVNYGQRTWQKELQSFRSIADHYSITERLEVNADFLGRIGGSSLTDHSMPVAGADLRGSGIPTSYVPFRNACFLSMAVSWSEVIGAERLFIGAVEEDSSGYPDCRRVFYDAFNRVIELGTRPETGITILTPLIAMQKAQIVRNGMELGAPFEHSWSCYRSEGRACGVCDSCARRLRAFELQGIRDPIDYEVRPQYID

SEQ ID NO: 40729 - protein, 227 aa, unidentified
  source 1..227: note = Pelodictyon luteolum
  REGION 1..227: note = tr|A0A165MDQ5|A0A165MDQ5_PELLU 7-cyano-7-deazaguanine synthase OS=Pelodictyon luteolum; OX = 1100 GN=queC PE=3 SV=1
MKAVLLLSGGMDSLVTTAIAHREGHDLAAMHVNYGQRTWQKELASFRSIADHYAITERLEVNADFLGLIGGSSLTDHSMPVAGADLRGSGIPTSYVPFRNACFLSMAVSWSEVIGADRIFIGAVEEDSSGYPDCRRVFYDAFNRVIELGTKPETGITILTPLIAMQKAEIVMKGMELGAPFEHSWSCYRSEGRACGVCDSCARRLRAFELQGIRDPIDYEVRPQYID

SEQ ID NO: 40730 - protein, 258 aa, unidentified
  source 1..258: note = Pelodictyon phaeoclathratiforme
  REGION 1..258: note = tr|B4SEN5|B4SEN5_PELPB 7-cyano-7-deazaguanine synthase OS=Pelodictyon phaeoclathratiforme (strain DSM 5477 / BU-1) OX=324925 GN=queC PE=3 SV=1
MSRFVSTTQPKAVVLLSGGMDSLVTTAMAHAAGFELAAMHVNYGQRTWQKELESFRSICSHYNIEQRLEVNADFLAQIGGSSLTDFSMPVGGADLQGSSIPTSYVPFRNAGFLSMAVSWSEVIGASKIFIGAVEEDSSGYPDCRKVFYDAFNTVIVLGTKPETDIAILTPLIEMQKSEIVRKGIELQVPFELSWSCYKSEGKACGLCDSCARRLRAFEMMGITDPIDYEARPLYIQQKSAEHSRHTSSIHPSINTLQS

SEQ ID NO: 40731 - protein, 237 aa, Pelomonas puraquae
  REGION 1..237: note = tr|A0A254N4A5|A0A254N4A5_9BURK 7-cyano-7-deazaguanine synthase OS=Pelomonas puraquae; OX = 431059 GN=queC PE=3 SV=1
MTDTRKALVLFSGGQDSTTCLAWALDRYAEVETLAFDYGQRHRVELDCRTTVRERIAAQFPAWAGKLGADHLLDLSLLGQISDTALTSERAIELQANGLPNTFVPGRNLLFLTFAATLAYRRGASVLVGGMCETDFSGYPDCRDNTMKALQVALSLGLDAPMTLETPLMFIDKAATWRLAEQLGGEALVKLIVEDTHTCYLGERGALHAWGHGCGHCPACELRAKGYAGYAAARARA

SEQ ID NO: 40732 - protein, 74 aa, Pelomonas puraquae
  REGION 1..74: note = tr|A0A254MXM6|A0A254MXM6_9BURK Uncharacterized protein OS=Pelomonas puraquae OX=431059 GN=CDO81_26865; PE = 4 SV=1
MDERFCRPSLNKQETWHLSHTLGGPGLLELVRRETHTCYLGDHTTWHEWGYGCGTCPACELRSKGYDAYMRGQP

SEQ ID NO: 40733 - protein, 234 aa, Pelomonas saccharophila
  REGION 1..234: note = tr|A0A4R3UIN5|A0A4R3UIN5_PELSC 7-cyano-7-deazaguanine synthase OS=Pelomonas saccharophila; OX = 304 GN=queC PE=3 SV=1
MQDTRKALVLFSGGQDSTTCLAWALDRYAEVETLAFDYGQRHRVELDCRNTVRARIAAQFPHWAGKLGADHLLDLSLLGQISDTALTSERAIELQANGLPNTFVPGRNLLFLTFAATLAYRRGASVLVGGMCETDFAGYPDCRDNTMKALQVALSLGLDAPMTLETPLMFIDKAATWRLAESLGGAALVKLIVEETHTCYLGERGELHDWGHGCGHCPACELRAKGFAAYRAVA

SEQ ID NO: 40734 - protein, 234 aa, Pelomonas sp.
  REGION 1..234: note = tr|A0A397S1S0|A0A397S1S0_9BURK 7-cyano-7-deazaguanine synthase OS=Pelomonas sp. BT06; OX = 2135721 GN=queC PE=3 SV=1
MQDTRKALVLFSGGQDSTTCLAWALDRFAEVETLAFDYGQRHRIELDCRNTVRAGIARQFPQWAGKLGADHLLDLSLLGQISDTALTSERAIELQANGLPNTFVPGRNLLFLTFAATLAYRRGASVLVGGMCETDFSGYPDCRDNTMKALQVALSLGLDAPMTLDTPLMFIDKAATWRLAESLGGAALVKLIVEDTHTCYLGERGELHDWGHGCGRCPACELRASGFARYKAGQ

SEQ ID NO: 40735 - protein, 237 aa, Pelomonas sp.
  REGION 1..237: note = tr|A0A2R7TBE1|A0A2R7TBE1_9BURK 7-cyano-7-deazaguanine synthase OS=Pelomonas sp. HMWF004; OX = 2056841 GN=queC PE=3 SV=1
MTDTRDTRKALVLFSGGQDSTTCLAWALDRYAEVETLAFDYGQRHRIELDCRNTVRAEIVRQFPHWAGKLGADHLLDLSLLGQISDTALTSERAIELQANGLPNTFVPGRNLLFLTFAATLAYRRSASVLVGGMCETDFSGYPDCRDNTLKAAQVALSLGLDAPMTIETPLMFIDKAATWRLAEGLGGEALVKLIVEETHTCYLGERGQLHDWGHGCGHCPACALRAKGFAAYRDAA

SEQ ID NO: 40736 - protein, 226 aa, Pelosinus fermentans
  REGION 1..226: note = tr|I9NRP2|I9NRP2_9FIRM 7-cyano-7-deazaguanine synthase OS=Pelosinus fermentans JBW45 OX=1192197 GN=queC; PE = 3 SV=1
MKAVVLLSGGLDSTVCMAVAHSKGYELFPISFNYNQRHARELESAESVAQYYNVTKHIIIETNMNVIGGSALTDEQLTVPTGNIDSHQIPVTYVPARNLIFLSYALGYAEVMGADKIFIGVNALDYSGYPDCRPEFINLFQQVADYSTKAGVQDHRKIVIETPLLQLTKKDIVLLGKNLDAPLQFTTSCYNGESVACGECDSCLLRLKGFAEAGTIDPIIYRTRSE

SEQ ID NO: 40737 - protein, 226 aa, Pelosinus fermentans
  REGION 1..226: note = tr|I9LDT2|I9LDT2_9FIRM 7-cyano-7-deazaguanine synthase OS=Pelosinus fermentans B4 OX=1149862 GN=queC; PE = 3 SV=1
MKAVVLLSGGLDSTVCMAVAHSKGYELFPISFNYNQRHARELESAESVAQYYNVTKHIIIETNMNVIGGSALTDGQLTVPTGNIDSHQIPVTYVPARNLIFLSYALGYAEVTGADKIFIGVNALDYSGYPDCRPEFINLFQQVADYSTKAGVQDHRKIVIETPLLQLTKKDIVLLGKNLDAPLQFTTSCYNGEPVACGECDSCLLRLKGFAEAGTIDPIIYRTRSE

SEQ ID NO: 40738 - protein, 226 aa, Pelosinus propionicus
  REGION 1..226: note = tr|A0A1I4H7Y4|A0A1I4H7Y4_9FIRM 7-cyano-7-deazaguanine synthase OS=Pelosinus propionicus DSM 13327 OX=1123291 GN=queC PE=3 SV=1
MKAVVLLSGGLDSTVCMAVARSKGYELFPISFNYNQRHARELECAKKVSQYYNVTKHIVIETNMNAIGGSALTDEQLAVPTGNLDSRQIPVTYVPARNLIFLSYALGYAEVAGADKIFIGVNALDYSGYPDCRPEFINLFQQVADYSTKAGVQEHRKIVIETPLLQLTKKDIVMLGNSLDAPLQLTTSCYNGEPVACGECDSCLLRLRGFAEAGTIDPIMYRTRSE

SEQ ID NO: 40739 - protein, 226 aa, Pelosinus sp.
  REGION 1..226: note = tr|A0A075KCA7|A0A075KCA7_9FIRM 7-cyano-7-deazaguanine synthase OS=Pelosinus sp. UFO1; OX = 484770 GN=queC PE=3 SV=1
MKAVVLLSGGLDSTVCMAVAHSQGYELFPISFNYNQRHSRELESATTVAQYYKVTKHIVIETNMNAIGGSALTDEHLEVPSGSNATHDIPITYVPARNLIFLSYALGYAEVTGADKIFIGVNALDYSGYPDCRPEFIDLFQEVADYSTKAGVQDQRKIRIETPLLHLTKKDIVILGHSLNAPLELTTSCYKGESAACGECDSCLLRLKGFSEANITDPILYKTRSE

SEQ ID NO: 40740 - protein, 233 aa, Pelotomaculum propionicicum
  REGION 1..233: note = tr|A0A4Y7RLW4|A0A4Y7RLW4_9FIRM 7-cyano-7-deazaguanine synthase OS=Pelotomaculum propionicicum OX=258475 GN=queC_1 PE=3 SV=1
MKSIVLLSGGLDSSVALAQALRETDVALCLTFDYGQKSAAKEKKAAAALAAYYKTNHRVLELNFLKEITTSALVAGESVPEPGLFDLDDRAKSGASAVMVWVPNRNGLFVNIAASFAEAYQCDIIVAGFNREEAATFPDNSREYVSAANLAMSFSTLRRVRLVSYTQQLDKAEIVKLGLALGLPFQYVWSCYRGGEKMCGRCESCMRLKRAVEAAGLELERLQSRDDGDRTFY

SEQ ID NO: 40741 - protein, 628 aa, Pelotomaculum propionicicum
  REGION 1..628: note = tr|A0A4Y7RK30|A0A4Y7RK30_9FIRM 7-cyano-7-deazaguanine synthase OS=Pelotomaculum propionicicum OX=258475 GN=queC_3 PE=4 SV=1
MNSQPSKPNEAIIVYCDELCKSSICNSQELNLLNRDIDGLDANITIEFNKFVRDPENLSPRILDLLRIAAYVYCTDRLINRGERDSLNNTAWSRAFEFHIPVSDIAFWSDGKISTKMGEALAFMTGDRRFNFSFTKASLSPVNTDNQQLSLFSTEYITLDEAEKTDVMLFSGGLDSLAGAIQRLNDHNDRKLCLVSHKANNCTIRTQNATAKHLRDKYSNRAIQYGFECHNKKAAPSREETQRSRMFLFSAIAFAICNCYEKKEFFVHENGITSINLPKQSDTFNARMSRTTHPKTIGLLREFFRLFDKDFNIITPYYNKTKSDILDIFKQYGEENIITSSVSCSSTRNKPKNSATHCGCCSQCIDRIFAIYASGLEDYDVTYADDIIKEIPGKKTAQHLYNTLRLACAESSRTKDELFRSYTDEITDVINYWPNDNPDDSLDEIFQLYGRFGDSVMKAIKSIQLKFEDPRVPVNKNSLLGIVAEREYLNTPVQIRVNEMDTILRKAIPMSFQREKPKDENDMNDKVQALLSTQGEFTREYPALQFGETAYKADHAKDGLIIESKFPRGKTAKSTVSEGIAADITKIPSSVAGILFVVYDPERKITDDDLFISTFEATRQNCFVRIYR

SEQ ID NO: 40742 - protein, 225 aa, Pelotomaculum schinkii
  REGION 1..225: note = tr|A0A4Y7RF16|A0A4Y7RF16_9FIRM 7-cyano-7-deazaguanine synthase OS=Pelotomaculum schinkii; OX = 78350 GN=queC PE=3 SV=1
MKSVVLLSGGLDSTVSFAHALRESEVALCLTFDYGQRAANQEKKAAAALAAHYRVEHLVVELPFLRDITSTALVRGDLDLPEPDRTGLDDFAASTASAAAVWVPNRNGVFINIAAAFAESRQCGLVVTGFNREEAVTFPDNSTDFVAAAGHALSFSTMNKVKVVSYTQRLDKVEIIKFGLRLGIPFRHIWSCYRGYEKMCGSCESCQRFKRASEQAGLDTTAFFV

SEQ ID NO: 40743 - protein, 229 aa, Pelotomaculum sp.
  REGION 1..229: note = tr|A0A1V4VMH5|A0A1V4VMH5_9FIRM 7-cyano-7-deazaguanine synthase OS=Pelotomaculum sp. PtaB.Bin104 OX=1811693 GN=queC_3 PE=3 SV=1
MPRSAVLLSGGLDSAVSLAHALRESEVALCLTFNYGQHAAQKEIEAAANLTAYYHLPHQVVELPFLGEITGTALVKNEASLPEPELALLDDPVAATASAVQVWVPNRNGLFINIAAAFAEACGAGLVVCGFNREEAATFPDNGADFVRAANSALSYSTLNDVKVVSYTQLLSKADIIKLGLRHHVPFQYIWSCYRGGEKMCGRCESCLRFKRAAQEADLDLEQIAFQEV

SEQ ID NO: 40744 - protein, 623 aa, Pelotomaculum sp.
  REGION 1..623: note = tr|A0A1V5BN16|A0A1V5BN16_9FIRM 7-cyano-7-deazaguanine synthase OS=Pelotomaculum sp. PtaU1.Bin065 OX=1811696 GN=queC_3 PE=4 SV=1
MNLQPSVVNVFCGELSVAPENKEEKSLKLSYFDLENFDANINIGFNKFINDIESLPPRIIDLLEIAAYVFCADRAVDRGERNSINNNSWARSFQFYIPVRDNLFWSNPKVSAAISSAMEFMTGDRKYSFQFEKYEQIPNIVPNHQLSLFNNEYITISEAKNTEVMLFSGGLDSLAGVIEYLNTFKSKELCLVSHKANNSVTHTQNSIIGYLQKRYNHRIKHYNFECHFKKNTPSKEETQRSRMFLYSAIAFAICNCYEKQEFYVYENGITSINLPKQADTFNARASRTTHPKAIALLQKFYRYFSEEFSLLTPYSNKTKADILQIFKNNNEQNIISSSVSCSSTRNKPGIAAHCGCCSQCIDRRFAVFATELEEYDAEYADDFIRHIPNSETRQRLYNTLRLAAMEGMKSKQDFIEKYMDEIADIIDYTPGSNPDDKMDDLYKLFCRFGQSVLFAAKRIQAQCEDLSAKNPKDSLLEMLATREHLATPTLSRVNEIDQYPKVAIPLMFQREPPANENDFNDKVQALLVSKGDFEREYPVLQFGITSYKADHSQDMLLIESKYIRSNTSPSVATNGIASDITLVPNEFGLYFVVYDPERRIGSDMKFISNLESKRESCFVRIYR

SEQ ID NO: 40745 - protein, 221 aa, Pelotomaculum thermopropionicum
  REGION 1..221: note = sp|A5D2E1|QUEC_PELTS 7-cyano-7-deazaguanine synthase; OS = Pelotomaculum thermopropionicum (strain DSM 13744 / JCM 10971 / SI) OX=370438 GN=queC PE=3 SV=1
MRSIVLLSGGLDSAVSLACSLQGGEVCLCLTFDYGQKAAEREKKAAAALAAHYKLRHRVIELPFLKEITSTALVSETSELPAAEEEELDENEASRSSAALVWVPNRNGVFINIAAAFAEAYRCDLVVTGFNREEAASFPDNSPEFVVAANASLSYSTLNKVRVASYTQGLNKTEIVKLGMNMGVPFDLIWSCYGGAEKMCRRCESCLRFIRAAKTAGLQLE

SEQ ID NO: 40746 - protein, 225 aa, Pelotomaculum thermopropionicum
  REGION 1..225: note = tr|A0A101HV72|A0A101HV72_9FIRM 7-cyano-7-deazaguanine synthase OS=Pelotomaculum thermopropionicum OX=110500 GN=queC PE=3 SV=1
MKSIVLLSGGLDSTVSLAFAMKDTVVSLCLTFDYGQKAAENENIAAAALAEHYRVRHKIINLPFLQELTSSSLVARDKKIPEPESNHLDDYTSATATAKSVWVPNRNGIFINIASSLAEALQCSFVITGFNREEAVTFPDNSAEFVSAANRALSYSTLNRVKVISYTQRLSKVEIIKLGMRLRVPFHLIWCCYQGETKMCGRCESCLRLLQAANKAGLDLQKLFS

SEQ ID NO: 40747 - protein, 218 aa, unidentified
  source 1..218: note = Peptoclostridium acidaminophilum
  REGION 1..218: note = tr|W8TIE6|W8TIE6_PEPAC 7-cyano-7-deazaguanine synthase OS=Peptoclostridium acidaminophilum DSM 3953; OX = 1286171 GN=queC PE=3 SV=1
MENEKALIVFSGGQDSTTCLFWAKERFADVIALSFDYGQKHVLELDCAKAICKKYGVEHHTMNLGLLGEITSNSLTRLDMDVDKEVEEGSLPNSFVDGRNMLFFTFAAIFAKQKGIKHIVTGVSQSDYSGYPDCRDIFVKSLNVTANLAMEYDFVIHTPLMWLDKAQTWGLADRIGVLDIIKNETLTCYNGIIGDGCGECPACNLRRNGYEKYVESKA

SEQ ID NO: 40748 - protein, 221 aa, unidentified
  source 1..221: note = Peptoclostridium litorale
  REGION 1..221: note = tr|A0A069REV9|A0A069REV9_PEPLI 7-cyano-7-deazaguanine synthase OS=Peptoclostridium litorale DSM 5388 OX=1121324 GN=queC PE=3 SV=1
MNHEKAIVVFSGGQDSTTCLFWAKERFNEVIAVSFDYNQKHKLELECAGDICKKYGVEHHTLDLGLLNQLAPNSLTRTDISVDTDSPEEGVPNSFVDGRNMLFLAFVAVFAKQRGINHIITGVSQSDFSGYPDCRDVFIKSLNVTLNLSMDYQFEIHTPLMWIDKAQTWKMANDLGVLDVIKEETLTCYNAIKGNGCGDCPACKLRKNGYLEFKKFYMHGA

SEQ ID NO: 40749 - protein, 225 aa, unidentified
  source 1..225: note = Peptococcaceae bacterium
  REGION 1..225: note = tr|A0A419G6Z1|A0A419G6Z1_9FIRM 7-cyano-7-deazaguanine synthase OS=Peptococcaceae bacterium OX=2052179 GN=queC PE=3 SV=1
MRSVVLLSGGLDSTVSMAHALREVEVSLSLTFDYGQRAAAREISAAERIAAYYGICHQVLELPFLKEVTGTALVGKDRAVPEPSVSDLDDYERARFNAKRVWVPNRNGLFINIAATIAEARQCGIIVTGFNREEAETFPDNSFAFVRAANNALAYSTLNQVKVVSYTQQLDKEEIVQLGRQLKAPLEYIWSCYLGGQEMCGRCESCRRLSRALQPPGHRGGEAKK

SEQ ID NO: 40750 - protein, 230 aa, unidentified
  source 1..230: note = Peptococcaceae bacterium
  REGION 1..230: note = tr|A0A0J1F6U5|A0A0J1F6U5_9FIRM 7-cyano-7-deazaguanine synthase OS=Peptococcaceae bacterium CEB3 OX=999898 GN=queC PE=3 SV=1
MRKAVILLSGGMDSSTVLYIAKSEGFELHAVSFDYGQRHVRELECAKAVAQEAGVKEHIVVRTNMDAWGGSALTDKGIDVPENEPHKDRIPITYVPARNMIFLSFAASYAEAIGSQDIFIGVSEVDYSGYVDCRQEFIDAMESAINAGTVCAVQDGRKIKIHTPLIHMTKAAEIKLGLKLGVDYELTWTCYKGEELACGTCDSCTLRLKAFREAGYEDPIPYQAASRGES

SEQ ID NO: 40751 - protein, 218 aa, Peptoniphilus asaccharolyticus
  REGION 1..218: note = tr|A0A1W1UPX7|A0A1W1UPX7_PEPAS 7-cyano-7-deazaguanine synthase OS=Peptoniphilus asaccharolyticus DSM 20463 OX=573058 GN=queC PE=3 SV=1
MKMVLFSGGVDSTTCLAMAKEKDEDVIAISFDYGQRHSEQELNAAKKVAKYYNVKQIFIDLKDVFKHGNSSLTDLDLEVSEGDYAEQENANTEVEFRNGIFISVLASLAMQYKADEIYFGAHKDDSGVIYPDCSPEFVKAMEEAIKVGSRDTVALKVPFLNKTKTELVAYGKTIGVPYNLTYSCYNGTNPPCHKCGTCIDREKAFIANGLDRDGNYAR

SEQ ID NO: 40752 - protein, 219 aa, Peptoniphilus indolicus
  REGION 1..219: note = tr|G4D608|G4D608_9FIRM 7-cyano-7-deazaguanine synthase OS=Peptoniphilus indolicus ATCC 29427 OX=997350; GN = exsB PE=3 SV=1
MKMVLFSGGVDSSTCLAMAKETGDSVMTVSFDYGQRHNEQELEAAKKVAKYYDVEQINIDLKDIFKHGNSSLTDLSLEVSEGDYAEQENANTEVEFRNGIFISVLASLAMQYKVDEIYFGAHKDDSGVIYPDCSPEFVKAMGEAINVGSRGKVSLQVPFLNKTKTELVAYGKSIGVPYHLTYSCYNGTNPPCGKCGTCIDREKAFLANGLDREGHYAED

SEQ ID NO: 40753 - protein, 259 aa, Peptoniphilus indolicus
  REGION 1..259: note = tr|G4D1E3|G4D1E3_9FIRM PP-loop family protein; OS = Peptoniphilus indolicus ATCC 29427 OX=997350; GN = HMPREF9129_0223 PE=4 SV=1
MLFICEEQRMNLKEFFSKNKKVAIAFSGGVDSVFLLQQALKNKAEVRAYYVKSDFQPEFEFKEAKYFAHELGADLKILEVDVLKDVRIEKNDKDRCYFCKQKIFGTIIEAAKIDGFDVLLDGTNASDEYEDRPGMRAKEEMKVLSPLRECNLTKSEIRELSKKEGLASWRKPSYSCLATRIKTGMNITKEDLAVIEKAEAFLMNLGFKNFRVRKIDDVAKIEVTGKDFEKIISFRKEIVDEFKKFYREVTLNLEVRDEE

SEQ ID NO: 40754 - protein, 430 aa, Peptostreptococcus anaerobius
  REGION 1..430: note = tr|A0A135YTT6|A0A135YTT6_9FIRM 7-cyano-7-deazaguanine synthase OS=Peptostreptococcus anaerobius OX=1261 GN=HMPREF3195_01017 PE=3 SV=1
MRIYCTNESIDNIPEGFDEKLDITNKKDIGFNFWDNYIKLEKEFSKLAIDLLYLSIFVFVADRIVKRDTQNDCWTRTIKLNVPVSDIDFWNSQKVLVTDMLNFLSGDNWTFEFRPKTVYQEQIYYSSKKYKELDKRSYDKICMFSGGLDSFIGAIDLLEDSTSSILLVSHYGGGKGTKSYQDDIFKAVKNKYKLDDRDQVQSYVVARNGKEDTTRTRSFMFFSHAIVYASAFGRKTKLYIPENGYISLNVPLSGSRFGSSSTRTTHPYYMKKLQTLINNMNLDIKIINPYQFKTKGEMVKECKNSSFLKEQYVNTMSCSHPDNGRYKKEKTSKHCGDCIPCIVRKAAIISAYGKDETEYRHKNLEKSEAGILNRNAFLQMLEKHNPKRAVFEIQKSGPLTDNLFEFAGVYNRSIEELNKVFNEGDLNEVD

SEQ ID NO: 40755 - protein, 239 aa, Peredibacter sp.
  REGION 1..239: note = tr|A0A2E5CAZ2|A0A2E5CAZ2_9PROT 7-cyano-7-deazaguanine synthase OS=Peredibacter sp.; OX = 2024850 GN=queC PE=3 SV=1
MTDKKIQKQAVVVHSGGMDSSICLALAVEKHGAENVLSMTFTYGQRHTEEIKQAQKICSDWGVDQIIVNLDCLQQITESSLIGHSLEIQHKEGEVPNTMVVGRNGLMARVASIHADFLGANSIYMGVIELEEANSGYRDCSRKYMDIVQAALRLDFANPGFEIKTPLVFMSKKQTLDAAYQMGKLEYLLENTISCYEGQKGYGCGECPACELRNEGIQDFLDQNSDIQFSYKNKYRLSN

SEQ ID NO: 40756 - protein, 225 aa, Peredibacter sp.
  REGION 1..225: note = tr|A0A2E5CAY8|A0A2E5CAY8_9PROT 7-cyano-7-deazaguanine synthase OS=Peredibacter sp.; OX = 2024850 GN=queC PE=3 SV=1
MSSDIGLVLVSGGMDSLVCAAIANEKHEQLAFLHLSYGQKTSAKEKLCYDKIADFYKVSPGLRKTVDMSFLSQIGGSSLTDNKLEVTDFEGDSDEIPSSYVPFRNAHIISMAVSWAEVIGAKKIYIGANYEDSPGYPDCRPEYYEAFNKLIKAGTAAGDIEVVTPVLMDKKKDIVMKAKNFNAPLELTWSCYKNEDIACGVCDSCALRLRGFREANLKDPLPYKN

SEQ ID NO: 40757 - protein, 225 aa, Perlucidibaca sp.
  REGION 1..225: note = tr|A0A2P6AV02|A0A2P6AV02_9GAMM 7-cyano-7-deazaguanine synthase OS=Perlucidibaca sp. HR-E; OX = 2094561 GN=queC PE=3 SV=1
MNMPHAVVLLSGGLDSATCLAIAREQGYSISALSFDYGQRHNAELAAARRIAKALQVEDHRVMRLDLGLIGGSALTDAGIAVPEEESEGIPVTYVPARNTVFLSFALGLAEVTGAQDIFIGVNAVDYSGYPDCRPEYIAAFTRVANLATKAGVEGGLMHIRTPLIDLSKADIIRTGLRLGLDYGLTVSCYQADDDGSACGRCDACRLRRKGFSDAGVADPTRYAP

SEQ ID NO: 40758 - protein, 235 aa, unidentified
  source 1..235: note = Permianibacter aggregans
  REGION 1..235: note = tr|A0A4R6US68|A0A4R6US68_9GAMM 7-cyano-7-deazaguanine synthase OS=Permianibacter aggregans OX=1510150 GN=queC PE=3 SV=1
MFPVIESSVMSNVRCAVVLLSGGLDSTTCLAMAKAAGFACYALSFRYGQRSAQEIVFAERIARANGVMEHKVIDLDLSQIGGSALTDHRIAVPESPTSGIPVTYVPARNTVFLSIALGWAEVLGADAIYTGVNAVDYSGYPDCRPDYIAAFEKMANLATRAGVEGHRLRIETPLIQLSKAQIIQAGLTLGVDYSLTVSCYQANDAGQACGRCDACRLRRQGFTDAGITDPTLYRT

SEQ ID NO: 40759 - protein, 228 aa, Persephonella hydrogeniphila
  REGION 1..228: note = tr|A0A285N9Z6|A0A285N9Z6_9AQUI 7-cyano-7-deazaguanine synthase OS=Persephonella hydrogeniphila OX=198703 GN=queC PE=3 SV=1
MKQESKIIVLVSGGMDSATLLWLAKEKFSKVYAISFDYGQKHKIELDFAKQLTEEAGVEKHFIVDVPHLKGIEGSALTDEKIEVPSEEYPEGPPITTVPMRNLNFLAIAASFADVYEIENIGIGIHSVDSPYPDCRAEFASSAEAAINASSVMVAKKKNRITVWTPFLGMTKAEVLKTGLRLGVPYEKTYSCYRGTIPPCGECATCRQREEAFKEAGIEDPTKKLEGR

SEQ ID NO: 40760 - protein, 227 aa, Persephonella marina
  REGION 1..227: note = sp|C0QST3|QUEC_PERMH 7-cyano-7-deazaguanine synthase; OS = Persephonella marina (strain DSM 14350 / EX-H1); OX = 123214 GN=queC PE=3 SV=1
MKQSSSIIILVSGGMDSAALLWLAKKEFDKVYAVSFDYGQKHRVELDFAKKLTEEAGVEEHFIAEVPHLKGIKGSALTDRSVEIPSEEYPEGPPVTTVPMRNLNFLSIAASFADIYEIENIGIGVHSVDSPYPDCRAEFVSAAEAAINASSVMVAKKKNRITVYTPFLGMTKTDVLRIGLELGVPYEKTYSCYRGTIPPCGECATCRQRIEAFRSVGLEDPWFKKER

SEQ ID NO: 40761 - protein, 227 aa, Persephonella sp.
  REGION 1..227: note = tr|A0A432S3M3|A0A432S3M3_9AQUI 7-cyano-7-deazaguanine synthase OS=Persephonella sp.; OX = 2060922 GN=queC PE=3 SV=1
MKEDIIVLVSGGMDSATLLWLAKNNFRNVYAISFKYGQKHSIELDFARRLVERAGIKKHFIIEIPHLKELKGSALTDEDIDVPAEEYPKNEPPITTVPMRNLTFLSIAASFCDIYEIENIGIGIHSVDSPYPDCRGEFASSVEAAINASSIMVAKKKNRIKVYTPFLGMTKTDVLKLGLELNVPYELTYSCYRGSLPPCGTCATCIQREEAFKSLGIEDPLKKQINH

SEQ ID NO: 40762 - protein, 224 aa, unidentified
  source 1..224: note = Petrimonas mucosa
  REGION 1..224: note = tr|A0A1G4G7C7|A0A1G4G7C7_9PORP 7-cyano-7-deazaguanine synthase OS=Petrimonas mucosa; OX = 1642646 GN=queC PE=3 SV=1
MTNYKNEDAVVLFSGGQDSTTCLFWAKQTFRNVEALCFSYGQRHSLEIEVARNIAKIAEVSFRLLDASVISQLSPNSLTDSSIVMDEEQPAGSYPNTFVPGRNMLFITFAAAIAYAKNIRHLVTGVSEADYSGYPDCRDTFIHSLNATVNLAMDKHFIIHTPLMHKDKVKVWAFADELGVFDIVRNETLTCYNGIKAEGCGHCPACKLRNRGLQEYLDQRSKSI

SEQ ID NO: 40763 - protein, 221 aa, Petrimonas sp.
  REGION 1..221: note = tr|A0A3G9DUT4|A0A3G9DUT4_9PORP 7-cyano-7-deazaguanine synthase OS=Petrimonas sp. IBARAKI; OX = 1978337 GN=queC PE=3 SV=1
MTDYKNEDALVLFSGGQDSTTCLFWAKQTFRNVEALCFSYGQRHSLEVEVARNIAEIAGVSFQLLDASVISHLSPNSLTDASIVMDEEQPAGSYPNTFVPGRNMLFITFAAAVAYAKNIKHLVTGVSEADYSGYPDCRDTFIHSLNATINLAMDKHFVIHTPLMHRDKAKVWALADDLGVFDIVKNETLTCYNGIKAGGCGHCPACKLRNRGLQEYLADRK

SEQ ID NO: 40764 - protein, 232 aa, Phaeobacter gallaeciensis
  REGION 1..232: note = tr|V9WKH7|V9WKH7_9RHOB 7-cyano-7-deazaguanine synthase OS=Phaeobacter gallaeciensis DSM 26640 OX=1423144; GN = queC PE=3 SV=1
MKTLVICSGGLDSVSLAHILAAQGQLSRLVSFDYGQRHRKELDYAAACGQRLGVPHEIIDMRSIGAALSGSALTDDIDVPDGHYAEETMKVTVVPNRNAIMLTIAYGIAAAKGDTAVATAVHGGDHFIYPDCRPAFTDAFDAMQRMALDGYADVSLVTPFVHRSKGDIVAEGAAVNTPFAETWSCYKGGEHHCGRCGTCVERREAFDLAGVEDPTVYTDPDFWRTAVQEGAA

SEQ ID NO: 40765 - protein, 220 aa, Phaeobacter gallaeciensis
  REGION 1..220: note = tr|A0A1B0ZN23|A0A1B0ZN23_9RHOB 7-cyano-7-deazaguanine synthase OS=Phaeobacter gallaeciensis OX=60890 GN=queC PE=3 SV=1
MSLAHIVAAERQLTRLVSFDYGQRHRKELDFAAAAAQRLNVPHHLIDMRPIGAALTGSALTDDIDVPDGHYAEETMRITVVPNRNAIMLAIGFGVAAANGDEAVATAVHGGDHFIYPDCRPGFTRAFETMQKAALDGYADVELYTPFVERSKADIVADGARHGTPFAETWSCYKGGDLHCGRCGTCVERREAFHLAGVADPTAYTDPDYWLSAIAGKEGH

SEQ ID NO: 40766 - protein, 232 aa, Phaeobacter inhibens
  REGION 1..232: note = tr|A0A135IHS9|A0A135IHS9_9RHOB 7-cyano-7-deazaguanine synthase OS=Phaeobacter inhibens; OX = 221822 GN=queC PE=3 SV=1
MKTLVICSGGLDSVSLAHVLAAQGQLSRLVSFDYGQRHRKELDYAAACGQRLGVPHEIIDMRLIGAALSGSALTDDIDVPDGHYAEETMKVTVVPNRNAIMLTIAYGIAAAKGDTAVATAVHGGDHFIYPDCRPAFTDAFDVMQRMALDGYADVSLVTPFVHRSKGDIVAEGAAVNTPFAETWSCYKGGEHHCGRCGTCVERREAFDLAGVEDPTVYADPDFWRTAIKEGVA

SEQ ID NO: 40767 - protein, 232 aa, Phaeobacter inhibens
  REGION 1..232: note = tr|I7EWS6|I7EWS6_PHAIB 7-cyano-7-deazaguanine synthase OS=Phaeobacter inhibens (strain ATCC 700781 / DSM 17395 / CIP 105210 / JCM 21319 / NBRC 16654 / NCIMB 13546 /BS107) OX=391619 GN=queC PE=3 SV=1
MKTLVICSGGLDSVSLAHVLAAKGQLSRLVSFDYGQRHRKELDYAAACGQRLGVPHEIIDMRSIGAALSGSALTDDIDVPDGHYAEETMKVTVVPNRNAIMLTIAYGIAAAKGDTAVATAVHGGDHFIYPDCRPAFTDAFDVMQRMALDGYADVALVTPFVHRSKGDIVAAGAAVKTPFAETWSCYKGGEHHCGRCGTCVERREAFDLAGVEDPTVYADPDFWRTAIKEGAA

SEQ ID NO: 40768 - protein, 232 aa, unidentified
  source 1..232: note = Phaeobacter italicus
  REGION 1..232: note = tr|A0A0H5DFN8|A0A0H5DFN8_9RHOB 7-cyano-7-deazaguanine synthase OS=Phaeobacter italicus; OX = 481446 GN=queC PE=3 SV=1
MKTLVICSGGLDSVSLAHVLAAQGQLSRLVSFDYGQRHRKELDYAAACGQRLGVPHEIIDMRSIGAALSGSALTDDIDVPDGHYAEETMKVTVVPNRNAIMLTIAYGIAAAKGDTAVATAVHGGDHFIYPDCRPAFTDAFDAMQRMALDGYADVSLVTPFVHRSKGDIVAAGAAVNTPFAETWSCYKGGEHHCGRCGTCVERREAFDLAGVEDPTVYADPDFWRTAIKDGGA

SEQ ID NO: 40769 - protein, 232 aa, unidentified
  source 1..232: note = Phaeobacter piscinae
  REGION 1..232: note = tr|A0A291FKM8|A0A291FKM8_9RHOB 7-cyano-7-deazaguanine synthase OS=Phaeobacter piscinae; OX = 1580596 GN=queC PE=3 SV=1
MKTLVICSGGLDSVSLAHILAAQGQLSRLVSFDYGQRHRKELDYAAACGQRLGVPHEIIDMRSIGVALSGSALTDDIDVPDGHYAEETMKVTVVPNRNAIMLTIAYGIAAAKGDTAVATAVHGGDHFIYPDCRPAFTDAFDAMQRMALDGYADVSLVTPFVHRSKGDIVADGAAVNTPFAETWSCYKGGEHHCGRCGTCVERREAFDLAGVMDPTVYADPDFWRTAVQEGGA

SEQ ID NO: 40770 - protein, 232 aa, unidentified
  source 1..232: note = Phaeobacter piscinae
  REGION 1..232: note = tr|A0A291FWV5|A0A291FWV5_9RHOB 7-cyano-7-deazaguanine synthase OS=Phaeobacter piscinae; OX = 1580596 GN=queC PE=3 SV=1
MKTLVICSGGLDSVSLAHILAAEGQLSRLVSFDYGQRHRKELDYAAACGQRLGVPHEIIDMRSIGAALSGSALTDDIDVPDGHYAEETMKVTVVPNRNAIMLTIAYGIAAAKGDTAVATAVHGGDHFIYPDCRPAFTDAFDAMQRMALDGYADVSLVTPFVHRSKGDIVADGAAVNTPFAETWSCYKGGEHHCGRCGTCVERREAFDLAGVVDPTVYADPDFWRTAIKEGGA

SEQ ID NO: 40771 - protein, 232 aa, unidentified
  source 1..232: note = Phaeobacter porticola
  REGION 1..232: note = tr|A0A1L3I835|A0A1L3I835_9RHOB 7-cyano-7-deazaguanine synthase OS=Phaeobacter porticola; OX = 1844006 GN=queC PE=3 SV=1
MKTLVICSGGLDSVSLAHVLAAQGQLSRLVSFDYGQRHRKELDYAAACGQRLGVPHDIIDMRSVGAALSGSALTDDIDVPDGHYAEETMKVTVVPNRNAIMLTIAYGIAASKGDTAVATAVHGGDHFIYPDCRPAFTKAFDQMQRQALDGYADVALVTPFVDRSKGDIVLEGARVNTPFAETWSCYKGGAHHCGRCGTCVERREAFHLAGVTDPTIYDDPEFWLTATKEGAA

SEQ ID NO: 40772 - protein, 232 aa, Phaeobacter sp.
  REGION 1..232: note = tr|A0A384FPJ3|A0A384FPJ3_9RHOB 7-cyano-7-deazaguanine synthase OS=Phaeobacter sp. S60; OX = 1569353 GN=queC PE=3 SV=1
MKTLVICSGGLDSVSLAHILAAQGQLSRLVSFDYGQRHRKELDYAAACGQRLGVPHEIIDMRSIGAALSGSALTDDIDVPDGHYAEETMKVTVVPNRNAIMLTIAYGIAAAKGDTAVATAVHGGDHFIYPDCRPAFTDAFDAMQRMALDGYADVSLVTPFVHRSKGDIVAEGAAVNTPFAETWSCYKGGEHHCGRCGTCVERREAFDLAGVVDPTVYADPDFWRTAIKEGGA

SEQ ID NO: 40773 - protein, 233 aa, Phaeobacter sp.
  REGION 1..233: note = tr|A0A0P6RMH0|A0A0P6RMH0_9RHOB 7-cyano-7-deazaguanine synthase OS=Phaeobacter sp. 11ANDIMAR09 OX=1225647 GN=queC PE=3 SV=1
MKTLVICSGGLDSVSLAHITANEHQLTRLVSFDYGQRHRKEIYFAEAAAKRLGVPFHLIDMRGIGASLTGSALTDDIDVPDGHYEEDTMRVTVVPNRNAIMLSIGFGIAAAKGDEAVATAVHGGDHFIYPDCRPSFTRAFDAMQQAALDGYANVSLHTPFVEHSKAEIVRQGAKHDTPFAQTWSCYKGNKVHCGRCGTCVERREAFHLAGVSDPTVYADPDYWTVALATQGAS

SEQ ID NO: 40774 - protein, 229 aa, Phaeospirillum fulvum
  REGION 1..229: note = tr|A0A1H6HIW1|A0A1H6HIW1_PHAFV 7-cyano-7-deazaguanine synthase OS=Phaeospirillum fulvum; OX = 1082 GN=queC PE=3 SV=1
MSERPAIVLLSGGLDSSTVLAIARAQGFRPAALTFRYGQRHAVEIEAARRVAAAQGVADHRIADIDLRVFGGSALTADIAVPKGRAEAEMADGHIPVTYVPARNTIMLSFALAFAEVIDAADIFVGVNAVDYSGYPDCRPDYIQAFETMANLATKAAVEGRRLTLHTPLIDLTKADIIRRGLELGVDYAITSTCYDPDPQGRACGQCDSCRLRLKGFADAGLSDPAPYV

SEQ ID NO: 40775 - protein, 229 aa, Phaeospirillum fulvum
  REGION 1..229: note = tr|S9TFG1|S9TFG1_PHAFV 7-cyano-7-deazaguanine synthase OS=Phaeospirillum fulvum MGU-K5 OX=1316936; GN = queC PE=3 SV=1
MSNRPAIVLLSGGLDSTTVLAIARAQGFRPAALTFRYGQRHAVEIEASRRVAAAQGVTDHRIADIDLRVFGGSALTADIAVPKGRDEAEMSDGHIPVTYVPARNTIMLSFALAFAEVIDAADIFLGVNAVDYSGYPDCRPDYIQSFETMANLATRAGVEGRRLTLHTPLIDLTKADIIRRGLELGVDYSITSTCYDPDPQGRACGQCDSCRLRLKGFADAGLTDPAPYV

SEQ ID NO: 40776 - protein, 229 aa, Phaeospirillum molischianum
  REGION 1..229: note = tr|H8FMX5|H8FMX5_PHAMO 7-cyano-7-deazaguanine synthase OS=Phaeospirillum molischianum DSM 120 OX=1150626; GN = queC PE=3 SV=1
MSDRPAIVLLSGGLDSSTVLAIARAQGFRPAALTFRYGQRHAVEIDAARRVAASQGVADHRIADIDLRVFGGSALTADIDVPKGRDEDEMSDGQIPVTYVPARNTIMLSFALAFAEVIDAADIFLGVNAVDYSGYPDCRPDYIQAFETMANLATRAAVEGRRLTLHTPLIDLSKADIIRQGLALGVDYSITSTCYDPDPQGRACGQCDSCRLRLKGFADAGLSDPAPYM

SEQ ID NO: 40777 - protein, 225 aa, Phascolarctobacterium faecium
  REGION 1..225: note = tr|A0A3G9GR13|A0A3G9GR13_9FIRM 7-cyano-7-deazaguanine synthase OS=Phascolarctobacterium faecium OX=33025 GN=queC PE=3 SV=1
MKKVVLLSGGIDSTTCLAQAVQVCGAENVTALCVFYGQKHSREMAAARKVAAYYGVRLLEQDIAGIMSYSNCSLLAASSEAIEHKSYAQQLAEHGEGTVATYVPFRNGLLISAAAAIAISLGADAICYGAHADDAAGRAYPDCTPEFYAAMDTAIYEGSGKLCHLEAPLLNKNKAQIVELGLNLGAPYQYTWSCYEGGDRPCGECGTCIDRANAFKANGVDDPAL

SEQ ID NO: 40778 - protein, 225 aa, Phascolarctobacterium sp.; identical to SEQ ID NO: 40777
  REGION 1..225: note = tr|R6I421|R6I421_9FIRM 7-cyano-7-deazaguanine synthase OS=Phascolarctobacterium sp. CAG:207 OX=1262914; GN = queC PE=3 SV=1

SEQ ID NO: 40779 - protein, 226 aa, Phascolarctobacterium sp.
  REGION 1..226: note = tr|A0A316S697|A0A316S697_9FIRM 7-cyano-7-deazaguanine synthase OS=Phascolarctobacterium sp. OX=2049039 GN=queC PE=3 SV=1
MKALVLLSGGVDSTTCLALAKEKYNDVIALAMYYGQKHSKELESAQKIADYYGVELLKLDLTPVFSYSNCSLLKQSDEAVPQKSYAEQVAECHGDTVSTYVPFRNGVFLSVAASIALAQGCSVVYYGAHADDATGNAYPDCSVDFNNKMNEGIYIGSGRKLQLEAPFVNCSKKDIVKTGLALNVPYELTWSCYCGGDKPCGRCGTCIDRKNAFLANGVTDPLEYER

SEQ ID NO: 40780 - protein, 245 aa, Phascolarctobacterium succinatutens
  REGION 1..245: note = tr|E8LF22|E8LF22_9FIRM 7-cyano-7-deazaguanine synthase OS=Phascolarctobacterium succinatutens YIT 12067; OX = 626939 GN=queC PE=3 SV=1
MTESFYILWTLPARYREEKMKVLVLLSGGVDSSTCLALAKEKYGDNVLALSMSYGQKHAKELAAAQAIADYYHVELLHMDLSKIFAHSKCSLLQGSEESVPHASYAEQLKESKGEPVSTYVPFRNGLFLSAAASIALEYECNEIYYGPHADDAAGNAYPDCSVEFNESMNLAVYLGSGRKVRLVAPFVDKTKKDIVAEGLRLGVPYELTWSCYDGDEKPCHKCGTCIDREAAFAANGVVDPLAEV

SEQ ID NO: 40781 - protein, 226 aa, Phascolarctobacterium succinatutens
  REGION 1..226: note = tr|R6Y0M4|R6Y0M4_9FIRM 7-cyano-7-deazaguanine synthase OS=Phascolarctobacterium succinatutens CAG:287; OX = 1263101 GN=queC PE=3 SV=1
MKVLVLLSGGVDSSTCLALAKEKYGDNVLALSMSYGQKHAKELAAAQAIADYYHVELLHMDLSKIFAHSKCSLLQGSETSVPHASYAEQLKESKGEPVSTYVPFRNGLFLSAAASIALEYECNEIYYGPHADDAAGNAYPDCSVEFNESMNLAVYLGSGRKVRLVAPFVDKTKKDIVAEGLRLGVPYELTWSCYDGGEKPCHKCGTCIDREAAFAANGVVDPLAEV

SEQ ID NO: 40782 - protein, 240 aa, unidentified
  source 1..240: note = Phenylobacterium deserti
  REGION 1..240: note = tr|A0A328AUQ6|A0A328AUQ6_9CAUL 7-cyano-7-deazaguanine synthase OS=Phenylobacterium deserti OX=1914756 GN=queC PE=3 SV=1
MSDTSGALVLFSGGQDSTVCLAWALSRFEHVETVGFDYGQKHAVELRARDEVRRNITARFPQWADRLGEDHMLEMRGFGAVAQSALTADRAIEMTEKGLPSTFVPGRNLVFFVYAAALADRRGLKTMIGGMCETDFSGYPDCRRDTLDAVQTALNLGMEQDFIIETPLMRLTKAETWGLAKSLGGEDLVDLVVRDSHTCYQGDREHFHDWGYGCETCPACELRAKGWNEWVAEGRPTLAA

SEQ ID NO: 40783 - protein, 248 aa, unidentified
  source 1..248: note = Phenylobacterium hankyongense
  REGION 1..248: note = tr|A0A328AYQ0|A0A328AYQ0_9CAUL 7-cyano-7-deazaguanine synthase OS=Phenylobacterium hankyongense OX=1813876 GN=queC PE=3 SV=1
MGPMIDTSGALVLFSGGQDSTVCLAWALDRYARVETVGFDYGQRHSVELQARAGVRARVSERFPDWAPRLGEDHVLEMRGFGAVAQSALTAERAIEMTSKGLPSTFVPGRNLAFLVYAAALADRRGLQVLVGGMCETDFSGYPDCRRDTLDAMQSALNLGMAQDFRVETPLMWLTKAQTWSLAKALGGESLVDVILEDSHTCYLGDREHRHPWGYGCGTCPACELRARGWADWVAEGRPVLHAEVVEP

SEQ ID NO: 40784 - protein, 241 aa, unidentified
  source 1..241: note = Phenylobacterium kunshanense
  REGION 1..241: note = tr|A0A328BC63|A0A328BC63_9CAUL 7-cyano-7-deazaguanine synthase OS=Phenylobacterium kunshanense OX=1445034 GN=queC PE=3 SV=1
MGPMNNGALVLFSGGQDSTACLAWALSRYDRVETVGFDYGQRHAVELEARQAVRARIVREFPDWSPRLGDDHMLDIRSFGALAETAMTSEREIEITEKGLPSTFVPGRNLVFLVYAAALADRRLLGALVGGMCETDFSGYPDCRRDTLDAMQQALNLGMEQTFRIETPLMRLTKAETWALAKGLGGEALVELTVQDSHTCYLGERGVLHAWGHGCGTCPACELRRRGFEQWDADGRPALAS

SEQ ID NO: 40785 - protein, 243 aa, Phenylobacterium sp.
  REGION 1..243: note = tr|A0A0Q7ETJ0|A0A0Q7ETJ0_9CAUL 7-cyano-7-deazaguanine synthase OS=Phenylobacterium sp. Root1290 OX=1736445 GN=queC PE=3 SV=1
MSEASPQSRALVLFSGGQDSSVCLAWALARYDHVETVGFDYGQRHAVEMEQRSLVREAIRARFPQWAGRLGEDHVLDLTGFGAVGETAMTQERAFEITEKGLPNTYVPGRNLVFLTYAAALADRRKLKFLVGGMCETDFSGYPDCRRETLDALERALNLGMAQDFVVETPLMWLTKAQTWALAKQLGGEDLIEIIVRDSHTCYRGTRGELHDWGHGCGDCPACDLRARGWNEWVGAGRLELEA

SEQ ID NO: 40786 - protein, 241 aa, Phenylobacterium sp.
  REGION 1..241: note = tr|A0A1E4GN01|A0A1E4GN01_9CAUL 7-cyano-7-deazaguanine synthase OS=Phenylobacterium sp. SCN 70-31 OX=1660129 GN=queC PE=3 SV=1
MGPMTDQALVLFSGGQDSTACLAWALARYGRVETLGFDYGQRHAVELAARQAVRARIAATFPAWAARLGEDHMLDIRSFGDIAETAMTAERAIEITEKGLPSTFVPGRNLVFLTYAAALADRRGLNVLVGGMCETDYSGYPDCRRETLDAVERALNLGMAQAFRIETPLMRLTKAQTWALAKGLGGEPLVAITVEDSHTCYLGERGTVQPWGHGCGTCPACELRRRGYEAWDAEGRPELLP

SEQ ID NO: 40787 - protein, 241 aa, unidentified
  source 1..241: note = Phenylobacterium zucineum
  REGION 1..241: note = tr|B4RHW2|B4RHW2_PHEZH 7-cyano-7-deazaguanine synthase OS=Phenylobacterium zucineum (strain HLK1); OX = 450851 GN=queC PE=3 SV=1
MGPMTDAALVLFSGGQDSSVCLAWALDRYDRVETVGFDYGQRHAVELQARQAVRSRLAAGFPRWAGRLGEDHFIEMRGFGAIGGTAMTQERAFEITEKGLPSTYVPGRNLAFLTYAAALADRRGIPVLVGGMCETDYSGYPDCRRDAIDAMERALNLGMAQDFRIETPLMRLTKAQTWGLASRLGGEPLVDLIVRESHTCYRGERGELHAWGHGCGDCPACELRARGWEEWVAGGRPELAA

SEQ ID NO: 40788 - protein, 241 aa, unidentified
  source 1..241: note = Phenylobacterium zucineum
  REGION 1..241: note = tr|A0A2W5R900|A0A2W5R900_9CAUL 7-cyano-7-deazaguanine synthase OS=Phenylobacterium zucineum OX=284016 GN=queC PE=3 SV=1
MGPMNDGALVLFSGGQDSTACLAWALARYPRVETVGFDYGQRHAVELEARQAVRARIAAGFPEWAGRLGDDHMLDIRSFGAIGETAMTMERAIEVTDKGLPSTFVPGRNLIFLTYAAALADRRGLKALVGGMCETDFSGYPDCRRDTLDAMQDALNLGMAQDFRIETPLMRLTKAETWALAKGLGGEPLVAITVEESHTCYLGERGELHPWGHGCGTCPACDLRQRGFECWVSDGRPELAA

SEQ ID NO: 40789 - protein, 235 aa, unidentified
  source 1..235: note = Phorcysia thermohydrogeniphila
  REGION 1..235: note = tr|A0A4V2PCW6|A0A4V2PCW6_9BACT 7-cyano-7-deazaguanine synthase OS=Phorcysia thermohydrogeniphila OX=936138 GN=queC PE=3 SV=1
MTSAVVIFSGGLDSTTALYWAKREFDEVYAITFYYGQRHSLEVEMAKITAKNAKVKEHLLFEVDLSKVGASALTDKSIEVPETKSVEEIKERGIPVTYVPFRNGVFISIAAAYAESLGTTHLVGGWNAVDYSGYPDCRPEFLRAMEETLNRGTKLGAEGRKWQIHAPLLYLTKGEIIKLGLELGADYSYSLSCYRGSEVPCMKCDSCVLRAKGWAEVGVTDHLIERLKREGKIVE

SEQ ID NO: 40790 - protein, 242 aa, unidentified
  source 1..242: note = Phormidesmis priestleyi
  REGION 1..242: note = tr|A0A0P7Z152|A0A0P7Z152_9CYAN 7-cyano-7-deazaguanine synthase OS=Phormidesmis priestleyi Ana OX=1666911 GN=queC PE=3 SV=1
MTALSSNRFNHDNEMPKAIVLLSGGLDSATCAAQAIADGFQVTALSLDYGQRHNRELVAAKAVVQALGISDHRIISVNLAQWGGSSLTDQTMAIPTEGVKPNEIPSTYVPGRNTVFIAIALSLAEAQSAKAIYVGINAVDYSGYPDCRPEYLAAFQHLATLSSKAGLEGCAPELVAPLAMDSKADIVQRSLRLGVPIEKTWSCYEGGTEPCGLCDSCRIRDAALIQAGRSDLATKVARSAVS

SEQ ID NO: 40791 - protein, 237 aa, unidentified
  source 1..237: note = Phormidesmis priestleyi
  REGION 1..237: note = tr|A0A2W4X8Z3|A0A2W4X8Z3_9CYAN 7-cyano-7-deazaguanine synthase OS=Phormidesmis priestleyi; OX = 268141 GN=queC PE=3 SV=1
MSNQKKEQPKAVVLLSGGLDSATCCAQALVDGFSVTAISFDYGQRHQRELTAAEDIAQTLGITDHHVVEINLAQWGGSSLTSEAMSVPTDGLKSDEIPSTYVPGRNTVFIAIALSLAEAQGATAIYLGINAIDYSGYPDCRPEYLSAFQHLAKLSSKAGLEGHAPDLVAPLVMDSKADIVRRALKLGVPIEKTWSCYQGESLPCGVCDACRIRDQALISVGRPDLATAIGQQKSQSA

SEQ ID NO: 40792 - protein, 271 aa, Phormidium ambiguum
  REGION 1..271: note = tr|A0A1U7ILG9|A0A1U7ILG9_9CYAN Uncharacterized protein OS=Phormidium ambiguum IAM M-71 OX=454136; GN = NIES2119_10865 PE=4 SV=1
MTYQKNFKLEILQSELETFINTPREEGANLDAVVAFSGGKDSAAALLWAKNKLNLEVVAVLVQNGFIPEQVIDNGRKLCDKLGVELVVLNIELAPFVKDMMDKNFTNGYPCYKCGEMFHKEIQKYCGIKRINRVILGRNWWRWIEPEVRSVRWVKDEASGLNMQFFSLPFALQLTEKDVYKMLDDIGWKTVKIHGNSTNCVIPGLIEYPIYQRLGYHPELNLLSREVISGFLDKEEAKEQLADIKDNTGILRKMVNKKLQEIESDQGEKTQ

SEQ ID NO: 40793 - protein, 225 aa, Phormidium ambiguum
  REGION 1..225: note = tr|A0A1U7IG65|A0A1U7IG65_9CYAN 7-cyano-7-deazaguanine synthase OS=Phormidium ambiguum IAM M-71 OX=454136 GN=queC PE=3 SV=1
MKAVILLSGGLDSSTVLYQARADGYDCYALSFDYQQRHRRELEAARDIARFVGVREHQVVSFDLRLWGGSALTDNQIDLPSDRSLTEMGQTIPITYVPARNTIFLSFALGYAEAIGAAKVYIGVNALDYSGYPDCRPDYIQAMQEVFRLGTKQGLEGESIEIVAPLINLKKTEIIQLGNSLGVPWEKTWSCYAGEEKACGVCDSCRLRLAAFQALELEDPLPYAS

SEQ ID NO: 40794 - protein, 227 aa, Phormidium sp.
  REGION 1..227: note = tr|A0A522XBN5|A0A522XBN5_9CYAN 7-cyano-7-deazaguanine synthase OS=Phormidium sp. SL48-SHIP OX=2518363 GN=queC PE=3 SV=1
MAKTAIVLLSGGLDSSTVLYQAQADGYTCHAISFDYQQRHRRELDAAHAIAQAAGVRTHQVVQFDLSQWGGSALTDSRLDLPGDRSLADMAQDIPITYVPARNTIFLSFALALAEVQQAERIYIGVNALDYSGYPDCRPDYIQAMQEAFRLGTKQGREGTPIIIQTPLINLKKTEIIQLGNQLGVPWEKTWSCYAGGEVACGVCDSCQLRRAAFDSLNLTDPIPYAQ

SEQ ID NO: 40795 - protein, 417 aa, Phormidium sp.
  REGION 1..417: note = tr|A0A522XFT7|A0A522XFT7_9CYAN Uncharacterized protein OS=Phormidium sp. SL48-SHIP OX=2518363; GN = EYR95_08810 PE=4 SV=1
MPDGDIVHSKIKGFYRNPYRILCEQSADEEPCTRELLKALKKDLQGKGDQPITLVCSLEKLLSNELSPNRCNKSVDWGALSDRVTKLINQSDMHHYCGGLDALAGLYTRLTSNNKKSFMLFGTGANLIVSKRQHKGFKELQREFINRVSLSQLTFSLEHKEKRSSKKKMLRTRGVVFTLLGSAYAYLMDCNVLNLYENGIGAINLPYTESTVGLDHSRSTHPLTLLKVSNLVSDIFGEIFKIRNPFLFSTKAQMCQSLTRNKKADLSALTQSCDRPHRRKPVQCGYCSSCILRRQAILASNLNDKNHYIVPHAKQATNEDCIYLDNMWIQVNTLREIFKESKTRQSQWMSLTKNFPVLDDIVDQTATMEGITEEEFRINLIKLFQAYINEWGHVEFHLWRDFSRNPIGSHKTRDIVP

SEQ ID NO: 40796 - protein, 234 aa, unidentified
  source 1..234: note = Phormidium tenue
  REGION 1..234: note = tr|A0A1U7J3N0|A0A1U7J3N0_9CYAN 7-cyano-7-deazaguanine synthase OS=Phormidium tenue NIES-30 OX=549789 GN=queC PE=3 SV=1
MSQSSLSPKAIVLLSGGLDSATAAAQAIADGYDLTALSFNYGQRHQRELEAAKAVAKHLAIADHRFIDVNLAQWGASSLTDLAQPLPQDDPQTGIAAGIPSTYVPGRNTVFIALALALAEAKEAEAIYLGINAVDYSGYPDCRPEYLAAFQQLAQLSSKAGLEGHAPALVAPLVMDSKVDIVRRAVALGVPIEQTWSCYQGGAAPCGRCDSCRIRDRALVEAGYPQLASTTGQG

SEQ ID NO: 40797 - protein, 480 aa, unidentified
  source 1..480: note = Phormidium tenue
  REGION 1..480: note = tr|A0A1U7J666|A0A1U7J666_9CYAN Uncharacterized protein OS=Phormidium tenue NIES-30 OX=549789; GN = NIES30_09760 PE=4 SV=1
MSYKVSTHDHQADDSDYTLHFGPILNGGGIVRFIDHARKSTSDVGISISDQDFQYRIYQHFPSVIADLVDLAVAIHASDRLAFQHLHKRQSRLHVVLPVRHPELLGIPSFMNKLEKLLSWVTGSKWSFNFQALVASGRMVENQGVLPVALPTGCEVALWSGGLDALAGLYTRLKTEPDQPFLLFGAGSNDNAYARQAEVFNSLIPSFPSRLNLCRVPIRFTESGRHRKNKISRARGIVFTMLGAASAYLMGQRVLYLYENGVGAINLPYRASAVGLDHSRSVHPLTLLMVSELVTELIGEEFKIHNPFLLWTKAEMCQSLKEDSRTDLPPLTMSCDSPHRQKPVQCGYCPSCLLRRQALATSGLLDKTQYVILNGKAPASDPSVYLRHMLEQVSTLRQLLHASTNTKVKWEAIAREFPVLDDIVDRGASTEELTYIQMRTRLIKLYQNYIAEWDNIGSQLSIGLFNHSSEQAAAMPLAAT

SEQ ID NO: 40798 - protein, 227 aa, unidentified
  source 1..227: note = Phormidium willei
  REGION 1..227: note = tr|A0A166SK10|A0A166SK10_9CYAN 7-cyano-7-deazaguanine synthase OS=Phormidium willei BDU 130791 OX=399101 GN=queC PE=3 SV=1
MAKTAIVLLSGGLDSSTVLYQAQADGYTCHAISFDYQQRHRRELDAARAIAQGAGVRTHQVVQFDLSQWGGSALTDTSLDLPGDRSLADMAQDIPITYVPARNTIFLSFALALAEVRQAERIYIGVNALDYSGYPDCRPDYIQALQEAFRLGTKQGREGTPIIIQTPLINLKKTEIIQLGNQLGVPWENTWSCYAGGDIACGVCDSCQLRRAAFDALNLTDPIPYVQ

SEQ ID NO: 40799 - protein, 231 aa, Photobacterium angustum
  REGION 1..231: note = tr|Q1ZPB3|Q1ZPB3_PHOAS 7-cyano-7-deazaguanine synthase OS=Photobacterium angustum (strain S14 / CCUG 15956) OX=314292 GN=queC PE=3 SV=1
MSKAVVVFSGGQDSTTCLIQALAHYDEVHCITFDYGQRHKLEIEVAEAIAKDLGVTAHKVMDVGLLNELAISSLTRDNIAVSHELQENGLPNSFVPGRNILFLTLAGIYAYQIGAETVITGVCETDFSGYPDCRDEFVKSLNQSLILGMDRPLTIATPLMWLNKAETWALADQYQKLDYVREKTLTCYNGIIGDGCGDCPSCDLRRAGLNDYLDHKTTVMNALKEKQAQQA

SEQ ID NO: 40800 - protein, 231 aa, Photobacterium angustum
  REGION 1..231: note = tr|A0A2T3M2E4|A0A2T3M2E4_PHOAN 7-cyano-7-deazaguanine synthase OS=Photobacterium angustum; OX = 661 GN=queC PE=3 SV=1
MSKAVVVFSGGQDSTTCLIQALAHYDEVHCITFDYGQRHKLEIEVAEAIAKDLGVTAHKVMDVGLLNELAISSLTRDNIAVSHELQENGLPNSFVPGRNILFLTLAGIYAYQIGAETVITGVCETDFSGYPDCRDEFVKSLNQSLVLGMDRPLTIATPLMWLNKAETWALADQYQKLDYVREKTLTCYNGIIGDGCGDCPSCDLRRAGLNDYLDHKTTVMNALKEKQAQQA

SEQ ID NO: 40801 - protein, 232 aa, Photobacterium aphoticum
  REGION 1..232: note = tr|A0A090RDC1|A0A090RDC1_9GAMM 7-cyano-7-deazaguanine synthase OS=Photobacterium aphoticum OX=754436 GN=queC PE=3 SV=1
MRKAVVVFSGGQDSTTCLIQALAQYDEVHCITFDYGQRHKLEIEVAEALCKQLGVAAHKVMDVGLLNELAISSLTRDNIPVSHELQENGLPNSFVPGRNILFLTLAGIYAYQIGADAVITGVCETDFSGYPDCRDAFVKSLNQSLVLGMDREMTIETPLMWLNKAETWALADQCGKLDVVREQTLTCYNGIIGDGCGDCPSCDLRKAGLDDYLANRDAIMAELVRKQQAGQA

SEQ ID NO: 40802 - protein, 232 aa, Photobacterium aphoticum
  REGION 1..232: note = tr|A0A0J1GKJ3|A0A0J1GKJ3_9GAMM 7-cyano-7-deazaguanine synthase OS=Photobacterium aphoticum OX=754436 GN=queC PE=3 SV=1
MRKAVVVFSGGQDSTTCLIQALAQYDEVHCITFDYGQRHKLEIEVAEALCKQLGVAAHKVMDVGLLNELAISSLTRDNIPVSHELQENGLPNSFVPGRNILFLTLAGIYAYQIGADAVITGVCETDFSGYPDCRDAFVKSLNQSLVLGMDREMRIDTPLMWLNKAETWALADQCGKLDVVREQTLTCYNGIIGDGCGDCPSCDLRKAGLDDYLANRNAIMAELVRKQQAGQA

SEQ ID NO: 40803 - protein, 232 aa, unidentified
  source 1..232: note = Photobacterium aquae
  REGION 1..232: note = tr|A0A0J1HC65|A0A0J1HC65_9GAMM 7-cyano-7-deazaguanine synthase OS=Photobacterium aquae; OX = 1195763 GN=queC PE=3 SV=1
MRKAVVVFSGGQDSTTCLIQAMAHYDEVHCITFDYGQRHKLEIEVAESICQELGVAAHKVMDVGLLNELAISSLTRDNIPVSHELQENGLPNSFVPGRNILFLTLAGIYAYQIGAEAVITGVCETDFSGYPDCRDEFVKSLNQSLVLGMDRPLRIDTPLMWLNKAETWALADQYGKLDFVREKTLTCYNGVIGDGCGDCPSCDLRKAGLDSYLANRTTIMAELESKQQAGKA

SEQ ID NO: 40804 - protein, 232 aa, Photobacterium aquimaris
  REGION 1..232: note = tr|A0A2T3I2T7|A0A2T3I2T7_9GAMM 7-cyano-7-deazaguanine synthase OS=Photobacterium aquimaris OX=512643 GN=queC PE=3 SV=1
MTKAVVVFSGGQDSTTCLIQALAHYDEVHCITFDYGQRHKLEIEIAEHIAKDLGVAAHKVMDVSLLGELAISSLTRDSIAVSHELQANGLPNSFVPGRNILFLTLAGIYTYQIGAETVITGVCETDFSGYPDCRDEFVRSLNQSLVLGMDRPFTIATPLMWLNKAETWALADQYGKLDYVRNQTLTCYNGIVGDGCGDCPSCDLRRAGLEDYLQHQPIVMAALKEKQAQHKA

SEQ ID NO: 40805 - protein, 232 aa, Photobacterium aquimaris
  REGION 1..232: note = tr|A0A2T3IMX4|A0A2T3IMX4_9GAMM 7-cyano-7-deazaguanine synthase OS=Photobacterium aquimaris OX=512643 GN=queC PE=3 SV=1
MTKAVVVFSGGQDSTTCLIQALAHYDEVHCITFDYGQRHKLEIEIAEHIAKDLGVTAHKVMDVSLLGELAISSLTRDNIAVSHELQANGLPNSFVPGRNILFLTLAGIYAYQIGAETVITGVCETDFSGYPDCRDEFVRSLNQSLVLGMDRPFTIATPLMWLNKAETWALADQYGKLDYVREQTLTCYNGVVGDGCGDCPSCDLRRVGLEDYLQHQSTVMAALKEKQAQQKA

SEQ ID NO: 40806 - protein, 232 aa, unidentified
  source 1..232: note = Photobacterium carnosum
  REGION 1..232: note = tr|A0A2N4UXN3|A0A2N4UXN3_9GAMM 7-cyano-7-deazaguanine synthase OS=Photobacterium carnosum; OX = 2023717 GN=queC PE=3 SV=1
MAKAVVVFSGGQDSTTCLIQALAHYDEVHCITFDYGQRHKLEVEIAEHIAKDLGVAAHKIMDVSLLGELAISSLTRDSIPVSHELQANGLPNSFVPGRNILFLTLAGIYAYQIGAEAVITGVCETDFSGYPDCRDEFVRSLNHSLVLGMDRQFTIETPLMWLNKAETWALADQYEKLDYIREQTLTCYNGIVGDGCGDCPSCNLRRAGLDDYLQHQATVMASLKQKQAQHKA

SEQ ID NO: 40807 - protein, 234 aa, unidentified
  source 1..234: note = Photobacterium damsela
  REGION 1..234: note = tr|A0A1Q9H6B0|A0A1Q9H6B0_PHODP 7-cyano-7-deazaguanine synthase OS=Photobacterium damsela subsp. piscicida OX=38294 GN=queC PE=3 SV=1
MRKAVVVFSGGQDSTTCLIQALAHYDEVHCITFDYGQRHKLEIEVAQAITQELGVAAHKVMDVGLLNELAISSLTRDNIAVSHELQENGLPNSFVPGRNILFLTLAGIYAYQIGAEAVITGVCETDFSGYPDCRYEFVKSLNQSLVLGMDRPLRIETPLMWLNKAETWALADQYGKLDYVREKTLTCYNGIIGDGCGDCPSCDLRRAGLEDYLQHQESVMASLQDKQAHGQAER

SEQ ID NO: 40808 - protein, 234 aa, Photobacterium damselae
  REGION 1..234: note = tr|D0YZ46|D0YZ46_PHODD 7-cyano-7-deazaguanine synthase OS=Photobacterium damselae subsp. damselae CIP 102761 OX=675817 GN=queC PE=3 SV=1
MRKAVVVFSGGQDSTTCLIQALAHYDEVHCITFDYGQRHKLEIEVAQAITQELGVAAHKVMDVGLLNELAISSLTRDNIAVSHELQENGLPNSFVPGRNILFLTLAGIYAYQIGAEAVITGVCETDFSGYPDCRDEFVKSLNQSLVLGMDRPLRIETPLMWLNKAETWALADQYGKLDYVREKTLTCYNGIIGDGCGDCPSCDLRRAGLEDYLQHQESVMASLQDKQAHGQAER

SEQ ID NO: 40809 - protein, 234 aa, Photobacterium damselae; identical to SEQ ID NO: 40808
  REGION 1..234: note = tr|A0A2T3QQ76|A0A2T3QQ76_9GAMM 7-cyano-7-deazaguanine synthase OS=Photobacterium damselae; OX = 38293 GN=queC PE=3 SV=1

SEQ ID NO: 40810 - protein, 232 aa, Photobacterium frigidiphilum
  REGION 1..232: note = tr|A0A2T3JRF6|A0A2T3JRF6_9GAMM 7-cyano-7-deazaguanine synthase OS=Photobacterium frigidiphilum OX=264736 GN=queC PE=3 SV=1
MRKAVVVFSGGQDSTTCLIQAIENYDEVHCITFDYGQRHKLEIEVAQSITKELGITAHKVMDVGLLNELAISSLTRDNIDVSHELQANGLPNSFVPGRNILFLTLSGIYAYQIGAEAVITGVCETDFSGYPDCRDEFVKSLNQSLVLGMDRALKIETPLMWLNKAETWALADQYKQLDFVREKTLTCYNGIIGDGCGNCPSCDLRRAGLEDYLTNKEAIMADLVVKQAKGQA

SEQ ID NO: 40811 - protein, 232 aa, Photobacterium gaetbulicola
  REGION 1..232: note = tr|A0A0B9GXG0|A0A0B9GXG0_9GAMM 7-cyano-7-deazaguanine synthase OS=Photobacterium gaetbulicola OX=1295392 GN=queC PE=3 SV=1
MRKAVVVFSGGQDSTTCLIQAMAHYDEVHCITFDYGQRHKLEIEVAESICKELGVAAHKVMDVGLLNELAISSLTRDNIPVSHELQENGLPNSFVPGRNILFLTLSGIYAYQIGAEAVITGVCETDFSGYPDCRDEFVKSLNQSLVLGMDRPLNIETPLMWLNKAETWALADQYGKLNFVREKTLTCYNGVIGDGCGDCPSCDLRKAGLDDYLANQSDIMAELKAKQQTGKA

SEQ ID NO: 40812 - protein, 232 aa, Photobacterium gaetbulicola
  REGION 1..232: note = tr|A0A0C5WRZ5|A0A0C5WRZ5_9GAMM 7-cyano-7-deazaguanine synthase OS=Photobacterium gaetbulicola Gung47 OX=658445 GN=queC PE=3 SV=1
MRKAVVVFSGGQDSTTCLIQAMAHYDEVHCITFDYGQRHKLEIEVAESICKELGVAAHKVMDVGLLNELAISSLTRDNIPVSHELQENGLPNSFVPGRNILFLTLSGIYAYQIGAEAVITGVCETDFSGYPDCRDEFVKSLNQSLVLGMDRPLKIETPLMWLNKAETWALADQYSKLNFVREKTLTCYNGVIGDGCGDCPSCDLRKAGLDDYLANQSDIMAELEAKQQAGKA

SEQ ID NO: 40813 - protein, 232 aa, unidentified
  source 1..232: note = Photobacterium galatheae
  REGION 1..232: note = tr|A0A066RZL3|A0A066RZL3_9GAMM 7-cyano-7-deazaguanine synthase OS=Photobacterium galatheae OX=1654360 GN=queC PE=3 SV=1
MRKAVVVFSGGQDSTTCLIQAMARYDEVHCITFDYGQRHKLEIEVAEAICKDLGVAAHKVMDVGLLNELAISSLTRDNIPVSHELQDNGLPNSFVPGRNILFLTLAGIYAYQIGAEAVITGVCETDFSGYPDCRDAFVKSLNQSLVLGMDRPLNIETPLMWLNKAETWALADQHGKLDYIRNHTLTCYNGIIGDGCGNCPSCDLRREGLESYLTDKDAVMNSLTGKQADNRA

SEQ ID NO: 40814 - protein, 232 aa, Photobacterium ganghwense
  REGION 1..232: note = tr|A0A0J1H0C8|A0A0J1H0C8_9GAMM 7-cyano-7-deazaguanine synthase OS=Photobacterium ganghwense OX=320778 GN=queC PE=3 SV=1
MRKAVVVFSGGQDSTTCLIQAMAQYDEVHCLTFDYGQRHKLEIEVAESVCRELGVTAHKVMDVGLLNELAISSLTRDNIPVSHELQANGLPNSFVPGRNILFLTLAGIYAYQIGAEAVITGVCETDFSGYPDCRDEFVKSLNQSLVLGMDRPLRIETPLMWLNKAETWALADQYSQLNFVREKTLTCYNGIIGDGCGQCPSCDLRKAGLDEYQTNQAAIMAELERKQSSGQA

SEQ ID NO: 40815 - protein, 232 aa, Photobacterium halotolerans
  REGION 1..232: note = tr|A0A0F5VGR8|A0A0F5VGR8_9GAMM 7-cyano-7-deazaguanine synthase OS=Photobacterium halotolerans OX=265726 GN=queC PE=3 SV=1
MRKAVVVFSGGQDSTTCLIQAMANYDEVHCITFDYGQRHKLEIEVAEAIAKDLGVAAHKVMDVGLLNELAISSLTRDNIPVSHELQDNGLPNSFVPGRNILFLTLAGIYAYQIGAEAVITGVCETDFSGYPDCRDAFVQSLNQSLVLGMDRPLRIETPLMWLNKAETWALADQHGKLDYIRNQTLTCYNGVIGDGCGNCPSCDLRREGLESYLNDKDAVMKALTDKQAANQA

SEQ ID NO: 40816 - protein, 232 aa, Photobacterium iliopiscarium
  REGION 1..232: note = tr|A0A0D8PZV2|A0A0D8PZV2_9GAMM 7-cyano-7-deazaguanine synthase OS=Photobacterium iliopiscarium OX=56192 GN=queC PE=3 SV=1
MAKAVVVFSGGQDSTTCLIQALAHYDEVHCITFDYGQRHKLEVEIAEHIAKDLGVAAHKVMDVSLLGELAISSLTRDSIPVSHELQANGLPNSFVPGRNILFLTLAGIYAYQIGAETVITGVCETDFSGYPDCRDEFVRSLNQSLVLGMDRQFTISTPLMWLNKAETWALADQYGKLDYIREQTLTCYNGIVGDGCGDCPSCDLRRAGLEDYLQHQATVMAALKAKQAQHKA

SEQ ID NO: 40817 - protein, 232 aa, Photobacterium indicum
  REGION 1..232: note = tr|A0A2T3LBF9|A0A2T3LBF9_9GAMM 7-cyano-7-deazaguanine synthase OS=Photobacterium indicum; OX = 81447 GN=queC PE=3 SV=1
MRKAVVVFSGGQDSTTCLIQAIENYDEVHCITFDYGQRHKLEIEVAQSITKELGITAHKVMDVGLLNELAISSLTRDNIEVSHELQANGLPNSFVPGRNILFLTLSGIYAYQIGAEAVITGVCETDFSGYPDCRDEFVKSLNQSLVLGMDRALKIETPLMWLNKAETWALADQYKQLDFVREKTLTCYNGIIGDGCGNCPSCDLRRAGLEDYLTNKDAIMADLVAKQAEGQA

SEQ ID NO: 40818 - protein, 232 aa, Photobacterium jeanii
  REGION 1..232: note = tr|A0A178KNL3|A0A178KNL3_9GAMM 7-cyano-7-deazaguanine synthase OS=Photobacterium jeanii; OX = 858640 GN=queC PE=3 SV=1
MRKAVVVFSGGQDSTTCLIQAIAQYDEVHCITFDYGQRHKLEIEIAEAICKKLNVAAHKVMDVGLLNELAISSLTRDNIAVSHELQENGLPNSFVPGRNILFLTLAGIYAYQIGAEAVITGVCETDFSGYPDCRDEFVKSLNQSLVLGMDRALKIETPLMWLNKAETWALADQYQELQFVREHTLTCYNGVVGDGCGDCPSCDLRRAGLEEYLADQAEIMAELERKQAQGKA

SEQ ID NO: 40819 - protein, 204 aa, Photobacterium jeanii
  REGION 1..204: note = tr|A0A178KAS5|A0A178KAS5_9GAMM 7-cyano-7-deazaguanine synthase OS=Photobacterium jeanii; OX = 858640 GN=A3K86_11650 PE=3 SV=1
MKKAIVLTSGGLDSTTVVYQLLEDKVDVYPIFFDYGQHCVEMEWARLNEVLPKECNPPERLNISSIFNGSKSRLIDEANLWEDDIVDEDLYIPYRTMLFFAAAAARAQTIGILDVFTGFINSNHAKEIDCTSEFMNKLDGLTESIGPVRFHSPFRFSSKSDVAESAVKLKVPIGRTYSCQASSNFPCGACPNCVERLNALEKLN

SEQ ID NO: 40820 - protein, 232 aa, Photobacterium kishitanii
  REGION 1..232: note = tr|A0A2T3KNH8|A0A2T3KNH8_9GAMM 7-cyano-7-deazaguanine synthase OS=Photobacterium kishitanii OX=318456 GN=queC PE=3 SV=1
MTKAVVVFSGGQDSTTCLIQALAHYDEVHCITFDYGQRHKLEIEIAEHIAKDLGVAAHKVMDVSLLGELAISSLTRDSIPVSHELQANGLPNSFVPGRNILFLTLAGIYAYQIGAETVITGVCETDFSGYPDCRDEFVRSLNQSLVLGMDRQFTIATPLMWLNKAETWALADQYGKLDYVREQTLTCYNGVVGDGCGDCPSCDLRRAGLEDYLQHQATVMTALKTKQAQHKA

SEQ ID NO: 40821 - protein, 232 aa, Photobacterium kishitanii
  REGION 1..232: note = tr|A0A2T3R3D3|A0A2T3R3D3_9GAMM 7-cyano-7-deazaguanine synthase OS=Photobacterium kishitanii OX=318456 GN=queC PE=3 SV=1
MTKAVVVFSGGQDSTTCLIQALAHYDEVHCITFDYGQRHKLEIEIAEHIAKDLGVAAHKVMDVSLLGELAISSLTRDSIPVSHELQANGLPNSFVPGRNILFLTLAGIYAYQIGAETVITGVCETDFSGYPDCRDEFVRSLNHSLVLGMDRQFTIATPLMWLNKAETWALADQYGKLDYVREQTLTCYNGVVGDGCGDCPSCDLRRAGLEDYLQHQPTVMAALKEKQAQHKA

SEQ ID NO: 40822 - protein, 232 aa, Photobacterium leiognathi
  REGION 1..232: note = tr|A0A0U1P7C7|A0A0U1P7C7_PHOLE 7-cyano-7-deazaguanine synthase OS=Photobacterium leiognathi lrivu.4.1 OX=1248232 GN=queC PE=3 SV=1
MSKAVVVFSGGQDSTTCLIQALAHYDEVHCITFDYGQRHKLEIEVAEAIAKDLGVTAHKVMDVGLLNELAISSLTRDNIAVSHELQANGLPNSFVPGRNILFLTLAGIYAYQIGAETVITGVCETDFSGYPDCRDEFVKSLNQSLVLGMDRQLKIDTPLMWLNKAETWALADQYGKLDYVREKTLTCYNGVIGDGCGNCPSCDLRRAGLNDYLDHKETVMNALKEKQATHQA

SEQ ID NO: 40823 - protein, 232 aa, Photobacterium leiognathi
  REGION 1..232: note = tr|A0A2G4WMP8|A0A2G4WMP8_PHOLE 7-cyano-7-deazaguanine synthase OS=Photobacterium leiognathi OX=553611 GN=queC PE=3 SV=1
MSKAVVVFSGGQDSTTCLIQALAHYDEVHCITFDYGQRHKLEIEVAEAIAKDLGVTAHKVMDVGLLNELAISSLTRDNIAVSHELQANGLPNSFVPGRNILFLTLAGIYAYQIGAETVITGVCETDFSGYPDCRDEFVKSLNQSLELGMDRQLKIDTPLMWLNKAETWALADQYGKLDYVREKTLTCYNGIIGDGCGNCPSCDLRRAGLNDYLDHKETVMNALKEKQATHQA

SEQ ID NO: 40824 - protein, 232 aa, Photobacterium lipolyticum
  REGION 1..232: note = tr|A0A2T3N555|A0A2T3N555_9GAMM 7-cyano-7-deazaguanine synthase OS=Photobacterium lipolyticum OX=266810 GN=queC PE=3 SV=1
MRKAVVVFSGGQDSTTCLIQAIANYDEVHCITFDYGQRHKLEIEVAQSITKELGITAHKVMDVGLLNELAISSLTRDNIEVSHELQANGLPNSFVPGRNILFLTLAGIYAYQIGAEAVITGVCETDFSGYPDCRDEFVKSLNQSLVLGMDRQLNIDTPLMWLNKAETWALADQYGKLDFVREKTLTCYNGVIGDGCGDCPSCDLRRAGLEDYLNHKETVMAELKAKQEKGDA

SEQ ID NO: 40825 - protein, 232 aa, Photobacterium lutimaris
  REGION 1..232: note = tr|A0A2T3IJJ8|A0A2T3IJJ8_9GAMM 7-cyano-7-deazaguanine synthase OS=Photobacterium lutimaris OX=388278 GN=queC PE=3 SV=1
MRKAVVVFSGGQDSTTCLIQAMSHYDEVHCITFDYGQRHKLEIEVAESICKDLGVTAHKVMDVGLLNELAISSLTRDNIPVSHELQENGLPNSFVPGRNILFLTLAGIYAYQIGADAVITGVCETDFSGYPDCRDEFVKSLNQSLVLGMDRALKIETPLMWLNKAETWALADQYGKLNFVREKTLTCYNGIIGDGCGDCPSCDLRKAGLDDYLANQSDIMAELKSKQQAGNV

SEQ ID NO: 40826 - protein, 232 aa, unidentified
  source 1..232: note = Photobacterium marinum
  REGION 1..232: note = tr|L8J870|L8J870_9GAMM 7-cyano-7-deazaguanine synthase OS=Photobacterium marinum OX=1056511 GN=queC PE=3; SV = 1
MRKAVVVFSGGQDSTTCLIQAIANYDEVHCITFDYGQRHKLEIEVAESIAKEQGVAAHKVMDVGLLNELAISSLTRDNIPVSHELQDNGLPNSFVPGRNILFLTLAGIYAYQIGAESVITGVCETDFSGYPDCRDEFVKSINQSLVLGMDRPLNIETPLMWLNKAETWALADQYSKLNFVRERTLTCYNGVIGDGCGDCPSCDLRRAGLEDYLNHQETVMAALKAKQAEGNA

SEQ ID NO: 40827 - protein, 232 aa, Photobacterium phosphoreum
  REGION 1..232: note = tr|A0A2T3JXK9|A0A2T3JXK9_PHOPO 7-cyano-7-deazaguanine synthase OS=Photobacterium phosphoreum OX=659 GN=queC PE=3 SV=1
MAKAVVVFSGGQDSTTCLIQALAHYDEVHCITFDYGQRHKLEIEIAEHIAKDLGVAAHKVMDVSLLSELAISSLTRDSIPVSHELQANGLPNSFVPGRNILFLTLAGIYAYQIGAETVITGVCETDFSGYPDCRDEFVRSLNQSLVLGMDRQFTIATPLMWLNKAETWALADQYGKLDYVREKTLTCYNGVVGDGCGDCPSCDLRRAGLDDYLQHQATVMAALKEKQAQHKA

SEQ ID NO: 40828 - protein, 232 aa, Photobacterium phosphoreum
  REGION 1..232: note = tr|A0A2T3PRT3|A0A2T3PRT3_PHOPO 7-cyano-7-deazaguanine synthase OS=Photobacterium phosphoreum OX=659 GN=queC PE=3 SV=1
MAKAVVVFSGGQDSTTCLIQALAHYDEVHCITFDYGQRHKLEIEIAEHIAKDLGVAAHKVMDVCLLSELAISSLTRDSIPVSHELQANGLPNSFVPGRNILFLTLAGIYAYQIGAETVITGVCETDFSGYPDCRDEFVRSLNQSLVLGMDRQFTIATPLMWLNKAETWALADQYGKLDYVREKTLTCYNGVVGDGCGDCPSCDLRRAGLDDYLQHQATVMAALKEKQAQHKA

SEQ ID NO: 40829 - protein, 232 aa, unidentified
  source 1..232: note = Photobacterium piscicola
  REGION 1..232: note = tr|A0A1T5HZB0|A0A1T5HZB0_9GAMM 7-cyano-7-deazaguanine synthase OS=Photobacterium piscicola OX=1378299 GN=queC PE=3 SV=1
MAKAVVVFSGGQDSTTCLIQALAHYDEVHCITFDYGQRHKLEVEIAEHIAKDLGVAAHKVMDVSLIGELAISSLTRDSIPVSHELQANGLPNSFVPGRNILFLTLAGIYAYQIGAEAVITGVCETDFSGYPDCRDEFVRSLNHSLVLGMDRQFTIETPLMWLNKAETWALADQYGKLDYIREQTLTCYNGIVGDGCGDCPSCDLRRAGLEDYLQHQATVMAALKAKQAQHKA

SEQ ID NO: 40830 - protein, 232 aa, Photobacterium profundum
  REGION 1..232: note = tr|Q1YWK7|Q1YWK7_9GAMM 7-cyano-7-deazaguanine synthase OS=Photobacterium profundum 3TCK OX=314280; GN = queC PE=3 SV=1
MRKAVVVFSGGQDSTTCLIQAIENYDEVHCITFDYGQRHKLEIEVAQSITKELGITAHKVMDVGLLNELAISSLTRDNIAVSHELQANGLPNSFVPGRNILFLTLSGIYAYQIGAEAVITGVCETDFSGYPDCRDEFVKSLNQSLVLGMDRALKIETPLMWLNKAETWALADQYKQLDFVREKTLTCYNGIIGDGCGDCPSCDLRRAGLEDYLTNKDTIMADLVAKQAEGQA

SEQ ID NO: 40831 - protein, 232 aa, Photobacterium profundum
  REGION 1..232: note = sp|Q6LTJ7|QUEC_PHOPR 7-cyano-7-deazaguanine synthase; OS = Photobacterium profundum (strain SS9) OX=298386 GN=queC; PE = 3 SV=1
MRKAVVVFSGGQDSTTCLIQAIKNYDEVHCITFDYGQRHKLEIEVAQSITKELGITAHKVMDVGLLNELAISSLTRDNIEVSHELQANGLPNSFVPGRNILFLTLSGIYAYQIGAEAVITGVCETDFSGYPDCRDEFVKSLNQSLVLGMDRALKIETPLMWLNKAETWALADQYKQLDFVREKTLTCYNGIIGDGCGNCPSCDLRRAGLEDYLTNKDAIMADLVAKQAEGQA

SEQ ID NO: 40832 - protein, 232 aa, unidentified
  source 1..232: note = Photobacterium proteolyticum
  REGION 1..232: note = tr|A0A1Q9H1B6|A0A1Q9H1B6_9GAMM 7-cyano-7-deazaguanine synthase OS=Photobacterium proteolyticum OX=1903952 GN=queC PE=3 SV=1
MRKAVVVFSGGQDSTTCLIQALANYDEVHCITFDYGQRHKLEIEVAQSVAKDLGVAAHKVMDVGLLNELAISSLTRDNIAVSHELQENGLPNSFVPGRNILFLTLAGIYAYQIGAEAVITGVCETDFSGYPDCRDEFVKSINQSLVLGMDRPLAIETPLMWLNKAETWALADQYSKLDYVRQQTLTCYNGIIGDGCGDCPSCDLRRAGLEDYLSNKKSVMAELEAKQAKGNA

SEQ ID NO: 40833 - protein, 232 aa, Photobacterium rosenbergii
  REGION 1..232: note = tr|A0A2T3N6F1|A0A2T3N6F1_9GAMM 7-cyano-7-deazaguanine synthase OS=Photobacterium rosenbergii OX=294936 GN=queC PE=3 SV=1
MRKAVVVFSGGQDSTTCLIQAMAHYDEVHCITFDYGQRHKLEIEVAESVCKELGVAAHKVMDVGLLNELAISSLTRDNIPVSHELQENGLPNSFVPGRNILFLTLAGIYAYQIGAEAVITGVCETDFSGYPDCRDEFVKSINQSLVLGMDRALKIETPLMWLNKAETWALADQYGKLDFVREKTLTCYNGIIGDGCGDCPSCDLRKAGLDDYLANQAAIMAELKAKQQAGNA

SEQ ID NO: 40834 - protein, 232 aa, unidentified
  source 1..232: note = Photobacterium sanctipauli
  REGION 1..232: note = tr|A0A2T3NRA9|A0A2T3NRA9_9GAMM 7-cyano-7-deazaguanine synthase OS=Photobacterium sanctipauli OX=1342794 GN=queC PE=3 SV=1
MRKAVVVFSGGQDSTTCLIQAMANYDEVHCITFDYGQRHKLEIEVAESICKELNVAAHKVMDVGLLNELAISSLTRDNIEVSHELQANGLPNSFVPGRNILFLTLAGIYAYQIGAEAVITGVCETDFSGYPDCRDEFVKSLNQSLVLGMDRPLNIETPLMWLNKAETWALADQYSKLDFVREKTLTCYNGIIGDGCGDCPSCDLRKAGLDDYQGNKEAIMAELTSKQSAGQA

SEQ ID NO: 40835 - protein, 228 aa, unidentified
  source 1..228: note = Photobacterium sanguinicancri
  REGION 1..228: note = tr|A0A264TDS5|A0A264TDS5_9GAMM 7-cyano-7-deazaguanine synthase OS=Photobacterium sanguinicancri OX=875932 GN=queC PE=3 SV=1
MRKAVVVFSGGQDSTTCLIQAIAQYDEVHCITFDYGQRHKLEIEVAESICKELNITAHKVMDVGLLNELAISSLTRDSIEVSHELQANGLPNSFVPGRNILFLTLAGIYAYQIGAESVITGVCETDFSGYPDCRDEFVKSLNQSLVLGMDRTFTIETPLMWLNKAETWALADQKHQLDFVREKTLTCYNGIIGDGCGDCPSCDLRRAGLKDYLDNRAEVMASLVSKQQ

SEQ ID NO: 40836 - protein, 230 aa, unidentified
  source 1..230: note = Photobacterium sanguinicancri
  REGION 1..230: note = tr|A0A135ZN92|A0A135ZN92_9GAMM 7-cyano-7-deazaguanine synthase OS=Photobacterium sanguinicancri OX=875932 GN=queC PE=3 SV=1
MRKAVVVFSGGQDSTTCLIQAIAQYDEVHCITFDYGQRHKLEIEVAESICKELNITAHKVMDVGLLNELAISSLTRDSIEVSHELQANGLPNSFVPGRNILFLTLAGIYAYQIGAESVITGVCETDFSGYPDCRDEFVKSLNQSLVLGMDRTFTIETPLMWLNKAETWALADQKHQLDFVREKTLTCYNGIIGDGCGDCPSCDLRRAGLTDYLDNRAEVMASLVTKQQEA

SEQ ID NO: 40837 - protein, 231 aa, Photobacterium sp.
  REGION 1..231: note = tr|A0A2T3LRX2|A0A2T3LRX2_9GAMM 7-cyano-7-deazaguanine synthase OS=Photobacterium sp. GB-1; OX = 2022111 GN=queC PE=3 SV=1
MSKAVVVFSGGQDSTTCLIQALAHYDEVHCITFDYGQRHKLEIEVAEAIAKDLGVTAHKVMDVGLLNELAISSLTRDNIAVSHELQENGLPNSFVPGRNILFLTLAGIYAYQIGAETVITGVCETDFSGYPDCRDEFVKSLNQSLVLGMDRPLTIATPLMWLNKAETWALADQYQKLDYVREKTLTCYNGIIGDGCGDCPSCDLRRAGLTDYLDHKTTVMNALKAKQAQQA

SEQ ID NO: 40838 - protein, 232 aa, Photobacterium sp.
  REGION 1..232: note = tr|A0A1Y6M961|A0A1Y6M961_9GAMM 7-cyano-7-deazaguanine synthase OS=Photobacterium sp. CECT 9190 OX=2006084 GN=queC PE=3 SV=1
MTKAVVVFSGGQDSTTCLIQALAHYDEVHCITFDYGQRHKLEIEIAEHIAKDLGVAAHKVMDVSLLGELAISSLTRDNIAVSHELQANGLPNSFVPGRNILFLTLAGIYAYQIGAETVITGVCETDFSGYPDCRDEFVRSLNQSLVLGMDRQFTIATPLMWLNKAETWALADQYGKLDYVREQTLTCYNGVVGDGCGDCPSCDLRRIGLEDYLQHQSTVMAALKEKQAQHKA

SEQ ID NO: 40839 - protein, 228 aa, Photobacterium swingsii
  REGION 1..228: note = tr|A0A0J8VDM7|A0A0J8VDM7_9GAMM 7-cyano-7-deazaguanine synthase OS=Photobacterium swingsii; OX = 680026 GN=queC PE=3 SV=1
MRKAVVVFSGGQDSTTCLIQAIAQYDEVHCITFDYGQRHKLEIEVAEAICKELNVTAHKVMDVGLLNELAISSLTRDSIEVSHELQANGLPNSFVPGRNILFLTLAGIYAYQIGAESVITGVCETDFSGYPDCRDEFVKSLNQSLVLGMDRNFTIETPLMWLNKAETWALADQSEQLTFVREKTLTCYNGIIGDGCGDCPSCDLRRAGLKDYLDNRAEVMASLVSKQG

SEQ ID NO: 40840 - protein, 232 aa, unidentified
  source 1..232: note = Photobacterium toruni
  REGION 1..232: note = tr|A0A1T4KAJ2|A0A1T4KAJ2_9GAMM 7-cyano-7-deazaguanine synthase OS=Photobacterium toruni; OX = 1935446 GN=queC PE=3 SV=1
MAKAVVVFSGGQDSTTCLIQALAHYDEVHCITFDYGQRHKLEVEIAEHIAKDLGVAAHKVMDVSLLGELAISSLTRDSIPVSHELQANGLPNSFVPGRNILFLTLAGIYAYQIGAETVITGVCETDFSGYPDCRDEFVRSLNHSLVLGMDRQFKIETPLMWLNKAETWALADQYGKLDYVREQTLTCYNGIVGDGCGDCPSCDLRRAGLDDYLQHQATVMAALKQKQAQHKA

SEQ ID NO: 40841 - protein, 232 aa, Photorhabdus asymbiotica
  REGION 1..232: note = tr|C7BJH3|C7BJH3_PHOAA 7-cyano-7-deazaguanine synthase OS=Photorhabdus asymbiotica subsp. asymbiotica (strain ATCC 43949 / 3105-77) OX=553480 GN=queC PE=3 SV=1
MRRAVVVFSGGQDSTTCLIQAINQYDEVHCITFDYGQRHCAEIDVARNISRSLGVVAHKVLDITLLNELALSSLTRNNIPIPNYNESEKSTIPNTFVPGRNILFLTLAAIYAYQVEAETVITGVCETDFSGYPDCRDEFVKAMNKAVSLGIARDIRFETPLMWLNKAETWALSDYYQHLDFVRSQTLTCYNGIQGNGCGTCAACHLRTSGLEQYLDAPEKIMTEMKAKTHLA

SEQ ID NO: 40842 - protein, 232 aa, unidentified
  source 1..232: note = Photorhabdus australis
  REGION 1..232: note = tr|A0A1C0U3N7|A0A1C0U3N7_9GAMM 7-cyano-7-deazaguanine synthase OS=Photorhabdus australis; OX = 286156 GN=queC PE=3 SV=1
MRRAIVVFSGGQDSTTCLIQAINQYDEVHCITFDYGQRHHAEIDVARNISHSLGVVAHKILDVTLLNELALSSLTRNNIPVPNYNESEKSIIPNTFVPGRNILFLTLAAIYAYQVEAETVITGVCETDFSGYPDCRDEFVKALNKAVSLGIARDIRFETPLMWLSKAETWALSDYYQHLDFVRSQTLTCYNGIQGNGCGTCAACHLRTSGLEQYLDAPEKIMTEMKAKTHLA

SEQ ID NO: 40843 - protein, 232 aa, unidentified
  source 1..232: note = Photorhabdus bodei
  REGION 1..232: note = tr|A0A329XFB3|A0A329XFB3_9GAMM 7-cyano-7-deazaguanine synthase OS=Photorhabdus bodei; OX = 2029681 GN=queC PE=3 SV=1
MRQAVVVFSGGQDSTTCLIQAINQYDEVHCVTFDYGQRHRAEIDVARNISHSLGAVAHKVLDVTLLNELALSSLTRNNIPVPDYNESEKSAIPSTFVPGRNILFLTLAAIYAYQVEAEAVITGVCETDFSGYPDCRDEFVKALNKAVSLGIARNIRFETPLMWLNKAETWALSDYYQHLDFVRSQTLTCYNGIQGNGCGTCAACHLRANGLEQYLNAPEKIMTEMKAKTHLV

SEQ ID NO: 40844 - protein, 232 aa, unidentified
  source 1..232: note = Photorhabdus heterorhabditis
  REGION 1..232: note = tr|A0A0N0CN38|A0A0N0CN38_9GAMM 7-cyano-7-deazaguanine synthase OS=Photorhabdus heterorhabditis OX=880156 GN=queC PE=3 SV=1
MRRAVVVFSGGQDSTTCLIQAINQYDEVHCVTFDYGQRHRAEIDVARYISHSLNVVAHKVLDVTLLNELALSSLTRDNIPVPDYNESEKSTIPNTFVPGRNILFLTLAAIYAYQVEAEAVITGVCETDFSGYPDCRDEFVKALNKAVNLGIARDIRFETPLMWLNKAETWALSDYYQHLDFVRSQTLTCYNGVQGNGCGTCAACHLRANGLEQYLDAPEKIMTEMKAKTHLA

SEQ ID NO: 40845 - protein, 232 aa, unidentified
  source 1..232: note = Photorhabdus khanii
  REGION 1..232: note = tr|W3VBE8|W3VBE8_9GAMM 7-cyano-7-deazaguanine synthase OS=Photorhabdus khanii NC19 OX=1004151 GN=queC; PE = 3 SV=1
MRRTVVVFSGGQDSTTCLIQAINQYDEVHCVTFDYGQRHRAEIDVARNISHSLGAVAHKVIDVTLLNELALSSLTRDNIPVPNYSESKKSTLPSTFVPGRNILFLTLAAIYAYQVEAETVITGVCETDFSGYPDCRDEFVKALNKAVSLGIARDIRFETPLMWLNKAETWALSDYYQHLDFIRSQTLTCYNGIQGNGCGTCAACHLRASGLEQYLNAPEKIMTEMKAKTHLS

SEQ ID NO: 40846 - protein, 232 aa, unidentified
  source 1..232: note = Photorhabdus laumondii
  REGION 1..232: note = tr|A0A329VL71|A0A329VL71_9GAMM 7-cyano-7-deazaguanine synthase OS=Photorhabdus laumondii subsp. clarkei OX=2029685 GN=queC PE=3 SV=1
MRRAVVVFSGGQDSTTCLIQAINQYDEVHCVTFDYGQRHRAEIDVARNVSHFLGVVAHKVLDVTLLNELALSSLTRDNIPVPDHSESEKSAIPSTFVPGRNILFLTLAAIYAYQVEAEAVITGVCETDFSGYPDCRDEFVKALNKAVSLGIARDIRFETPLMWLNKAETWALSDYYQHLDFVRSQTLTCYNSIQGNGCGTCAACHLRANGLEQYLNAPEKIMTEMKAKTHLV

SEQ ID NO: 40847 - protein, 232 aa, unidentified
  source 1..232: note = Photorhabdus laumondii
  REGION 1..232: note = sp|Q7N0M0|QUEC_PHOLL 7-cyano-7-deazaguanine synthase; OS = Photorhabdus laumondii subsp. laumondii (strain DSM 15139 / CIP 105565 / TT01) OX=243265 GN=queC PE=3 SV=1
MRRAVVVFSGGQDSTTCLIQAINQYDEVHCVTFDYGQRHRAEIDVARNVSHFLGVVAHKVLDVTLLNELALSSLTRDNIPVPDHSESEKSAIPSTFVPGRNILFLTLAAIYAYQVEAEAVITGVCETDFSGYPDCRDEFVKALNKAVSLGIARDIRFETPLMWLNKAETWALSDYYQHLDFVRSQTLTCYNGIQGNGCGTCAACHLRANGLEQYLNAPEKIMTEMKAKTHLV

SEQ ID NO: 40848 - protein, 232 aa, Photorhabdus luminescens
  REGION 1..232: note = tr|A0A5C4RMC1|A0A5C4RMC1_PHOLU 7-cyano-7-deazaguanine synthase OS=Photorhabdus luminescens subsp. sonorensis OX=1173677 GN=queC PE=3 SV=1
MRRAVVVFSGGQDSTTCLIQAINQYDEVHCVTFDYGQRHRAEIDVARNISHSLGVVAHKVLDVTLLSELALSSLTRDNIPIPDYSESAKSAIPSTFVPGRNILFLTLAAIYAYQVEAEAIITGACETDFSGYPDSRDEFVKALNKAVTLGIARDIRFETPLMWLNKAETWALSDYYQHLDFVRSQTLTCYNGIQGNGCGKCAACHLRANGLEQYLNAPEKIMTEMKAKTHLV

SEQ ID NO: 40849 - protein, 232 aa, Photorhabdus luminescens
  REGION 1..232: note = tr|A0A0A0CRZ2|A0A0A0CRZ2_PHOLU 7-cyano-7-deazaguanine synthase OS=Photorhabdus luminescens OX=29488 GN=queC PE=3 SV=1
MRRAVVVFSGGQDSTTCLIKAINQYDEVHCVTFDYGQRHRAEIDVARNVSHSLGVVAHKVLDVTLLNELALSSLTRDNIPVPDYSESEKSAIPSTFVPGRNILFLTLAAIYAYQVEAEAVITGVCETDFSGYPDCRDEFVKALNKAVSLGIARDIRFETPLMWLNKAETWALSDYYQHLDFVRSQTLTCYNGIQGNGCGTCAACHLRANGLEQYLNAPDKIMAEMKAKTHLV

SEQ ID NO: 40850 - protein, 232 aa, unidentified
  source 1..232: note = Photorhabdus namnaonensis
  REGION 1..232: note = tr|A0A1B8YMK8|A0A1B8YMK8_9GAMM 7-cyano-7-deazaguanine synthase OS=Photorhabdus namnaonensis OX=1851568 GN=queC PE=3 SV=1
MRRAVVVFSGGQDSTTCLIQAINQYDEVHCVTFDYGQRHRAEIDVARNINHSLGVVAHKVLDVTLLSELALSSLTRDNIPIPDYNESKKSAIPSTFVPGRNILFLTLAAIYAYQVEAEAVITGVCETDFSGYPDSRDEFIKAMNKAVSLGIARDIRFETPLMWLNKAETWALSDYYQHLDFVRSQTLTCYNGIQGNGCGKCAACHLRANGLEQYLNAPEKIMTEMKAKTHLV

SEQ ID NO: 40851 - protein, 232 aa, Photorhabdus sp.
  REGION 1..232: note = tr|A0A329W1U9|A0A329W1U9_9GAMM 7-cyano-7-deazaguanine synthase OS=Photorhabdus sp. S9-53; OX = 2029683 GN=queC PE=3 SV=1
MRRAVVVFSGGQDSTTCLIQAINQYDEVHCVTFDYGQRHRAEIDVARNISHSLGAVAHKVLDVTLLNELALSSLTRDNIPVPDYNESEKSAIPSTFVPGRNILFLTLAAIYAYQVEAEAVITGVCETDFSGYPDCRDEFVKALNKAVSLGIARNIRFETPLMWLNKAETWALSDYYQHLDFIRSQTLTCYNGIQGNGCGTCAACHLRANGLEQYLNAPEKIMTEMKAKTHLV

SEQ ID NO: 40852 - protein, 232 aa, Photorhabdus sp.; identical to SEQ ID NO: 40851
  REGION 1..232: note = tr|A0A329W1M0|A0A329W1M0_9GAMM 7-cyano-7-deazaguanine synthase OS=Photorhabdus sp. S10-54; OX = 2029684 GN=queC PE=3 SV=1

SEQ ID NO: 40853 - protein, 232 aa, Photorhabdus temperata
  REGION 1..232: note = tr|A0A081S225|A0A081S225_PHOTE 7-cyano-7-deazaguanine synthase OS=Photorhabdus temperata subsp. temperata Meg1 OX=1393735 GN=queC PE=3 SV=1
MRRTVVVFSGGQDSTTCLIQAINQYDEVHCVTFDYGQRHRAEIDVACDISHSLGVIAHKVIDVTLLNELALSSLTRDNIPIPNYSESEKSTLPSTFVPGRNILFLTLAAIYAYQVEAETVITGVCETDFSGYPDCRDEFVKALNKAVNLGVARDIHFETPLMWLNKAETWALSDYYQHLDFVRSQTLTCYNGIQGNGCGTCAACHLRANGLEQYLNAPEKIMTEMKAKTHLS

SEQ ID NO: 40854 - protein, 232 aa, Photorhabdus temperata
  REGION 1..232: note = tr|A0A4V3F5I2|A0A4V3F5I2_PHOTE 7-cyano-7-deazaguanine synthase OS=Photorhabdus temperata; OX = 574560 GN=queC PE=3 SV=1
MKRAVVVFSGGQDSTTCLIQAINQYDEIHCVTFDYGQRHRAEIDVACNISHSLGVIAHKIIDVTLLNELALSSLTRDNIPVPNYSESKKSTLPSTFVPGRNILFLTLAAIYAYQVEAETVITGVCETDFSGYPDCRDEFVKALNKAVSLGVARDIHFETPLMWLNKAETWALSDYYQHLDFVRSQTLTCYNGIQGNGCGTCAACHLRASGLEQYLNAPEKIMTEMKAKTHLA

SEQ ID NO: 40855 - protein, 232 aa, unidentified
  source 1..232: note = Photorhabdus thracensis
  REGION 1..232: note = tr|A0A0F7LK20|A0A0F7LK20_9GAMM 7-cyano-7-deazaguanine synthase OS=Photorhabdus thracensis; OX = 230089 GN=queC PE=3 SV=1
MRRAVVVFSGGQDSTTCLIQAINQYDEVHCVTFDYGQRHRAEIDVACDISHSLGVIAHKVIDVTLLNELALSSLTRDNIPVPNYSESEKSTLPSTFVPGRNILFLTLAAIYAYQVEAETVITGVCETDFSGYPDCRDEFVKALNKAVSLGVARDIHFETPLMWLNKAETWALSDYYQHLDFVRSQTLTCYNGIQGNGCGTCAACYLRTSGLEKYLNAPEKIMTEMKAKTHLP

SEQ ID NO: 40856 - protein, 231 aa, unidentified
  source 1..231: note = Phreatobacter cathodiphilus
  REGION 1..231: note = tr|A0A2S0NI28|A0A2S0NI28_9PROT 7-cyano-7-deazaguanine synthase OS=Phreatobacter cathodiphilus OX=1868589 GN=queC PE=3 SV=1
MADDGALVLFSGGQDSATCLAWALDRFAHVETLGFDYGQRHQVELACRAGIRDGLGRVNSGWAARLGPDHTLGLAALGEVSDTALTREVAIEMTDQDLPNTFVPGRNLVFLTFAAALAYRRGLKHIVAGMCETDYSGYPDCRDDTIKALQVALNLGMEKRFVLHTPLMFIDKADTWRMAERLGGEALVELIRTDSHSCYLGVRTELHAWGHGCGTCPACHLRAAGWRRYRE

SEQ ID NO: 40857 - protein, 232 aa, unidentified
  source 1..232: note = Phreatobacter oligotrophus
  REGION 1..232: note = tr|A0A2T4Z0Z4|A0A2T4Z0Z4_9PROT 7-cyano-7-deazaguanine synthase OS=Phreatobacter oligotrophus OX=1122261 GN=queC PE=3 SV=1
MDDSGALVLFSGGQDSATCLAWALDRFNHVETLGFDYGQRHAVELECRATVRDGLATVNADWGVRLGPDHTLGLAALGEVSDTALTRSVEIAMTDQGLPNTFVPGRNLVFLTFAAALAYRRGLKHIVAGMCETDYSGYPDCRDDTIKALQVALNLGMESRFVLHTPLMFIDKAETWRLAERLGGEPLVELIRAESHSCYLGDREHLHDWGHGCGTCPACHLRAAGWRRYRGG

SEQ ID NO: 40858 - protein, 236 aa, unidentified
  source 1..236: note = Phreatobacter sp.
  REGION 1..236: note = tr|A0A4D7QSQ3|A0A4D7QSQ3_9PROT 7-cyano-7-deazaguanine synthase OS=Phreatobacter sp. NMCR1094 OX=2570229 GN=queC PE=3 SV=1
MAEAGGALVLFSGGQDSATCLAWALDRFDHVETLGFDYGQRHLVELACRAAIRDGLPTIRHGWEQRLGPDHTLNLAALGEVSNTALTRDMAIEMGESGLPNTFVPGRNIVFLTFAAALAYRRGLKHIVAGMCETDYSGYPDCRDDTIKALQVALNLGMDKRFVLHTPLMWIDKAATWRLAEDLGGKPLVDLIVEQSHSCYLGDRAHHHDWGFGCGTCPACQLRADGWRRYVAEPVA

SEQ ID NO: 40859 - protein, 245 aa, unidentified
  source 1..245: note = Phreatobacter stygius
  REGION 1..245: note = tr|A0A4D7AZS7|A0A4D7AZS7_9PROT 7-cyano-7-deazaguanine synthase OS=Phreatobacter stygius; OX = 1940610 GN=queC PE=3 SV=1
MADIESEQAAAAAGSGALVLFSGGQDSSTCLAWALERFGTVETLGFDYGQRHRVELECRDALRQGLTDLNAGWAARLGPDHTVNLAALGEISNTALTRDVAIAMSEGGLPNTFVPGRNLIFLTFAATLAYRRGLKHIVAGMCETDYSGYPDCRDDTIKALQVALNLGMDRRFVLHTPLMWIDKAETWALTARLGGEPLVALIREQSHSCYLGDRSHHHEWGFGCGTCPACQLRAEGYRRFVAAAV

SEQ ID NO: 40860 - protein, 187 aa, Phycicoccus sp.
  REGION 1..187: note = tr|A0A444BRC0|A0A444BRC0_9MICO 7-cyano-7-deazaguanine synthase OS=Phycicoccus sp. CMS6Z-2; OX = 2502783 GN=EPD83_02925 PE=3 SV=1
MAMTYAGSCAVLLSGGIDSAVVAHALRSQGWDIAALFVDYGQPAREAERTASTRVAAHYDLPWQEVGLTGMSVPQSGEIPGRNDMLIALARATLPGRSIAVGIHGGTEYADCSPAWTTAWQQLIDAQSGGVARILAPLLHRRKDEIISHARYSQVPIHLTHSCERANDPCGQCLSCQDWERARVGAK

SEQ ID NO: 40861 - protein, 202 aa, Phycisphaera mikurensis
  REGION 1..202: note = tr|I0IH11|I0IH11_PHYMF Uncharacterized protein; OS = Phycisphaera mikurensis (strain NBRC 102666 / KCTC 22515 / FYK2301M01) OX=1142394 GN=PSMK_23900 PE=4 SV=1
MPPAPRPLLLAAGDLPSLVVLALRHRDRKPMPRLLFVHDGRDASAARLRRLREQMDRYGLGTLEELHAVHLRAERGPGGEAAHPPLADAQLLLAACQAAGRRGSTPVIWATARGDAAGDATAAVPARLAAHETCLLVRRLQEAAGVEPVPVETPLVELHLEQVMALGRRASVDPGLAWACAFRGPAPCGSCDGCRRLRAAVG

SEQ ID NO: 40862 - protein, 247 aa, Phycisphaera mikurensis
  REGION 1..247: note = tr|I0IDJ2|I0IDJ2_PHYMF 7-cyano-7-deazaguanine synthase OS=Phycisphaera mikurensis (strain NBRC 102666 / KCTC 22515 / FYK2301M01) OX=1142394 GN=queC PE=3 SV=1
MEADTAPAPSGTPTPPIRRAVVLLSGGLDSATVLAIAKREGFRVTALSFRYGQRHGDELAAAARVADAAGVADHRVVDLDLSAFGGSALTDAAIEVPQRDGQQPPDPGIPPTYVPARNTVFLSVALALAEATGARDLFIGVNAVDYSGYPDCRPAFVEAFERLANLATRAGVEASPTGGFRVHAPLIRLSKAEIIRRGTALGVDYGDTLSCYAPAASGRACGRCDACHLRAAGFREAGLTDPAASTP

SEQ ID NO: 40863 - protein, 226 aa, Phycisphaera sp.
  REGION 1..226: note = tr|A0A3M8FZB1|A0A3M8FZB1_9BACT 7-cyano-7-deazaguanine synthase OS=Phycisphaera sp.; OX = 2030824 GN=queC PE=3 SV=1
MQPMAVVLLSGGLDSATCLAIARRDGFNATCLAVDYGQRHRCELDAARQVAASFDAELRTVRVDLRAFGGSALTDDLDVPKGRSEQDISGSIPVTYVPARNLVFLSLAVAQAEVLGAQYLYIGVNQLDYSGYPDCRGEFIESFRVASNLATKAGVEGKPLRISTPLIDLTKAEIVTLGTSLGVDYALTVSCYDPTEDGLACGSCDSCQLRRRGFDQANLRDPTRYA

SEQ ID NO: 40864 - protein, 223 aa, Phycisphaera sp.
  REGION 1..223: note = tr|A0A424KJB8|A0A424KJB8_9BACT 7-cyano-7-deazaguanine synthase OS=Phycisphaera sp. TMED9; OX = 1986611 GN=queC PE=3 SV=1
MKAVVLLSGGLDSSTVLAWARAEGRECYALSFDYGQRHRIELERAAEIAERIGAVEHRVLSIDLRAFGGSALTDDIEVPKDRVDGHGRSSASDGEDAIPVTYVPARNTIFLSFAMAYAEVRDAGEIWLGINAIDYSGYPDCRPEYLAAFQRMSDLATKAGVEGHGPRFISPLAELGKVDIVRKATALGVPIDRTFSCYDPGDDGTPCGRCDSCILRRAAIAEA

SEQ ID NO: 40865 - protein, 223 aa, unidentified
  source 1..223: note = Phycisphaeraceae bacterium
  REGION 1..223: note = tr|A0A1Z9Q829|A0A1Z9Q829_9BACT 7-cyano-7-deazaguanine synthase OS=Phycisphaeraceae bacterium TMED231 OX=1986831 GN=queC PE=3 SV=1
MKAVVLLSGGLDSATVLAWARAEGRECFALSFDYGQRHRIELERAAELADQLGACEHRVLSIDLRAFGGSALTDDIAVPKDRVDGHGRSAGESAEASIPVTYVPARNTIFLSFAMAYAEVRAAEEIWLGINAIDYSGYPDCRPEYLAAFQRMSDLATKAGVEGHGPRFVSPLAELGKVDIVRKAVALGVPVDRTFSCYDPDDEGTPCGRCDSCVLRQAAIAEA

SEQ ID NO: 40866 - protein, 229 aa, unidentified
  source 1..229: note = Phycisphaeraceae bacterium
  REGION 1..229: note = tr|A0A520QCU4|A0A520QCU4_9BACT 7-cyano-7-deazaguanine synthase OS=Phycisphaeraceae bacterium OX=2026777 GN=queC PE=3 SV=1
MGTSDPAVVLLSGGLDSATVLAIARDEGYAVHALVVDYGQRHRHELEAAKKLSEEAGIPFRVMPLDLRVFGGSALTDDIDVPHGRDESEMQQDIPVTYVPARNLIFLSLASGFAETIGAKDLFLGVNAVDYSGYPDCRPEFLTAFEACANLATKAGVQGQAFTIHAPLVNLTKAEIIQRGLKLGVDYSKTHSCYDPDPQGRACGTCDSCVLRRRGFEAAGVPDPTRYSA

SEQ ID NO: 40867 - protein, 231 aa, unidentified
  source 1..231: note = Phycisphaerae bacterium
  REGION 1..231: note = tr|A0A0S8KS78|A0A0S8KS78_9BACT 7-cyano-7-deazaguanine synthase OS=Phycisphaerae bacterium SM1_79 OX=1703410 GN=queC PE=3 SV=1
MADKKAVVLLSGGIDSATTLAIARSEGFQCYALTFRYGQRHQREIEAAKKIAHSLAVAEHRVIDIDLAQFGGSALTDLSIEVPKDRTKLDNPNQIPQTYVPARNTIFLSYALAWAEVLGAFDIFIGVNTTDYSGYPDCRAEFIAAFEKTANIATANAVQGKGRYRINTPIIDMTKAQIILTGTKLGVDYSLTHSCYDPDEQGRSCSRCDSCRLRLKGFAEAGMEDPIEYAK

SEQ ID NO: 40868 - protein, 235 aa, unidentified
  source 1..235: note = Phycisphaerae bacterium
  REGION 1..235: note = tr|A0A2E0XW95|A0A2E0XW95_9BACT 7-cyano-7-deazaguanine synthase OS=Phycisphaerae bacterium; OX = 2026778 GN=queC PE=3 SV=1
MTAQRHAVVLLSGGLDSATVLAIAGDDGFTLHALTFDYGQRHRHELDCAATVAKASGAVHHVLKLDHAAFRGSALTDGPEVPVDRSEDAMSDGIPVTYVPARNTIMLSHALGYAEHVGSRDIFVGVNAVDYSGYPDCRPAFIEAFQSLANLATKAGVEGDSFRVHAPLQHMNKSEIIQRGCALGVDYGLTSTCYQPAADGTPCMRCDACALRARGFREAGVIDPLIGHQTAGEQD

SEQ ID NO: 40869 - protein, 231 aa, unidentified
  source 1..231: note = Phycisphaerales bacterium
  REGION 1..231: note = tr|A0A3C0YQM2|A0A3C0YQM2_9BACT 7-cyano-7-deazaguanine synthase OS=Phycisphaerales bacterium OX=2052180 GN=queC PE=3 SV=1
MKRALKKAVILLSGGLDSTTTLAIAKSRGFDCFALTFRYGQRHSIEQKSAKKIAKFFGGKQLVVDVNPAVFQHSALTDKSIKVPMGRKIDSSKIPVTYVPARNTLFLSYALALAESIGAFDIFIGVNSTDYSGYPDCRPEYIKAYEKMANLATAASVQKKGKYKIHTPIIKMTKSQIIKTGVKLGVNYSLTHSCYNPDKKGIACGKCDSCQLRLKGFAEAKLKDPVKYANK

SEQ ID NO: 40870 - protein, 231 aa, unidentified
  source 1..231: note = Phycisphaerales bacterium
  REGION 1..231: note = tr|A0A3D3URR4|A0A3D3URR4_9BACT 7-cyano-7-deazaguanine synthase OS=Phycisphaerales bacterium OX=2052180 GN=queC PE=3 SV=1
MAGKKAVILLSGGLDSATTLAIARSEGFLCYALTFRYGQRHKREIEAAKKVAESVGAAEHRIIDIDLAAFGGSALTDASIDVPKDRAGLGEATQIPPTYVPARNTIFLSYALAWAEVLGAFDIYIGVNSTDYSGYPDCRAEFITAFEKTANLATAAAVEQKGRYRIHTPIIEMTKAGIILAGTKLGVDYSMTHSCYDPDEQGRSCGRCDSCRLRLKGFAEAGIKDPIDYMT

SEQ ID NO: 40871 - protein, 236 aa, Phyllobacterium bourgognense
  REGION 1..236: note = tr|A0A368YXN2|A0A368YXN2_9RHIZ 7-cyano-7-deazaguanine synthase OS=Phyllobacterium bourgognense OX=314236 GN=queC PE=3 SV=1
MARSSDGALVLFSGGQDSATCLAWALSRFDRVETVGFDYGQRHRIELEMRGRFRSALAGKFPDWTARLGDDHMLDASIIGELGSTAMTQDIAIEMAENGLPNTFVPGRNLLFFTLAAALAYRRGLRTIVGGMCETDYSGYPDCRDDTLKAQQVALSLGLDRRITIETPLMWLDKAETFELAQDLGGEALLDLVVEHTHTCYLGDRSQRHEWGYGCNSCPACELRAKGWQKFKAEFA

SEQ ID NO: 40872 - protein, 236 aa, Phyllobacterium brassicacearum
  REGION 1..236: note = tr|A0A2P7BJG7|A0A2P7BJG7_9RHIZ 7-cyano-7-deazaguanine synthase OS=Phyllobacterium brassicacearum OX=314235 GN=queC PE=3 SV=1
MARNSDGALVLFSGGQDSATCLAWALANFDRVETVGFDYGQRHRIELEVRHQFREAITATFPQWAARLGDDHMLDAGIVGQLGASAMTNDIAIEMADNGLPNTFVPGRNLLFFTLAGALAYRRGLRVIVGGMCETDYSGYPDCRDDTLKAQQVALSLGLDRRVTIETPLMWLDKAETFALAQDLGGEALLNLIVENTHTCYLGDRSNRHAWGYGCGTCPACELRSAGWQKFKAEAA

SEQ ID NO: 40873 - protein, 233 aa, unidentified
  source 1..233: note = Phyllobacterium endophyticum
  REGION 1..233: note = tr|A0A2P7ASH4|A0A2P7ASH4_9RHIZ 7-cyano-7-deazaguanine synthase OS=Phyllobacterium endophyticum OX=1149773 GN=queC PE=3 SV=1
MSTTALVLFSGGQDSTTCLAWALDRFERVETVGFDYGQRHRIELACRDTLRAELSALNPVWADRLGDDHTISLAALGEISDTALTSGMQIEMSESGLPNTFVPGRNLIFLTFAAALAYRRGLKHIVGGMCETDYSGYPDCRDDTIKALQVALNIGMEKRFVLDTPLMWIDKAQTWQLAKDLGGRALVDIIVKDSHTCYLGERGEFHDWGYGCGTCPACDLRAKGHEKFVAEEE

SEQ ID NO: 40874 - protein, 236 aa, unidentified
  source 1..236: note = Phyllobacterium endophyticum
  REGION 1..236: note = tr|A0A2P7AYZ9|A0A2P7AYZ9_9RHIZ 7-cyano-7-deazaguanine synthase OS=Phyllobacterium endophyticum OX=1149773 GN=queC PE=3 SV=1
MARSTDGALVLFSGGQDSATCLAWALSRFDRVETVGFDYGQRHRIELEVRSQFRGALRRTFSEWAERLGDDHLLDAGIIGQLGSTAMTQDIAIEMADNGLSNTFVPGRNLLFFTLAGALAYRRGLRVIVGGMCETDYSGYPDCRDDTLKAQQVALSLGLDRRMTIETPLMWLDKAETFALARDLGGQSLLNLIMEHTHTCYLGDRTQRHNWGYGCGTCPACELRANGWRKFKAEAA

SEQ ID NO: 40875 - protein, 236 aa, Phyllobacterium leguminum
  REGION 1..236: note = tr|A0A318T7Y4|A0A318T7Y4_9RHIZ 7-cyano-7-deazaguanine synthase OS=Phyllobacterium leguminum OX=314237 GN=queC PE=3 SV=1
MKTLVVCSGGLDSVSLAHKVAAEHELTGLISFDYGQRHLREIDFAASCAKRLGVAHHVIDIRPIGAHLTGSALTDDVDVPDGHYAEETMKTTIVPNRNAIMLAIAFGLAAAQKADAVAVAVHGGDHFIYPDCRPGFIEAFQAMQDEALDGYAKVRLFAPYVEISKAEIVSDGARHGTPFAESWSCYKGGENHCGRCGTCVERREAFHLAGIEDPTRYEDPDFWKTAVSQHAVREER

SEQ ID NO: 40876 - protein, 236 aa, Phyllobacterium myrsinacearum
  REGION 1..236: note = tr|A0A2S9JJD4|A0A2S9JJD4_9RHIZ 7-cyano-7-deazaguanine synthase OS=Phyllobacterium myrsinacearum OX=28101 GN=queC PE=3 SV=1
MARNADGALVLFSGGQDSATCLAWALSRFDRVETVGFDYGQRHRVELDVRNDFRAEVIRRFPDWAKRLGDDHRLDAGVIGQLGATAMTGDIAIEMAENGLPNTFVPGRNLLFFTLAAALAYRRGLRVIVGGMCETDYSGYPDCRDDTLKAQQVALSLGLDRRITIETPLMWLDKAETFALARDIGGEPLLDMIIENTHTCYLGDRSARHAWGYGCGTCPACTLRSGGWSKFKAEAA

SEQ ID NO: 40877 - protein, 232 aa, unidentified
  source 1..232: note = Phyllobacterium salinisoli
  REGION 1..232: note = tr|A0A368K252|A0A368K252_9RHIZ 7-cyano-7-deazaguanine synthase OS=Phyllobacterium salinisoli OX=1899321 GN=queC PE=3 SV=1
MKTLVICSGGLDSVSLAHKVAAEQELSGLLSFDYGQRHKKELDFAAACAARLKVLHQVIDINAIGRSLSGSALTDDLDVPDGHYAEETMRVTVVPNRNAIMLAIAFGVAASQKADAVATAVHGGDHFIYPDCRPGFIDAFQTMQLHALEGYADIRLYAPYVNISKADIVTDGVKHHTPFAETWSCYKGGERHCGRCGTCVERREAFHLAEIEDPTDYEDREYWREAIRNAGR

SEQ ID NO: 40878 - protein, 236 aa, unidentified
  source 1..236: note = Phyllobacterium sophorae
  REGION 1..236: note = tr|A0A2P7BKQ1|A0A2P7BKQ1_9RHIZ 7-cyano-7-deazaguanine synthase OS=Phyllobacterium sophorae OX=1520277 GN=queC PE=3 SV=1
MARNSDGALVLFSGGQDSATCLAWALSRFDRVETVGFDYGQRHRIELEVRGEFRSAITRQFPQWAARLGDDHLLDAGIVGQLGASAMTDDIAIEMADNGLPNTFVPGRNLLFFTLAGALAYRRGLRVIVGGMCETDYSGYPDCRDDTLKAQQVALSLGLDRRITIETPLMWLDKSETFALARELGGGPLLDLIVEHTHTCYLGDRSKRHAWGYGCGTCPACELRSAGWEKFRAEAV

SEQ ID NO: 40879 - protein, 213 aa, Phyllobacterium sp.
  REGION 1..213: note = tr|A0A2S9IIY6|A0A2S9IIY6_9RHIZ 7-cyano-7-deazaguanine synthase OS=Phyllobacterium sp. 1N-3 OX=2100534 GN=C5748_26770 PE=3 SV=1
MNSAVLLASGGLDSTTVAYGLAAAGIDVFPLFFDYGQHCADTEWDRVNEVLPRDMRRPERCDISDIFKGSSSRLIKEANLWEDKVADNDLYVPYRTMLFFAAAAARAQTLGILDVYTGFINSNHAKEIDCTEEFMNSMDGLIDNIGPVRFTSPFRFSSKTAVVEEALRRGVPIGRTFSCQAASDFPCGACPNCVERLHALQDAALVIPQAKVD

SEQ ID NO: 40880 - protein, 120 aa, Phyllobacterium sp.
  REGION 1..120: note = tr|J3HMG5|J3HMG5_9RHIZ 7-cyano-7-deazaguanine synthase (Fragment) OS=Phyllobacterium sp. YR531; OX = 1144343 GN=PMI41_03704 PE=3 SV=1
APLAYRRGLRVIIGGMCETDYSGYPDCRDDTLKAQQVALSLGLDRRITIETPLMWLDKAETFALAKELGGKPLLELIVENSHTCYLGDRSKRHDWGYGCGKCPACDLRSAGWQKFKAEAA

SEQ ID NO: 40881 - protein, 236 aa, unidentified
  source 1..236: note = Phyllobacterium zundukense
  REGION 1..236: note = tr|A0A2N9VWS2|A0A2N9VWS2_9RHIZ 7-cyano-7-deazaguanine synthase OS=Phyllobacterium zundukense OX=1867719 GN=queC PE=3 SV=1
MARNSDGALVLFSGGQDSATCLAWALSRFDRVETVGFDYGQRHRIELEVRGGFRNALAKQFPHWAARLGDDHMLDAGVVGQLGASAMTNDIAIEMAENGLPNTFVPGRNLLFFTLAGALAYRRGLRVIVGGMCETDYSGYPDCRDDTLKAQQVALSLGLDRRVTIETPLMWLDKAETFALAQDLGGEPLLDLIVENTHTCYLGDRSKRHAWGYGCGTCPACELRSAGWQKFKAEAL

SEQ ID NO: 40882 - protein, 231 aa, unidentified
  source 1..231: note = Phytobacter diazotrophicus
  REGION 1..231: note = tr|A0A4R4B3N6|A0A4R4B3N6_9GAMM 7-cyano-7-deazaguanine synthase OS=Phytobacter diazotrophicus OX=395631 GN=queC PE=3 SV=1
MKRAVVVFSGGQDSTTCLVQALQQYDEVHCVTFDYGQRHRAEIDVARELALQLGARAHKVLDVTLLNELAVSSLTRDSIPVPDYQPDASGIPNTFVPGRNILFLTLAAIYAYQVQAEAVITGVCETDFSGYPDCRDEFVKALNHAVTLGMAKDIRFETPLMWIDKAETWALADYWGKLELVRNETLTCYNGIKGDGCGQCAACNLRANGLSHYLADKTAVMATMKKKTGLK

SEQ ID NO: 40883 - protein, 231 aa, unidentified
  source 1..231: note = Phytobacter ursingii
  REGION 1..231: note = tr|A0A0G3QFB5|A0A0G3QFB5_9GAMM 7-cyano-7-deazaguanine synthase OS=Phytobacter ursingii; OX = 1972431 GN=queC PE=3 SV=1
MKRAVVVFSGGQDSTTCLIQALQQYDEVHCVTFDYGQRHRAEIDVARELVLQSGARAHKVLDVTLLNELAVSSLTRDSIPVPDYQPDASGIPNTFVPGRNILFLTLTAIYAYQVQAEAVITGVCETDFSGYPDCRDEFVKALNHAVNLGMAKDIRFETPLMWIDKAETWALADYWGKLELVRNETLTCYNGIKGDGCGHCAACNLRANGLRHYLADKAGVMAAMKKKTGLK

SEQ ID NO: 40884 - protein, 231 aa, unidentified; identical to SEQ ID NO: 38969
  source 1..231: note = Phytobacter ursingii
  REGION 1..231: note = tr|A0A508UD22|A0A508UD22_9GAMM 7-cyano-7-deazaguanine synthase OS=Phytobacter ursingii; OX = 1972431 GN=queC PE=3 SV=1

SEQ ID NO: 40885 - protein, 242 aa, unidentified
  source 1..242: note = Pigmentiphaga aceris
  REGION 1..242: note = tr|A0A5C0B1U8|A0A5C0B1U8_9BURK 7-cyano-7-deazaguanine synthase OS=Pigmentiphaga aceris; OX = 1940612 GN=queC PE=3 SV=1
MAEQNRHALVLFSGGQDSTTCLAWALERYDRVETIGFDYGQRHRVELDQRKVVLAQVRAQFPAWADRLGEDHMIDLAVLGQISDTALTSDAEIRMNADGLPNTFVPGRNLLFLTLAAALAYRRELNVLVGGMCETDFSGYPDCRDDTIKAMQVAISLGMGKRYTFETPLMWIDKHETWQLAQDLGGDALVEVIVEHSHTCYTGDRSERHDWGYGCGKCPACVLRRNGFAQWRAEQANLEAAQ

SEQ ID NO: 40886 - protein, 236 aa, Pigmentiphaga kullae
  REGION 1..236: note = tr|A0A4Q7NJG0|A0A4Q7NJG0_9BURK 7-cyano-7-deazaguanine synthase OS=Pigmentiphaga kullae; OX = 151784 GN=queC PE=3 SV=1
MDARKALVLFSGGQDSTTCLAWALDRYALVETVGFDYGQRHRVELDARRNVLREIRARFPDWSPRLGEDHAIDLSVLGALSDTALTRDTEIKLTDAGLPNTFVPGRNLVFLTMAAALAYRRGLEIVVGGMCETDFSGYPDCRDDTVKALQVAVSLGMGQRFTFETPLMWLDKAQTWQLAEDLGGDALVEVVAEHSHTCYLGDRSKRFDWGYGCGTCPACELRAAGYGRWRQAPGGE

SEQ ID NO: 40887 - protein, 236 aa, Pigmentiphaga sp.
  REGION 1..236: note = tr|A0A208Y9I9|A0A208Y9I9_9BURK 7-cyano-7-deazaguanine synthase OS=Pigmentiphaga sp. NML080357 OX=2008675 GN=queC PE=3 SV=1
MDSRKALVLFSGGQDSTTCLAWALDRYAAVETVGFDYGQRHRVELEARRNVLREMRARFPAWASRLGEDHAVDLSVLGAISDTALTRETEIRLTDAGLPNTFVPGRNLVFLTMASALAYRRGLDVVVGGMCETDFSGYPDCRDDTVKALQVAVSLGMGQRFTFETPLMWLDKAQTWQLAFDLGGGALVDIVAEHSHTCYLGDRSKRFEWGYGCGACPACELRAAGYGRWRQAPGGM

SEQ ID NO: 40888 - protein, 236 aa, Pigmentiphaga sp.
  REGION 1..236: note = tr|A0A3G8GGR4|A0A3G8GGR4_9BURK 7-cyano-7-deazaguanine synthase OS=Pigmentiphaga sp. H8; OX = 2488560 GN=queC PE=3 SV=1
MDARKALVLFSGGQDSTTCLAWALDRYARVETVGFDYGQRHRVELDARRNVLREVHARFPDWSPRLGEDHAIDLSVLGALSDTALTRDTEIRLTDAGLPNTFVPGRNLVFLTMAAALAYRRGLEVVVGGMCETDFSGYPDCRDDTVKALQVAVSLGMGQRFTFETPLMWLDKAQTWQLAQDLGGDALVEVVAEHSHTCYLGDRSKRFDWGYGCGTCPACELRAAGHARWRQVPGSV

SEQ ID NO: 40889 - protein, 232 aa, Pirellula sp.
  REGION 1..232: note = tr|A0A142XV23|A0A142XV23_9PLAN 7-cyano-7-deazaguanine synthase OS=Pirellula sp. SH-Sr6A; OX = 1632865 GN=queC PE=3 SV=1
MKNLKKPAVVLLSGGLDSATCMALAREQGFSLYAISFRYGQRHRVELEKAQAVASAFQAEKHVILDIDLGKLGGSALTDVSIDVPKHESVDEIGEDIPLTYVPARNTVFLSYALAWAEVLQSNDIFVGVNALDYSGYPDCRPEYIQAFETMANLATKRAVEGDRLTIHAPLIHWSKEEIVRKGLELGVDYSLTSSCYDPLPGGFACGHCDSCLLRERGFRLNGMQDPARQPL

SEQ ID NO: 40890 - protein, 236 aa, Pirellula staleyi
  REGION 1..236: note = tr|D2R400|D2R400_PIRSD 7-cyano-7-deazaguanine synthase OS=Pirellula staleyi (strain ATCC 27377 / DSM 6068 / ICPB 4128) OX=530564 GN=Psta_4201 PE=3 SV=1
MISQHSSTEIAVLMSGGLDSSILVGKFLREGRTVHPIYIRTGLFWQSGELPAVQAFLAAIATANLRPLKILELPLDDLYTDHWSLTGSGTPADDTPDEAVYLPGRNALLLVKAAVYCQLHGIGQLACAPLGSSPFEDASSEFFTEYQSAMNRGSSSPVVLLRPFGELHKEEVMRLGVGLPLELTFSCIHPVDGTHCGTCNKCFERKEAFRITGIEDKTVYTASRRTAVQVATKSTP

SEQ ID NO: 40891 - protein, 229 aa, Pirellula staleyi
  REGION 1..229: note = tr|D2R8A5|D2R8A5_PIRSD 7-cyano-7-deazaguanine synthase OS=Pirellula staleyi (strain ATCC 27377 / DSM 6068 / ICPB 4128) OX=530564 GN=queC PE=3 SV=1
MKTVAIFSGGLDSTVLAHELLAAGDEVLLLSIDYGQRHRKELVFAENFAKKQGLVWKLADLKSIAGLLGGNSQTSSAVAVPHGHYAEENMKLTVVPNRNMIMLAVAGGWAVSEKADRLAYGAHAGDHTIYPDCRPEFVRAMAAALELCDWHKLAMFTPFVSRSKADIVRRGAELGVDFAATWSCYEGGEIHCGQCGTCYERREAFERAGVADPTHYAVRAKYAEPPNFS

SEQ ID NO: 40892 - protein, 172 aa, unidentified
  source 1..172: note = Piscirickettsia litoralis
  REGION 1..172: note = tr|A0A1E3GB73|A0A1E3GB73_9GAMM 7-cyano-7-deazaguanine synthase OS=Piscirickettsia litoralis OX=1891921 GN=BGC07_03985 PE=3 SV=1
MQRKAVVLLSGGVHSSLCLHLARSQGYMPYALSLDIPKRSFQLESAQQVAQEVVVAEHQVVAMNENSLSESKELTYYSSLLSFAVNWAQTLSAQDIFIGIHPGEAHSLEFMMEWLQSYQELVNLTATTGIRIQTPLLFMSDKKRAQTAKQFDLTLPMSIQPKKKKFMERIFS

SEQ ID NO: 40893 - protein, 225 aa, unidentified
  source 1..225: note = Piscirickettsia litoralis
  REGION 1..225: note = tr|A0A1E3GE02|A0A1E3GE02_9GAMM 7-cyano-7-deazaguanine synthase OS=Piscirickettsia litoralis OX=1891921 GN=queC PE=3 SV=1
MTKKAVVLASGGLDSTTCIALAKSQGFEVYAMSFDYGQQHNAELDAVKRIVKKMAVKQHEIIKFSMDGIAQGSALTNSEIEVPDYQGDGEIPVTYVPARNTIFLSMALGWAEVLGAQDIFIGVSEVDYSGYPDCRPEYIEAFANMANLATKAGVEGNKLNIHAPLSHLSKAETIQLGLKLGVDYRLTVSCYRADHEGRACGQCDSCAYRKKGFIEAGVEDPTPYY

SEQ ID NO: 40894 - protein, 176 aa, Piscirickettsia salmonis
  REGION 1..176: note = tr|A0A0K2L2F8|A0A0K2L2F8_PISSA 7-cyano-7-deazaguanine synthase OS=Piscirickettsia salmonis OX=1238 GN=KU39_1079 PE=3 SV=1
MQRKAIVLLSGGGYSSLCLYLARSQGYLPYALSLDIPKRHFQLDSAQQFARDVGVAEHQVIAMNENSLSDSKALTYYSSLLSFAVNWAQELSAQDIFIGLHPSAEHTLEYMVEWLQSYQELINLSSTTAIRIQTPLLFMSDKKREQTAEQFNLKLPEPVSKLKSKKKKFIQRIFSE

SEQ ID NO: 40895 - protein, 228 aa, Piscirickettsia salmonis
  REGION 1..228: note = tr|A0A0K2DXS1|A0A0K2DXS1_PISSA 7-cyano-7-deazaguanine synthase OS=Piscirickettsia salmonis OX=1238 GN=queC PE=3 SV=1
MTNSVKKAVVLASGGLDSTTCIALAQSQGFDVYAMSFDYGQQHTAELDAVKRLVGAMGVKQHEVVKLTMGGVAKGSALTNHNIDVPDYKGDGEIPVTYVPARNTIFLSMALGWAEVLGSQDIFIGVSEVDYSGYPDCRPEYIEAFAKMANLATKVGTQGNKLNIHAPLSHLSKAQTIHAGLKLGVDYSLTVSCYRADHTGRACGQCDSCTYRKKGFIEAGVTDPTLYY

SEQ ID NO: 40896 - protein, 155 aa, unidentified
  source 1..155: note = Piscirickettsiaceae bacterium
  REGION 1..155: note = tr|A0A2A4SHQ3|A0A2A4SHQ3_9GAMM 7-cyano-7-deazaguanine synthase (Fragment); OS = Piscirickettsiaceae bacterium OX=2030828 GN=queC PE=3; SV = 1
MTSKIAVVLVSGGLDSVTVLAIAKQQGYQCYALSFDYGQRHSSELEAASKLAKYYDVVEHKTIKLGMGEFGGSALTDTLIDVPIEKTQGIPVTYVPARNTVFLSIALGWAEIVGAKDIFIGVNAVDYSGYPDCRPEFISAFEALANLATKVGVEE

SEQ ID NO: 40897 - protein, 224 aa, unidentified
  source 1..224: note = Piscirickettsiaceae bacterium
  REGION 1..224: note = tr|A0A2A4PM23|A0A2A4PM23_9GAMM 7-cyano-7-deazaguanine synthase OS=Piscirickettsiaceae bacterium OX=2030828 GN=queC PE=3 SV=1
MTTKRAVVLVSGGLDSATVLAMANTQGYECYALSFDYGQRHSSELEAASKLVKQSNVAEHKTIILGMGEFGGSALTDDNIDVPTEKSQGIPITYVPARNTVFLSIALGWAEVIEAKDIFIGVNAVDYSGYPDCRPEFISAFEKLANLATKVGVEEGGIRIHTPLIHLTKAQIIQKGHALNVDYSQTVSCYQANAKGEACGECESCQLRQQGFTKAKIADPTIYQ

SEQ ID NO: 40898 - protein, 235 aa, unidentified
  source 1..235: note = Planctomicrobium piriforme
  REGION 1..235: note = tr|A0A1I3D986|A0A1I3D986_9PLAN 7-cyano-7-deazaguanine synthase OS=Planctomicrobium piriforme OX=1576369 GN=queC PE=3 SV=1
MSSNLETTPRAVVLVSGGLDSATTLAIARHSGFDCYALSFDYGQRHRHELEAAKRVCSTIGVSEHAVVPLDLRQFGGSALTSEIAVPKDRDEKTMSAGIPVTYVPARNTVFLSIALAWAEVLGAFDLFIGVNAVDYSGYPDCRPEFIDRFERLANVATKAGVEGAGLFQIHTPLILLKKTEIIAKGIELGVDFGLTHSCYDPFPDGTPCGHCDSCKLRLAGFAEAGLADPLVYAS

SEQ ID NO: 40899 - protein, 396 aa, Planctomyces bekefii
  REGION 1..396: note = tr|A0A5C6M5P1|A0A5C6M5P1_9PLAN 7-cyano-7-deazaguanine synthase OS=Planctomyces bekefii; OX = 1653850 GN=E3A20_13340 PE=3 SV=1
MCSILGGTKFNKKALEIYNNAKSRGKDFSGLIEYKGNWICNHRATPTNEIQYAESNQPFSYNGNIIVHNGTISNDKELGNKDGEIDSKIIAKIVETESLEKFRDSLLKLKGSYAIGCITSKGEIFLACNYKPLFYKKHKGEYYFSSLKEHLGKCKRVKPYSCINLKTNEKLEIKRYQPNNALIVCSGGLDSTSLIGYALKNHNKVTLLHFDYGCKATTKEIEAIKKIAEKLKIPYIIQKLNYNSMQGESPLFKEEKITNGIDGVEYAIEWVYARNLIMLSNAVGYAEANDYGYVYLGNNLEESGAYPDNEEQFILDFNKVLWGAVNNGYKVEIKMPLGNLMKKEIVQFGIDNNSPIELSWSCYNNEKHHCGECAPCYMRKKAFERSSNIDKTKYLK

SEQ ID NO: 40900 - protein, 225 aa, Planctomyces sp.
  REGION 1..225: note = tr|A0A142YGX9|A0A142YGX9_9PLAN 7-cyano-7-deazaguanine synthase OS=Planctomyces sp. SH-PL62 OX=1636152 GN=queC_2 PE=3 SV=1
MREDDTRTAAVLISGGIESAVLCATMLDEHPRVQPIYIRCGLRWEEVELASARAFLAAVARPGLARLVVLDEPIRDVYGPHWSTDGPEVPGAETPDEAVYLPGRNLLLTVKSALWCRLRGVATLTLGSLGSNPFPDSTDEFFRDLESVVGRALSGSPRLIRPFARLHKADVIRRGAGLPLHLTFSCIRPVAGLHCGLCNKCAERRDGFRDAEVPDRTRYAEPDRA

SEQ ID NO: 40901 - protein, 230 aa, Planctomyces sp.
  REGION 1..230: note = tr|A0A2E3GXM1|A0A2E3GXM1_9PLAN 7-cyano-7-deazaguanine synthase OS=Planctomyces sp.; OX = 37635 GN=queC PE=3 SV=1
MNAPRKAVVLLSGGLDSSTTLAIAREQGFELWAISFDYGQKHRFELDAARRLAQAFDVKKHVIVKIDLGAFGGSALTSDIEVPKDRSTDQMEAAIPITYVPARNTVFLSTALGWAETLDCSDLFIGVNAVDYSGYPDCRPEFVEAFARLANLATKTGVEGTADWKVHAPLIDLTKAEIIRKGTALGVDYAMTHTCYDPNEAGLACGHCDACQLRLQGFEQAGLSDPAAYQ

SEQ ID NO: 40902 - protein, 246 aa, unidentified
  source 1..246: note = Planctomycetaceae bacterium
  REGION 1..246: note = tr|A0A2E3X5D7|A0A2E3X5D7_9PLAN 7-cyano-7-deazaguanine synthase OS=Planctomycetaceae bacterium OX=2026779 GN=queC PE=3 SV=1
MNKASRKGEAIVLLSGGLDSATAAAWAVAEGYSVTAISFDYGQRHRIELQAAQAVANALGISDHVNLTIDLATFGGSALVDQSIAVPKNRSDDVISNGIPVTYVPARNTVFLSLALALAETRNASSLILGVNSIDYSGYPDCRPEFLHAFESLANLATKSGVEGTRFTIQAPLVSLTKPEIIRLGLSLNVDYGLTTSCYDPQDNGRPCGECDSCLIRAAGFAAVNIPDPRVTAFMAPKETNCGSDC

SEQ ID NO: 40903 - protein, 232 aa, unidentified
  source 1..232: note = Planctomycetaceae bacterium
  REGION 1..232: note = tr|A0A177PZN3|A0A177PZN3_9PLAN 7-cyano-7-deazaguanine synthase OS=Planctomycetaceae bacterium SCGC AG-212-D15 OX=1799653 GN=AYO40_04245 PE=3; SV = 1
MLKREANSTSAAPLAVLVSGGLDSAILLGEAIQQRPAVFPLYVRSGMAWESVEFEHLQRYLQALACPVLRPLHALELPVTDVYDREHWSLSGAGVPDAHTKDEAVFLPGRNVLLLSKALIWCHLRGVPELAMAPLGSNPFPDATPAFFASFVEVVNRAVDGDVRLWLPYASLHKAEVMQRGRGLPLEMTFSCIRPRGGRHCGECNKCAERRQAFADAGMQDPTPYAEAPPEP

SEQ ID NO: 40904 - protein, 252 aa, unidentified
  source 1..252: note = Planctomycetales bacterium
  REGION 1..252: note = tr|A0A1V4QQU1|A0A1V4QQU1_9BACT 7-cyano-7-deazaguanine synthase OS=Planctomycetales bacterium 4484_123 OX=1956162 GN=queC PE=3 SV=1
MQAETTRLAVVLLSGGVDSATTLAVAQDRGFACHALTFDYGQRHRFELDAARRVAEALGVVEHRIVRIDLSADGGFGRSALTDDIAVPKDRPGLPDGADDSADARSARRGERPAIPPTYVPARNTIFLSIALGYAEVIGSFDIFIGVNAIDYSGYPDCRGQFVEAFQRLANLATAAAVEGRGVFCIHAPLIDMTKGQIIRTGLALGVDYSLTHSCYDPAGDGSACGRCDACRLRLAGFAEAGAEDPARYQEG

SEQ ID NO: 40905 - protein, 233 aa, unidentified
  source 1..233: note = Planctomycetales bacterium
  REGION 1..233: note = tr|A0A354GU90|A0A354GU90_9BACT 7-cyano-7-deazaguanine synthase OS=Planctomycetales bacterium OX=2053591 GN=queC PE=3 SV=1
MDKSSLPAVVLLSGGLDSAVALAVARRDGFRCHALTIAYGQRHAVELDAARRVAAALGAVEQRVFSLDLRAFGGSALTADLDVPRDRNAEEMNSGIPITYVPARNTVFLSLALAWAETLGAFDLYIGVNAVDYSGYPDCRPEFTFAFEQLANLATKAGVEKQGRFHIHTPLVHLSKGEIIHLGLTLGVDFGLTHSCYDPAPDGAACGRCDSCRIRRDGFVAAGVPDPTRYALG

SEQ ID NO: 40906 - protein, 231 aa, unidentified; identical to SEQ ID NO: 40869
  source 1..231: note = Planctomycetes bacterium
  REGION 1..231: note = tr|A0A1G2Y7K2|A0A1G2Y7K2_9BACT 7-cyano-7-deazaguanine synthase OS=Planctomycetes bacterium GWF2_42_9 OX=1801958 GN=queC PE=3 SV=1

SEQ ID NO: 40907 - protein, 249 aa, unidentified
  source 1..249: note = Planctomycetes bacterium
  REGION 1..249: note = tr|A0A518CH59|A0A518CH59_9BACT 7-cyano-7-deazaguanine synthase OS=Planctomycetes bacterium Pla110 OX=2528007 GN=queC PE=3 SV=1
MLANSLAPHLLLASFPMAASDKRAVVLVSGGLDSATVLAIARSQGYELFALSFRYGQRHSYELEAATNICSQFEVVRHETLDLDLRAFGGSALTAEIDVPKDRSEDEMSGGIPITYVPARNTIFLSIALGWAEVLKANDIFIGVNAVDYSGYPDCRPEFIKSFQQTANLATKTGVEGTDPFQIHTPLIDLTKAEIIHTGTKLGVDYSQTLSCYDPAPGGLACGHCDSCQLRRKGFADAGLPDPTKYVTA

SEQ ID NO: 40908 - protein, 227 aa, unidentified
  source 1..227: note = Planctomycetia bacterium
  REGION 1..227: note = tr|A0A257T8I1|A0A257T8I1_9BACT 7-cyano-7-deazaguanine synthase (Fragment); OS = Planctomycetia bacterium 21-64-5 OX=1970542; GN = B7Z73_17825 PE=3 SV=1
MSCNGRPSTIGVLASGGLDSSVLVAHLLDQGRRVQPIYIRFGSTWQEAEAAALRRFLAAVHGPLLQPLIVLEMPIGDLYGDHWSTTGRDVPGAETPDEAVYLPGRNLLLIVKAALWCQLNGIGQLALAPLRSNPFADATPAFFAEFEAVLNRAEGTGLSLLRPFAELGKRQVMQLGRAYPLHLTFSCIAPRRGLHCGACNKCAERQQAFRLIDQNDRTKYERPGVRR

SEQ ID NO: 40909 - protein, 228 aa, unidentified
  source 1..228: note = Planctomycetia bacterium
  REGION 1..228: note = tr|A0A3D3KM36|A0A3D3KM36_9BACT 7-cyano-7-deazaguanine synthase OS=Planctomycetia bacterium OX=2052181 GN=queC PE=3 SV=1
MKAGLAVVLLSGGMDSCVTAAIANESFELACLHVNYKQRTEARELRAFNDIASYYGVPKEKRLIIDMAYLGAIGGSSLTDTRIAVPTSTATANKVPSTYVPFRNTHLLMAAVSWAEVIGAEKVFIGAVEDDRIGYPDCRKEYYDIFNALVDAGTKPDTHITVETPLINMKKSDIVRMGMSLGAPFSLSWSCYQEKDRACGRCQSCLLRREAFNEAGYTDPIPYRTNSP

SEQ ID NO: 40910 - protein, 243 aa, unidentified
  source 1..243: note = Planctopirus ephydatiae
  REGION 1..243: note = tr|A0A518GQF6|A0A518GQF6_9PLAN 7-cyano-7-deazaguanine synthase OS=Planctopirus ephydatiae; OX = 2528019 GN=queC PE=3 SV=1
MALGNQEASAAPPQRMSPPCVVLVSGGLDSATILAMAKAQGFSPFAISFDYGQRHRFELEAAKRVCEAQGVARHVIIPLDLRSIGGSALTANIDVPKDRTDAELTSGIPITYVPARNTVFLSIALGWAEVIGAQDLFVGVNAVDYSGYPDCRPEFVAAFEKLANLATQTGVEGQPWKIHAPLIHLTKAEIIRQGVALGVDYSLTHSCYDPTSTGLSCGHCDSCLIRKKGFLEAHVPDPTRYAD

SEQ ID NO: 40911 - protein, 243 aa, unidentified
  source 1..243: note = Planctopirus hydrillae
  REGION 1..243: note = tr|A0A1C3EHP7|A0A1C3EHP7_9PLAN 7-cyano-7-deazaguanine synthase OS=Planctopirus hydrillae; OX = 1841610 GN=queC PE=3 SV=1
MVLGNQEATTSSPQKISPPCVVLVSGGLDSATILAMAKAQGFSPFAISFDYGQRHRFELEAAKKVCEAQGVARHVIIPLDLRSIGGSALTANIDVPKDRTDAELTSGIPITYVPARNTVFLSIALGWAEVIGAQDLFVGVNAVDYSGYPDCRPEFVAAFEKLANLATQTGVEGQPWKIHAPLIHLTKAEIIRQGVALGVDYSLTHSCYDPTSTGLSCGHCDSCLIRKKGFLEAHIPDPTRYAD

SEQ ID NO: 40912 - protein, 244 aa, unidentified
  source 1..244: note = Planctopirus limnophila
  REGION 1..244: note = tr|D5SXT5|D5SXT5_PLAL2 7-cyano-7-deazaguanine synthase OS=Planctopirus limnophila (strain ATCC 43296 / DSM 3776 / IFAM 1008 / 290) OX=521674 GN=queC PE=3 SV=1
MALDHQKASTAPPQKKISPPCVVLVSGGLDSATILAMAKAQGFSPFAISFDYGQRHRFELEAAEKVCQAQGVARHVVIPLDMRSIGGSALTANIDVPKDRSEAELTSGIPITYVPARNTVFLSIALGWAEVIGAQDLFVGVNAVDYSGYPDCRPEFVAAFEKLANLATQTGVEGQPWKIHAPLIHLTKAEIIRQGVALGVDYSLTHSCYDPTPTGLSCGHCDSCLIRKKGFLEAHIPDPTRYAD

SEQ ID NO: 40913 - protein, 230 aa, Planifilum fimeticola
  REGION 1..230: note = tr|A0A2T0LII4|A0A2T0LII4_9BACL 7-cyano-7-deazaguanine synthase OS=Planifilum fimeticola; OX = 201975 GN=queC PE=3 SV=1
MSDKAVVILSGGLDSTTCMAVAADEGFEIYALTFDYGQRHRREVDCARRVAEHFGAREHRIVQLDLLQHIGGSSLTDSRMEIPSGETGEEIPNTYVPGRNLIFLSLAASFAEVVGARAIFIGVSAVDYSGYPDCRPEFIEAVNRVLRVGTRAGTRSEPIEIRTPLIRLSKAETVKLGHRLGAPYHLTTSCYRGGERACGVCDSCRLRLKGFREAGIIDPIPYEERPADLS

SEQ ID NO: 40914 - protein, 230 aa, Planifilum fulgidum
  REGION 1..230: note = tr|A0A1I2M5P2|A0A1I2M5P2_9BACL 7-cyano-7-deazaguanine synthase OS=Planifilum fulgidum; OX = 201973 GN=queC PE=3 SV=1
MPDKAVVILSGGLDSTTCMAVAADEGFDIYALTFDYGQRHRREVDCARRVAAHFGAREHRIVNLDFLKQIGGSSLTDSRMDIPSGGAGDDIPNTYVPGRNLIFLSLAASFAEVIGARAIFIGVSAVDYSGYPDCRPQFIEAVNRVLRVGTRAGDRSEPIEIRTPLIHLSKAETIKLGHRLGAPYHLTTSCYRGGERACGECDSCRLRLKGFREAGIIDPIPYEKRPGDPS

SEQ ID NO: 40915 - protein, 224 aa, unidentified
  source 1..224: note = Planktothricoides sp.
  REGION 1..224: note = tr|A0A0M1JWN3|A0A0M1JWN3_9CYAN 7-cyano-7-deazaguanine synthase OS=Planktothricoides sp. SR001 OX=1705388 GN=queC PE=3 SV=1
MKAVILLSGGLDSSTVLYQAKADGCECYAISFDYQQRHRRELDSAAAIARVAGVVAHQVITFDLRQWGGSALTDDGIDLPEGRSLSEMASQIPVTYVPARNTIFLSFALAYAEAIAAERVYIGVNALDYSGYPDCRPDYIQAMQEVFRLGTKQGREGQAIAIISPLLELHKTEIIQLGNKLGVPWQHTWSCYAGEEKACGVCDSCQLRLAAFAELGLSDPLPYR

SEQ ID NO: 40916 - protein, 228 aa, Planktothrix agardhii
  REGION 1..228: note = tr|A0A2Z6CDV5|A0A2Z6CDV5_PLAAG 7-cyano-7-deazaguanine synthase OS=Planktothrix agardhii NIES-204 OX=282423 GN=queC PE=3 SV=1
MKAVILLSGGLDSSTVLYQAKADGCECYAISFDYQQRHSKELESARKIAEFAGVVEHQVVTFDLSLWGGSALTDNRLDLPQDRSTEIMAGSIPITYVPARNTIFLSFALAYAEAIAARKVYIGVNALDYSGYPDCRPDYIQAIEEVFRLGTKQGREGDPITIESPLIHLAKTEIIKLGNRLGVPWEFTWSCYAGEEKACGVCDSCRLRLAAFAELELIDPIAYIAGNR

SEQ ID NO: 40917 - protein, 228 aa, Planktothrix agardhii; identical to SEQ ID NO: 40916
  REGION 1..228: note = tr|A0A073CNH5|A0A073CNH5_PLAAG 7-cyano-7-deazaguanine synthase OS=Planktothrix agardhii NIVA-CYA 126/8 OX=388467 GN=exsB PE=3 SV=1

SEQ ID NO: 40918 - protein, 228 aa, unidentified
  source 1..228: note = Planktothrix rubescens
  REGION 1..228: note = tr|A0A1J1L5X7|A0A1J1L5X7_PLARU 7-cyano-7-deazaguanine synthase OS=Planktothrix rubescens; OX = 59512 GN=queC PE=3 SV=1
MKAVILLSGGLDSSTVLYQAKADGCECYAISFDYQQRHRKELESARKIAEFAGVVEHQVVTFDLSLWGGSALTDNRLDLPQDRSPETMAGSIPITYVPARNTIFLSFALAYAEAIAARKVYIGVNVLDYSGYPDCRPDYIQAIEEVFRLGTKQGREGDPITIESPLIHLAKTEIIKLGNRLGVPWEFTWSCYAGEEQACGVCDSCRLRLAAFAELELIDPIAYIAGNG

SEQ ID NO: 40919 - protein, 478 aa, unidentified
  source 1..478: note = Planktothrix rubescens
  REGION 1..478: note = tr|A0A1J1L4B3|A0A1J1L4B3_PLARU Uncharacterized protein OS=Planktothrix rubescens OX=59512 GN=PLAN41139; PE = 4 SV=1
MKKHYTYDSDYTLHFDSILNSNGKVRFIDHSSGKESTIGITVDDQDFKYRVWQEFPSIIADLIDLAVAIQASDRLVLQHLHQEQRHIFVVLPVRHPELLNTSIFHAKLENLLEWTTGSRWSFDFQKRTTLDRTIEKQQILPIVPEGCEVALWSGGLDALAGLYTRLQASDTEPFMLFGTGSNHNTHDLQQKVFKALNPYFPNRLNLCRVPIHFSDSKQHRKNKISRARGVVFTLLGSACAYLMGQKELFVYENGIGAINLPYRKSAVGLDHTRSVHPLTLIMVSDIVSELLGQEFRIKNPFLFWTKAQMCKALAEDDRNNLVSLTVSCDSPHRKKQIFQCGYCSSCLLRRQAIAASNMNDQTRYVVLHGEKPAGDPSLYLQNMLEQVTMLKKLLNNSTNPNLQWQNLTKRFLELEDIVDQSSESENLLPFQMQQRLIQLYQTYLSEWDAVEPQISVGMLDQENNHQISDQRLVTVQSS

SEQ ID NO: 40920 - protein, 226 aa, Planktothrix sp.
  REGION 1..226: note = tr|A0A3C1RPQ0|A0A3C1RPQ0_9CYAN 7-cyano-7-deazaguanine synthase OS=Planktothrix sp. UBA8407 OX=2055758 GN=queC PE=3 SV=1
MKAVILLSGGLDSSTVLYQAKADGCECYAISFDYQQRHRNELESARQIAESAGVVEHQIVSFDLSLWGGSALTDNRLDLPQNRTIEKMDESIPITYVPARNTIFLSFALAYAETIAASKIYLGVNALDYSGYPDCRPDYIQAMEEVFRLGTKQGREGDPITIESPLIHLKKTEIIKLGNRLGVPWGLTWSCYAGEEKACGICDSCRLRLTAFAELELTDPISYIDR

SEQ ID NO: 40921 - protein, 226 aa, Planktothrix sp.; identical to SEQ ID NO: 40920
  REGION 1..226: note = tr|A0A354WDL0|A0A354WDL0_9CYAN 7-cyano-7-deazaguanine synthase OS=Planktothrix sp. UBA10369 OX=2055760 GN=queC PE=3 SV=1

SEQ ID NO: 40922 - protein, 226 aa, unidentified
  source 1..226: note = Planktothrix tepida
  REGION 1..226: note = tr|A0A1J1LLA3|A0A1J1LLA3_9CYAN 7-cyano-7-deazaguanine synthase OS=Planktothrix tepida PCC 9214 OX=671072 GN=queC PE=3 SV=1
MKAVILLSGGLDSSTVLYQAKADGCECYAISFDYQQRHRKELESARKIAECAGVIERQVVTFDLTLWGGSALTDNHLDLPQDRSIEKMAESIPVTYVPARNTIFLSFALAYAEAIVASRVYIGVNALDYSGYPDCRPDYIQSMEEVFRLGTKQGREGNPITIESPLIHLKKTEIIQLGNHLGVPWEFTWSCYAGQTKACGTCDSCRLRLAAFSELGLTDPIPYIKS

SEQ ID NO: 40923 - protein, 221 aa, Planococcus antarcticus
  REGION 1..221: note = tr|A0A1C7DIT2|A0A1C7DIT2_9BACL 7-cyano-7-deazaguanine synthase OS=Planococcus antarcticus DSM 14505 OX=1185653 GN=queC PE=3 SV=1
MKNEKAVVVFSGGQDSTTCLFWAIMNFKEVATVTFDYGQRHSAEIECARKIAEELGVSFKVLDMSLINQLSANALTRDDIAITAEEDGLPSTFVPGRNHLFLSFAAVYADAIGSRHLITGVSQTDFSGYPDCRDTFIRSLNVTLNLAMDKQFIIHTPLMWLDKADVWELSDTLGALDFVQEKTLTCYNGIPSTGCGECPACKLRNEGLARYKSKKMAGAVE

SEQ ID NO: 40924 - protein, 220 aa, Planococcus citreus
  REGION 1..220: note = tr|A0A497YJA6|A0A497YJA6_9BACL 7-cyano-7-deazaguanine synthase OS=Planococcus citreus; OX = 1373 GN=queC PE=3 SV=1
MKNEKAVVVFSGGQDSTTCLFWALEQFSEVLAVTFDYGQRHAQEIDHAKRIAETLGVTLQVLDMGLINQLSANALTRDSIEVEEQKDGPPSTFVPGRNLLFLSFAAIYADAFGARHLVTGVSETDFSGYPDCRDTFIRSLNVTLNLSMDKQFVIHTPLMWLDKAGVWELSDELGAFEFVQTETLTCYHGIPAAGCGTCPSCVLRNQGLQTYLSKKEGAKF

SEQ ID NO: 40925 - protein, 221 aa, Planococcus donghaensis
  REGION 1..221: note = tr|A0A1C7EJ83|A0A1C7EJ83_9BACL 7-cyano-7-deazaguanine synthase OS=Planococcus donghaensis; OX = 414778 GN=queC PE=3 SV=1
MKNEKAVVVFSGGQDSTTCLFWAIKNFKEVATVTFDYGQRHSAEIECARKIADELGVLFKVLDMTLINQLSANALTRDDIDVTAEEGELPSTFVPGRNLLFLSFAAVFADAIGSRHLITGVSQTDFSGYPDCRDTFIRSLNVTLNLAMDKQFIIHTPLMWLDKADVWELSDTLGALDFVQEKTLTCYNGIPSTGCGECPACQLRNEGLARYQAKKSAGAMT

SEQ ID NO: 40926 - protein, 221 aa, Planococcus donghaensis
  REGION 1..221: note = tr|E7RE93|E7RE93_9BACL 7-cyano-7-deazaguanine synthase OS=Planococcus donghaensis MPA1U2 OX=933115; GN = queC PE=3 SV=1
MKNEKAVVVFSGGQDSTTCLFWAIKNFKEVATVTFDYGQRHSAEIECARKIADELGVLFKVLDMTLINQLSANALTRDDIEVTAEEGELPSTFVPGRNLLFLSFAAVYADAIGSRHLITGVSQTDFSGYPDCRDTFIRSLNVTLNLSMDKQFIIHTPLMWLDKADVWELSDTLGALDFVQEKTLTCYNGIPSTGCGECPACQLRNEGLARYQAKKSAGAMT

SEQ ID NO: 40927 - protein, 221 aa, unidentified
  source 1..221: note = Planococcus halocryophilus
  REGION 1..221: note = tr|A0A1C7DMI5|A0A1C7DMI5_9BACL 7-cyano-7-deazaguanine synthase OS=Planococcus halocryophilus OX=1215089 GN=queC PE=3 SV=1
MKNEKAVVVFSGGQDSTTCLFWAIKNFKEVATVTFDYGQRHSAEIECARKIADELGVLFKVLDMTLINQLSANALTRDDIEVTAEEGELPSTFVPGRNLLFLSFAAVYADAIGSRHLITGVSQTDFSGYPDCRDTFIRSLNVTLNLAMDKQFIIHTPLMWLDKADVWELSDTLGALDFVQEKTLTCYNGIPSTGCGECPACQLRTDGLARYQAKKMAGANT

SEQ ID NO: 40928 - protein, 221 aa, unidentified
  source 1..221: note = Planococcus halotolerans
  REGION 1..221: note = tr|A0A365L6N8|A0A365L6N8_9BACL 7-cyano-7-deazaguanine synthase OS=Planococcus halotolerans OX=2233542 GN=queC PE=3 SV=1
MKNEKAVVVFSGGQDSTTCLFWALSKFKEVTTITFDYGQRHAVEIEHAQKIAEELNVPFKVLDMQLINQLSANALTRNEIPINEEEGELPSTFVPGRNHLFLSFAAVYAQTIGAQHIITGVSETDFSGYPDCRDTFIKSLNVTLNLAMDAQFVLHTPLMWRDKKQVWELADRFGALEFVQEKTVTCYNGVPSSGCGECPACQLRNDGLEAYLAAKSGGAVK

SEQ ID NO: 40929 - protein, 221 aa, Planococcus kocurii
  REGION 1..221: note = tr|A0A0U2NBN1|A0A0U2NBN1_9BACL 7-cyano-7-deazaguanine synthase OS=Planococcus kocurii; OX = 1374 GN=queC PE=3 SV=1
MKKEKAVVVFSGGQDSTTCLFWAIKNFKEVATVTFDYGQRHSAEIECARKIAEELGVSFKVLDMTLINQLSANALTRDDIDVTAEDGELPSTFVPGRNHLFLSFAAVYADAIGCQHLITGVSQTDFSGYPDCRDTFIRSLNVTLNLAMDKQFIIHTPLMWLDKTEVWELSDTLGAFEFIQDKTLTCYNGIPSTGCGECPACKLRNDGLARYQDKKMAGVRA

SEQ ID NO: 40930 - protein, 220 aa, Planococcus maitriensis
  REGION 1..220: note = tr|A0A365K2H9|A0A365K2H9_9BACL 7-cyano-7-deazaguanine synthase OS=Planococcus maitriensis; OX = 221799 GN=queC PE=3 SV=1
MKNEKAVVVFSGGQDSTTCLFWALGEFSEVLAVTFDYGQRHAQEIGHARRIAETLGVSLQVLDMGLINQLSANALTRKSIDVEEQEDGPPSTFVPGRNLLFLSFAAIYADAFGARHLVTGVSETDFSGYPDCRDTFIRSLNVTLNLSMDKQFVIHTPLMWLDKAGVWELSDKLGAFEFVQNETLTCYHGIPAAGCGTCPACALRNEGLQTYLSKKEGAKS

SEQ ID NO: 40931 - protein, 220 aa, Planococcus maritimus
  REGION 1..220: note = tr|A0A150W5E9|A0A150W5E9_PLAMR 7-cyano-7-deazaguanine synthase OS=Planococcus maritimus; OX = 192421 GN=queC PE=3 SV=1
MKNEKAVVVFSGGQDSTTCLFWALEQFSEVLAVTFDYGQRHVQEIEHAKHIAETLGVTLQVLDMGLINQLSANALTRDSIEVKEQSDGLPSTFVPGRNLLFLSFAAIYADAFGARHLVTGVSETDFSGYPDCRDTFIRSLNVTLNLSMDKQFVIHTPLMWLDKAGVWELSDQLGAFDFVQKETLTCYHGIPAEGCGTCPSCKLRNEGLQTYLSQKAGAKS

SEQ ID NO: 40932 - protein, 220 aa, Planococcus maritimus
  REGION 1..220: note = tr|A0A1C7DZL8|A0A1C7DZL8_PLAMR 7-cyano-7-deazaguanine synthase OS=Planococcus maritimus; OX = 192421 GN=queC PE=3 SV=1
MKNEKAVVVFSGGQDSTTCLFWALEQFSEVLAVTFDYGQRHVQEIEHAKHIAETLGVTLQVLDMGLINQLSANALTRDSIEVEEQSDGLPSTFVPGRNLLFLSFAAIYADAFGARHLITGVSETDFSGYPDCRDTFIRSLNVTLNLSMDKQFVIHTPLMWLDKAGVWELSDQLGAFDFVQKETLTCYHGIPAEGCGTCPSCRLRNEGLQTYLSQKAGAKS

SEQ ID NO: 40933 - protein, 220 aa, Planococcus plakortidis
  REGION 1..220: note = tr|A0A1C7E5U4|A0A1C7E5U4_9BACL 7-cyano-7-deazaguanine synthase OS=Planococcus plakortidis; OX = 1038856 GN=queC PE=3 SV=1
MKNEKAVVVFSGGQDSTTCLFWALEQFSEVLAVTFDYGQRHAQEIDHAKRIAEKLGVSLQVLDMGLINQLSANALTRDSIKVEEQQDGPPSTFVPGRNLLFLSFAAIYADAFGARHLVTGVSETDFSGYPDCRDTFIRSLNVSLNLSMDKQFVIHTPLMWLDKAGVWALSDELGAFDFVQDETLTCYHGIPASGCGTCPSCVLRNEGLQTYLSQKAGANS

SEQ ID NO: 40934 - protein, 220 aa, Planococcus rifietoensis
  REGION 1..220: note = tr|A0A0U2P9A9|A0A0U2P9A9_9BACL 7-cyano-7-deazaguanine synthase OS=Planococcus rifietoensis OX=200991 GN=queC PE=3 SV=1
MKNEKAVVVFSGGQDSTTCLFWALEQFSEVLAVTFDYGQRHSQEIDHAKRIAETLGVTLQVLDMGLINQLSANALTRDSIEVEEQKDGPPSTFVPGRNLLFLSFAAIYADAFGARHLVTGVSETDFSGYPDCRDTFIRSLNVTLNLSMDKQFVIHTPLMWLDKAGVWELSDELGAFEFVQTETLTCYHGIPAAGCGTCPSCVLRNQGLQTYLAKKEGAKS

SEQ ID NO: 40935 - protein, 221 aa, unidentified
  source 1..221: note = Planococcus salinus
  REGION 1..221: note = tr|A0A3M8PCE7|A0A3M8PCE7_9BACL 7-cyano-7-deazaguanine synthase OS=Planococcus salinus; OX = 1848460 GN=queC PE=3 SV=1
MKNEKAVVVFSGGQDSTTCLFWALENFGEVRAVTFDYGQRHSKEIECARKIAVELNVPFKVLDMTLINQLSANALTRDHIEVKTEEGGLPSTFVPGRNLLFLSFAAVYADAFGARHLITGVSETDFSGYPDCRDTFIKSLNVSLNLAMDKQFAIHTPLMWRDKAQVWELSDELGALDFVQEKTLTCYNGIPSTGCGECPACTLRNEGLAKYLTGKSAGAAK

SEQ ID NO: 40936 - protein, 221 aa, Planococcus sp.
  REGION 1..221: note = tr|A0A5C5T5A1|A0A5C5T5A1_9BACL 7-cyano-7-deazaguanine synthase OS=Planococcus sp. CPCC 101016 OX=2599617 GN=queC PE=3 SV=1
MKNEKAVVVFSGGQDSTTCLFWAIKNFKEVATVTFDYGQRHSAEIECARKIADELGVSFKVLDMTLINQLSANALTRDDIEVTAEEGALPSTFVPGRNHLFLSFAAVYADAIGSRHLITGVSQTDFSGYPDCRDTFIRSLNVTLNLAMDKQFIIHTPLMWLDKADVWELSDTLGALDFVQEKTLTCYNGIPSTGCGECPACLLRNEGLARYKAKKLAGAVE

SEQ ID NO: 40937 - protein, 221 aa, Planococcus sp.; identical to SEQ ID NO: 40929
  REGION 1..221: note = tr|A0A5B0CW67|A0A5B0CW67_9BACL 7-cyano-7-deazaguanine synthase OS=Planococcus sp. ANT_H30; OX = 2597347 GN=queC PE=3 SV=1

SEQ ID NO: 40938 - protein, 362 aa, Planomicrobium glaciei; identical to SEQ ID NO: 24083
  REGION 1..362: note = tr|A0A518XPQ4|A0A518XPQ4_9BACL 7-cyano-7-deazaguanine synthase OS=Planomicrobium glaciei; OX = 459472 GN=queC PE=3 SV=1

SEQ ID NO: 40939 - protein, 221 aa, Planomicrobium glaciei
  REGION 1..221: note = tr|A0A1G8GVY5|A0A1G8GVY5_9BACL 7-cyano-7-deazaguanine synthase OS=Planomicrobium glaciei; OX = 459472 GN=queC PE=3 SV=1
MKNEKAVVVFSGGQDSTTCLFWALKNFKEVATVTFDYGQRHSAEIECARKIAEELGVSFKVLDMTLINQLSANALTRDDIEVTATEGELPSTFVPGRNHLFLSFAAVYADAIGARHLITGVSETDFSGYPDCRDTFIKSLNVSLNLAMDKQFVIHTPLMWLDKSEVWELSDQLDALDFVQEKTLTCYNGIPSSGCGECPSCILRNEGLSAYKAKKAAGAHL

SEQ ID NO: 40940 - protein, 221 aa, unidentified
  source 1..221: note = Planomicrobium soli
  REGION 1..221: note = tr|A0A2P8GAP5|A0A2P8GAP5_9BACL 7-cyano-7-deazaguanine synthase OS=Planomicrobium soli; OX = 1176648 GN=queC PE=3 SV=1
MKNEKAVVVFSGGQDSTTCLFWALQNFGEVATVTFDYGQRHSAEIEVARKIADELGVKFKVLDMTLINQLSANALTRADIDITAKEGELPSTFVPGRNLLFLSFAAVYADAIGSRHLITGVSETDFSGYPDCRDTFIRSLNVSLNLAMDKQFIIHTPLMWLDKAGVWELSDGLGALEFVQEKTLTCYEGIPSTGCGECPSCKLRNEGLKTYLVQKAAGAVE

SEQ ID NO: 40941 - protein, 221 aa, Planomicrobium sp.
  REGION 1..221: note = tr|A0A3L7JHT5|A0A3L7JHT5_9BACL 7-cyano-7-deazaguanine synthase OS=Planomicrobium sp. Y74; OX = 2478977 GN=queC PE=3 SV=1
MKNEKAVVVFSGGQDSTTCLFWALSKFKEVSTITFDYGQRHAVEIEHAQKIAEELDVPFKVLDMQLINQLSANALTREEIPINEEEGELPSTFVPGRNHLFLSFAAVYAQTVGAQHIVTGVSETDFSGYPDCRDTFIKSLNVSLNLAMDAQFVIHTPLMWRDKKQVWELADRFGALEFVQEKTVTCYNGVPSSGCGECPACQLRNDGLEAYLAAKSGGAVK

SEQ ID NO: 40942 - protein, 221 aa, Planomicrobium sp.
  REGION 1..221: note = tr|A0A5C5ULA8|A0A5C5ULA8_9BACL 7-cyano-7-deazaguanine synthase OS=Planomicrobium sp. CPCC 101110 OX=2599619 GN=queC PE=3 SV=1
MKNEKAVVVFSGGQDSTTCLFWALQNFGEVATVTFDYGQRHSAEIEVARKIADELGVKFKVLDMTLINQLSANALTRDDIDITAEEGELPSTFVPGRNLLFLSFAAVYADAIGSRHLITGVSETDFSGYPDCRDTFIRSLNVSLNLAMDKQFIIHTPLMWLDKAGVWELSDELGALEFVQEKTLTCYEGIPSTGCGECPSCKLRNEGLKTYLEQKTAGAVE

SEQ ID NO: 40943 - protein, 219 aa, Planomonospora sphaerica
  REGION 1..219: note = tr|A0A171DIQ7|A0A171DIQ7_9ACTN 7-cyano-7-deazaguanine synthase OS=Planomonospora sphaerica OX=161355 GN=PS9374_04436 PE=3 SV=1
MTTENRAVALLSGGPDSVVAAALARESGYRIYGLYINYGQRTGKRDFRQAERTAQWLGVEELRVAYCPFLGKVGGSPLTDLSLRLGDDNRSSEYVPFRNTVFCSLAVAWAEILGAQKVVIGSIGGPWITPDNKPSYFAALNALIQEGSRSEIQAWAPLGAMSKAEVVSVGTRLGVPFGLTWSCQNDEEEPCGECNNCRDRAVGFAGNNLADPLLARTPR

SEQ ID NO: 40944 - protein, 212 aa, Plantibacter flavus
  REGION 1..212: note = tr|A0A4U3FP36|A0A4U3FP36_9MICO 7-cyano-7-deazaguanine synthase OS=Plantibacter flavus; OX = 150123 GN=PlfCFBP13513_17100 PE=3 SV=1
MVHAERSVLLFSGGLDSTALAAIYRPALLLFIDYGQRPADLERRSARRVAEVLSLPLAEESLGIQAFGSGLLQTESGAQLDAAPSPEWWPYRNQFLATAGAAVALREELSAVLLGSVAPDGERHLDGTPEFYRRLNALMHFQEGAVEVLAPAINRTTEELLDSSGLEEDVLGWTASCHRSNLSCGQCPGCWKRMRVLAARGISGYEWGSGHE

SEQ ID NO: 40945 - protein, 230 aa, Plasticicumulans acidivorans
  REGION 1..230: note = tr|A0A317MYP0|A0A317MYP0_9GAMM 7-cyano-7-deazaguanine synthase OS=Plasticicumulans acidivorans OX=886464 GN=queC PE=3 SV=1
MPNRSRALVVLSGGQDSTTCLYWALAQFGAEAVEAVSFDYGQRHRIELECAAHIAAMAGVPHTVLPINTFAALGGNALTAGDIAVQPGVQANGLPNTFVPGRNLVFLSFAAALAYQRQCSELVTGVAQTDYSGYPDCRWQTIQALQAALRLGMEFELTIHTPLMFKSKADTVRMAQEFGALSALAWSHTCYNGQQPPCGVCPACELRANGFAEAGIPDPLIERLRAEGRL

SEQ ID NO: 40946 - protein, 226 aa, unidentified
  source 1..226: note = Plasticicumulans lactativorans
  REGION 1..226: note = tr|A0A4R2L6S3|A0A4R2L6S3_9GAMM 7-cyano-7-deazaguanine synthase OS=Plasticicumulans lactativorans OX=1133106 GN=queC PE=3 SV=1
MPRCLVVLSGGQDSTTCLYWSLARFGAANVDTVTFDYGQRHRIELDCARAIAALAGVPHTVLPIDTFAALGGNALTESAIAVQAGVEADGLPNTFVPGRNLIFLTFAAALAYRRGITELVTGVAQTDYSGYPDCREATIRALQQALRLGMEWEGTLHTPLMFLSKADTVRLARDLGALPALALSHTCYNGVQPPCGVCPACRLRAQGFTEAGIPDPLLERFGGAAA

SEQ ID NO: 40947 - protein, 231 aa, Plautia stali
  REGION 1..231: note = tr|U3U5X5|U3U5X5_9ENTR 7-cyano-7-deazaguanine synthase OS=Plautia stali symbiont OX=891974 GN=queC PE=3; SV = 1
MKRAVVVFSGGQDSTTCLIQALQQYDEVHCVTFDYGQRHREEISVAAQLAHQLGARAHKVLDVTLLNELAVSSLTRDSIPVPAYNPQASGLPSTFVPGRNILFLTLASIYAYQVEAEAVITGVCETDFSGYPDCRDEFVKALNNAVSLGMAREVRFETPLMWLNKAETWALADYWQQLPLVRSETLTCYNGVKGDGCGECAACHLRARGLADYRANAASVMAAMKQKSGLR

SEQ ID NO: 40948 - protein, 223 aa, unidentified
  source 1..223: note = Pleionea mediterranea
  REGION 1..223: note = tr|A0A316G2U2|A0A316G2U2_9GAMM 7-cyano-7-deazaguanine synthase OS=Pleionea mediterranea; OX = 523701 GN=queC PE=3 SV=1
MKKAIVLLSGGLDSTTCLAIAKDAGYACYGLSFSYGQRHSAELEAAKRIAKQANVASHRIIPIDLGGFGGSALTDDNIDVPESEADGIPVTYVPARNTVFLSIGLAWAEVLQADAIYAGVNAVDYSGYPDCRPEYIDAFQKMADLATKAGIEGQGAKLETPLIDKTKVEIIQWGNRLSVDYSKTVSCYQADSNGRACGRCDSCRIRAEAFKQAKLPDPTVYID

SEQ ID NO: 40949 - protein, 239 aa, Plesiocystis pacifica
  REGION 1..239: note = tr|A6GH14|A6GH14_9DELT 7-cyano-7-deazaguanine synthase OS=Plesiocystis pacifica SIR-1 OX=391625 GN=queC; PE = 3 SV=1
MVLLSGGLDSTTVLAIAAREAGQRVHALSFAYGQRHALELGCAARQARRFDAAAHEVVDLSHLGRLVAPATSLVAASELAVPDAEARQRQLERGEAEAIPSTYVPARNTLFLSYALAWAEVVGARDIWLGVNAVDYSGYPDCRPEFVAAFEAMARLATKATDVRVRAPLIDLEKGAIIERGLGLGVDYGDTTSCYDPSSVGEPGSADERPLACGRCESCMLRRQGFAAAGVEDPTRYAD

SEQ ID NO: 40950 - protein, 230 aa, Plesiomonas shigelloides
  REGION 1..230: note = tr|A0A2P1VL51|A0A2P1VL51_PLESH 7-cyano-7-deazaguanine synthase OS=Plesiomonas shigelloides OX=703 GN=queC PE=3 SV=1
MSTTVVIFSGGQDSTTCLVQALTQYEHVHCITFDYGQRHRAEIDVARKLAQKLGVTAHKVMDVTLLNELAISSLTRDNIPVPTECSEGVPNTFVPGRNILFLTLAAIYAYQIGAESIITGVCETDFSGYPDCRDEFVKALHHAVNLGMARDIRFDTPLMWLDKAETWALADYYDALETVRHETLTCYNAVQGDGCGECPACHLRARGLHTYLADKDAITLSMLQKTGLSA

SEQ ID NO: 40951 - protein, 230 aa, Plesiomonas shigelloides
  REGION 1..230: note = tr|R8AP32|R8AP32_PLESH 7-cyano-7-deazaguanine synthase OS=Plesiomonas shigelloides 302-73 OX=1315976; GN = queC PE=3 SV=1
MSTTVVIFSGGQDSTTCLVQALTQYEHVHCITFDYGQRHRAEIDVARKLAQKLGVTAHKVMDVTLLNELAISSLTRDNIPVPTECSEGVPNTFVPGRNILFLTLAAIYAYQIGAESIITGVCETDFSGYPDCRDEFVKALHHAVNLGMARDIRFDTPLMWLDKAETWALADYYGALETVRHETLTCYNAVQGDGCGECPACHLRARGLHTYLADKDAITRSMLQKTGLRA

SEQ ID NO: 40952 - protein, 230 aa, Pleurocapsa sp.
  REGION 1..230: note = tr|A0A2T1CS65|A0A2T1CS65_9CYAN 7-cyano-7-deazaguanine synthase OS=Pleurocapsa sp. CCALA 161 OX=2107688 GN=queC PE=3 SV=1
MNKAVVLLSGGLDSATTAAIAIAQGYQVIALSFRYGQRHAKELAAAKKIAEALGITEHFITDIDLSQWGGSSLTDQSMAIPQGGLQPDIIPSTYVPGRNTVFLAIALSLAEAKNAQAIYLGINAIDYSGYPDCRPEYLAAYQKLANLSSKAGVEGNAPQLVAPLVEDSKVDIVRRALELNVPIADTWSCYQGVVNPCGLCDSCRIRDRALIEAGRSDLTSDQVNERSFKL

SEQ ID NO: 40953 - protein, 248 aa, Pleurocapsa sp.
  REGION 1..248: note = tr|K9T7Q9|K9T7Q9_9CYAN 7-cyano-7-deazaguanine synthase OS=Pleurocapsa sp. PCC 7327 OX=118163 GN=queC; PE = 3 SV=1
MPVERSIEEESLTVVSKAVVLLSGGLDSATTAAIAIADGYEVIALSFRYGQRHERELAAATKIAKTLGIKEHYTVDVNLSQWGGSALTDVSLEVPKDGVRADIIPATYVPGRNTVFIAIALSLAEAKGAEAIYLGINAVDYSGYPDCRPEYLEAYQQLANLSSKIGVEGKAPRLVAPLVKDSKVEIVRRALRLGVPIQDTWSCYQGGEDPCGVCDSCRIRDRALIEADVAELATPTGRELYYAEEMKG

SEQ ID NO: 40954 - protein, 231 aa, unidentified
  source 1..231: note = Pluralibacter gergoviae
  REGION 1..231: note = tr|A0A1Y4XYF4|A0A1Y4XYF4_PLUGE 7-cyano-7-deazaguanine synthase OS=Pluralibacter gergoviae; OX = 61647 GN=queC PE=3 SV=1
MKRAVVVFSGGQDSTTCLIQALQQYDEVHCVTFDYGQRHRAEIDVARELAKKLGARAHKVLDVNLLGELAVSSLTRDSIPVPDYAPDASGIPNTFVPGRNILFLTLTAIYAYQVQAEAVITGVCETDFSGYPDCRDEFVKALNHAVNLGMAKEVRFETPLMWLDKAETWALADYWGQLDLVRHETLTCYNGIKGDGCGQCAACNLRANGLNHYLADKTGVTAAMKEKAGLQ

SEQ ID NO: 40955 - protein, 231 aa, unidentified
  source 1..231: note = Pluralibacter gergoviae
  REGION 1..231: note = tr|A0A0J5MDR8|A0A0J5MDR8_PLUGE 7-cyano-7-deazaguanine synthase OS=Pluralibacter gergoviae; OX = 61647 GN=queC PE=3 SV=1
MKRAVVVFSGGQDSTTCLIQALQQYDEVHCVTFDYGQRHRAEIDVARQLAKKLGARAHKVLDVNLLGELAVSSLTRDSIPVPDYAPDASGIPNTFVPGRNILFLTLTAIYAYQVQAEAVITGVCETDFSGYPDCRDEFVKALNHAVNLGMAKEVRFETPLMWLDKAETWALADYWGQLDLVRHETLTCYNGIKGDGCGQCAACNLRANGLNHYLADKTGVTAAMKEKAGLQ

SEQ ID NO: 40956 - protein, 220 aa, unidentified
  source 1..220: note = Pokkaliibacter plantistimulans
  REGION 1..220: note = tr|A0A318C941|A0A318C941_9GAMM 7-cyano-7-deazaguanine synthase OS=Pokkaliibacter plantistimulans OX=1635171 GN=queC PE=3 SV=1
MKDKVVVIYSGGMDSFTVLHRALRDGYEVYPLSFNYGQRHARELLVAEEVCNSLSLSHKVVDIRAINSLLAGSSLTDDIDIPEGHYAADNMKSTVVPNRNMILLSLAIGYAVSIGARKVMYGAHSGDHTIYPDCRPEFVEKMNDVAQIANFESVQVVSPYLYKNKIDILADGLRMGLDYSKTWTCYNGRELSCGKCGSCQERLEAFQLNGVKDPLDYEQA

SEQ ID NO: 40957 - protein, 534 aa, Polaribacter dokdonensis
  REGION 1..534: note = tr|A0A0N0UN79|A0A0N0UN79_9FLAO Asparagine synthetase related protein OS=Polaribacter dokdonensis DSW-5; OX = 1300348 GN=I602_484 PE=4 SV=1
MLTNKNIYLKFNLGFKWYSSKSIAVKGYFYVDDVFYEKEEALNYLDKNLTHNNRKDIFERLNGVFTILISEGDHLEMVCDVTRLFPLFYTIKNDILFVSDDIQLLKSKIKTNQFDKLSKLEFKASNHTHCNKTLLKNIFQLEASKYLIFNKINILNNQFLFHYSIKKESSNSFKKLKSEAIQTIESTFLRFLKSINNKTILLPLSGGFDSRLLAVFLKKHNYKNVICFTYGRKQNFEVENSKKTAKQLGYKWFFIEYSTELIANFLETNEFLEYAHFAGKYSSMPYLQEYFAVKYLKEELNVPNDSIVVPGFAGDFLGGSEYNKVSTNLKTEKIADAILNIKLNNFKVSNSEKSKLKEVMENNVLKIDKRYETKIPSTVFEDYVLKERIAKYIFNSASYYLYFGFEVRFPYWDLELLNFFKELPIQYKKMKKFYDDVLTSEYFEKHKVNFENEIQPKSSDLVKQRIKDKIKPLLTDSLKAKILKKHDWNNYEPITKQMLLQIKQNGLNVNRSYKDYNEIISQWYIYFCENKLQN

SEQ ID NO: 40958 - protein, 530 aa, Polaribacter filamentus
  REGION 1..530: note = tr|A0A2S7L1G2|A0A2S7L1G2_9FLAO Asparagine synthase; OS = Polaribacter filamentus OX=53483 GN=BST83_02400 PE=4; SV = 1
MNITLKHNKGFQWFKNDSLFFKGYFYVDAVFYEKENAFNYLSSISNRYGFKEILKKLNGVFTILIVDDHSLYVASDLTRSFPIFYTFQNYKIFLSDDIFHLKDTFELDDFDPLSEIEFKACNHTHGKKTLLKNVFQVQASEYVIIENNEIIESDFFYSYAIKKESSDTYQTLKDNAVFAFENTFNRFIDSLQNRTVVIPLSGGFDSRLIAVMLKKYNYKNVLCYTYGRKNSFEIENSKKTAEQLNFKWIFIEYDTQLIDGYLKTTEFKEYAQFAGKLSSMPNLQEYFAVKYLKEKNLIPEDSIFIPGYAGDLLGGSQFLKVIPENLKHTEIADLIIKQKFTNYPLSASDKKILKSEVEKKLVRFDKNYLEKIPSSVFEDYDLKEKIAKYIFNSANFYTYFGFEHRFPFWDKELLDFFKKVSVKNKLMKTFFDDVLINNYFVPNNIYFESELQPSEKTIHTQKIKEKIKPILPTFIKQKFLLKNDWNNYKPITDKMLDSISVNELKVYQLCKNYNEIITQWYLYFSKNKIK

SEQ ID NO: 40959 - protein, 239 aa, Polaromonas naphthalenivorans
  REGION 1..239: note = sp|A1VJX7|QUEC_POLNA 7-cyano-7-deazaguanine synthase; OS = Polaromonas naphthalenivorans (strain CJ2) OX=365044; GN = queC PE=3 SV=2
MPAPVSRAHTSALVLFSGGQDSTTCLAQALAKYERVETIAFDYGQRHKVELQARLNVLRELKSQFPQWAAKLGEDHLLDLAVLGQVSDCSLTRDVAFKMESSGLPNTFVPGRNLLFLTLAAALAYRRDLQVLVTGVCETDFSGYPDCRDDTMKAMQLALSLGMDKRFLIETPLMWIDKADTWALAESLGGQPLVELIIEHTHTCYLGDRIHRHAWGYGCGQCPACELRARGYARYAEAA

SEQ ID NO: 40960 - protein, 235 aa, Polaromonas sp.
  REGION 1..235: note = tr|A0A1S8FKV6|A0A1S8FKV6_9BURK 7-cyano-7-deazaguanine synthase OS=Polaromonas sp. A23; OX = 1944133 GN=queC PE=3 SV=1
MHTTALVLFSGGQDSTTCLAQALSKYERVETVGFDYGQRHSVELQARLVVLREIRAQFPQWAHKLGEDHFLDLAVLGQVSETSLTRDTAFKMESSGLPNTFVPGRNLLFLTLAAALAYRRDLQVLVTGVCETDFSGYPDCRDDTMKAMQLALSLGMDKRFLIDTPLMWIDKAATWALAESLGGRELVDLIIEHTHTCYLGDREHRHAWGYGCGQCPACELRLRGYAAYAAALSKP

SEQ ID NO: 40961 - protein, 235 aa, Polaromonas sp.
  REGION 1..235: note = sp|Q12FK2|QUEC_POLSJ 7-cyano-7-deazaguanine synthase; OS = Polaromonas sp. (strain JS666 / ATCC BAA-500) OX=296591; GN = queC PE=3 SV=1
MHTSALVLFSGGQDSTTCLAQALSKYERVETVAFDYGQRHKVELDARLNVLREIKSRFPHWAPKLGEDHLLDLAVLGQVSDTSLTRDVAFKMENSGLPNTFVPGRNLLFLTLAAALAYRRDLQVLVTGVCETDFSGYPDCRDDTIKAMQLALSLGMDKRFLIETPLMWIDKADTWRLAHALGGQALVDLIIEHTHTCYLGDRTHRQAWGYGCGACPACELRARGYERYAAALSKP

SEQ ID NO: 40962 - protein, 229 aa, unidentified
  source 1..229: note = [Polyangium] brachysporum
  REGION 1..229: note = tr|A0A0G3BCI7|A0A0G3BCI7_9BURK 7-cyano-7-deazaguanine synthase OS=[Polyangium] brachysporum OX=413882 GN=queC PE=3 SV=1
MLFSGGQDSTACLAWALQRYAQVETVGFDYGQRHRIELDCRPRVLNELRARFPKWAARLGPDHLLDLSLLGQISDTALTSQRAIEMADSGLPNTFVPGRNLLFLSFAATLAYRRGAAVLVGGMCETDYSGYPDCRDNTLKALQVALSLGMDRPLVIETPLMWLDKAQTWALSHTLGGDALNELIVEHTHTCYLGERGQRHPWGHGCGSCPACELRRRGYEGYLARDANP

SEQ ID NO: 40963 - protein, 229 aa, unidentified
  source 1..229: note = Polycyclovorans sp.
  REGION 1..229: note = tr|A0A2E2JB63|A0A2E2JB63_9GAMM 7-cyano-7-deazaguanine synthase OS=Polycyclovorans sp.; OX = 2024852 GN=queC PE=3 SV=1
MTAVQGERRAVVLLSGGLDSATVLAEVVHQGYRAYALSVAYGQRHSAELAASEAIAAHFGAAAHQVLTVDVGRFGGSALTDQRIAVPENGADEGIPVTYVPARNTLFLSLALGWAEVLDAEAIFIGVNAVDYSGYPDCRPAFIEAFSALAAVATKSGVEGHGPRIEAPLLTLSKAQIITRGTALGVPWPLTVSCYQADSQGRACGRCDSCRLRREGFLAAGQVDPTRYQ

SEQ ID NO: 40964 - protein, 223 aa, unidentified
  source 1..223: note = Polymorphobacter sp.
  REGION 1..223: note = tr|A0A4Y9ESE2|A0A4Y9ESE2_9SPHN 7-cyano-7-deazaguanine synthase OS=Polymorphobacter sp. DJ1R-1 OX=2511025 GN=queC PE=3 SV=1
MTAPLAVVLLSGGLDSTTVAAIARERGYRILALTIDYNQRHRIELQAAASVAAALGAERHIVLPLDLRGFGGSALTADIDVPKLGVEPGIPVTYVPARNTIFLSVALGWAEAAGAFDLFIGVNALDYSGYPDCRPEFIAAFENLANTATKAGVEGTGHFTVHAPLAAMTKADIVREAVRLGVDLSHTWSCYDPTPEGRPCGQCDSCRLRAKGFADAGVTDPAL

SEQ ID NO: 40965 - protein, 246 aa, unidentified
  source 1..246: note = Polynucleobacter aenigmaticus
  REGION 1..246: note = tr|A0A254PUV6|A0A254PUV6_9BURK 7-cyano-7-deazaguanine synthase OS=Polynucleobacter aenigmaticus OX=1743164 GN=queC PE=3 SV=1
MSLLSAAFQNIAPRKPNAPAVILFSGGLDSSTILALAKDLGYAPYVLSVGYGQRHSSELAAAKHIAKKIGVIRHEVVNLDLTRFGGSALTDSSIDIPVTPGNDQEIPVTYVPARNTILLSLALGWAESLGGLDIFYGANAVDYSGYPDCRPEYVASFETMANLATKAGVEAQNNENRFRVHAPIISMSKADIIQLGTTLGIDYSQTVSCYQANDLGEACGECESCRLRKVGFKQANLSDPTRYQKK

SEQ ID NO: 40966 - protein, 246 aa, unidentified
  source 1..246: note = Polynucleobacter asymbioticus
  REGION 1..246: note = sp|A4SVH9|QUEC_POLAQ 7-cyano-7-deazaguanine synthase; OS = Polynucleobacter asymbioticus (strain DSM 18221 / CIP 109841 / QLW-P1DMWA-1) OX=312153 GN=queC PE=3 SV=1
MSSLSAAYQNLAPRKDGAPAVILFSGGLDSTTVLALAKDLGYTPYALSVGYGQRHSSELAAAKHIAKQIGVARHEVVNLDLTRFGGSALTDSSIAVPTTPGKDQEIPVTYVPARNTILLSLALGWAESLGGLDVFYGANSVDYSGYPDCRPEYVASFETMANLATKAGVEAINNENRFRVHAPIISLTKAEIIQLGSTLGVDYSQTVSCYQANDLGEACGECESCRLRQIGFKQANVIDPTRYQKK

SEQ ID NO: 40967 - protein, 246 aa, unidentified
  source 1..246: note = Polynucleobacter asymbioticus
  REGION 1..246: note = tr|A0A1J0D9T6|A0A1J0D9T6_9BURK 7-cyano-7-deazaguanine synthase OS=Polynucleobacter asymbioticus OX=576611 GN=queC PE=3 SV=1
MSSLSAAYQNLAPRKDGAPAVILFSGGLDSTTVLALAKDLGYTPYALSVGYGQRHSSELAAAKHIAKQIGVARHEVVNLDLTRFGGSALTDSSIAVPTTPGKDQEIPVTYVPARNTILLSLALGWAESLGGLDVFYGANSVDYSGYPDCRPEYVASFETMANLATKAGVEAINNENRFRVHAPIISLTKAEIIQLGSTLGVDYSQTVSCYQANDLGEACGECESCRLRQIGFKQANAIDPTRYQKK

SEQ ID NO: 40968 - protein, 246 aa, unidentified
  source 1..246: note = Polynucleobacter campilacus
  REGION 1..246: note = tr|A0A254Q082|A0A254Q082_9BURK 7-cyano-7-deazaguanine synthase OS=Polynucleobacter campilacus OX=1743163 GN=queC PE=3 SV=1
MSKLSAAFENLAPRKPGAPAVILFSGGLDSTTVLALAKDLGYSPYALSVAYGQRHSSELAAAKHIAKQIGVIRHEVVNLDLTRFGGSALTDSSIAVPTTLGKDQEIPITYVPARNTILLSLALGWAESLGGLDVFYGANAVDYSGYPDCRPEYVASFEHMANLATKAGVEAINDENRFRVHAPIINLTKAQIIELGSTMGVDYSQTVSCYQANDLGEACGECESCRLRQAGFKQANVSDPTRYLKN

SEQ ID NO: 40969 - protein, 235 aa, Polynucleobacter cosmopolitanus
  REGION 1..235: note = tr|A0A229FWC0|A0A229FWC0_9BURK 7-cyano-7-deazaguanine synthase OS=Polynucleobacter cosmopolitanus OX=351345 GN=queC PE=3 SV=1
MHARKPNAPAVVLLSGGLDSATVLAIAKKLGYAVHALSFRYGQRHSSELDAATRVAKSLGAVEHQIIDLDLRRFVGGSALTDDAYDVPTSPGANNEIPITYVPARNTIMLSVALGWAEALGGLDIFFGANAVDYSGYPDCRPDYVKSFEATANLATKVGVESHQESTRFRVHAPIIQMSKAQIIQAGMSLGVDFSQTVSCYQANAEGLACGQCESCRLRKEGFQSAGIPDPTHYL

SEQ ID NO: 40970 - protein, 246 aa, unidentified
  source 1..246: note = Polynucleobacter duraquae
  REGION 1..246: note = tr|A0A0E3ZL01|A0A0E3ZL01_9BURK 7-cyano-7-deazaguanine synthase OS=Polynucleobacter duraquae OX=1835254 GN=queC PE=3 SV=1
MSKLSAAFQNIAPRKPNAQAVILFSGGLDSSTILALAKDLGYAPYVLSVGYGQRHSSELAAAKHIAKKMGVVRHEVVNLDLTRFGGSALTDSSIDIPITPGKELEIPVTYVPARNTILLSLALGWAESLGGLDIFYGANAVDYSGYPDCRPEYVASFETMANLATKAGVEAINNENRFRVHAPIISMSKAEIIQLGTTLGVDYSQTVSCYQANDLGEACGECESCRLRQIGFKQANLSDPTRYQKK

SEQ ID NO: 40971 - protein, 247 aa, unidentified
  source 1..247: note = Polynucleobacter hirudinilacicola
  REGION 1..247: note = tr|A0A210RYU9|A0A210RYU9_9BURK 7-cyano-7-deazaguanine synthase OS=Polynucleobacter hirudinilacicola OX=1743166 GN=queC PE=3 SV=1
MSKLSAAFQNLAPRKPGAPAVILFSGGLDSTTVLALAKDLGYSPYALSVGYGQRHSSELAAAKHIAKQIGVIRHEVVNLDLTRFGGSALTDSSIAVPTTPGKDQEIPITYVPARNTILLSLALGWAESLGGLDVFYGANAVDYSGYPDCRPEYVASFEHMANLATKAGVEAINDQNRFRVHAPIIDLTKAQIIELGSTMGVDYSQTVSCYQANDLGEACGECESCRLRQAGFKQANVSDPTRYRKNK

SEQ ID NO: 40972 - protein, 245 aa, unidentified
  source 1..245: note = Polynucleobacter meluiroseus
  REGION 1..245: note = tr|A0A240E1H6|A0A240E1H6_9BURK 7-cyano-7-deazaguanine synthase OS=Polynucleobacter meluiroseus OX=1938814 GN=queC PE=3 SV=1
MTPLSAEFTQFSPRKPNAPAVILFSGGLDSTTILALAKDLGYAPYVLSVGYGQRHSSELAAAKHIAKKMGVKRHEVINLDLTRFGGSALTDASIELPTSPGGEHEIPITYVPARNTILLSLALGWAESLGGLDIFYGANAVDYSGYPDCRPEYVASFETMANLATKAGVEAVNNDNRFRVHAPIISMSKAEIIALGNTLGVDYSQTVSCYQANDLGEACGECESCRLRQVGFKNAKLVDPTRYRK

SEQ ID NO: 40973 - protein, 208 aa, Polynucleobacter necessarius
  REGION 1..208: note = tr|B1XTB6|B1XTB6_POLNS 7-cyano-7-deazaguanine synthase OS=Polynucleobacter necessarius subsp. necessarius (strain STIR1) OX=452638 GN=Pnec_0300 PE=3 SV=1
MRSSSSLAQNKLTVSAQACLSIDSTTVLALAKDSDYTPYALSVGYGQRHSSELAAAKHIAKQIGVARHEVVNLDLTRFGGSALTDTKIAVPTSPGKDHEIPVTYVPARNTILLSLALGWTESLGGLDIFYGANSVDYSGYPDCRPECVASFEHMANLATKAGVEAINNKNRFRVHAPIVSLTKAQIIQLGSTMGVDYSQTVHAIKPKI

SEQ ID NO: 40974 - protein, 246 aa, unidentified
  source 1..246: note = Polynucleobacter paneuropaeus
  REGION 1..246: note = tr|A0A2Z4JKF4|A0A2Z4JKF4_9BURK 7-cyano-7-deazaguanine synthase OS=Polynucleobacter paneuropaeus OX=2527775 GN=queC PE=3 SV=1
MSSLSAAFDHLAPRTPHAPAVILFSGGLDSTTILALAKDLGYAPYALSVSYGQRHSSEVAAAKLIAKQMGVLAHEVVQLDLTRFGGSALTDASIALPLTPSKADEIPVTYVPARNTILLSLALSWAEALGGLDIFYGANAVDYSGYPDCRPEYVAAFEGMANLATKAGVEASNHANRFRVHAPIIQMSKAEIIHLGTTLGVDYSQTVSCYQADAEGHACGICESCRLRQAGFAQAKVTDPTRYQNQ

SEQ ID NO: 40975 - protein, 246 aa, unidentified
  source 1..246: note = Polynucleobacter paneuropaeus
  REGION 1..246: note = tr|A0A2Z4JQL5|A0A2Z4JQL5_9BURK 7-cyano-7-deazaguanine synthase OS=Polynucleobacter paneuropaeus OX=2527775 GN=queC PE=3 SV=1
MSSLSAAFDHLAPRTPHAPAVILFSGGLDSTTILALAKDLGYAPYVLSVSYGQRHSSEVAAAKLIAKQMGVLAHEVVQLDLTRFGGSALTDASIALPLTPSKADEIPVTYVPARNTILLSLALSWAEALGGLDIFYGANAVDYSGYPDCRPEYVAAFESMANLATKAGVEASNHANRFRVHAPIIQMSKAEIIHLGTTLGVDYSQTVSCYQADAEGHACGICESCRLRQAGFAQAKVTDPTRYQNK

SEQ ID NO: 40976 - protein, 246 aa, Polynucleobacter sp.
  REGION 1..246: note = tr|A0A258X7E5|A0A258X7E5_9BURK 7-cyano-7-deazaguanine synthase OS=Polynucleobacter sp. 16-46-70 OX=1970421 GN=queC PE=3 SV=1
MSSLSAAFANLAPRKPNAPAVILFSGGLDSSTILALAKDLGYAPYVLSVSYGQRHSSELAAAKHIAKKMGVIQHEIVNLDLTRFGGSALTDSAIDVPTIPSKDQEIPVTYVPARNTILLSLALGWAESLGGLDIFYGANAVDYSGYPDCRPEYVASFEAMANLATKAGVEAINHDNRFRVHAPIIHMSKAQIIQLGSTLGVDYSQTVSCYQANDLGEACGECESCRLRQAGFKQADLIDPTRYQKK

SEQ ID NO: 40977 - protein, 246 aa, Polynucleobacter sp.; identical to SEQ ID NO: 40976
  REGION 1..246: note = tr|A0A259PF25|A0A259PF25_9BURK 7-cyano-7-deazaguanine synthase OS=Polynucleobacter sp. 39-45-136 OX=1970427 GN=queC PE=3 SV=1

SEQ ID NO: 40978 - protein, 246 aa, unidentified
  source 1..246: note = Polynucleobacter sphagniphilus
  REGION 1..246: note = tr|A0A1R0HBV3|A0A1R0HBV3_9BURK 7-cyano-7-deazaguanine synthase OS=Polynucleobacter sphagniphilus OX=1743169 GN=queC PE=3 SV=1
MSQLSAAFENLAPRIPNAPAVILFSGGLDSTTILALAKDLGYAPYVLSVGYGQRHSSELAAAKHIAKKMGVVRHEVVNLDLTRFGGSALTDSSIDVPITPGNDQEIPVTYVPARNTILLSLALGWAESLGGLDIFYGANAVDYSGYPDCRPEYVASFETMANLATKAGVEALNNENRFRVHAPIISMSKAQIIALGSTLGVDYSQTVSCYQANDLGEACGECESCRLRQAGFLQAKLSDPTRYQKK

SEQ ID NO: 40979 - protein, 243 aa, unidentified
  source 1..243: note = Polynucleobacter victoriensis
  REGION 1..243: note = tr|A0A212T7Y4|A0A212T7Y4_9BURK 7-cyano-7-deazaguanine synthase OS=Polynucleobacter victoriensis OX=2049319 GN=queC PE=3 SV=1
MSVDFQSMHARQPNAPAVVLLSGGLDSATVLAIAKKLGYAPYALSFRYGQRHSSELDAAVRVARSIGAVRHEIIDLDLRRFVGGSALTDDAYAVPTSPGPQDEIPITYVPARNTIMLSVALGWAEALGGLDIFFGANAVDYSGYPDCRPDYVKSFEATANLATKVGVESHEESTRFRVHAPIIKMSKAEIIKTGIELGVDFSQTVSCYQANSEGLACGQCESCRLRREGFKSAGISDPTHYAK

SEQ ID NO: 40980 - protein, 247 aa, unidentified
  source 1..247: note = Polynucleobacter wuianus
  REGION 1..247: note = tr|A0A191UDB3|A0A191UDB3_9BURK 7-cyano-7-deazaguanine synthase OS=Polynucleobacter wuianus OX=1743168 GN=queC PE=3 SV=1
MSKLSAAFENLAPRIPGAPAVILFSGGLDSTTVLALAKDLGYTPYALSVGYGQRHSSELAAAKHIAKQVGVARHEVVNLDLTRFGGSALTDSSIAIPIVPSNDQEIPVTYVPARNTILLSLALGWAEALGGLDIFYGANSVDYSGYPDCRPEYVASFEAMANLATKAGVEAINNENRFRVHAPIISLTKAEIIQLGSTLGVDYSQTVSCYQANDLGEACGECESCRLRQAGFKQANVSDPTRYRKNQ

SEQ ID NO: 40981 - protein, 221 aa, Pontibacillus chungwhensis
  REGION 1..221: note = tr|A0A0A2USU0|A0A0A2USU0_9BACI 7-cyano-7-deazaguanine synthase OS=Pontibacillus chungwhensis BH030062 OX=1385513 GN=queC PE=3 SV=1
MDNKKALVVFSGGQDSTTCLFWAMKHFDEVEAVTFDYNQRHDEEIEVAKEIAEDLGVKHTILDMSLLSQLAPNALTRDDIEVKDGENGDLPSTFVPGRNLLFLSFASIMGKQIGAQHIVTGVCETDFSGYPDCRDVFIKSLNVTLNLSMDDQFVVHTPLMWLDKAQTWELADDLNALTYVKERTLTCYHGVRGSGCGECPSCKLRQNGLDTYINQKEGANA

SEQ ID NO: 40982 - protein, 246 aa, Pontibacillus halophilus
  REGION 1..246: note = tr|A0A0A5IE28|A0A0A5IE28_9BACI Uncharacterized protein OS=Pontibacillus halophilus JSM 076056 = DSM 19796; OX = 1385510 GN=N781_01595 PE=4 SV=1
MIYNVLWTGGWDSTYRVLNLVLDQGATIQPYYVNDPVRPSTEMEKKTIEKIKRLVVELDPSKEGHIKETIEIRKEDIPQNEEITALYHKLANSKWRLGDQYDWLPRYVHSSGIEKLELSIHNGDKAREIIIQDVVKVEDGNDSYYVLKEAVSMQEFKIFKDFRFPLLDITKLQMEENAKQRGYAHIMEETWFCHTPRKDGKSCGLCNPCKYAMEEGLGRRVTTPSTIDKLQYKAFKVRRKLKKIFN

SEQ ID NO: 40983 - protein, 223 aa, Pontibacillus halophilus
  REGION 1..223: note = tr|A0A0A5GS25|A0A0A5GS25_9BACI 7-cyano-7-deazaguanine synthase OS=Pontibacillus halophilus JSM 076056 = DSM 19796 OX=1385510 GN=queC PE=3; SV = 1
MNKEKCIVVFSGGQDSTTCLFWALRRFKEVETVTFNYNQRHAEEIEVAEEIAAELGVKHTVLDMSLLNQLAPNALTRDDIAVEDGEDGGLPSTFVPGRNLIFLSFATIMGYQIDAKHIVTGVCETDFSGYPDCRDDFVKSLNVTLNLSMDEKFVIHTPLMWLDKAETWELADELGGFDYVREKTLTCYNGVRGSGCGECPACQLRQRGLQAYLEKREEVRADV

SEQ ID NO: 40984 - protein, 222 aa, Pontibacillus marinus
  REGION 1..222: note = tr|A0A0A5I121|A0A0A5I121_9BACI 7-cyano-7-deazaguanine synthase OS=Pontibacillus marinus BH030004 = DSM 16465 OX=1385511 GN=queC PE=3 SV=1
MMNKKAVVVFSGGQDSTTCLFWAMKHFDEVEVVTFNYNQRHALEIECAKNIAEEVNVKHHILDMALLNQLAPNALTRDDIEVKDGEDGGLPSTFVPGRNLLFLSFAGVLASQVGAKHIITGVCETDFSGYPDCRDAFVKSLNVTLNLSMDQDFVIHTPLMWLDKKETWALADELDALEFVREKTLTCYNGVIADGCGECPACELRRAGLDEYLASVEEEAKS

SEQ ID NO: 40985 - protein, 434 aa, Pontibacillus marinus
  REGION 1..434: note = tr|A0A0A5FZR2|A0A0A5FZR2_9BACI ATPase; OS = Pontibacillus marinus BH030004 = DSM 16465 OX=1385511; GN = N783_17780 PE=4 SV=1
MRKAIFNCKYTEESDYELSKNAFEYNINDSNVFSYTFLKETKTTLPAFYSNTGLDLFYLSLFVYGADRIIKRSSFKDGWTRSFKLNLPVLEKDIWDVNKNHVEKMLSFLTGDKWEINFFSRNLTKDELSVKKKIEDDPENIIIEEFCMFSGGLDSFIGAIDLIEENKQKNKQSGIHFISHYAGGKGTKEFQDILRNKLKSKFGLEGNNFSSYYAVARNGIEDTTRSRSLMFFGHAIALASCMREKVELIIPENGMISLNVPLTNSRLGTSSTRTTHPHYINMLQELLSNLGLKISITNPYQFKTKGEMIKECKNIDFLYENIVNTMSCSHPDIGRMKKEKESCHCGYCLPCVIRRAAVKRAGLEDPTTYRDVNFNSGPTAKLNYSSYSLGLKKQNKNYSFLRIQNSGPIYKDVDYYAFLYKRGLKELSEFLEDL

SEQ ID NO: 40986 - protein, 222 aa, Pontibacillus yanchengensis
  REGION 1..222: note = tr|A0A0A2T897|A0A0A2T897_9BACI 7-cyano-7-deazaguanine synthase OS=Pontibacillus yanchengensis Y32 OX=1385514 GN=queC PE=3 SV=1
MQKNNKAIVVFSGGQDSTTCLFWAMKHFDEVEAVTFHYNQRHSEEVEVAKEIVDDLNIKHTNLDMSLLSQLAPNALTRDDIEVNDGEEGGLPSTFVPGRNLLFLSFATILGYQIDAKHIITGVCETDFSGYPDCRDMFVKSLNVTLNLSMDSEFVIHTPLMWLDKAQTWELADDLGAFDYVREKTLTCYHGVRGDGCGECPSCILRKNGLNTYLAQREGANA

SEQ ID NO: 40987 - protein, 210 aa, Pontibacter korlensis
  REGION 1..210: note = tr|A0A0E3UYD1|A0A0E3UYD1_9BACT 7-cyano-7-deazaguanine synthase OS=Pontibacter korlensis; OX = 400092 GN=PKOR_16325 PE=3 SV=1
MSNKDGVLLASGGLDSTTLAYWLLNEGIDFVPLFIKYGQHCAKTELETLKKVLPVSHANKIEIIDIQSVYQKSTSRFIKPANLWEEEVNADDLYIPYRNVLLLTIGATFAQTLGYSNVYSAFINSNHAKEIDCSNEFFQKMEDMLVDYGSVKIHMPFRYFSKYEVAKIGINLGAQIGYTFSCQASPEIPCGACPNCVDRLEALRKIETEA

SEQ ID NO: 40988 - protein, 227 aa, Pontibacter sp.
  REGION 1..227: note = tr|A0A4P8RII7|A0A4P8RII7_9BACT 7-cyano-7-deazaguanine synthase OS=Pontibacter sp. SGAir0037 OX=2571030 GN=queC PE=3 SV=1
MSNFSESALVLFSGGQDSTTCLFWAKEQFKHVEALGFKYGQKHEVELKQAQIIAEKAQVSFRVIDISGMLQGSALTEHDKDVSAQHELNANLPAAFVPGRNAVFLSIAISHAFTRNITDIVGGMCQADYSGYPDCRRVFIDSLQTSMSLALDKDIRIHTPLMYKSKAEAWKLAKELKVLDIVRDLSHTDYNGDRTTYNEWGYGKLDNPASVLRAKGYEEAKAKGWLD

SEQ ID NO: 40989 - protein, 242 aa, Ponticaulis sp.
  REGION 1..242: note = tr|A0A2E0U5N5|A0A2E0U5N5_9RHOB 7-cyano-7-deazaguanine synthase OS=Ponticaulis sp.; OX = 2020902 GN=queC PE=3 SV=1
MTSQNALVLFSGGQDSTVCLAWALARYNRVTTVGFDYAQRHSVELNCRQNVLEAFRKSSVVRTDHLGDDVMLDLSILGQIAETSLTRDAEIRMTEDGLPSTFVPARNLIFFSLSGTIAYRQAANILVGGMCETDYSGYPDCRRATLDAQEQTLSLGLDRDIVIETPLMHKTKADTFALAKSLGGEELVEIVVEHTHTCYLGDRSTRHDWGYGCGTCPACELRAKGWNDWQEAGCPKDPTGLA

SEQ ID NO: 40990 - protein, 239 aa, Ponticaulis sp.
  REGION 1..239: note = tr|A0A2D7IX79|A0A2D7IX79_9RHOB 7-cyano-7-deazaguanine synthase OS=Ponticaulis sp.; OX = 2020902 GN=queC PE=3 SV=1
MSGTSALVLFSGGQDSTVCLAWALARYDQVSTVGFDYGQRHSIELTCRQNVLKAFRESSLNTDGLGEDALLDLSVLGQISETSLTREAEITMSEQGLPSTFVPGRNLIFLTLASAVAYRRAATVMVGGMCETDFSGYPDCRRNTLDAQEQAISLGLDREMVIETPLMHKTKADTFAMAKGLGGDELVEIVVEHTHTCYLGDRSKRHDWGYGCGTCPACDLRANGWDDWQAAGCPTDPAG

SEQ ID NO: 40991 - protein, 425 aa, unidentified
  source 1..425: note = Ponticoccus gilvus
  REGION 1..425: note = tr|A0A4R6LWA5|A0A4R6LWA5_9ACTN 7-cyano-7-deazaguanine synthase in queuosine biosynthesis; OS = Ponticoccus gilvus OX=519423 GN=C8D81_0139 PE=4 SV=1
MRYVSGPTSALTKVDDTSTPVVLFGRATSDDVASAGGSAALTVRRQKLVPDSAAWDLLAIALSVVVADGATKRDTSPDGWTRELELNVALHDSARWEPSASSFSSALAFLTTDRWQVEFRGGGAIPKPPRTPRYPDEDAVVLLSGGLDSLIGAIDLASNGRQLFAVSQTVRGDADKQDRFARIIGGGIEHLQVNHNASTRRGLKETSQRSRSLIFLAFAVLAATSTERYRSGESVPLYVCENGFIAINPPLTIARIGSLSTRTAHPHFLGQMQEILDGVGLRVRIINPYAEKTKGEMLRECLDQALLSAEASVSTSCGRFQRFNYRHCGRCVPCQIRRAAFIAWGRDDPTDYVYADLGRPDEDHAAFDDVRSVALARLVVAEEGFDRWLGPTLSSPRITSRTALREMLQRGLDELGALHGEHGLA

SEQ ID NO: 40992 - protein, 454 aa, unidentified
  source 1..454: note = Pontimonas salivibrio
  REGION 1..454: note = tr|A0A2L2BS04|A0A2L2BS04_9MICO QueC queuosine biosynthesis protein-like protein OS=Pontimonas salivibrio; OX = 1159327 GN=C3B54_111518 PE=4 SV=1
MAFDPTAYTTFSYREYRFSDSRFEATFHYQLAGGSVTPLDFTETVQFTPGIADRVDTPRLESLLALLGAVLGLSYYKLAAPDEYVIEQPGLTREAEEYLALLISEGMAEFAYRNGFSVPLQPAIINKAAGVASAWPEASWREHTGDPIVPIGGGKDSVVSVELLHHHRLHPIQFAVNANPTIHRVARASGHPLVTAKRTIDPRLLELNTEGGLNGHVPVTAMNSLIALCQSRILDGGPVVMSNESSASDSTLEVDGWSINHQWSKSWEAEKALHDVLGPQAGLRPEHYFSLLRPFSELRIAGAYANYSQYHRVATSCNRAYRLDAGDVSWCGECDKCRFVYLVLSAYLSPQALRGIFGRDLLDEPEQIPGYEELLGLARHKPFECVGTEAESLVALSVAARRQDWSQHRVVAHFDQVIPGLSDVHDDLEHQVWAASENSATLPAGYREAQGALR

SEQ ID NO: 40993 - protein, 232 aa, Porphyrobacter dokdonensis
  REGION 1..232: note = tr|A0A1A7BEL6|A0A1A7BEL6_9SPHN 7-cyano-7-deazaguanine synthase OS=Porphyrobacter dokdonensis DSW-74 OX=1300349 GN=queC PE=3 SV=1
MTAPEQASSAPIAVVLLSGGLDSMVTASLAKEQGFAVHALSVDYGQRHRLELSSARRIAQRLSLVRHAEIALDLRTFGGSALTDAIDVPKAGLGEDIPVTYVPARNLVFLALTTACAEAAGARDVFIGVNALDYSGYPDCRPEFIASFAETARLGTKAGVEGAPFTIHTPLQYMTKADIARECARLGLDPSWSWSCYDPTPEGLACGLCDSCRLRKKGFAEAGIADSTRYRD

SEQ ID NO: 40994 - protein, 229 aa, unidentified
  source 1..229: note = Porphyrobacter mercurialis
  REGION 1..229: note = tr|A0A0B2BSX0|A0A0B2BSX0_9SPHN 7-cyano-7-deazaguanine synthase OS=Porphyrobacter mercurialis OX=1572751 GN=queC PE=3 SV=1
MSDMPKAVVLLSGGLDSMVAAGLARQGGYAVHALTVDYNQRHRVELSAAARIAQELQVAAHVVLPLDLSQFGGSALTSDIAVPKTGASGVDDDIPVTYVPARNMIFLSLAMGWAEALGARDIFIGVNALDYSGYPDCRPEFISSFVATANLATKAGVEGHGVTIHTPLQHWGKARIAQEAAALGLDPGMSWSCYDPTPDGIACGTCDSCRLRRKGFADAQLIDPTPYAA

SEQ ID NO: 40995 - protein, 230 aa, Porphyrobacter neustonensis
  REGION 1..230: note = tr|A0A192D253|A0A192D253_9SPHN 7-cyano-7-deazaguanine synthase OS=Porphyrobacter neustonensis OX=1112 GN=queC PE=3 SV=1
MLDRENGKPLAVVLLSGGLDSMVTAALAQEAGFAVHALTVDYGQRHKLELQSAAAIVERLGLAAHTQIALDLRAFGGSALTDSIDVPKGGVGQDIPVTYVPARNLVFLALTTACAEAAGARDVFIGVNALDYSGYPDCRPEFIASFSETARLGTKAGVEGAPFRVHTPLQHLTKADIARESARLGLDPAWSWSCYDPTPEGLACGLCDSCRLRKKGFAEAGIVDSTRYNA

SEQ ID NO: 40996 - protein, 232 aa, Porphyrobacter sanguineus
  REGION 1..232: note = tr|A0A1M7SGT4|A0A1M7SGT4_9SPHN 7-cyano-7-deazaguanine synthase OS=Porphyrobacter sanguineus OX=198312 GN=queC PE=3 SV=1
MNAAYPLSPAPIAVVLLSGGLDSMVTAALAKEQGFAVHALSVDYGQRHRLELESARRIAKQLDVANHTEIKLDLRAFGGSALTDAIDVPKDGLGENIPITYVPARNLVFLALTTACAEAAGAHDVFIGVNALDYSGYPDCRPEFIASFAETARLGTKAGVEGAPFTIHAPLQHMTKADIACECARLELDPVWSWSCYDPTPEGMACGLCDSCRLRKKGFAEAGIIDSTRYNA

SEQ ID NO: 40997 - protein, 232 aa, Porphyrobacter sp.
  REGION 1..232: note = tr|A0A0N0JPZ5|A0A0N0JPZ5_9SPHN 7-cyano-7-deazaguanine synthase OS=Porphyrobacter sp. AAP60 OX=1523423 GN=queC PE=3 SV=1
MTGSEHNASLPIAVVLLSGGLDSMVTAALAQERGFAVHALTVDYGQRHRLELQSAERIAHQLGLARQTSIALDLRAFGGSALTDAIDVPKSGVGDDIPVTYVPARNLVFLALTTACAEAAGARDVFIGVNALDYSGYPDCRPEFIASFAETARLGTKAGVERAPFTIHAPLQHMTKADIARECARLGLDPAWSWSCYDPTPDGLACGLCDSCRLRKKGFAEAGIVDSTRYHA

SEQ ID NO: 40998 - protein, 209 aa, Porphyrobacter sp.
  REGION 1..209: note = tr|A0A1D7NHA1|A0A1D7NHA1_9SPHN 7-cyano-7-deazaguanine synthase OS=Porphyrobacter sp. LM 6; OX = 1896196 GN=queC PE=3 SV=1
MVTAALAQERGFSVHALTVDYGQRHRLELESAARIAGQLGLAKHTSIALDLRAFGGSALTDAIDVPKTGVGDDIPVTYVPARNLVFLALTTACAEAAGARDVFIGVNALDYSGYPDCRPGFIASFAETARLGTKAGVEGAPFTIHAPLQHMTKADIARECARLGLDPSWSWSCYDPTVEGTACGLCDSCRLRKKGFAEAGIVDSTRYNA

SEQ ID NO: 40999 - protein, 221 aa, unidentified
  source 1..221: note = Porphyromonadaceae bacterium
  REGION 1..221: note = tr|A0A354X742|A0A354X742_9PORP 7-cyano-7-deazaguanine synthase OS=Porphyromonadaceae bacterium OX=2049046 GN=queC PE=3 SV=1
MNDFKQEDALVLFSGGQDSTTCLYWAKKQFRNVQTLCFSYGQRHSQEVENARRIAQMAGVPFRVIDTSVISQLAPNSLTDASIKMDEEKPADSYPNTFVPGRNMLFLTFAAAIAYAQDIRHLVTGVSEADYSGYPDCRDTFIHSLNASLNLAMDKHFLIHTPLMWRNKKEVWRLSDELGVFDLVRNETLTCYNGIIADGCGHCPACKLRNKGLQEYLEVRG

SEQ ID NO: 41000 - protein, 224 aa, unidentified; identical to SEQ ID NO: 40762
  source 1..224: note = Porphyromonadaceae bacterium
  REGION 1..224: note = tr|A0A1I7GUC8|A0A1I7GUC8_9PORP 7-cyano-7-deazaguanine synthase OS=Porphyromonadaceae bacterium KHP3R9 OX=1855398 GN=queC PE=3 SV=1

SEQ ID NO: 41001 - protein, 217 aa, Porphyromonas asaccharolytica
  REGION 1..217: note = tr|F4KLJ4|F4KLJ4_PORAD 7-cyano-7-deazaguanine synthase OS=Porphyromonas asaccharolytica (strain ATCC 25260 / DSM 20707 / BCRC 10618 / JCM 6326 / LMG 13178 / VPI 4198 ) OX=879243 GN=queC PE=3 SV=1
MRNSLIAHSGGVDSTTLLYEYREEVACAVGFDYGSKHNARELAAAKAICRELDIPYLIIPLAFIEEYFRSDLLLSGGEMQLGDYSEENMRSTVVPFRNGIMLSVLAGLAESRDLQQVLIANHFGDHAIYPDCRESFVKPMGEAITAGTSNGVKLVAPYTALTKAEIVARGTRLGVPYGKTYSCYQGGERHCGRCGTCRERHDAFVANGLEDPTLYEE

SEQ ID NO: 41002 - protein, 223 aa, Porphyromonas cangingivalis
  REGION 1..223: note = tr|A0A1T4NS01|A0A1T4NS01_PORCN 7-cyano-7-deazaguanine synthase OS=Porphyromonas cangingivalis OX=36874 GN=queC PE=3 SV=1
MNKQTALVVFSGGQDSTTCLFWAKKHFERVHALCFFYGQKHREEVEIARKIAEGAGVPFEVKDVSFIGSLAHNSLTDDSIPMDKEKPEGSVPNTFVPGRNLFFLSIAAVYARELGIHHLVIGVSQTDFSGYPDCRDAFVKSLNVTLNLAMDDTFVIHTPLMWIDKAETWALADELGVLELVRQETLTCYNGIKGDGCGECPACALRSEGLQKYLKEKARPKTK

SEQ ID NO: 41003 - protein, 223 aa, Porphyromonas cangingivalis
  REGION 1..223: note = tr|A0A0A2ERS4|A0A0A2ERS4_PORCN 7-cyano-7-deazaguanine synthase OS=Porphyromonas cangingivalis OX=36874 GN=queC PE=3 SV=1
MNKQTALVVFSGGQDSTTCLFWAKKHFERVHALCFFYGQKHREEVEIARKIAEGAGVPFEVKDVSFIGSLAHNSLTDDSIPMDKEKPEGSVPNTFVPGRNLFFLSIAAVYARELGIHHLVTGVSQTDFSGYPDCRDAFVKSLNVTLNLAMDDTFVIHTPLMWIDKSETWGLADELGILELVRQETLTCYNGIKGDGCGECPACALRLEGLQKYLKEKARPKTK

SEQ ID NO: 41004 - protein, 221 aa, Porphyromonas catoniae
  REGION 1..221: note = tr|L1NBA5|L1NBA5_9PORP 7-cyano-7-deazaguanine synthase OS=Porphyromonas catoniae F0037 OX=1127696; GN = queC PE=3 SV=1
MTNKRGLIVLSGGMDSVTLLYEYQADIALALSFDYGSKHNARELPYARLHCERLGIEHLTIPLSFISQYFQSALLQGGGDIPKGSYDEQNMASTVVPFRNGIMLSIAAGLAESRGLDRVYIANHFGDHAIYPDCRASFIQPMHSAVYEGTNNHVSIEAPYTDISKGAIAAHGKRLGIDYSETWSCYEGGDVQCGTCATCIERREAMQEAGIIDPTIYKENA

SEQ ID NO: 41005 - protein, 221 aa, Porphyromonas catoniae
  REGION 1..221: note = tr|Z4WUJ5|Z4WUJ5_9PORP 7-cyano-7-deazaguanine synthase OS=Porphyromonas catoniae ATCC 51270 OX=887901; GN = queC PE=3 SV=1
MTNKRGLIVLSGGMDSVTLLYEHQADIALALSFDYGSKHNARELPYARLHCERLGIEHLTIPLSFISQYFQSALLQGGGDIPKGSYDEQNMASTVVPFRNGIMLSIAAGLAESRRLDRVYIANHFGDHAIYPDCRASFIQPMHSAVYEGTNNHVSIEAPYTDISKGDIATHGKRLGIDYSETWSCYEGGDVQCGTCATCIERREAMQEARIIDPTIYKENA

SEQ ID NO: 41006 - protein, 222 aa, Porphyromonas circumdentaria
  REGION 1..222: note = tr|A0A1T4N5U8|A0A1T4N5U8_9PORP 7-cyano-7-deazaguanine synthase OS=Porphyromonas circumdentaria OX=29524 GN=queC PE=3 SV=1
MLHNGKKDGLIVLSGGLDSTTLLYDYKEEIALALTFDYGSKHNASEIPCAERHCRLLSIPHITIPLDFMGRYFRSDLLLSGGKIPQGVYTEENMKSTVVPFRNGIMLSIAAGLAESRNLDRIFIANHFGDHAIYPDCRASFIEPMMKSIEEGTSNRIQLCAPYTHLNKDQIVSIGSRIGIDYTDTWSCYEGGAIQCGRCATCQERKEAFIKAGVTDPTVYKE

SEQ ID NO: 41007 - protein, 222 aa, Porphyromonas crevioricanis
  REGION 1..222: note = tr|A0A2X4PI00|A0A2X4PI00_9PORP 7-cyano-7-deazaguanine synthase OS=Porphyromonas crevioricanis OX=393921 GN=queC PE=3 SV=1
MRLNKKEDQTRKGLIIVSGGMDSVTMLYDFADRIALGVSFDYGAKHNAKEIPFAKEHCERLGIRHIVIPLSFMNQYFRSDLLQSGGEIPEGQYAEDNMASTVVPFRNGIMLSIAAGLAESYGLAEIYIANHFGDHSIYPDCRADFVLPMGEAIAHGTSNAVCLKAPYTGWSKIDIAKRGKTLGIDYRRTWSCYKGEMTPCRKCATCLERIEALRAIGEADFL

SEQ ID NO: 41008 - protein, 225 aa, Porphyromonas crevioricanis
  REGION 1..225: note = tr|T1CQZ8|T1CQZ8_9PORP 7-cyano-7-deazaguanine synthase OS=Porphyromonas crevioricanis JCM 15906; OX = 1305617 GN=queC PE=3 SV=1
MQEMRLNKKEDQTRKGLIIVSGGMDSVTMLYDFADRIALGVSFDYGAKHNAKEIPFAKEHCERLGIRHIVIPLSFMNQYFRSDLLQSGGEIPEGQYAEDNMASTVVPFRNGIMLSIAAGLAESYGLAEIYIANHFGDHSIYPDCRADFVLPMGEAIAHGTSNAVCLKAPYTGWSKIDIAKRGKTLGIDYRRTWSCYKGEMTPCRKCATCLERIEALRAIGEADFL

SEQ ID NO: 41009 - protein, 225 aa, Porphyromonas endodontalis
  REGION 1..225: note = tr|C3JC36|C3JC36_POREA 7-cyano-7-deazaguanine synthase OS=Porphyromonas endodontalis (strain ATCC 35406 / BCRC 14492 / JCM 8526 / NCTC 13058 / HG 370) OX=553175; GN = q ueC PE=3 SV=1
MLTTAHNGARDGLIVLSGGLDSTTLLYDYRDEIALAVTFDYGSKHNQREIPCAQHHCRQLGIEHLIIPLGFMGQYFRSDLLLSGGEIPLGAYNEENMQATVVPFRNGIMLSIAAGLAESRGLKRLFIANHFGDHNIYPDCRATFAEPMAEAILQGTSNSVELAAPYTHLSKSEIVAVGMPLGLDYATTWSCYVGGETQCGECATCRERKEAFALAGVPDPTSYLQ

SEQ ID NO: 41010 - protein, 220 aa, Porphyromonas gingivalis
  REGION 1..220: note = sp|B2RJS2|QUEC_PORG3 7-cyano-7-deazaguanine synthase; OS = Porphyromonas gingivalis (strain ATCC 33277 / DSM 20709 / CIP 103683 / JCM 12257 / NCTC 11834 / 2561) OX=4319 47; GN = queC PE=3 SV=1
MQREKDSLIVVSGGMDSVTLMYEKRASIALALSFDYGSKHNARELSFARLHAERLGVEHLIIPLDFIGQYFQSDLLLSGGDIPEGRYDEENMKSTVVPFRNGIMLAVAAGLAESRGLRRIYIANHFGDHAIYPDCRASFIRPMTEAVRCGTTNGVLIEAPYTDITKTDIARIGASLGIDYAETWSCYKGGVFHCGVCGTCVERKEALHDAGIPDPTEYEG

SEQ ID NO: 41011 - protein, 220 aa, Porphyromonas gingivalis
  REGION 1..220: note = tr|A0A254N084|A0A254N084_PORGN 7-cyano-7-deazaguanine synthase OS=Porphyromonas gingivalis OX=837 GN=queC PE=3 SV=1
MQREKDSLIVVSGGMDSVTLMYEKRASIALALSFDYGSKHNARELSFARLHAERLGVEHLIIPLDFIGQYFQSDLLLSGGDIPEGRYDEENMKSTVVPFRNGIMLAVAAGLAESRGLRRIYIANHFGDHAIYPDCRASFIRPMTEAVRCGTTNGVLIEAPYTDITKTDIARIGASLGIDYAETWSCYKGGVFHCGVCGTCVERREALHDAGIPDPTEYEG

SEQ ID NO: 41012 - protein, 225 aa, Porphyromonas gingivicanis
  REGION 1..225: note = tr|A0A0A2GCQ4|A0A0A2GCQ4_9PORP 7-cyano-7-deazaguanine synthase OS=Porphyromonas gingivicanis OX=266762 GN=queC PE=3 SV=1
MQENLHKGHKDGLIVLSGGLDSTTLLYDYKEEIALALTFDYGSKHNASEIPCAEKHCELLAIPHIVVPLDFMARYFQSNLLLSGGAIPKGAYNEENMKSTIVPFRNGIMLSIAAGLAESRGLSRIFIANHFGDHAIYPDCRFAFIEPMMQSIREGTSNRVELCAPYTHINKEQIVAIGSRLSIDYALTWSCYEGGAIQCGRCATCCERKEAFIKAGVEDPTKYQQ

SEQ ID NO: 41013 - protein, 220 aa, Porphyromonas gulae
  REGION 1..220: note = tr|A0A0A2FQF4|A0A0A2FQF4_9PORP 7-cyano-7-deazaguanine synthase OS=Porphyromonas gulae; OX = 111105 GN=queC PE=3 SV=1
MQTEKDSLIVVSGGMDSVTLMYEKRASIALALSFDYGSKHNARELPFAHLHAERLGVEHLIVPLDFIGQYFRSDLLLGGGDIPEGRYDEENMKSTVVPFRNGIMLAIAAGLAESRGLRRIYIANHFGDHAIYPDCRASFIRPMTEAVRCGTSNSVLIEAPYTDITKTDIARIGASLGIDYAETWSCYKGGASHCGVCGTCVERREALRDAGIVDPTEYED

SEQ ID NO: 41014 - protein, 220 aa, Porphyromonas gulae
  REGION 1..220: note = tr|A0A0A2F9D1|A0A0A2F9D1_9PORP 7-cyano-7-deazaguanine synthase OS=Porphyromonas gulae; OX = 111105 GN=queC PE=3 SV=1
MQTEKDSLIVVSGGMDSVTLMYEKRASIALALSFDYGSKHNARELSFARLHAERLGVEHLIVPLDFIGQYFQSDLLLSGGDIPEGRYDEENMKSTVVPFRNGIMLAVAAGLAESRGLRRIYIANHFGDHAIYPDCRASFIRPMTEAVRCGTSDGVLIEAPYTDITKTDIARIGASLGIDYAETWSCYKGGVSHCGVCATCVERREALRDAGIPDPTEYEG

SEQ ID NO: 41015 - protein, 218 aa, Porphyromonas levii
  REGION 1..218: note = tr|A0A4Y8WQW3|A0A4Y8WQW3_9PORP 7-cyano-7-deazaguanine synthase OS=Porphyromonas levii; OX = 28114 GN=queC PE=3 SV=1
MDKKGIIVVSGGVDSITLLYDKREEIALAITFKYGSNHQDKEIPCAVYHCQKLGIPHQVIDLDFVRSMQSSLLQGAEAIPTGQYKEDNMKSTVVPFRNGVMLAIAAAFAEDRGLNKVFIANHFGDHAIYPDCTKAFIDGMNEAMRQGTYNHVEVSAPYTGKSKAEIVAIGTALGVAYEHTWSCYKGQELPCGVCATCRERIEAFEENGLTDPVKYQEL

SEQ ID NO: 41016 - protein, 220 aa, unidentified
  source 1..220: note = Porphyromonas loveana
  REGION 1..220: note = tr|A0A2U1F886|A0A2U1F886_9PORP 7-cyano-7-deazaguanine synthase OS=Porphyromonas loveana; OX = 1884669 GN=queC PE=3 SV=1
MQAKKDSLIVVSGGMDSVTLMYDKRDSIALALSFDYGSKHNARELAFARLHAERLGVEHLVIPLGFMGEHFHSDLLLSGGSIPEGRYDEENMKSTVVPFRNGIMLAVAAGLAESRGLKRMYIANHFGDHAIYPDCRAAFIRPMAEAIREGTTNAVLTEAPYTSITKTDIARIGVALGIDYAETWSCYKGGEIHCGVCGTCVERKEAMREAGIADPTQYEE

SEQ ID NO: 41017 - protein, 221 aa, Porphyromonas macacae
  REGION 1..221: note = tr|A0A379DK74|A0A379DK74_9PORP 7-cyano-7-deazaguanine synthase OS=Porphyromonas macacae; OX = 28115 GN=queC PE=3 SV=1
MDEKKKNGLIVLSGGMDSVTLLYDKQDEIVMAVTFNYGSKHNAREIPFARLHSERLKIPHIVIDLDFMNKYFRSDLLQNGGNIPMGEYNEENMRNTVVPFRNGIMLSIAAGVAESYDLDKLFIANHFGDHAIYPDCRAAFIAPMSKAVTQGTSNGIKIIAPYTNIDKGQIAIIGKRLGLNYAETWSCYCGGEVQCGTCGTCIERREAMQQAGIDDPTTYLH

SEQ ID NO: 41018 - protein, 221 aa, Porphyromonas macacae
  REGION 1..221: note = tr|A0A0A2EFF6|A0A0A2EFF6_9PORP 7-cyano-7-deazaguanine synthase OS=Porphyromonas macacae; OX = 28115 GN=queC PE=3 SV=1
MDEKNKNGLIVLSGGMDSVTLLYDKQDEIAMAVTFNYGSKHNAREIPFARLHSERLKIPHIVIDLDFMNKYFRSDLLQNGGNIPMGEYNEENMRNTVVPFRNGIMLSIAAGLAESYDLDKLFIANHFGDHAIYPDCRAAFIAPMSEAVTQGTSNGIKIIAPYTNIDKGQIAIIGKRLGLNYAETWSCYCGSEVQCGTCGTCIERREAMRQAGIDDPTTYLH

SEQ ID NO: 41019 - protein, 219 aa, Porphyromonas somerae
  REGION 1..219: note = tr|A0A134B9D5|A0A134B9D5_9PORP 7-cyano-7-deazaguanine synthase OS=Porphyromonas somerae; OX = 322095 GN=queC PE=3 SV=1
MPQQDGLIVLSGGMDSVTLLYEYQANIALAISFDYGSKHNAQEIPYARVHCERLGIEHLTIPLGFMGQYFRSALLQGGGEIPKGSYDEENMAATVVPFRNGIMLSIAAGLAESRGLKRVYIANHFGDHAIYPDCRASFIRPMHEAIAAGTSNGVEVTAPYTDISKGEIARHGKALGINYAETWSCYEGGDVQCGQCGTCIERREAMLEAGIEDPTTYKD

SEQ ID NO: 41020 - protein, 219 aa, Porphyromonas sp.
  REGION 1..219: note = tr|J5TVH4|J5TVH4_9PORP 7-cyano-7-deazaguanine synthase OS=Porphyromonas sp. oral taxon 279 str. F0450; OX = 1125723 GN=queC PE=3 SV=1
MPQQDGLIVLSGGMDSVTLLYEYQANIALAISFDYGSKHNAQEIPYARLHCERLGIEHLTIPLGFMGQYFRSALLQGGGDIPKGSYDEENMAATVVPFRNGIMLSIAAGLAESRGLKRVYIANHFGDHAIYPDCRASFIRPMHEAIAAGTSNGVEVTAPYTDINKGEIARHGKALGINYAETWSCYEDGDVQCGQCGTCIERREAMLEAGIEDPTTYKD

SEQ ID NO: 41021 - protein, 210 aa, Porphyromonas sp.
  REGION 1..210: note = tr|A0A0A2DW13|A0A0A2DW13_9PORP 7-cyano-7-deazaguanine synthase OS=Porphyromonas sp. COT-239 OH1446 OX=1515613 GN=queC PE=3 SV=1
MDSVTLLYEYRERIGLALSFDYGAKHNARELPCARYHCERLGIPHIIIPLGFMGEYFRSSLLLSGGDIPLGQYDEHNIQSTVVPFRNGIMLSIAAGLAESHALGSIYIANHFGDHALYPDCRASFIEPMTRAVREGTTNAVELIAPYTHLDKGQIASIGARLGIDYSHTWSCYQGRELHCGECSTCLERREAMAQAGLEDPTAYESKPIQ

SEQ ID NO: 41022 - protein, 217 aa, Porphyromonas uenonis
  REGION 1..217: note = tr|C2MDE8|C2MDE8_9PORP 7-cyano-7-deazaguanine synthase OS=Porphyromonas uenonis 60-3 OX=596327 GN=queC; PE = 3 SV=1
MRNSLIALSGGVDSTTLLYEYREEIACAVGFDYGSKHNARELAAAKAICRELEIPYLIIPLAFIGEYFRSDLLLSGGEMQLGDYSEENMSSTVVPFRNGIMLSVLAGLAESRDLQQVLIANHFGDHAIYPDCRESFVKPMGEAITAGTSNGVKLVAPYTALTKAEIVARGTRLGVPYSKTYSCYQGGERHCGRCGTCRERHDAFVANGLEDPTLYEE

SEQ ID NO: 41023 - protein, 231 aa, unidentified
  source 1..231: note = Porticoccaceae bacterium
  REGION 1..231: note = tr|A0A2A5GFZ5|A0A2A5GFZ5_9GAMM 7-cyano-7-deazaguanine synthase OS=Porticoccaceae bacterium OX=2026782 GN=queC PE=3 SV=1
MTESDKKAVVLISGGLDSTTVLAMAREQGFDCYTLSFDYGQKAHAELKAARQCSELFGACQHKVVELDLRTIGGSALTDDSIDVPEEQTSGIPVTYVPARNTVFLSIALGWAEVLGAQDIFIGVNAVDYSGYPDCRPEYIEAFERMANLATKAGVEGQSIKINTPLIHMTKAEIIREGISIGVDYAQTVSCYQASEEGLACGKCESCRLRKLGFEQAGIVDTTRYISLINT

SEQ ID NO: 41024 - protein, 231 aa, unidentified
  source 1..231: note = Porticoccaceae bacterium
  REGION 1..231: note = tr|A0A352Q436|A0A352Q436_9GAMM 7-cyano-7-deazaguanine synthase OS=Porticoccaceae bacterium OX=2026782 GN=queC PE=3 SV=1
MKTAVVLVSGGLDSATALAVAAGNGYACHCLAFDYGQRHRSELAASKKVASTLHAKAHKIVQLDLRSIGGSALTDDNIAVPDAKIVNAGNANADTDIPVTYVPARNTVFLSIALGWAEVLHASDIFIGVNAVDYSGYPDCRPEYIAAFENMANLATRATVQGQRVTIQTPLISMRKEDIIRLGTDLGVDYSLTVSCYRATPEGLACGHCDSCHLRRQGFERAGLADPTRYV

SEQ ID NO: 41025 - protein, 230 aa, Porticoccus sp.
  REGION 1..230: note = tr|A0A2G2QS20|A0A2G2QS20_9GAMM 7-cyano-7-deazaguanine synthase OS=Porticoccus sp.; OX = 2024853 GN=queC PE=3 SV=1
MTENENNRAVVLVSGGLDSTTVLALAKNQGFSCYTLSFDYGQRAQAELVAARRCSEQLGAEEHKVIKLDLRAIGGSALTDDRIDVPEEQTSGIPVTYVPARNTVFLSIALGWAEVLGAQDIFIGVNAVDYSGYPDCRPDYIEAFEKMANLATKSGIEGHYLRINKPLINLTKAEIILQGTLAGVDYGETVSCYQANERGFACGRCDSCRLRISGFQEAGLPDPTRYIGTE

SEQ ID NO: 41026 - protein, 230 aa, Porticoccus sp.
  REGION 1..230: note = tr|A0A2E2VYR3|A0A2E2VYR3_9GAMM 7-cyano-7-deazaguanine synthase OS=Porticoccus sp.; OX = 2024853 GN=queC PE=3 SV=1
MTVNENNRAVVLVSGGLDSTTVLALAKSQGYSCYTLSFDYGQRAQAELAAARRCSEQLGAEEHKVIKLDLRAIGGSALTDDRIDVPEEQTSGIPVTYVPARNTVFLSIALGWAEVLGAQDIFIGVNAVDYSGYPDCRPDYIEAFEKMANLATKSGIEGHYLRINKPLINLTKAEIILQGTLAGVDYAETVSCYQANERGFACGRCDSCRLRISGFQDAGLPDPTRYIGTE

SEQ ID NO: 41027 - protein, 218 aa, unidentified
  source 1..218: note = Pradoshia eiseniae
  REGION 1..218: note = tr|A0A2S7N017|A0A2S7N017_9BACI 7-cyano-7-deazaguanine synthase OS=Pradoshia eiseniae; OX = 2064768 GN=queC PE=3 SV=1
MTNKAVVIFSGGQDSTTCLFWAMKKFDEVIAVTFDYGQRHRLELECAASITDELGIEHHILDMSLLNQLSPNALTRTEIAITEGESGPPSTFVEGRNMLFLTFAGILAKTKGAKHLITGVCETDFSGYPDCRDIFIKSLNVTMNLAMDYPFVIHTPLMWFDKAETWEMADSFGKLEYIRTNTLTCYNGIIGDGCGSCPSCKLRQNGLNIYQKKKMVKK

SEQ ID NO: 41028 - protein, 223 aa, unidentified
  source 1..223: note = Pradoshia sp.
  REGION 1..223: note = tr|A0A5J6XP05|A0A5J6XP05_9BACI 7-cyano-7-deazaguanine synthase QueC OS=Pradoshia sp. D12; OX = 2651284 GN=queC PE=4 SV=1
MKQEKALVVFSGGQDSTTCLFWAMKNFGEVEVVTFNYGQRHALEIECAKQIANELNVHQHILDMSLLNQLAPNALTRADIEVKDGAEGELPSTFVPGRNLLFLSFAGVLARQIGAKHIITGVCETDFSGYPDCRDIFIKSFNVTINLSMEEAFVIHTPLMWLNKAETWSLADELGAFDFVKEKTLTCYHGIKADGCGECPACKLRLQGMHTYLHTKQHIGGSI

SEQ ID NO: 41029 - protein, 229 aa, Pragia fontium
  REGION 1..229: note = tr|A0A379DRP1|A0A379DRP1_9GAMM 7-cyano-7-deazaguanine synthase OS=Pragia fontium OX=82985; GN = queC PE=3 SV=1
MKRAVVVFSGGQDSTTCLIQALTQYDEVHCVTFDYGQRHLAEIEVARNLTKQLNVAAHKVMDVGLLNELAISSLTRDNIPVPKSSDDGIPNTFVPGRNILFLTLAAIYAYQIKAEAVITGVCETDFSGYPDCRDEFVKALNHAVALGMDYPVRFDTPLMWLDKAETWALADYYGKLDLIRNQTLTCYNGIQGDGCGECPSCHLRANGLKSYLANKQQTLQQLKIKLKLS

SEQ ID NO: 41030 - protein, 229 aa, Pragia fontium
  REGION 1..229: note = tr|A0A0G3CLD1|A0A0G3CLD1_9GAMM 7-cyano-7-deazaguanine synthase OS=Pragia fontium OX=82985; GN = queC PE=3 SV=1
MKRAVVVFSGGQDSTTCLIQALTQYDEVHCVTFDYGQRHLAEIEVARNLTKQLNVAAHKVMDVGLLNELAISSLTRDNIPVPKSSDDGIPNTFVPGRNILFLTLAAIYAYQIKAEAVITGVCETDFSGYPDCRDEFVKALNHAVALGMDYPVRFDTPLMWLDKAETWALADYYGKLDLIRNQTLTCYNGIQGDGCGECPSCHLRANGLKTYLANKQQTLQQLKIKLKLN

SEQ ID NO: 41031 - protein, 229 aa, Pragia sp.
  REGION 1..229: note = tr|A0A411WIK6|A0A411WIK6_9GAMM 7-cyano-7-deazaguanine synthase OS=Pragia sp. CF-458; OX = 2498113 GN=queC PE=3 SV=1
MKRAVVVFSGGQDSTTCLIQALTQYDEVHCVTFDYGQRHQAEIDVARTLAKQLGATAHKVLDTGLLNQLAISSLTRDNIPVPTSVDDGVPNTFVPGRNILFLTLAAIYAYQIKAQTVITGVCETDFSGYPDCRDEFVKALNHAVALGMDSPVKFETPLMWLDKAETWALADYYGKLALIRHQTLTCYNGIQGDGCGECPACHLRANGLKTYQDNRQQVMAQLKGKLTLS

SEQ ID NO: 41032 - protein, 240 aa, Prauserella sp.
  REGION 1..240: note = tr|A0A318LBR9|A0A318LBR9_9PSEU 7-cyano-7-deazaguanine synthase OS=Prauserella sp. YIM 121212 OX=1477506 GN=queC PE=3 SV=1
MRGVVAVPIEPSPHRHPRHAIVIASGGLDSTVLAYWLAARGAELTLLSFDYGQRHRVELEHAAEIATLLECPHEIVNLSSLGGLLVGSALTDSDVAVPDGYYTDESMRATVVPNRNAIMLDIAVAVAVARKADAVAFGAHAGDHAIYPDCRPEFVERFTRSARTANEGLLVEEFEILAPFLDQSKTDIVRLGSALGVPFERTWSCYRGETVHCGTCGTCTERKEAFEQNDIPDPTSYSRA

SEQ ID NO: 41033 - protein, 234 aa, Prauserella sp.
  REGION 1..234: note = tr|A0A365ZET3|A0A365ZET3_9PSEU 7-cyano-7-deazaguanine synthase OS=Prauserella sp. PE36; OX = 1504709 GN=queC PE=3 SV=1
MPIGTPEHRHPRHAIVIASGGLDSTVLAYWLAARGAELTLLSFDYGQRHRVELEHAADIARLLNCPHETVELAMLGRLLVGSALTDTEVSVPDGHYTDESMRATVVPNRNAIMLDIAVAVAIVHKADVVAFGAHAGDHAIYPDCRPEFVERFTRSARTANEGLLVDEFEILAPFLTQSKTDIVRIGAALNVPFERTWSCYRGEAAHCGTCGTCTERKEAFEQNGITDPTNYRCA

SEQ ID NO: 41034 - protein, 218 aa, unidentified
  source 1..218: note = Prevotella aff.
  REGION 1..218: note = tr|A0A1I0ML40|A0A1I0ML40_9BACT 7-cyano-7-deazaguanine synthase OS=Prevotella aff. ruminicola Tc2-24 OX=81582 GN=queC PE=3 SV=1
MKKDTIIILSGGMDSVTLLYDQQERIALAVSFDYGSNHNAREIPFAKLHCERLGIKHVVIPLDFMAHYFRSSLLEGAEAIPEGHYADENMRSTVVPFRNGIMLAIAVGMAESNGLRFVMMANHGGDHTIYPDCTPQFVAAFDEASRAGTFVNVGLLTPFVNWSKGDIARRGKELGLDYAETWSCYKGGEKHCGKCGTCVERKEALADAGIDDPTIYES

SEQ ID NO: 41035 - protein, 217 aa, Prevotella amnii
  REGION 1..217: note = tr|A0A096AVX6|A0A096AVX6_9BACT 7-cyano-7-deazaguanine synthase OS=Prevotella amnii DNF00058 OX=1401066 GN=queC PE=3 SV=1
MRNSVIIVSGGLDSITLLYEKADDIALAISFDYGQNHSKNELPLAEYHCKKLGIPHITIPLKFMNVYLKSSLLEGSEAIPEGHYEEENMKSTVVPFRNGIMLSIAIGIAESHNLKYVMIANHGGDHTIYPDCRPEFISAINNAACAGTYINVQVVAPYTNISKTEIVKRGVALGIDYNKTWSCYKGGEKHCGKCGTCVERKEAFLKADVNDPTEYVE

SEQ ID NO: 41036 - protein, 234 aa, Prevotella amnii
  REGION 1..234: note = tr|A0A134BK20|A0A134BK20_9BACT 7-cyano-7-deazaguanine synthase OS=Prevotella amnii; OX = 419005 GN=queC PE=3 SV=1
MKSYLFFLLFLHYKEKSMRNSVIIVSGGLDSITLLYEKADDIALAISFDYGQNHSKNELPLAEYHCKKLGIPHITIPLKFMNVYLKSSLLEGSEAIPEGHYEEENMKSTVVPFRNGIMLSIAIGIAESHNLKYVMIANHGGDHTIYPDCRPEFISAIDKAACAGTYINVQVVAPYTNISKTEIVKRGVALGIDYNKTWSCYKGGEKHCGKCGTCVERKEAFLKADVNDPTEYVE

SEQ ID NO: 41037 - protein, 217 aa, Prevotella baroniae
  REGION 1..217: note = tr|U2QLA7|U2QLA7_9BACT 7-cyano-7-deazaguanine synthase OS=Prevotella baroniae F0067 OX=1115809 GN=queC; PE = 3 SV=1
MKDSIIIVSGGMDSITLLHDKKDEIALGVSFDYGSNHNRQEIPFAQLHCERLGIKHVTIPLDFMGRHFKSSLLEGADAIPEGHYAEDNMKSTVVPFRNGIMLAIAVGMAESYGLTKVLIANHAGDHTIYPDCRPAFIAAIDRAAQAGTFADVRVEAPYTHLTKGEIAAVGKRLKLDYAETWSCYKGGERHCGKCGTCIERKEALAFAGIADTTDYEE

SEQ ID NO: 41038 - protein, 242 aa, Prevotella bergensis
  REGION 1..242: note = tr|D1PYH8|D1PYH8_9BACT 7-cyano-7-deazaguanine synthase OS=Prevotella bergensis DSM 17361 OX=585502; GN = exsB PE=3 SV=1
MIDNTNQCKSSTPLKGLDVSSSANKRDAIIIVSGGMDSITMLYEFQDRIALGLSFDYGSNHNAREIPYAEMHCKRLGIPHIIIPLDFMSRYFKSSLLEGADAIPEGDYNEVGMKSTVVPFRNGIMLSIAAGMAESQNLKYIMMANHSGDHIIYPDCRPEFIRAMSKATQTGTFPGIKILAPYTDITKGDIACRGKALGLDYTETWSCYKGGERHCGKCGTCLERIAALKDAGIKDLTEYEEE

SEQ ID NO: 41039 - protein, 217 aa, Prevotella bivia
  REGION 1..217: note = tr|A0A096CIH0|A0A096CIH0_9BACT 7-cyano-7-deazaguanine synthase OS=Prevotella bivia DNF00320 OX=1401068 GN=queC PE=3 SV=1
MKDSVIIVSGGLDSVTLLYEKADEIALAISFDYGQNHSKNELPLAAYHCEKLGIRHIVIPLKFINEYFKSSLLDGGEAIPEGHYEENNMKSTVVPFRNGIMLSIATGIAESHALKRVMIANHGGDHTIYPDCRPAFIQAMNGATATGTYINVQVEAPYTNITKAEIVHRGAALGIDYSKTWSCYKGGEKHCGKCGTCVERKEAFRDAGVVDPTIYIE

SEQ ID NO: 41040 - protein, 217 aa, Prevotella bivia; identical to SEQ ID NO: 41039
  REGION 1..217: note = tr|A0A137T013|A0A137T013_9BACT 7-cyano-7-deazaguanine synthase OS=Prevotella bivia; OX = 28125 GN=queC PE=3 SV=1

SEQ ID NO: 41041 - protein, 217 aa, Prevotella bryantii
  REGION 1..217: note = tr|D8DY77|D8DY77_PREBR 7-cyano-7-deazaguanine synthase OS=Prevotella bryantii B14 OX=752555 GN=queC PE=3; SV = 1
MKDSVIVVSGGLDSITLLYEKQAEIALGISFDYGSNHNSKEIPFAKMHCERLGIKHITINLEFMHQYFKSSLLEGGDAIPEGNYDEENMKSTVVPFRNGIMLSIAVGLAESHGLKRIFIANHGGDHTIYPDCRPEFIQAIDNAAQAGTYENVRIEAPYTNITKADIVKRGSALGIHYEDTWSCYKGGDIHCGKCGTCTERKEAFELAGVQDPTEYIE

SEQ ID NO: 41042 - protein, 217 aa, Prevotella bryantii; identical to SEQ ID NO: 41041
  REGION 1..217: note = tr|A0A255SME4|A0A255SME4_PREBR 7-cyano-7-deazaguanine synthase OS=Prevotella bryantii; OX = 77095 GN=queC PE=3 SV=1

SEQ ID NO: 41043 - protein, 217 aa, Prevotella buccae
  REGION 1..217: note = tr|E6K8E8|E6K8E8_9BACT 7-cyano-7-deazaguanine synthase OS=Prevotella buccae ATCC 33574 OX=873513 GN=exsB; PE = 3 SV=1
MKDSAIIVSGGMDSITLLYDKKDEIALGISFDYGSNHNAREIPFAQMHCERLGIKHIVINLDFMHRYFKSSLLDGADAIPEGHYEADNMKSTVVPFRNGIMLSIAIGIAESHNLKKVLIANHGGDHTIYPDCRPEFIHAIDKAARYGTFINVGVSAPYTDITKGQIASIGKRLGIDYRETWSCYKGGVVHCGKCGTCIERKEALAEAGIEDPTVYEG

SEQ ID NO: 41044 - protein, 217 aa, Prevotella buccae
  REGION 1..217: note = tr|D3HWB4|D3HWB4_9BACT 7-cyano-7-deazaguanine synthase OS=Prevotella buccae D17 OX=575611 GN=queC PE=3; SV = 1
MKDSAIIVSGGMDSITLLYDKKDEIALGISFDYGSNHNAREIPFAQMHCERLGIKHIVINLDFMHRYFKSSLLDGADAIPEGHYEADNMKSTVVPFRNGIMLSIAIGIAESHNLKKVLIANHGGDHTIYPDCRPEFIHAIDKAARYGTFINVGVSAPYTDITKGQIASIGKRLGIDYRETWSCYKGGVVHCGKCGTCIERKEALAEAGIEDPTVYEE

SEQ ID NO: 41045 - protein, 228 aa, Prevotella buccalis
  REGION 1..228: note = tr|D1W7N2|D1W7N2_9BACT 7-cyano-7-deazaguanine synthase OS=Prevotella buccalis ATCC 35310 OX=679190; GN = queC PE=3 SV=1
MGITRMERNKMEKDSLIIVSGGMDSITMLYEYQQRIAIGVSFDYGSNHNQKEIPLAKMHCDRLGIRHIVIPLSFMHDYFKSSLLEGDDAIPEGHYEEENMKSTVVPFRNGIMLAVGCGLAVSNHLKYVMIANHGGDHTIYPDCRPEFIDSFSQAMAAGTFEGITILAPYTQISKGEIALRGKKLGINYAETWSCYKGGDKQCGKCGTCVERKEALAFAGINDDTPYED

SEQ ID NO: 41046 - protein, 218 aa, Prevotella buccalis
  REGION 1..218: note = tr|A0A096BT15|A0A096BT15_9BACT 7-cyano-7-deazaguanine synthase OS=Prevotella buccalis DNF00853 OX=1401074 GN=queC PE=3 SV=1
MEKDSLIIVSGGMDSITMLYEYQQRIAIGVSFDYGSNHNQKEIPLAKMHCERLGIRHIVIPLSFMHDYFKSSLLEGDDAIPEGHYEEENMKSTVVPFRNGIMLAVGCGLAVSNHLKYVMIANHGGDHTIYPDCRPEFIDSFSQAMAAGTFEGITILAPYTQISKGEIALRGKKLGINYAETWSCYKGGDKQCGKCGTCVERKEALAFAGIKDDTPYED

SEQ ID NO: 41047 - protein, 236 aa, unidentified
  source 1..236: note = Prevotella colorans
  REGION 1..236: note = tr|A0A2U0UFV2|A0A2U0UFV2_9BACT 7-cyano-7-deazaguanine synthase OS=Prevotella colorans; OX = 1703337 GN=queC PE=3 SV=1
MTEKKEEVSPRDNSIEKENKADCVLIVSGGMDSITMLYEFKDRIALGISFDYGSKHNAKEIPLAKLHCQRLGIPHLTIPLHFMAQYFRSSLLKGGEDIPEGNYDDDNMRSTVVPFRNGIMLSIATGIAESHDLRYVMMANHSGDHTIYPDCTPQFVQAMSQATEAGTFPGIKILAPYTRINKADIARRGKILKIDYSETWSCYKGEEFHCGVCGTCRERREALAEAGIDDTTIYMD

SEQ ID NO: 41048 - protein, 217 aa, Prevotella copri
  REGION 1..217: note = tr|D1P983|D1P983_9BACT 7-cyano-7-deazaguanine synthase OS=Prevotella copri DSM 18205 OX=537011 GN=queC; PE = 3 SV=1
MKDSVIIVSGGMDSITLLYDKKDEIALGISFNYGSNHNEREIPFAKMHCERLGIKHITIDLGFMHQYFKSSLLEGADAIPEGHYADDNMKSTVVPFRNGIMLSIAIGIAESNNLKKVFIANHGGDHTIYPDCRPEFIKAIDEAAEAGTFVDVRVVAPYTNITKGQIAEIGKKLGIDYAETWSCYKGGEKHCGKCGTCVERKEALAEAGIEDTTEYEE

SEQ ID NO: 41049 - protein, 217 aa, Prevotella copri
  REGION 1..217: note = tr|A0A3E5AD90|A0A3E5AD90_9BACT 7-cyano-7-deazaguanine synthase OS=Prevotella copri; OX = 165179 GN=queC PE=3 SV=1
MKDSVIIVSGGMDSITLLYDKKDEIALGISFNYGSNHNEREIPFAKMHCERLGIKHITIDLGFMHQYFKSSLLEGADAIPEGHYAADNMKSTVVPFRNGIMLSIAIGIAESNKLKKVFIANHGGDHTIYPDCRPEFIKAIDEAAEAGTFVDVRVVAPYTNITKGQIAKIGKKLGIDYAETWSCYKGGEKHCGKCGTCVERKEALAEAGIEDTTEYEE

SEQ ID NO: 41050 - protein, 217 aa, Prevotella corporis
  REGION 1..217: note = tr|A0A133PZ64|A0A133PZ64_9BACT 7-cyano-7-deazaguanine synthase OS=Prevotella corporis; OX = 28128 GN=queC PE=3 SV=1
MKDSIIIVSGGLDSITLLYDKQETIELAISFDYGQNHAEKEIPFAAYHCNKLGISHIVIPLKFMQSYFKSSLIEGSDKIPDGHYAEDNMKSTVVPFRNGIMLSIAVGIAESHNLNRIYIANHGGDHTIYPDCRPEFISSMNRAATTGTFNNTCIEAAYTNMSKADIVRRGLSLGIDYSKTWSCYKNGEHQCGKCGTCVERREAFKVVGVEDPTTYSL

SEQ ID NO: 41051 - protein, 217 aa, Prevotella dentalis
  REGION 1..217: note = tr|F9D0J5|F9D0J5_PREDD 7-cyano-7-deazaguanine synthase OS=Prevotella dentalis (strain ATCC 49559 / DSM 3688 / JCM 13448 / NCTC 12043 / ES 2772) OX=908937 GN=exsB; PE = 3 SV=1
MKDSIIIVSGGMDSITMLYEFRNRIALGLSFDYGSNHNAQELPLARMHCRRLGIPHVTIPLDFMSRYFKSSLLEGAAAIPEGDYDEQNMLSTVVPFRNGIMLSIAAGMAESRGLKRVMMANHTGDHTVYPDCRSEFVEAMSAATRAGTWPGIEVWAPYTRLTKAGIARRGKALGLDYAETWSCYKGGERHCGQCGTCRERREALAEAGITDTTPYED

SEQ ID NO: 41052 - protein, 230 aa, Prevotella denticola
  REGION 1..230: note = tr|F2KTE0|F2KTE0_PREDF 7-cyano-7-deazaguanine synthase OS=Prevotella denticola (strain F0289) OX=767031; GN = queC PE=3 SV=1
MFFVNLQEKTDQMKDSVIIVSGGLDSITLLYDRAETIALAVSFDYGQNHGAKELPFAAHHCRKLGIPHITIPLSFMHRFFKSSLLDGAEAIPEGHYAEENMKSTVVPFRNGIMLAIATGIAESHGLRRVYIANHGGDHTIYPDCRPDFIQAMDGAATAGTFVNVRIEAPYTNITKADIVRRGTALGVDYSKTWSCYKGSDVHCGKCGTCVERKEAFLEAGVKDPTEYKPG

SEQ ID NO: 41053 - protein, 218 aa, Prevotella denticola
  REGION 1..218: note = tr|A0A379ECS8|A0A379ECS8_9BACT 7-cyano-7-deazaguanine synthase OS=Prevotella denticola; OX = 28129 GN=queC PE=3 SV=1
MKDSVIIVSGGLDSITLLYDKAETIALAVSFDYGQNHGAKELPFAAHHCRKLGIPHITIPLSFMHRYFKSSLLDGAEAIPEGHYAEENMKSTVVPFRNGIMLAIATGIAESHGLKRVYIANHGGDHTIYPDCRPDFIQAMDGAAAAGTFVNVRIEAPYTNITKADIVCRGTALGVDYSKTWSCYKGSDVHCGKCGTCVERKEAFLEAGVKDPTEYEPA

SEQ ID NO: 41054 - protein, 217 aa, Prevotella disiens
  REGION 1..217: note = tr|U2IY48|U2IY48_9BACT 7-cyano-7-deazaguanine synthase OS=Prevotella disiens JCM 6334 = ATCC 29426; OX = 1235811 GN=queC PE=3 SV=1
MKDSIIIVSGGLDSITLLHQKANTIALAISFDYGQNHASKELPFAALHCKRLGIRHIVIPLQFMHEYFKSSLLEGSDKIPEGHYEEDNMKSTVVPFRNGIMLAIAAGIAESHHLNRIYIANHGGDHTIYPDCRPEFIDAMTAATQAGTFNNTRIEAAFTNITKADIVSIGTKLGIDYAETWSCYKDGNHHCGKCGTCVERKEAFQQAGIDDPTEYEA

SEQ ID NO: 41055 - protein, 217 aa, Prevotella disiens
  REGION 1..217: note = tr|A0A096ATS2|A0A096ATS2_9BACT 7-cyano-7-deazaguanine synthase OS=Prevotella disiens DNF00882 OX=1401075 GN=queC PE=3 SV=1
MKDSIIIVSGGLDSITLLHQKANTIALAISFDYGQNHASKELPFAALHCKRLGIRHIVIPLQFMHEYFKSSLLEGSEKIPEGHYEEDNMKSTVVPFRNGIMLAIAAGIAESHHLNRIYIANHGGDHTIYPDCRPEFIDAMTAATQAGTFNNTRIEAAFTNITKADIVSIGTKLGIDYAETWSCYKDGNHHCGKCGTCVERKEAFQQAGIDDPTEYEA

SEQ ID NO: 41056 - protein, 218 aa, Prevotella fusca
  REGION 1..218: note = tr|A0A0K1NLQ4|A0A0K1NLQ4_9BACT 7-cyano-7-deazaguanine synthase OS=Prevotella fusca JCM 17724 OX=1236517 GN=queC PE=3 SV=1
MKDSVIIVSGGLDSITLLYDKAESIALAISFDYGQNHGAKELPFAAYHCEKLGIPHITIPLSFMHQYFKSSLLDGAEAIPEGHYEEENMKSTVVPFRNGIMLSIATGIAESHELKRVYIANHGGDHTIYPDCRPEFIHAMNGATEAGTFVNVRVEAPYTEVTKAEIVARGAALGIDYSRTWSCYKGSDVHCGKCGTCMERREAFENAGVDDPTTYCKD

SEQ ID NO: 41057 - protein, 217 aa, Prevotella histicola
  REGION 1..217: note = tr|G6AGS5|G6AGS5_9BACT 7-cyano-7-deazaguanine synthase OS=Prevotella histicola F0411 OX=857291 GN=queC; PE = 3 SV=1
MKDSVIIVSGGLDSITLLYDKASTIALAISFDYGQNHGAKELPFAEYHCHKLGIPHITIPLSFMHQYFKSSLLDGAAAIPEGHYEEENMKSTVVPFRNGIMLAIATGIAESHELKRVYIANHGGDHVIYPDCRPEFISAMNGATEAGTFVNVRVEAPYTNITKADIVRRGAALGIDYSKTWSCYKGSDVHCGKCGTCVERKEAFADAGVNDPTVYEE

SEQ ID NO: 41058 - protein, 217 aa, Prevotella histicola
  REGION 1..217: note = tr|A0A095YRM9|A0A095YRM9_9BACT 7-cyano-7-deazaguanine synthase OS=Prevotella histicola JCM 15637 = DNF00424 OX=1236504 GN=queC PE=3 SV=1
MKDSVIIVSGGLDSITLLYDKASTIALALSFDYGQNHGAKELPFAEYHCHKLGIPHITIPLSFMHQYFKSSLLDGAAAIPEGHYEEENMKSTVVPFRNGIMLAIATGIAESHELKRVYIANHGGDHVIYPDCRPEFISAMNGATEAGTFVNVRVEAPYTNITKADIVRRGAALGIDYSKTWSCYKGSDVHCGKCGTCVERKEAFADAGVNDPTVYEE

SEQ ID NO: 41059 - protein, 217 aa, Prevotella intermedia
  REGION 1..217: note = tr|A0A1P8JFQ6|A0A1P8JFQ6_PREIN 7-cyano-7-deazaguanine synthase OS=Prevotella intermedia ATCC 25611 = DSM 20706 OX=1122984 GN=queC PE=3 SV=1
MKDSIIIVSGGLDSITLLYDKAETIALAVSFDYGQNHACKELPFAALHCKRLGIRHIVIPLQFMQQYFKSSLLEGSDKIPEGHYEEENMKSTVVPFRNGIMLAIAAGIAESHNLNRIYIANHGGDHTIYPDCRPDFIDAMTAATEAGTFNNTRIEAAFTNITKADIVRIGTKLGINYAETWSCYKAGKHHCGKCGTCIERHEAFGEAGLADPTEYEE

SEQ ID NO: 41060 - protein, 217 aa, Prevotella intermedia
  REGION 1..217: note = tr|A0A0D9NEG5|A0A0D9NEG5_PREIN 7-cyano-7-deazaguanine synthase OS=Prevotella intermedia ZT OX=1347790 GN=queC PE=3 SV=1
MKDSIIIVSGGLDSITLLYDKAETIALAVSFDYGQNHACKELPFAALHCKRLGIRHIVIPLQFMQQYFKSSLLEGSDKIPEGHYEEENMKSTVVPFRNGIMLAIAAGIAESHNLNRIYIANHGGDHTIYPDCRPDFIDAMTAATEAGTFNNTRIEAAFTNITKADIVRIGTKLGINYAETWSCYKAGKHHCGKCGTCIERHEAFDEAGLADPTEYEE

SEQ ID NO: 41061 - protein, 218 aa, unidentified
  source 1..218: note = Prevotella jejuni
  REGION 1..218: note = tr|A0A2N9Y9K1|A0A2N9Y9K1_9BACT 7-cyano-7-deazaguanine synthase OS=Prevotella jejuni; OX = 1177574 GN=queC PE=3 SV=1
MKDSVIIVSGGLDSITLLYDKAETIALAISFDYGQNHGSKELPYAQYHCEKLGIPHITIPLSFMHEYFKSSLLDGAEAIPEGHYAEENMKSTVVPFRNGIMLAIATGIAESHELKRVYIANHGGDHTIYPDCRPEFINAMNGATEAGTFVKVCVEAPYTEITKAEIVARGAALGIDYAKTWSCYKGSDVHCGKCGTCVERREAFEAAGVKDPTVYSED

SEQ ID NO: 41062 - protein, 217 aa, Prevotella loescheii
  REGION 1..217: note = tr|A0A069QK06|A0A069QK06_PRELO 7-cyano-7-deazaguanine synthase OS=Prevotella loescheii DSM 19665 = JCM 12249 = ATCC 15930 OX=1122985 GN=queC PE=3; SV = 1
MKDSVIVVSGGMDSITLLYEKKDEIALGISFDYGSNHNHNELPLAALHCQRLGIAHVVIPLGFMHQYFKSSLLESGASIPDGSYDEDNMKSTVVPFRNGIMLAVAAGIAESNGLTKVLIANHGGDHTIYPDCRPEFIAAMDAAVEAGTFANVHVVAPYTNISKADIARRGSSLGIDYAETWSCYKGGDVHCGTCGTCVERKEALREAGIEDNTKYER

SEQ ID NO: 41063 - protein, 217 aa, Prevotella maculosa
  REGION 1..217: note = tr|H1HJG9|H1HJG9_9BACT 7-cyano-7-deazaguanine synthase OS=Prevotella maculosa OT 289 OX=999422 GN=queC; PE = 3 SV=1
MKDSVIIVSGGMDSITLLYDKKNEIALGISFNYESNHNAKEIPLAEMHCRRLGIKHITINLDFMGQYFKSSLLEGGEAIPEGNYADENMKSTVVPFRNGIMLSIAIGIAESNNLKKVLIANHGGDHTIYPDCRPEFIKAIDAAAYAGTFVNAHVEAPYTHITKGDIARIGKRLGLNYAETWSCYKGADKHCGRCGTCIERKEALTEAGIDDTTEYEE

SEQ ID NO: 41064 - protein, 218 aa, Prevotella melaninogenica
  REGION 1..218: note = tr|A0A250KKI6|A0A250KKI6_9BACT 7-cyano-7-deazaguanine synthase OS=Prevotella melaninogenica OX=28132 GN=queC PE=3 SV=1
MKDSVIIVSGGLDSITLLYDKAETIALAISFDYGQNHGAKELPYAQYHCEKLGIPHITIPLSFMHQYFKSSLLDGADAIPEGHYEEENMKSTVVPFRNGIMLSIATGIAESHELKRVYIANHGGDHTIYPDCRPEFIHAMNGAAKAGTFVNVCIEAPYTEVTKAEIVARGAALGIDYSKTWSCYKGADVHCGKCGTCVERMEAFEDAGVDDPTTYCKD

SEQ ID NO: 41065 - protein, 218 aa, Prevotella melaninogenica
  REGION 1..218: note = tr|D9RWC8|D9RWC8_PREMB 7-cyano-7-deazaguanine synthase OS=Prevotella melaninogenica (strain ATCC 25845 / DSM 7089 / JCM 6325 / VPI 2381 / B282) OX=553174 GN=queC; PE = 3 SV=1
MKDSVIIVSGGLDSITLLYDKAETIALAISFDYGQNHGAKELPYAQYHCEKLGIPHITIPLSFMHQYFKSSLLDGADAIPEGHYEEENMKSTVVPFRNGIMLAIATGIAESHELKRVYIANHGGDHTIYPDCRPEFIHAMNGATEAGTFVKVRVEAPYTEITKAEIVARGAALGIDYSKTWSCYKGADIHCGKCGTCVERKEAFEAAGVKDPTIYSMD

SEQ ID NO: 41066 - protein, 218 aa, Prevotella multiformis
  REGION 1..218: note = tr|F0F8Q5|F0F8Q5_9BACT 7-cyano-7-deazaguanine synthase OS=Prevotella multiformis DSM 16608 OX=888743; GN = exsB PE=3 SV=1
MKDSVIIVSGGLDSVTLLYDKAEEIALAISFDYGQNHGARELPFAEYHCTKLGIPHITIPLSFMHRYFKSSLLDGAEAIPEGHYAEENMKSTVVPFRNGIMLAIATGIAESHGLKRVYIANHGGDHTIYPDCRPDFIRAMDGAATAGTFVNVRIEAPYTNITKADIVRRGTALDIDYSKTWSCYKGADLHCGKCGTCVERKEAFQEAGVNDPTEYEPA

SEQ ID NO: 41067 - protein, 217 aa, Prevotella multisaccharivorax
  REGION 1..217: note = tr|F8N5C3|F8N5C3_9BACT 7-cyano-7-deazaguanine synthase OS=Prevotella multisaccharivorax DSM 17128; OX = 688246 GN=queC PE=3 SV=1
MKDSIIIVSGGMDSITMLYEYKDRIALGVSFNYGSNHNQREIPFAEMHCKRLGIPYITIDLAFMPQYLKSSLLEGADAIPEGNYDDENMKSTVVPFRNGIMLSIAVGIAESNHLKYVMMANHGGDHAIYPDCRPEFVKAMSAATTAGTYENVEIWAPYTHITKADIARHGKALGIDYSETWSCYKGGERHCGKCGTCRERKDALHKAGIVDTTEYEE

SEQ ID NO: 41068 - protein, 217 aa, Prevotella nigrescens
  REGION 1..217: note = tr|A0A246ELR1|A0A246ELR1_9BACT 7-cyano-7-deazaguanine synthase OS=Prevotella nigrescens; OX = 28133 GN=queC PE=3 SV=1
MKDSIIIVSGGLDSITLLYDKAETIALAVSFDYGQNHASRELPFAALHCQRLGIRHIIIPLQFMQQYFKSSLLEGSDKIPEGHYEEENMKSTVVPFRNGIMLAIAAGIAESHNLNRIYIANHGGDHTIYPDCRPEFIKAMTAATQAGTFNNTRIEAAFTNITKADIVRIGTKLGINYAETWSCYKGGDCHCGKCGTCIERKEAFREAGLTDPTKYEE

SEQ ID NO: 41069 - protein, 217 aa, Prevotella nigrescens; identical to SEQ ID NO: 41068
  REGION 1..217: note = tr|V8CMR4|V8CMR4_9BACT 7-cyano-7-deazaguanine synthase OS=Prevotella nigrescens CC14M OX=1073366 GN=queC; PE = 3 SV=1

SEQ ID NO: 41070 - protein, 218 aa, Prevotella oralis
  REGION 1..218: note = tr|E7RTB1|E7RTB1_9BACT 7-cyano-7-deazaguanine synthase OS=Prevotella oralis ATCC 33269 OX=873533 GN=exsB; PE = 3 SV=1
MKDSVIIVSGGMDSVTMLYEYQDRIALGISFDYGSNHNAKEIPYARLHCKRLGIRHIVIDLGFVHQYFKSSLLEGADAIPEGSYNEGNMKSTVVPFRNGIMLSIAVGVAESHHLKYVMMANHGGDHAIYPDCRPDFVAAMSTAATAGTYEKVCVLAPYTGITKTDIARRGQKFGVNFAETWSCYKGGDKHCGHCGTCRERKEALAEAGIEDLTEYEER

SEQ ID NO: 41071 - protein, 218 aa, Prevotella oralis
  REGION 1..218: note = tr|V8C431|V8C431_9BACT 7-cyano-7-deazaguanine synthase OS=Prevotella oralis CC98A OX=1073367 GN=queC; PE = 3 SV=1
MKDSVIIVSGGMDSVTMLYEYQDRIALGISFDYGSNHNAKEIPYARLHCKRLGIRHIVIDLGFVHQYFKSSLLEGADAIPEGSYNEGNMKSTVVPFRNGIMLSIAVGVAESHHLKYVMMANHGGDHAIYPDCRPDFVAAMSTAATAGTYEKVCVLAPYTGITKTDIARRGQKFGVNFAETWSCYKGGDKHCGRCGTCRERKEALAEAGIEDLTEYEER

SEQ ID NO: 41072 - protein, 217 aa, Prevotella oris
  REGION 1..217: note = tr|D7NFF4|D7NFF4_9BACT 7-cyano-7-deazaguanine synthase OS=Prevotella oris C735 OX=563008 GN=queC PE=3; SV = 1
MKDSVIIVSGGMDSITLLYDKKDEIALGISFDYGSNHNAKEIPFAEMHCRRLGIKHITINLDFMHRYFKSSLLEGAEAIPEGHYADDNMKSTVVPFRNGIMLSIAIGIAESNNLKKVLIANHGGDHTIYPDCRPEFIKAIDAAAYAGTFVNTHVEAPYTNITKGDIARIGKKLGLDYTETWSCYKGGDKHCGKCGTCIERKEALAEAGIKDATEYEE

SEQ ID NO: 41073 - protein, 217 aa, Prevotella oris
  REGION 1..217: note = tr|A0A448L509|A0A448L509_9BACT 7-cyano-7-deazaguanine synthase OS=Prevotella oris; OX = 28135 GN=queC PE=3 SV=1
MKDSVIIVSGGMDSITLLYDKKDEIALGISFDYGSNHNAKEIPLAEMHCRRLGIKHITINLDFMHRYFKSSLLEGAEAIPEGHYADDNMKSTVVPFRNGIMLSIAIGIAESNNLKKVLIANHGGDHTIYPDCRPEFIKAIDAAAYAGTFVNAHVEAPYTNITKGDIARIGKKLGLDYTETWSCYKGGDKHCGKCGTCVERKEALAEAGIKDATEYEE

SEQ ID NO: 41074 - protein, 219 aa, Prevotella oulorum
  REGION 1..219: note = tr|G1WB53|G1WB53_9BACT 7-cyano-7-deazaguanine synthase OS=Prevotella oulorum F0390 OX=702438 GN=queC; PE = 3 SV=1
MTKKNSVIIVSGGMDSITLLYDRQDDIALGISFDYGSNHNAREIPLAAMHCKRLGIPHIVINLDFMQRHFESSLLQGADAIPEGHYAADNMQSTVVPFRNGIMLAIAIGVAESHGLTQVFIANHGGDHTLYPDCTPQFIRAIDAAATAGTYVKAHVVAPYTNISKADIARIGKRLGLNYAETWSCYKGGAHHCGKCGTCIERKEALQAAGIDDPTLYDA

SEQ ID NO: 41075 - protein, 219 aa, Prevotella oulorum
  REGION 1..219: note = tr|A0A1T4M3X0|A0A1T4M3X0_9BACT 7-cyano-7-deazaguanine synthase OS=Prevotella oulorum; OX = 28136 GN=queC PE=3 SV=1
MAKKNSVIIVSGGMDSITLLYDRQDDIALGISFDYGSNHNAREIPLAAMHCKRLGIPHIVINLDFMQRHFESSLLQGADAIPEGHYAANNMQSTVVPFRNGIMLAIAIGVAESHGLTQVFIANHGGDHTLYPDCTPQFIRAIDAAATAGTYVKAHVVAPYTNISKADIARIGKRLGLNYAETWSCYKGGAHHCGKCGTCIERKEALQAAGIDDPTLYDA

SEQ ID NO: 41076 - protein, 217 aa, Prevotella pallens
  REGION 1..217: note = tr|F9DJF0|F9DJF0_9BACT 7-cyano-7-deazaguanine synthase OS=Prevotella pallens ATCC 700821 OX=997353; GN = exsB PE=3 SV=1
MKDSIIIVSGGLDSITLLYDKAATIALAVSFDYGQNHASRELPFAALHCKRLGIQHIVIPLQFMQQYFKSSLLDGAENIPEGHYEEENMKSTVVPFRNGIMLAIAAGIAESHNLNRIYIANHGGDHTIYPDCRPEFINAMTAATQAGTFNNTRVEAAFTNITKADIVRIGNKLGINYAETWSCYKGGKCHCGKCGTCIERKEAFQEAGLTDPTEYEA

SEQ ID NO: 41077 - protein, 217 aa, Prevotella pallens; identical to SEQ ID NO: 41076
  REGION 1..217: note = tr|A0A379EZ96|A0A379EZ96_9BACT 7-cyano-7-deazaguanine synthase OS=Prevotella pallens; OX = 60133 GN=queC PE=3 SV=1

SEQ ID NO: 41078 - protein, 217 aa, Prevotella ruminicola
  REGION 1..217: note = tr|A0A1H5TC30|A0A1H5TC30_PRERU 7-cyano-7-deazaguanine synthase OS=Prevotella ruminicola; OX = 839 GN=queC PE=3 SV=1
MKKDSILILSGGMDSTTLLYDYQERIALAISFDYGSNHNAKEIPFARWHCEHLGIRHIVIPLEFMSQYFRSSLLEGDAAIPEGHYASENMKSTVVPFRNGIMLAIAAGMAESNELQYIMMANHGGDHTIYPDCRPEFVEAFDAAVHAGTFNGVRLLSPYCNMTKGEIAARGKELGIDYSKTWSCYRGGDKHCGKCGTCVERKEALADAGIPDPTDYE

SEQ ID NO: 41079 - protein, 217 aa, Prevotella ruminicola
  REGION 1..217: note = tr|D5EXA0|D5EXA0_PRER2 7-cyano-7-deazaguanine synthase OS=Prevotella ruminicola (strain ATCC 19189 / JCM 8958 / 23) OX=264731 GN=queC PE=3 SV=1
MKDSIIILSGGMDSTTLLYDYQERIALAISFDYGSNHNAKEIPFAKYHCEQLGIKHLVIPLKFMGEYFRSSLLSGDEAIPEGHYASENMKSTVVPFRNGIMLAVATGMAESNDLQYVMMANHGGDHTIYPDCRPEFVDAFDKTAQAGTFNGVRLLSPYCNMTKGQIAARGKELGIDYSKTWSCYRGGDKHCGKCGTCVERKEALADAGIDDPTEYED

SEQ ID NO: 41080 - protein, 225 aa, Prevotella saccharolytica
  REGION 1..225: note = tr|L1NGL5|L1NGL5_9BACT 7-cyano-7-deazaguanine synthase OS=Prevotella saccharolytica F0055 OX=1127699; GN = queC PE=3 SV=1
MDKNMKDSVIIVSGGMDSITLLYDKKDTIVLGISFDYGSNHNHNELPLARMHCERLGIPHITIDLTFIHEHFKSSLLRGADTIPDGSYSEENMKSTVVPFRNGIMLSIAAGIAESKGLTKLLIANHGGDHTIYPDCRPDFIHAMDYAVAKGTFAHLHIVAPYTNISKTDIVRRGLALGIDYAETWSCYKGGDTPCGTCSTCIERQQALHEAEALPHLSFPLPDIS

SEQ ID NO: 41081 - protein, 217 aa, Prevotella salivae
  REGION 1..217: note = tr|U2L5Z2|U2L5Z2_9BACT 7-cyano-7-deazaguanine synthase OS=Prevotella salivae F0493 OX=1395125 GN=queC; PE = 3 SV=1
MKDSVIIVSGGMDSITLLYDKKDEIALGISFDYGSNHNAKEIPFAEMHCKRLGIKHITINLDFMHQYFKSSLLQGAEAIPEGHYADENMKSTVVPFRNGIMLSIAIGIAESNHLKKVLIANHGGDHTIYPDCRPQFIQAIDAAANAGTFVNVRVEAPYTNITKGDIARIGKRLGLDYTETWSCYKGGEKHCGKCGTCIERKEALQEAGIHDATEYEE

SEQ ID NO: 41082 - protein, 217 aa, Prevotella salivae
  REGION 1..217: note = tr|E6MT81|E6MT81_9BACT 7-cyano-7-deazaguanine synthase OS=Prevotella salivae DSM 15606 OX=888832 GN=exsB; PE = 3 SV=1
MKDSVIIVSGGMDSITLLYDKKDEIALGISFDYGSNHNAKEIPFAEMHCKRLGIKHITINLDFMHQYFKSSLLQGAEAIPEGHYADENMKSTVVPFRNGIMLSIAIGIAESNQLKKVLIANHGGDHTIYPDCRPQFIQAIDAAANAGTFVNVRVEAPYTNITKGDIARIGKRLGLDYTETWSCYKGGEKHCGKCGTCIERKEALQEAGIHDATEYEE

SEQ ID NO: 41083 - protein, 218 aa, Prevotella scopos
  REGION 1..218: note = tr|A0A1B1IB73|A0A1B1IB73_9BACT 7-cyano-7-deazaguanine synthase OS=Prevotella scopos JCM 17725 OX=1236518 GN=queC PE=3 SV=1
MKDSVIIVSGGLDSITLLYDKAETIALAISFDYGQNHGAKELPFAQYHCEKLDIPHITIPLSFMHQYFKSSLLDGADAIPEGHYEEENMKSTVVPFRNGIMLAIATGIAESHELKRVYIANHGGDHTIYPDCRPEFIHAMNGAAEAGTFVNVRIEAPYTKITKAEIVARGAALGIDYSKTWSCYKGADVHCGKCGTCVERKEAFEEAGVQDPTIYHKD

SEQ ID NO: 41084 - protein, 217 aa, Prevotella shahii
  REGION 1..217: note = tr|A0A318HRZ6|A0A318HRZ6_9BACT 7-cyano-7-deazaguanine synthase OS=Prevotella shahii DSM 15611 = JCM 12083 OX=1122991 GN=queC PE=3 SV=1
MKDSIIVVSGGMDSVTLLYDKKDEIALGLSFDYGSNHNHNELPLAAMHCERLGIPHVVIPLGFMHQYFKSSLLESGESIPDGSYNEENMKSTVVPFRNGVMLAVAAGIAESNGLTKILIANHGGDHTIYPDCRPEFIAAMDAAVNAGTFANVHVVAPYTNWSKADIAKRGEVLGLDYTETWSCYKGGDVHCGTCGTCVERKEALREAGIADNTKYER

SEQ ID NO: 41085 - protein, 217 aa, Prevotella sp.
  REGION 1..217: note = tr|A0A3R6HQP2|A0A3R6HQP2_9BACT 7-cyano-7-deazaguanine synthase OS=Prevotella sp. AM34-19LB OX=2292364 GN=queC PE=3 SV=1
MKDSVIIVSGGMDSITLLYDKKDEIALGISFNYGSNHNEREIPFAKMHCERLGIKHITIDLGFMHQYFKSSLLEGADAIPEGHYADDNMKSTVVPFRNGIMLSIAIGIAESNNLKKVLIANHGGDHTIYPDCRPEFIKAIDEAAEAGTFVDVRVVAPYTNITKGEIAAIGKKLGIDYAETWSCYKGGEKHCGKCGTCVERKEALAAAGIEDTTEYED

SEQ ID NO: 41086 - protein, 219 aa, Prevotella sp.
  REGION 1..219: note = tr|R7HPL3|R7HPL3_9BACT 7-cyano-7-deazaguanine synthase OS=Prevotella sp. CAG:279 OX=1262924 GN=queC PE=3; SV = 1
MDEKDSIIVLSGGMDSVTLLYEFRANIALAVTFDYGSNHNRREIEFARMHCERLGIEHIVIPLDFMAKYFKSSLLEGAEAIPEGNYDDENMKSTVVPFRNGIMLAVACGLAESRGLSHVMIANHAGDHAIYPDCRPAFVRAMSSAMSAGTYDGITVMAPYTNVSKTEIARHGARLGLNYAETYSCYKGGEKHCGKCGTCRERIEALHDAGIEDPTEYEE

SEQ ID NO: 41087 - protein, 216 aa, Prevotella stercorea
  REGION 1..216: note = tr|G6AWV1|G6AWV1_9BACT 7-cyano-7-deazaguanine synthase OS=Prevotella stercorea DSM 18206 OX=1002367; GN = queC PE=3 SV=1
MKNSAIIVSGGMDSITLLYDHKDEIALGISFDYGSNHNAREIPFAKMHCERLGIKHITINLDFMHQYFKSSLLDGAEAIPEGHYADDNMKSTVVPFRNGIMLAIAIGIAESNNLDQVFIANHGGDHTIYPDCRPEFINAIDAAATAGTYNNVKVIAPYTKITKSDIARIGKRLGIDYAETWSCYKGGEVHCGKCGTCVERKEALAEAGIEDKTIYE

SEQ ID NO: 41088 - protein, 205 aa, Prevotella stercorea
  REGION 1..205: note = tr|R7H4Q5|R7H4Q5_9BACT 7-cyano-7-deazaguanine synthase OS=Prevotella stercorea CAG:629 OX=1263103; GN = queC PE=3 SV=1
MDSITLLYDRKDEITLGISFDYGSNHNAREIPFAKMHCERLGIKHITINLDFMHQYFKSSLLDGAEAIPEGHYADDNMKSTVVPFRNGIMLAIAIGIAESNNLDQVFIANHGGDHTIYPDCRPEFINAIDAAATAGTYNNVKVIAPYTKITKSDIARIGKRLGIDYAETWSCYKGGEVHCGKCGTCVERKEALAEAGIEDKTIYE

SEQ ID NO: 41089 - protein, 218 aa, Prevotella timonensis
  REGION 1..218: note = tr|A0A2K0XNH7|A0A2K0XNH7_9BACT 7-cyano-7-deazaguanine synthase OS=Prevotella timonensis; OX = 386414 GN=queC PE=3 SV=1
MEKDSLIIVSGGMDSITMLYEYQQRIAIGVSFDYGSNHNQKEIPLAKMHCERLGIRHIVIPLSFIHNYFKSSLLEGDDAIPEGHYEEENMKSTVVPFRNGIMLAVGCGLAVSNHLKYVMIANHGGDHTIYPDCRPEFIDSFSQAMAAGTFEGITILAPYTQLSKGEIALRGKKLGINYAETWSCYKGGDKQCGKCGTCVERKEALAFADIKDDTPYED

SEQ ID NO: 41090 - protein, 218 aa, Prevotella timonensis
  REGION 1..218: note = tr|A0A098YQS5|A0A098YQS5_9BACT 7-cyano-7-deazaguanine synthase OS=Prevotella timonensis S9-PR14 OX=1401062 GN=queC PE=3 SV=1
MEKDSLIIVSGGMDSITMLYEYQQRIAIGVSFDYGSNHNQKEIPLAKMHCERLGIRHIVIPLSFIHDYFKSSLLEGDDAIPEGHYEEENMKSTVVPFRNGIMLAVGCGLAVSNHLKYVMIANHGGDHTIYPDCRPEFIDSFSQAMTAGTFEGITILAPYTRISKGEIALRGKKLGINYAETWSCYKGGDKQCGKCGTCVERKEALAFAGIKDDTPYED

SEQ ID NO: 41091 - protein, 217 aa, Prevotella veroralis
  REGION 1..217: note = tr|C9MSF4|C9MSF4_9BACT 7-cyano-7-deazaguanine synthase OS=Prevotella veroralis F0319 OX=649761 GN=queC; PE = 3 SV=1
MKDSVIIVSGGLDSITLLYDKAETIALAISFDYGQNHGKKELPYAEYHCQKLGIPHITIPLTFMHQYFKSSLLEGAEAIPEGHYEEENMKSTVVPFRNGIMLAIATGIAESHELKRVYIANHGGDHTIYPDCRPEFIDAMDKATSAGTFVDVRVEAPYTNISKADIVRRGTALGIDYAKTWSCYKGSEIHCGKCGTCVERKEAFADAGVEDPTEYEN

SEQ ID NO: 41092 - protein, 222 aa, unidentified
  source 1..222: note = Prevotellaceae bacterium
  REGION 1..222: note = tr|A0A316NKJ8|A0A316NKJ8_9BACT 7-cyano-7-deazaguanine synthase OS=Prevotellaceae bacterium OX=2049047 GN=queC PE=3 SV=1
MIKNDDKALVVLSGGQDSTTCLFWAKEHFAEIWAITFSYGQHHVSEIKAAEEVARIAGAKWELLDVPLVGSLGKNSLTCPDVKMDEEKPAGGPPNTFVPGRNLFFLSIAAVYARERGIRHLVTGVGQTDFSGYPDCRDTFVKSLNVTLNLAMEEQFVIHTPLMWIDKKETWAMADELGVLDIVKEKTVTCYNGVPGDGCGHCPACKLRKHGLESYLNEKKKK

SEQ ID NO: 41093 - protein, 218 aa, unidentified
  source 1..218: note = Prevotellaceae bacterium
  REGION 1..218: note = tr|A0A1K1M6G4|A0A1K1M6G4_9BACT 7-cyano-7-deazaguanine synthase OS=Prevotellaceae bacterium HUN156 OX=1520830 GN=queC PE=3 SV=1
MEKDSLLILSGGVDSVTLLYDEQERIALAVSFDYGSNHNAKEIPFARLHCERLGIKHIVIPLDFMSKYFKSSLLEGADAIPEGHYEDKNMKSTVVPFRNGIMLSIAVGIAESHELKYVMMANHGGDHAIYPDCRPEFVSAFDAAAAVGTYVNVHLHSPYTTLTKADIARKGKELGIDYSETWSCYKGGEHHCGKCGTCVERREAFALAGIKDTTIYEE

SEQ ID NO: 41094 - protein, 226 aa, Prochlorococcus marinus
  REGION 1..226: note = sp|A2CDY7|QUEC_PROM3 7-cyano-7-deazaguanine synthase; OS = Prochlorococcus marinus (strain MIT 9303) OX=59922; GN = queC PE=3 SV=2
MSDSTTIALLSGGLDSATAAALAIEAGQKVIGLSFDYGQRHRKELQAAEELAACMGLTEHHVISVNLGSWGGSSLTDLTQTVPSEGVVDGVIPNTYVPGRNTVFIAIGLSLAEARHANRLVLGVNAMDYSGYPDCRPDYLKAYQSLADLANKAGREGHGIKLWAPLMHWHKKRIVQEALRLGVPIDKTWSCYSGGDHACGICDSCRIRDAALSEAGRSDLCSKPAP

SEQ ID NO: 41095 - protein, 225 aa, Prochlorococcus marinus
  REGION 1..225: note = sp|A2C5G1|QUEC_PROM1 7-cyano-7-deazaguanine synthase; OS = Prochlorococcus marinus (strain NATL1A) OX=167555; GN = queC PE=3 SV=1
MIEQTTIALLSGGIDSATAACIAMEAGQKVIGLSFDYGQRHLKELQAAADLAKNLNLEDHITIKIDLSSWGGSSLTDTSQAIPTKGIQKNTIPNTYVPGRNTIFVAIGLSLAEARGANRIALGINAMDYSGYPDCRPDYLKAYQELANLSSRVGREGKGIKLWAPLLDWEKTKIFEEALRLKIPIEKTWSCYQGESKPCGRCDSCRIRDKALKEIGREDLCSQNI

SEQ ID NO: 41096 - protein, 226 aa, Prochlorococcus sp.
  REGION 1..226: note = tr|A0A0A2CKE8|A0A0A2CKE8_9PROC 7-cyano-7-deazaguanine synthase OS=Prochlorococcus sp. MIT 0701 OX=1499502 GN=queC PE=3 SV=1
MSDSTTIALLSGGLDSATAAALAIEAGQKVIGLSFDYGQRHRKELQAAEALAAHMGLTEHNVINVNLGSWGGSSLTDLKQTVPSGGVIKDVIPSTYVPGRNTVFIAIGLSLGEARKADRLVLGVNAMDYSGYPDCRPDYLAAFQTLADLASKAGREGDGIKLWAPLMHWNKVEIVQEALRLGVPIEQTWSCYSGGDHACGICDSCRIRDAALSKAGRSDLCSQQQL

SEQ ID NO: 41097 - protein, 229 aa, Prochlorococcus sp.
  REGION 1..229: note = tr|A0A162BGL5|A0A162BGL5_9PROC 7-cyano-7-deazaguanine synthase OS=Prochlorococcus sp. MIT 1306 OX=1799667 GN=queC PE=3 SV=1
MASMIHSTTIALLSGGLDSATAAALAVEAGQTVIGLSFDYGQRHRKELQAADALAAHMGLTEHHVISVNLGSWGGSSLTDLTQTVPSEGVVDGVIPNTYVPGRNTVFIAIGLSLAEARNANQLVLGVNAMDYSGYPDCRPDYLKAYQALADLANKAGREGHGIKLWAPLMHWNKKRIVQEALRLKVPIDKTWSCYSGGEHACGICDSCRIRDAALSEAGRSDLCSKPTP

SEQ ID NO: 41098 - protein, 256 aa, unidentified
  source 1..256: note = Prochlorothrix hollandica
  REGION 1..256: note = tr|A0A0M2PZ01|A0A0M2PZ01_PROHO 7-cyano-7-deazaguanine synthase OS=Prochlorothrix hollandica PCC 9006 = CALU 1027 OX=317619 GN=queC PE=3 SV=1
MGGEQSQTPEPKPQNCPKAVVLLSGGLDSATAAAQAIADGYQPIALSLDYGQRHNRELQAAQVIARHLGIQQHYTIAVNLAQWGGSSLTDPRQTLPQDGVQDNQIPSTYVPGRNTVFIALALALAEAQGAVAIYLGINAVDYSGYPDCRPPYLEAFQALAQVSSKVGLEGHAPQLVAPLVLDSKVDIVRRALALGVPIAETWSCYGGGEEPCGTCDSCRIRDRALWDAGQPQLVSNQGRPLGQMVPLGELDHPSVS

SEQ ID NO: 41099 - protein, 245 aa, Prolinoborus fasciculus
  REGION 1..245: note = tr|A0A2U3MMW5|A0A2U3MMW5_9NEIS 7-cyano-7-deazaguanine synthase OS=Prolinoborus fasciculus; OX = 1056810 GN=queC_2 PE=4 SV=1
MNNVLWTGGWDSTFRILDLVLIKGREVQPFYVLDNGRNSTSIELETMQNIRQMIKELKPGAEKLIKDHIFIKIDEIPVDDLITEKYQHLLSQSFLGSQYDWLGRYVKSTGLNNLELCVHKDDKAEGFVKDEVHHVVDGNDDFYKLNTNLKNPALSIFENYNFPLLQMTKVEMGEIAKKHNFFHIMEQTWFCFNPTKDRKPCGLCNPCKYTREEGLGRRVPDVPFSKVLYLKVRGILGRIKRLFIN

SEQ ID NO: 41100 - protein, 222 aa, Prolinoborus fasciculus; identical to SEQ ID NO: 35594
  REGION 1..222: note = tr|A0A2U3MEE4|A0A2U3MEE4_9NEIS 7-cyano-7-deazaguanine synthase OS=Prolinoborus fasciculus; OX = 1056810 GN=queC_1 PE=3 SV=1

SEQ ID NO: 41101 - protein, 254 aa, unidentified
  source 1..254: note = Prolixibacter denitrificans
  REGION 1..254: note = tr|A0A2P8CG65|A0A2P8CG65_9BACT 7-cyano-7-deazaguanine synthase OS=Prolixibacter denitrificans OX=1541063 GN=queC PE=3 SV=1
MFGCYLVCLLLFQEYGFSLLMILEISYLYQNMKKAIVLLSGGLDSSVALHLAKSKGFDVYALSFDYGQRHERELQSARETAQSAGVKEHHIVNMRLDLWGGSALTDQSIEVENGDVTRTDIPVTYVPARNMVFLSVAASYAEAIGARDIFIGVSQVDYSGYVDCRQEFIDAMEAAINKGTVCGAEMDDPIHVHAPFIDKTKADEIRLGMELGVDFGLTWSCYRGGEKPCGTCDSCLLRAKAFEEAGYTDPLLEK

SEQ ID NO: 41102 - protein, 219 aa, unidentified
  source 1..219: note = Prolixibacteraceae bacterium
  REGION 1..219: note = tr|A0A399T5C0|A0A399T5C0_9BACT 7-cyano-7-deazaguanine synthase OS=Prolixibacteraceae bacterium XSD2 OX=2305463 GN=queC PE=3 SV=1
MIAEKALVVFSGGQDSTTCLFWAQQHFSEVQAIAFDYGQRHKIELEAARSIAEKAGIQLHIFRMDLLGQLTQNALTSQEMEVEEAKPEDRPPNTLVEGRNMLFLTYAAIFAKARGIHHLVTGVGQADFSGYPDCRNDFILSLNSTLNLSMDYDYTIHTPLMWKDKAAIWQLADELGVMEIVQNETVTCYNGVKGKGCGHCPACMLRNRGLENYLNSKKA

SEQ ID NO: 41103 - protein, 219 aa, unidentified
  source 1..219: note = Prolixibacteraceae bacterium
  REGION 1..219: note = tr|A0A355IZ72|A0A355IZ72_9BACT 7-cyano-7-deazaguanine synthase OS=Prolixibacteraceae bacterium OX=2053594 GN=queC PE=3 SV=1
MIGDKALVVFSGGQDSSTCLFWAKKHFAEVFAIAFNYGQRHKIELEAAKNIAKRAGVQLQIFKIDLLSQLTENALTSQQIEIEKEKPADRPPNTLVEGRNMLFLTYAAIFAKANGINHLVTGVGQADFSGYPDCRNDFILSLNQTLNLSMDIQYTIHTPLMWKNKAEIWQLADELGVFDLVRNETVTCYNGIKGAGCGECPACILRNRGLEMYLKTKNV

SEQ ID NO: 41104 - protein, 226 aa, unidentified
  source 1..226: note = Propionibacteriaceae bacterium
  REGION 1..226: note = tr|A0A2E0EA14|A0A2E0EA14_9ACTN 7-cyano-7-deazaguanine synthase OS=Propionibacteriaceae bacterium OX=2021380 GN=queC PE=3 SV=1
MTDSTAIALLSGGLDSATAAALAMKSGFRVIGLSFDYGQRHHRELDAATEIAKALNLAEHHTISVNLASWGGSSLTDCHQELPTGGVQEGVIPNTYVPGRNTVFISIGLSLAEARGADHLVLGVNAVDYSGYPDCRPDYLEAFQVLADLSSRVGREGHGPKLWAPLVVWGKQRIVEEALHLGVPIERTWSCYSGGDVPCGVCDSCRIRNEALLAAGRPDLCSPRCL

SEQ ID NO: 41105 - protein, 438 aa, unidentified
  source 1..438: note = Propionibacteriaceae bacterium
  REGION 1..438: note = tr|A0A359FB62|A0A359FB62_9ACTN Uncharacterized protein OS=Propionibacteriaceae bacterium OX=2021380; GN = DEG88_03345 PE=4 SV=1
MIARSEAASYLVRYRSGTESQSRSLQWESDLTVDGRGFRQHLAEAMPPEASDLLILAASAYAVDRMVARPGLRRTRDSGDWHRDLFMDVPVSDPSRWAALAAKTERLLRWLTDDNWNLHFSQRAGYRGPLDPSQQALFSALPARCRPILFSGGLDSGCALQNALSVDDAVAISVHTNSWMQNTQRTVAQGLASLSTHRLAALSFRVNLPAGGTETSQRTRGLLFLASGTMAAIAAGADGLVVAENGVGAINLPYVASQRGTESTRAMHPRTLHMFSDIVSSLRGTEFTVDAPYLMSTKAELIGMTNAVADKALSHTVSCDSGFSARVAHREPCGRCTSCILRRQSLAAAGRPMVDERLPYRHPIPVEFPEFSAMAWQVLRLRRCLREPDPWPQLMCEFPELVHLDGLLDQGRVLSLYDRYVQEFETYLQSLGIEQQWM

SEQ ID NO: 41106 - protein, 222 aa, Propionispira arboris
  REGION 1..222: note = tr|A0A1H6W2A4|A0A1H6W2A4_9FIRM 7-cyano-7-deazaguanine synthase OS=Propionispira arboris; OX = 84035 GN=queC PE=3 SV=1
MKAVVLLSGGLDSTVCMAVAKNKGLDVYPISFDYHQRHRIELESAKKVADFFAVKKHLIIDTNMNQIGGSALTDKTIDIPNGDVTRTDIPVTYVPARNLIFLSYALGYAEVLDAPYIYIGVNAVDYSGYPDCRPEFIQKFQDLSDYATKATAADHKKIKIETPLLDLSKKDIVLLGNKLQAPLHLTRSCYNEGENACGICDSCKLRLRGFEEAGIKDPVTYL

SEQ ID NO: 41107 - protein, 227 aa, Propionispora hippei
  REGION 1..227: note = tr|A0A1M6A6I0|A0A1M6A6I0_9FIRM 7-cyano-7-deazaguanine synthase OS=Propionispora hippei DSM 15287 OX=1123003 GN=queC PE=3 SV=1
MKAVVLLSGGLDSTVCMAVAKEQGFELLPLSFNYHQRHNRELACACNVADYYKVKRHLVIETNMEAIGGSALTDNSMTVPQGDIAREDIPSTYVPARNLIFLSYALGYAEVNRAEKIFIGVNALDYSGYPDCRPEFINLFQQVANYSTKAATQEGQEISVVTPLLHLTKKEIVQLGNRLGAPLELTTSCYQGGDAACGTCDSCLLRLKGFAEAGISDPILYSSTRSE

SEQ ID NO: 41108 - protein, 219 aa, Propionispora sp.
  REGION 1..219: note = tr|A0A0K8JC79|A0A0K8JC79_9FIRM 7-cyano-7-deazaguanine synthase OS=Propionispora sp. 2/2-37 OX=1677858 GN=queC PE=3 SV=1
MLKSQGAMVVFSGGQDSTTCLFWAREQFGQVEAITFNYNQRHKDEIKFAQKICTDLSIPHSVLDMSLLNQLTANALTRDDIAIAYGENGNPPSTFVDGRNLLFLSFAAIAAKQKGFRHIVTGVCETDFSGYPDCRDVFVKSLNVTLNLAMDYQFVLHTPLMWIDKAATWEMADKMGKLEYIRDNTLTCYNGVIGSGCGDCPACKLRNEGLRKYLERRGR

SEQ ID NO: 41109 - protein, 227 aa, Propionispora vibrioides
  REGION 1..227: note = tr|A0A1H8PA81|A0A1H8PA81_9FIRM 7-cyano-7-deazaguanine synthase OS=Propionispora vibrioides OX=112903 GN=queC PE=3 SV=1
MKAVVLLSGGLDSTVCMAVAKEQGFELLPLSFNYHQRHNRELACARNVADYYKVKRHLVIETNMEAIGGSALTDNSITVPQGDIARPDIPSTYVPARNLIFLSYALGYAEVNRAEKIFIGVNALDYSGYPDCRPEFINLFQQVANYSTKAATQEGQEISVVTPLLHLTKREIVQLGSRLGAPLELTTSCYQGGDAACGTCDSCLLRLKGFAEAGISDPILYSSTRSE

SEQ ID NO: 41110 - protein, 219 aa, Propionivibrio dicarboxylicus
  REGION 1..219: note = tr|A0A1G8LF66|A0A1G8LF66_9RHOO 7-cyano-7-deazaguanine synthase OS=Propionivibrio dicarboxylicus OX=83767 GN=queC PE=3 SV=1
MLLSGGLDSATTLAIARDRGHACYCLSLDYGQRHGAELNAAKKLASSLGAREHRVMKLDLAAFGGSALTDEHIAVPTEGVGSGIPVTYVPARNTIMLSLALAWAEVLGSRDIYVGVNAVDYSGYPDCRPEFIASFQAMANLATKAAVEGARLTIHAPLISLSKADIIRRGVSLGVDYGMTISCYQADEGGRACGLCDACRLRQEGFAAAGVTDPTVYQD

SEQ ID NO: 41111 - protein, 230 aa, Prosthecobacter debontii
  REGION 1..230: note = tr|A0A1T4Y4A8|A0A1T4Y4A8_9BACT 7-cyano-7-deazaguanine synthase OS=Prosthecobacter debontii OX=48467 GN=queC PE=3 SV=1
MSKAIILLSGGLDSTVALYWARQHHEVVGAVSFDYGSKHNDKEIVLALWHCSQLDIPHDTVALPFVNDLFQSDLLKSGGSIPEGHYADDNMKRTVVPFRNGIMLAIACGIAESRNVDALVIAAHSGDHAIYPDCREPFMKAIGDAMREGTYARTELMRPFIDKNKTDIVRLGHELGVDFGRTWSCYKGEDLQCGVCGTCVERRESFMRAGVPDPTVYQNEGPLPQPVALT

SEQ ID NO: 41112 - protein, 198 aa, Prosthecobacter debontii
  REGION 1..198: note = tr|A0A1T4Z2U0|A0A1T4Z2U0_9BACT 7-cyano-7-deazaguanine synthase OS=Prosthecobacter debontii OX=48467 GN=SAMN02745166_04870 PE=3 SV=1
MTSNGILLSGGIDSVALAFWKRPKYAFTVNYGQTGFLGELRASQKICSELGINHEVVSVDCRALGAGDMAGLPAAKNAPAVEWWPFRNQLLVTLVAMKGYPLGLSELLVGSVLSDGFHSDGTEAFYTKLDSLLSFQEGGVRVSAPAIGHTSVELVRLSGIPLELLAWTHSCHVSEFACGQCRGCHKNQRVWEDLQSGQ

SEQ ID NO: 41113 - protein, 230 aa, Prosthecobacter fusiformis
  REGION 1..230: note = tr|A0A4R7RL76|A0A4R7RL76_9BACT 7-cyano-7-deazaguanine synthase OS=Prosthecobacter fusiformis OX=48464 GN=queC PE=3 SV=1
MSKAIILLSGGLDSTVALYWARQHHNVVGAVSFDYGSKHNDKEIALAIWHCAQFGIPHDLVSLPFVNDLFNSALLKSGGAIPEGHYSDNNMKRTVVPFRNGIMLAIACGIAESREVDALIIAAHSGDHAIYPDCREPFMQAMGNAMREGTYARIELLRPFIDMNKIAIAKLGHELGVDMGKTWSCYKGEDLQCGICGTCVERREAFILAGLTDPTVYLHEGPLPRKPGEL

SEQ ID NO: 41114 - protein, 226 aa, Prosthecochloris aestuarii
  REGION 1..226: note = sp|B4S6H3|QUEC_PROA2 7-cyano-7-deazaguanine synthase; OS = Prosthecochloris aestuarii (strain DSM 271 / SK 413); OX = 290512 GN=queC PE=3 SV=1
MRAVVLLSGGMDSLVATAEADALGYELAAMHVNYGQRTWHKELMAFRAICDHYGIRHRLEVDADYLSAIGGSSLTDPSIPVEEADLHGATIPTSYVPFRNASFLSMAVAWSEVIGAEKIYIGAVEEDSSGYPDCRKVFYDAFNRVIELGTRPETAIGIETPLIELQKSAIVRRGIALQVPFRLSWSCYKSEGKACGHCDSCARRLRAFSLAGATDPIDYEQRPDYI

SEQ ID NO: 41115 - protein, 226 aa, unidentified
  source 1..226: note = Prosthecochloris marina
  REGION 1..226: note = tr|A0A317T4Q3|A0A317T4Q3_9CHLB 7-cyano-7-deazaguanine synthase OS=Prosthecochloris marina; OX = 2017681 GN=queC PE=3 SV=1
MRAVVLISGGMDSLVVTALADFLGYDIAAMHVNYGQRTWQKELMAFRQICSHYNIERRLEIDTPFLAQIGGSSLTDNTIPVEAADLDGSEVPSSYVPFRNASFLSMAASWSEVIGANKIFIGAVEEDSSGYPDCRKVFYEAFNRVIELGTRPETAIEIQTPLIDLQKSGIVKKGIDLDVPFQYSWSCYKSEGKACGVCDSCARRLRAFQQVGVPDPIDYEERPGYV

SEQ ID NO: 41116 - protein, 226 aa, Prosthecochloris sp.
  REGION 1..226: note = tr|A0A1B1Q3I4|A0A1B1Q3I4_9CHLB 7-cyano-7-deazaguanine synthase OS=Prosthecochloris sp. CIB 2401 OX=1868325 GN=queC PE=3 SV=1
MKAVVLLSGGMDSLVTTAEANASGYSIAAMHVNYGQRTWQKELESFRAICDHYGVADRLEVDADYLSCIGGSSLTDSSIPVESADLHGTTIPSSYVPFRNASFLSMAASWAEVIGAGKIYIGAVEEDSSGYPDCRKVFYEAFDKVLELGTRPETDISIETPLIELQKSAIVRRGVELEVPFELSWSCYKSEGRACGVCDSCARRLRAFEILGMEDPLEYESRPRYT

SEQ ID NO: 41117 - protein, 242 aa, Prosthecochloris sp.
  REGION 1..242: note = tr|A0A1W6HQU5|A0A1W6HQU5_9CHLB Uncharacterized protein OS=Prosthecochloris sp. HL-130-GSB OX=1974213; GN = B9H02_01590 PE=4 SV=1
MHEQPVHLLWSGGWDSTFRLCDLLLVRHKSVQPYYIIDHHRKSLAQELRAVRTVHSFLEQRVKLSECRMLPIHTVWRFDIPPDAGVSENYNALVKRFDKFGPQYEWVLRFAKHTGIEDLELSIEANTYQEEAKIWQQLRSMLVEYNGVFILRTDPPDPDFDFFRPFRFPLINITKVQMMDYAREHGFYDIMEKTWFCHSPCKGRPCGVCPPCRNALMEGMAHRVPVSGKLRYMQWKLGLRKR

SEQ ID NO: 41118 - protein, 226 aa, Prosthecochloris vibrioformis; identical to SEQ ID NO: 41116
  REGION 1..226: note = tr|A0A5C4RXD8|A0A5C4RXD8_PROVB 7-cyano-7-deazaguanine synthase OS=Prosthecochloris vibrioformis OX=1098 GN=queC PE=3 SV=1

SEQ ID NO: 41119 - protein, 221 aa, Proteiniphilum acetatigenes
  REGION 1..221: note = tr|A0A124FX63|A0A124FX63_9BACT 7-cyano-7-deazaguanine synthase OS=Proteiniphilum acetatigenes OX=294710 GN=queC PE=3 SV=1
MKDYQQEDALVLFSGGQDSTTCLYWARQQFRKVHALCFSYGQRHSQEVENARRLAARADTPFLLLDASIISRLAPNSLTDLSMTMDEKQPKDSYPNTFVPGRNLLFLTFAATRAYAQGIRHLVTGVSEADYSGYPDCRDTFIRSANATLNLAMDKQFVIHTPLMWRNKKEVWQLADELGVFDIIRNETLTCYNGILAEGCGHCPACLLRNKGLEAYLSERG

SEQ ID NO: 41120 - protein, 224 aa, unidentified
  source 1..224: note = Proteiniphilum saccharofermentans
  REGION 1..224: note = tr|A0A1R3SVP8|A0A1R3SVP8_9BACT 7-cyano-7-deazaguanine synthase OS=Proteiniphilum saccharofermentans OX=1642647 GN=queC PE=3 SV=1
MKDYQEQDALVLFSGGQDSTTCLYWAKQQFRRTYALCFTYGQRHSQEVENARRIAEMAGTPFQVLDAGIISRLAPNSLTDFSVQMDEEQPAGSYPNTFVPGRNLLFLTFAATLAYAQGVKHLVTGVSEADYSGYPDCRDTFIRSANATLNLAMDNQFVIHTPLMWRNKKEVWRLADELGVFDIVKNETLTCYNGILAEGCGHCPACRLRNKGLQEYLAERENSL

SEQ ID NO: 41121 - protein, 221 aa, Proteiniphilum sp.
  REGION 1..221: note = tr|A0A117MJ28|A0A117MJ28_9BACT 7-cyano-7-deazaguanine synthase OS=Proteiniphilum sp. 51_7; OX = 1641377 GN=queC PE=3 SV=1
MKDYQQEDALVLFSGGQDSTTCLYWARQQFRKVHALCFSYGQRHSQEVENARRLAARADTPFLLLDASIISRLAPNSLTDLSMTMDEKQPKDSYPNTFVPGRNLLFLTFAATLAYAQGIRHLVTGVSEADYSGYPDCRDTFIRSANATLNLAMDKQFVIHTPLMWRNKKEVWQLADELGVFDIIRNETLTCYNGILAEGCGHCPACLLRNKGLEAYLSERG

SEQ ID NO: 41122 - protein, 224 aa, Proteiniphilum sp.
  REGION 1..224: note = tr|A0A3M8EIL6|A0A3M8EIL6_9BACT 7-cyano-7-deazaguanine synthase OS=Proteiniphilum sp. X52; OX = 2382159 GN=queC PE=3 SV=1
MKDYQEQDALVLFSGGQDSTTCLYWAKRQFRNTYALCFIYGQRHSQEVENARRIADMARTPFQVLDAGIISRLAPNSLTDFSVEMDEGKPAGSYPNTFVPGRNLLFLTFAATLAYAQGVKHLVTGVSEADYSGYPDCRDTFIRSANATLNLAMDNQFVIHTPLMWRNKKEVWRLADELDVFDIVKNETLTCYNGILAEGCGHCPACRLRNKGLQEYLAERGNNL

SEQ ID NO: 41123 - protein, 231 aa, unidentified
  source 1..231: note = Proteobacteria bacterium
  REGION 1..231: note = tr|R6A7U4|R6A7U4_9PROT 7-cyano-7-deazaguanine synthase OS=Proteobacteria bacterium CAG:139 OX=1262986; GN = queC PE=3 SV=1
MKAIVLSSGGVDSTTCLAMAVHELGKENVVTLSFEYGQRHSKELDSAQKVADYYGVRHVVFNLTQIFSFSNCSLLSNSTEKPVHESYADQIAKNGEGKVSTYVPFRNGLMLSAGAALAQSLFPEEKCEIWIGAHADDAAGNAYADCSVGFNNAMDQAINIGTYGLVSLRAPLNRWNKAQVVAKGLELKVPYKLTWSCYDGGEKACGECGTCIDRKAAFEANGVKDPIEYFK

SEQ ID NO: 41124 - protein, 238 aa, unidentified
  source 1..238: note = Proteobacteria bacterium
  REGION 1..238: note = tr|A0A1W9HTV4|A0A1W9HTV4_9PROT 7-cyano-7-deazaguanine synthase OS=Proteobacteria bacterium SG_bin8 OX=1827387 GN=queC PE=3 SV=1
MISTSGALVLFSGGQDSTTCLAWALARYPRVETLGFDYGQRHVVELACRAILRDKMSALDPLWGERLGEDHTLDLAALGELSQTSLTRDIAIDMAAGGLPNTFVPGRNLLFLTFAAALAYRRGLTVLVTGVCETDYSGYPDCRDDTMKAMQVALNLGMERRFVIETPLMWIDKAASFRLARELGGQGLLDLVIEDTHSCYLGDRKQRHDWGYGCGACPACKLRGDGYRRFTAEESAGA

SEQ ID NO: 41125 - protein, 232 aa, Proteus hauseri
  REGION 1..232: note = tr|V6MMX7|V6MMX7_PROHU 7-cyano-7-deazaguanine synthase OS=Proteus hauseri ZMd44 OX=1312367 GN=queC PE=3; SV = 1
MKKTVVVFSGGQDSTTCLIQALEKYDEVHCITFNYGQRHKEEIEVAQKVSQLLGATAHKVLDVSLLNELAISSLTRDNIPVPDFKESEESDIPSTFVPGRNILFLTLAAIYAYQIGAESVITGVCETDFSGYPDCRDEFVKALNHAVSLGIARDIKFITPLMWLDKAETWALADHYKKLDFVRHETLTCYNGIQGDGCGECAACHLRQRGLNTYLADKTLIMQTMKQKVGLK

SEQ ID NO: 41126 - protein, 232 aa, Proteus hauseri
  REGION 1..232: note = tr|A0A410XAP2|A0A410XAP2_PROHU 7-cyano-7-deazaguanine synthase OS=Proteus hauseri; OX = 183417 GN=queC PE=3 SV=1
MKKTVVVFSGGQDSTTCLIQAIEQYDEVYCITFNYGQRHKEEIEVAQKVSQLLGVVAHKVLDVSLLNELAISSLTRDNIPVPDFKESEESSIPSTFVPGRNILFLTLAAIYAYQIGAESVITGVCETDFSGYPDCRDEFVKALNHAVSLGIARDIKFITPLMWLDKAQTWALADYFHRLDFIRHNTLTCYNGIQGDGCGECAACHLRQRGLMTYLQNKDSILKSMKEKIGLK

SEQ ID NO: 41127 - protein, 232 aa, Proteus mirabilis
  REGION 1..232: note = tr|A0A1Z1SYQ8|A0A1Z1SYQ8_PROMI 7-cyano-7-deazaguanine synthase OS=Proteus mirabilis; OX = 584 GN=queC PE=3 SV=1
MKKTVVVFSGGQDSTTCLIQALEQYDEVHCITFNYGQRHKEEIEVAQRVSQLLGATAHKVLDVSLLNELAISSLTRDNIPVPDFKQSEQSDIPSTFVPGRNILFLTLAAIYAYQIGAESVITGVCETDFSGYPDCRDEFVKALNHAVNLGIARDIQFITPLMWLDKAQTWALADYYGKLDFVRHNTLTCYNGIQGDGCGQCAACHLRERGLHGYLQDKNAVMDAMKNKVGLK

SEQ ID NO: 41128 - protein, 232 aa, Proteus mirabilis; identical to SEQ ID NO: 41127
  REGION 1..232: note = sp|B4EU60|QUEC_PROMH 7-cyano-7-deazaguanine synthase; OS = Proteus mirabilis (strain HI4320) OX=529507 GN=queC; PE = 3 SV=1

SEQ ID NO: 41129 - protein, 232 aa, Proteus penneri
  REGION 1..232: note = tr|A0A379EIF3|A0A379EIF3_9GAMM 7-cyano-7-deazaguanine synthase OS=Proteus penneri; OX = 102862 GN=queC PE=3 SV=1
MKKTVVVFSGGQDSTTCLIQALEKYDEVHCITFNYGQRHKEEIEVAQKVSQLLGATAHKVLDVSLLNELAISSLTRDNIPVPDFKESEESDIPSTFVPGRNILFLTLAAIYAYQIGAESVITGVCETDFSGYPDCRDEFVKALNHAVNLGIARDIKFITPLMWLDKAETWALADYYKKLDFVRHKTLTCYNGIQGDGCGECAACHLRQRGLNTYLADKTLIMQTMKQKVGLK

SEQ ID NO: 41130 - protein, 247 aa, Proteus penneri
  REGION 1..247: note = tr|C0AYN3|C0AYN3_9GAMM 7-cyano-7-deazaguanine synthase OS=Proteus penneri ATCC 35198 OX=471881 GN=queC; PE = 3 SV=1
MRTNPYKISIFRSILMKKTVVVFSGGQDSTTCLIQALEKYDEVHCITFNYGQRHKEEIEVAQKVSQLLGATAHKVLDVSLLNELAISSLTRDNIPVPDFKESEESDIPSTFVPGRNILFLTLAAIYAYQIGAESVITGVCETDFSGYPDCRDEFVKALNHAVNLGIARDIKFITPLMWLDKAETWALADYYKKLDFVRHKTLTCYNGIQGDGCGECAACHLRQRGLNTYLADKTLIMQTMKQKVGLK

SEQ ID NO: 41131 - protein, 232 aa, Proteus sp.; identical to SEQ ID NO: 41126
  REGION 1..232: note = tr|A0A3D2BIS1|A0A3D2BIS1_9GAMM 7-cyano-7-deazaguanine synthase OS=Proteus sp. OX=229037; GN = queC PE=3 SV=1

SEQ ID NO: 41132 - protein, 232 aa, Proteus sp.
  REGION 1..232: note = tr|A0A5J6RR77|A0A5J6RR77_9GAMM 7-cyano-7-deazaguanine synthase QueC OS=Proteus sp. CD3; OX = 1921565 GN=BTA34_02290 PE=4 SV=1
MKKTVVVFSGGQDSTTCLIQALEKYDEVHCITFNYGQRHKEEIEVAQKVSQLLGATAHKVLDVSLLNELAISSLTRDNIPVPDFKESEESDIPSTFVPGRNILFLTLAAIYAYQIGAESVITGVCETDFSGYPDCRDEFVKALNHAVSLGIARDIKFITPLMWLDKAETWALADYYKKLDFVRHETLTCYNGIQGDGCGECAACHLRQRGLNTYLADKTPIMQTMKQKVGLK

SEQ ID NO: 41133 - protein, 232 aa, Proteus vulgaris; identical to SEQ ID NO: 41129
  REGION 1..232: note = tr|A0A0G4Q824|A0A0G4Q824_PROVU 7-cyano-7-deazaguanine synthase OS=Proteus vulgaris OX=585; GN = queC PE=3 SV=1

SEQ ID NO: 41134 - protein, 232 aa, Proteus vulgaris
  REGION 1..232: note = tr|A0A0G4Q8Z7|A0A0G4Q8Z7_PROVU 7-cyano-7-deazaguanine synthase OS=Proteus vulgaris OX=585; GN = queC PE=3 SV=1
MKKTVVVFSGGQDSTTCLIQAKEKYDEVHCITFNYGQRHKEEIEVAQKVSQLLGATAHKVLDVNLLNELAISSLTRDNIPVPDFKESEESDIPSTFVPGRNILFLTLAAIYAYQIGAESVITGVCETDFSGYPDCRDEFVKALNHAVNLGIARDIKFITPLMWLDKAETWALADYYQKLDFVRHETLTCYNGVQGDGCGECAACHLRQRGLNTYLADKKQIMQAMKQKVGLK

SEQ ID NO: 41135 - protein, 229 aa, Providencia alcalifaciens
  REGION 1..229: note = tr|A0A3N1ZKZ3|A0A3N1ZKZ3_9GAMM 7-cyano-7-deazaguanine synthase OS=Providencia alcalifaciens OX=126385 GN=queC PE=3 SV=1
MKRAVVVFSGGQDSTTCLIQALQNYDEVHCVTFDYGQRHRFEIEVAQKLSVSLGATAHKVLDVTLLNELAISSLTRDNIPVPDFSESESSTLPSTFVPGRNILFLTLAAIYAYQVKAEAVITGVCETDFSGYPDCRDEFVKALNHAVDLGLAKNIRFETPLMWLNKAQTWALADSYGHLETIRQQTLTCYNGIQGDGCGECAACHLRSKGLNEYLNDKEAIMLSLKQKP

SEQ ID NO: 41136 - protein, 233 aa, Providencia alcalifaciens
  REGION 1..233: note = tr|B6XA91|B6XA91_9GAMM 7-cyano-7-deazaguanine synthase OS=Providencia alcalifaciens DSM 30120 OX=520999; GN = queC PE=3 SV=1
MKRAVVVFSGGQDSTTCLIQALKDYDEVHCVTFDYGQRHRLEIEVAQKLSLQLGAKAHKVLDVSLLNELAISSLTRDNIPVPDYEESEASGLPSTFVPGRNILFLTLSAIYAYQVNAEAVITGVCETDFSGYPDCRDEFVKALNHAVNLGLAKDIRFETPLMWLDKAQTWALADYYGHLETIRTQTLTCYNGIQGDGCAECAACHLRSKGLNYYLNNKQTVMDSLLKHLNSIK

SEQ ID NO: 41137 - protein, 232 aa, Providencia burhodogranariea
  REGION 1..232: note = tr|K8W1D6|K8W1D6_9GAMM 7-cyano-7-deazaguanine synthase OS=Providencia burhodogranariea DSM 19968; OX = 1141662 GN=queC PE=3 SV=1
MKRAVVVFSGGQDSTTCLIQALKDYDEVHCITFDYGQRHRFEIEVAQKLSISLGVAAHKVLDVTLLNELAVSSLTRDNIPVPSFDESEASGLPSTFVPGRNILFLTLAAIYAYQVQAEAVITGVCETDFSGYPDCRDEFVKALNHAVSLGLAKNIRFETPLMWLDKAQTWALADYYGHLQTIREQTLTCYNGIQGDGCGECAACHLRSKGLNHYLNNKDMVLSSLKKFINLN

SEQ ID NO: 41138 - protein, 230 aa, Providencia heimbachae
  REGION 1..230: note = tr|A0A4D7J2G9|A0A4D7J2G9_9GAMM 7-cyano-7-deazaguanine synthase OS=Providencia heimbachae; OX = 333962 GN=queC PE=3 SV=1
MKRAVVVFSGGQDSTTCLIQALKNYDEVHCVTFDYGQRHRFEIEVAQKLSQHLGATAHKTLDVTLLNELAVSSLTRDNIPVPDFNESESSSLPSTFVPGRNILFLTLAAIYAYQVQAEAVITGVCETDFSGYPDCRDEFVKSLNHAVNLGLAKDIRFETPLMWLDKAQTWALADSFGHLQTIREQTLTCYNGIQGDGCGECAACHLRSKGLNYYLSNKEAVMQSLQQLLK

SEQ ID NO: 41139 - protein, 230 aa, Providencia heimbachae; identical to SEQ ID NO: 41138
  REGION 1..230: note = tr|A0A1B7JP63|A0A1B7JP63_9GAMM 7-cyano-7-deazaguanine synthase OS=Providencia heimbachae ATCC 35613 OX=1354272 GN=queC PE=3 SV=1

SEQ ID NO: 41140 - protein, 229 aa, Providencia rettgeri
  REGION 1..229: note = tr|A0A379FME7|A0A379FME7_PRORE 7-cyano-7-deazaguanine synthase OS=Providencia rettgeri; OX = 587 GN=queC PE=3 SV=1
MKRAVVVFSGGQDSTTCLIQALQNYDEVHCVTFDYGQRHRFEIEVAQKLSVSLGATAHKVLDVTLLNELAISSLTRDNIPVPDFSESESSTLPSTFVPGRNILFLTLAAIYAYQVQAEAVITGVCETDFSGYPDCRDEFVKALNHAVDLGLAKNIRFETPLMWLNKAQTWALADSYGHLETIRQQTLTCYNGIQGDGCGECAACHLRSKGLNEYLNDKEATMLSLKQKL

SEQ ID NO: 41141 - protein, 237 aa, Providencia rettgeri
  REGION 1..237: note = tr|D4C193|D4C193_PRORE 7-cyano-7-deazaguanine synthase OS=Providencia rettgeri DSM 1131 OX=521000; GN = queC PE=3 SV=1
MIYHQGVPMKRAVVVFSGGQDSTTCLIQALQNYDEVHCVTFDYGQRHRFEIEVAQKLSVSLGAAAHKVLDVTLLNELAISSLTRDNIPVPDFAESESSALPSTFVPGRNILFLTLAAIYAYQVQAEAVITGVCETDFSGYPDCRDEFVKALNHAVDLGLAKNIRFETPLMWLNKAQTWALADSYGHLETIRQQTLTCYNGIQGDGCGECAACHLRSKGLNEYLSDKEAIMLSLKQKL

SEQ ID NO: 41142 - protein, 231 aa, Providencia rustigianii
  REGION 1..231: note = tr|A0A379G0L1|A0A379G0L1_9GAMM 7-cyano-7-deazaguanine synthase OS=Providencia rustigianii; OX = 158850 GN=queC PE=3 SV=1
MKRAVVVFSGGQDSTTCLIQALKHYDEVHCITFDYGQRHRLEIEVAQKLSLQLGAKAHKVLDVTLLSELAISSLTRDNIPVPDFKESEASGLPSTFVPGRNILFLTLAAIYAYQVQAEAVITGVCETDFSGYPDCRDEFVKSLNHAVSLGLAKDIRFETPLMWLDKAQTWALADHYGHLETIRQQTLTCYNGIQGDGCGECAACHLRSKGLNYYLSNKQAVMNSLLEQLKP

SEQ ID NO: 41143 - protein, 231 aa, Providencia rustigianii; identical to SEQ ID NO: 41142
  REGION 1..231: note = tr|D1P683|D1P683_9GAMM 7-cyano-7-deazaguanine synthase OS=Providencia rustigianii DSM 4541 OX=500637; GN = queC PE=3 SV=1

SEQ ID NO: 41144 - protein, 421 aa, Providencia sneebia
  REGION 1..421: note = tr|K8WED7|K8WED7_9GAMM Uncharacterized protein; OS = Providencia sneebia DSM 19967 OX=1141660 GN=OO7_12694; PE = 4 SV=1
MIKVMCAKAELIPAQVPSDERVFSYFKGAKRAGIGTIANRWHGALKRGGFRPSIEIWDFVQFCLAVCSADLSSPRRTSADGWTRNIQLTVGLCNPDKWLPLKSDLEDMLKVLTGDYWLLNFNNAGMEPPQGDGAFLTNDCVSLLSGGLDSLIGGIDLVAKGRKPLFVSQLAHKDSERQRAYASMLMGNGSHYQWSHGISFKGSREPSTRGRSLAFYAFALLASTKINLPKPTIFIPENGVISINPPLVPGRISSLSTRTTHPMFIDMLQKVLDNLGIHVQLELPYRFKTKGEMMRQCLDQDLLQKWAADSTSCGRFRTYNRQHCGRCVPCLIRRAAFIAWKPEGDTTSYRFESVVGSDKSSAPDDPMAVALAILDVRKRGLDRFLGGSLVFAPINERPMYRRVLQEGIKELETVLIQDKLL

SEQ ID NO: 41145 - protein, 232 aa, Providencia sneebia
  REGION 1..232: note = tr|K8VZD0|K8VZD0_9GAMM 7-cyano-7-deazaguanine synthase OS=Providencia sneebia DSM 19967 OX=1141660; GN = queC PE=3 SV=1
MKRAVVVFSGGQDSTTCLIQALKNYDEVHCITFDYGQRHRFEIEVAKKLSHDLGATAHKVLDVTLLNELAISSLTRDNIPVPNFTESEASGLPSTFVPGRNILFLTLAAIYAYQIQAESVITGVCETDFSGYPDCRDEFVKALNHAVNLGLAKDIRFETPLMWLNKAQTWALADYYGHLATIREQTLTCYNGIQGDGCKDCAACHLRSKGLTEYLTNKQAILASLKKLTGLN

SEQ ID NO: 41146 - protein, 226 aa, Providencia sp.
  REGION 1..226: note = tr|A0A345LX08|A0A345LX08_9GAMM 7-cyano-7-deazaguanine synthase OS=Providencia sp. WCHPHu000369 OX=2027290 GN=queC PE=3 SV=1
MKRAVVVFSGGQDSTTCLIQALQNYDEVHCVTFDYGQRHRFEIEVAQKLSVSLGATAHKVLDVTLLNELAISSLTRDNIPVPDFTESESSGLPSTFVPGRNILFLTLAAIYAYQVQAEAVITGVCETDFSGYPDCRDEFVKALNHAVDLGLAKNIRFETPLMWLNKAQTWALADSYGHLETIRQQTLTCYNGIQGDGCGECAACHLRSRGLAEYLNDKETIMLSLK

SEQ ID NO: 41147 - protein, 229 aa, Providencia sp.
  REGION 1..229: note = tr|A0A4S2YKA3|A0A4S2YKA3_9GAMM 7-cyano-7-deazaguanine synthase OS=Providencia sp. MGF014; OX = 2565573 GN=queC PE=3 SV=1
MKRAVVVFSGGQDSTTCLIQALQNYDEVHCVTFDYGQRHRFEIEVAQKLSVSLGAAAHKVLDVTLLNELAISSLTRDNIPVPDFAESESSALPSTFVPGRNILFLTLAAIYAYQVQAEAVITGVCETDFSGYPDCRDEFVKALNHAVDLGLAKNIRFETPLMWLNKAQTWALADSYGHLETIRQQTLTCYNGIQGDGCGECAACHLRSKGLNEYLSDKEAIMLSLKQKL

SEQ ID NO: 41148 - protein, 232 aa, Providencia stuartii
  REGION 1..232: note = tr|A0A140NIB3|A0A140NIB3_PROSM 7-cyano-7-deazaguanine synthase OS=Providencia stuartii (strain MRSN 2154) OX=1157951 GN=queC PE=3 SV=1
MKRAVVVFSGGQDSTTCLIQALKMYDEVHCVTFDYGQRHRLEIEVAQKLSHSLGAAAHKILDVNLLNELAVSSLTRDNIPVPDYNESTANGLPSTFVPGRNILFLTLAAIYAYQVQAEAVITGVCETDFSGYPDCRDEFVKALNHAVNLGLAKDIRFETPLMWLDKAQTWALADYYGHLETIREQTLTCYNGIQGDGCGECAACHLRSKGLDYYLSHKESVLASLKKLANLA

SEQ ID NO: 41149 - protein, 232 aa, Providencia stuartii
  REGION 1..232: note = tr|B2Q711|B2Q711_PROST 7-cyano-7-deazaguanine synthase OS=Providencia stuartii ATCC 25827 OX=471874; GN = queC PE=3 SV=1
MKRAVVVFSGGQDSTTCLIQALKMYDEVHCVTFDYGQRHRLEIEVAQKLSHSLGAAAHKILDVNLLNELAVSSLTRDNIPVPDYNESATNGLPSTFVPGRNILFLTLAAIYAYQVQAEAVITGVCETDFSGYPDCRDEFVKALNHAVNLGLAKDIRFETPLMWLDKAQTWALADYYGHLETIREQTLTCYNGIQGDGCGECAACHLRSKGLNYYLSHKESVLASLKKLANLA

SEQ ID NO: 41150 - protein, 241 aa, unidentified
  source 1..241: note = Unknown
  REGION 1..241: note = tr|A0A368DZF8|A0A368DZF8_9PROT 7-cyano-7-deazaguanine synthase OS=PS1 clade bacterium; OX = 2175152 GN=queC PE=3 SV=1
MTDSRTALVLFSGGQDSTVCLAHALATYSHVETVGFDYGQTHRIELECRLDVLAQLRAAFPDWAARLGDDHVLALPALADIGGTALTGDGEIRVLENGLPSTFVPGRNLLFLTYAAAIGYRRGLSVLIGGMCETDYSGYPDCRRDTLDHLAQAISAGMDAPLEIETPLMYLDKATTWAMSETLGGETLVELIREATHSCYRGDRTTRHAWGYGCNDCPACELRSKGYEQWLEENKGTRKKG

SEQ ID NO: 41151 - protein, 241 aa, Pseudacidovorax intermedius
  REGION 1..241: note = tr|A0A370FJS2|A0A370FJS2_9BURK 7-cyano-7-deazaguanine synthase OS=Pseudacidovorax intermedius OX=433924 GN=queC PE=3 SV=1
MHTTALVLFSGGQDSTTCLAHALNRYERVETLGFDYGQRHRIELEARNHVLTRLRRRFPGWSRRLGEDHLLKLDVLGQIGGSSLTEDIAFAMQATGLPNTFVPGRNLLFLTLAGALAYRRGLQVIVTGVCETDYSGYPDCRDDTMKAMQLALSLGLDQRLLIETPLMWIDKAQTWQLAESLGGQGLVDLIVEDTHTCYEGDRTQRHDWGWGCGHCPACQLRAQGWAGYIEGDVGSGASSTA

SEQ ID NO: 41152 - protein, 243 aa, Pseudacidovorax intermedius
  REGION 1..243: note = tr|A0A147GM82|A0A147GM82_9BURK 7-cyano-7-deazaguanine synthase OS=Pseudacidovorax intermedius OX=433924 GN=queC PE=3 SV=1
MHTTALVLFSGGQDSTTCLAHALARYERVETLGFDYGQRHRVELEARTQVLARLRERFPGWGRRLGEDHLLQLDVLAQIGGSSLTEDIAFAMQANGLPNTFVPGRNLLFLTLAGALAYRRGLQVIVTGVCETDYSGYPDCRDDTMKAMQLALSLGLDQRLVIETPLMWIDKAQTWQLAETLGGRALVDLIVEDTHTCYEGDRSHRHDWGWGCGRCPACELRAQGWKGYVEAGGEAGSGASSTA

SEQ ID NO: 41153 - protein, 241 aa, Pseudacidovorax sp.
  REGION 1..241: note = tr|A0A1N6Z0B7|A0A1N6Z0B7_9BURK 7-cyano-7-deazaguanine synthase OS=Pseudacidovorax sp. RU35E OX=1907403 GN=queC PE=3 SV=1
MHNTALVLFSGGQDSTTCLAHALNRYERVETLGFDYGQRHRIELEARTHVLTRLRRRFPGWSRRLGEDHLLKLDVLGQIGGSSLTEDIAFAMQANGLPNTFVPGRNLMFLTLAGALAYRRGLQVIVTGVCETDYSGYPDCRDDTMKAMQLALSLGLDQRLLIETPLMWIDKAQTWQLAESLGGQGLVDLIVEDTHTCYEGDRSQRHDWGWGCGRCPACELRAQGWARYVEGEAGSGASSTA

SEQ ID NO: 41154 - protein, 224 aa, unidentified
  source 1..224: note = Pseudanabaena biceps
  REGION 1..224: note = tr|L8N083|L8N083_9CYAN 7-cyano-7-deazaguanine synthase OS=Pseudanabaena biceps PCC 7429 OX=927668; GN = queC PE=3 SV=1
MASLESPQRKAIILLSGGLDSATSAAQAIADGYEPIALSFRYGQRHERELLAAREVAAALHIREHFIVDVNLSQWGGSALTDGNLEVPTEGVQAGEIPITYVPGRNTVFIAIALSLAEAKGAEVIYLGINAVDYSGYPDCRPSYLKAFQKLAELSSKIGVEGNAPKLVAPLVMDSKTDIVRRAKRLGVPIDLTWSCYQGGEVPCGVCDSCRIRDKAILEANAYS

SEQ ID NO: 41155 - protein, 230 aa, unidentified
  source 1..230: note = Pseudanabaena frigida
  REGION 1..230: note = tr|A0A2W4VZQ9|A0A2W4VZQ9_9CYAN 7-cyano-7-deazaguanine synthase OS=Pseudanabaena frigida; OX = 945775 GN=queC PE=3 SV=1
MIEVENPKDLQQTKKKAVILLSGGLDSATAAAQAIADGYEVIALSFRYGQRHERELVAARQVAAALNISEHFVVDVNLAQWGGSALTDVNIAVPIEGSQADEIPITYVPGRNTVFIAIALSLAESKEAEAIYLGINAVDYSGYPDCRPDYLAAFQKLAALSSKIGIEGHAPQLVAPLVIDSKTDIVRRARRLGVPIEITWSCYQGGEVPCGVCDSCRIRDKAILEAEADI

SEQ ID NO: 41156 - protein, 226 aa, Pseudanabaena sp.
  REGION 1..226: note = tr|A0A256BJR0|A0A256BJR0_9CYAN 7-cyano-7-deazaguanine synthase OS=Pseudanabaena sp. SR411; OX = 1980935 GN=queC PE=3 SV=1
MVDIGTSPKKAIILLSGGLDSSTVAAQAIADGYKAIALSFRYGQRHERELLAARQVAAALNIREHFVVDVNLAQWGGSALTDDNIAVPTEGVQLGEIPITYVPGRNTVFIAIALSLAESKGAEAIYLGINAVDYSGYPDCRPDYLEAFQNLAALSSKVGIEGNAPKLIAPLVMDSKTDIVRRARLLGVPIELTWSCYQGGEVPCGVCDSCRIRDKAILEANGIIAT

SEQ ID NO: 41157 - protein, 220 aa, Pseudanabaena sp.
  REGION 1..220: note = tr|A0A2W6ZLI7|A0A2W6ZLI7_9CYAN 7-cyano-7-deazaguanine synthase OS=Pseudanabaena sp.; OX = 1153 GN=queC PE=3 SV=1
MIQGLKKAVILLSGGLDSSTVAAQAIADGYEAIALSFRYGQRHEREILAAKQVASFLKIQEHFIVDVNLGQWGGSALTDANLDIPTGGVQIDEIPITYVPGRNTVFIAIALSLAESKGAEAIYLGINAVDYSGYPDCRPDYLEAFQKLAALSSKAGVEGHAPQLVAPLVMDSKVDIVRRAKRLGVPIELTWSCYQGGEVPCGVCDSCRIRDKAILEAEQQ

SEQ ID NO: 41158 - protein, 231 aa, unidentified
  source 1..231: note = Pseudescherichia vulneris
  REGION 1..231: note = tr|A0A090V5P8|A0A090V5P8_PSEVU 7-cyano-7-deazaguanine synthase OS=Pseudescherichia vulneris NBRC 102420 OX=1115515 GN=queC PE=3 SV=1
MKRAVVVFSGGQDSTTCLVQALHHYDEVHCVTFDYGQRHRAEIDVARELALKLGARAHKVLDVTLLNELAVSSLTRDSIPVPDYEPDASGIPNTFVPGRNILFLTLTAIYAYQVQAEAVITGVCETDFSGYPDCRDEFVKALNHAVSLGMAKDIRFETPLMWLDKAETWALADYWQKLELVREETLTCYNGIKGDGCGQCAACNLRANGLNHYLAEKPAVMATMKRKTGLE

SEQ ID NO: 41159 - protein, 219 aa, unidentified
  source 1..219: note = Pseudidiomarina sp.
  REGION 1..219: note = tr|A0A443YXN9|A0A443YXN9_9GAMM 7-cyano-7-deazaguanine synthase OS=Pseudidiomarina sp. R04H25 OX=2487740 GN=queC PE=3 SV=1
MAKVVVIYSGGMDSFTVLHHALKQGHDVYALSFNYGQRHVRELDAAATVCKSLGINHKVVDITAINTLLAGSSLTSDIDIPEGHYEAESMQSTVVPNRNMILLALAIGYAVSIKAEAVYYGAHSGDHAIYPDCRPEFVEKMNAVSLIANYEPIPIEVPFLTNSKAEILAAGLAMGLDYAQTWTCYNGREKACGKCGACVERLEAFAANNCVDPLPYASA

SEQ ID NO: 41160 - protein, 218 aa, unidentified
  source 1..218: note = Pseudoalteromonadaceae bacterium
  REGION 1..218: note = tr|A0A2D6VN56|A0A2D6VN56_9GAMM 7-cyano-7-deazaguanine synthase OS=Pseudoalteromonadaceae bacterium OX=2026783 GN=queC PE=3 SV=1
MTQKVVVIYSGGMDSFTVLNKALQQGHEVYALSFDYGQRHVKELKVAAQVCEKLGVSHKIVDISAINQLIGGSSLTDDIEVPEGHYEEESMKSTIVPNRNMILLSLAVGYAVSLKASKVYYGAHSGDHAIYPDCRPEFVQKMDDVCRIANYDAVEIFSPYLHNTKIDILTDGLKMGLDYSQTWTCYNGRDKACGKCGACQERLEAFALNKVTDPIEYE

SEQ ID NO: 41161 - protein, 218 aa, unidentified
  source 1..218: note = Pseudoalteromonadaceae bacterium
  REGION 1..218: note = tr|A0A2D7MVW8|A0A2D7MVW8_9GAMM 7-cyano-7-deazaguanine synthase OS=Pseudoalteromonadaceae bacterium OX=2026783 GN=queC PE=3 SV=1
MTQKVVVIYSGGMDSFTVLNKALQQGHDVYALSFDYGQRHVKELEVAANVCEKLNVPHKIVDISAINQLIGGSSLTDDIDVPEGHYEEESMKSTIVPNRNMILLSLAVGYAVSLKASKVYYGAHSGDHAIYPDCRPEFVQKMDDVCRIANYDAVEIFSPYLNNTKIDILTDGIKMGLDYSQTWTCYNGREKACGKCGACQERLEAFSLNNVTDPIEYE

SEQ ID NO: 41162 - protein, 218 aa, Pseudoalteromonas agarivorans; identical to SEQ ID NO: 41161
  REGION 1..218: note = tr|A0A290RWK9|A0A290RWK9_9GAMM 7-cyano-7-deazaguanine synthase OS=Pseudoalteromonas agarivorans DSM 14585 OX=1312369 GN=queC PE=3 SV=1

SEQ ID NO: 41163 - protein, 218 aa, Pseudoalteromonas agarivorans; identical to SEQ ID NO: 41161
  REGION 1..218: note = tr|N6VVA8|N6VVA8_9GAMM 7-cyano-7-deazaguanine synthase OS=Pseudoalteromonas agarivorans S816 OX=1307437; GN = queC PE=3 SV=1

SEQ ID NO: 41164 - protein, 218 aa, Pseudoalteromonas aliena
  REGION 1..218: note = tr|A0A1Q2H2V3|A0A1Q2H2V3_9GAMM 7-cyano-7-deazaguanine synthase OS=Pseudoalteromonas aliena OX=247523 GN=queC PE=3 SV=1
MTQKVVVIYSGGMDSFTVLNKALQQGHDVYALSFDYGQRHVKELKVAASVCEKLNVPHKIVDISAINQLIGGSSLTDDIDVPEGHYEEESMKSTIVPNRNMILLSLAVGYAVSLNAGQVYYGAHSGDHAIYPDCRPEFVQKMDDVCRIANYDAVEIFSPYLNNTKIGILTDGIEMGLDYSQTWTCYNGREKACGKCGACQERLEAFALNNITDPLEYE

SEQ ID NO: 41165 - protein, 219 aa, unidentified
  source 1..219: note = Pseudoalteromonas amylolytica
  REGION 1..219: note = tr|A0A1S1MRY8|A0A1S1MRY8_9GAMM 7-cyano-7-deazaguanine synthase OS=Pseudoalteromonas amylolytica OX=1859457 GN=queC PE=3 SV=1
MSEKVVVIYSGGMDSYTVLNKAIRAGYEVYALSFNYGQRHVKELQVAEQVCNSLNIAHKIVDISTINQLIGGSSLTDDIDVPEGHYEEESMKSTVVPNRNMILLSLAVGYAVSLKANKVFYGAHSGDHAIYPDCRPEFVKKMDDVCRIANYEEIEIVCPYLNNSKIDILTDGLKMGLDYSETWTCYNGREKACGKCGACQERLEAFALNNAQDPLSYEA

SEQ ID NO: 41166 - protein, 218 aa, Pseudoalteromonas arctica
  REGION 1..218: note = tr|A0A290S373|A0A290S373_9GAMM 7-cyano-7-deazaguanine synthase OS=Pseudoalteromonas arctica A 37-1-2 OX=1117313 GN=queC PE=3 SV=1
MTQKVVVIYSGGMDSFTVLNKALQQGHDVYALSFDYGQRHVKELKVAASVCEKLNVPHKIVDISAINQLIGGSSLTDDIDVPEGHYEEESMKSTIVPNRNMILLSLAVGYAVSLKAGQVYYGAHSGDHAIYPDCRPEFVQKMDDVCRIANYDAVEIFSPYLNNTKIGILTDGIEMGLDYSQTWTCYNGREKACGKCGACQERLEAFALNNITDPLEYE

SEQ ID NO: 41167 - protein, 218 aa, Pseudoalteromonas atlantica; identical to SEQ ID NO: 41161
  REGION 1..218: note = tr|A0A510ZUC0|A0A510ZUC0_PSEAF 7-cyano-7-deazaguanine synthase OS=Pseudoalteromonas atlantica OX=288 GN=queC PE=3 SV=1

SEQ ID NO: 41168 - protein, 218 aa, Pseudoalteromonas atlantica
  REGION 1..218: note = sp|Q15RL9|QUEC_PSEA6 7-cyano-7-deazaguanine synthase; OS = Pseudoalteromonas atlantica (strain T6c / ATCC BAA-1087) OX=342610 GN=queC PE=3 SV=1
MVQKVVVIFSGGMDSFTVLNMAVKEGYEVHALSFNYGQRHSKELDYASRACITLGVAHKIIDISAINELIGGSSLTSDVDIPEGHYAEESMKSTVVPNRNMILLSMAVGYAVSLDANKVYYGAHSGDHDIYPDCRPEFVERMNDVCAIANYEKVEIVSPFLYQSKIDILTAGLNMGLDYNLTWTCYNGREKACGKCGACQERLEAFDKNNAQDPLEYE

SEQ ID NO: 41169 - protein, 219 aa, Pseudoalteromonas byunsanensis
  REGION 1..219: note = tr|A0A1S1N602|A0A1S1N602_9GAMM 7-cyano-7-deazaguanine synthase OS=Pseudoalteromonas byunsanensis OX=327939 GN=queC PE=3 SV=1
MSEKVVVIYSGGMDSYTVLNKAIRAGYEVYALSFNYGQRHVKELEVAEQVCNSLNIAHKIVDISAINQLIGGSSLTDDIDVPEGHYEEESMKSTVVPNRNMILLSLAVGYAVSLKANKVFYGAHSGDHAIYPDCRPEFVKKMDDVCRIANYEEIEIVCPYLNNSKIDILTDGLKMGLDYSHTWTCYNGREKACGKCGACQERLEAFALNNAQDPLSYEA

SEQ ID NO: 41170 - protein, 218 aa, Pseudoalteromonas carrageenovora
  REGION 1..218: note = tr|A0A2K4X811|A0A2K4X811_PSEVC 7-cyano-7-deazaguanine synthase OS=Pseudoalteromonas carrageenovora IAM 12662 OX=1314868 GN=queC PE=3 SV=1
MTQKVVVIYSGGMDSFTVLNKALQQGHDVYALSFDYGQRHVKELKVAAQVCEKLNVPHKIVDISAINQLIGGSSLTDDIEVPEGHYEEESMKSTIVPNRNMILLSLAVGYAVSLKASQVYYGAHSGDHAIYPDCRPEFVQKMDDVCRIANYDAVEIFSPYLNNTKIDILTDGIKMGLDYSQTWTCYNGREKACGKCGACQERLEAFKLNNVTDPLEYE

SEQ ID NO: 41171 - protein, 218 aa, Pseudoalteromonas citrea
  REGION 1..218: note = tr|U1JTG0|U1JTG0_9GAMM 7-cyano-7-deazaguanine synthase OS=Pseudoalteromonas citrea DSM 8771 OX=1117314; GN = queC PE=3 SV=1
MSEKVVVIYSGGMDSYTVLNKAIRSGHDVYALSFNYGQRHVKELEVAAQVCERLNITHKIVDISAINQLIGGSSLTDDIDVPEGHYEEESMKSTIVPNRNMILISLAVGYAVSIKASKVFYGAHSGDHAIYPDCRPEFVKKMDDVCRIANYDAVEIVSPYLNNTKIDILTDGLEMGLDYSQTWTCYNGRQHACGKCGACQERLEAFALNNATDPIPYE

SEQ ID NO: 41172 - protein, 234 aa, Pseudoalteromonas denitrificans
  REGION 1..234: note = tr|A0A1I1IPG1|A0A1I1IPG1_9GAMM 7-cyano-7-deazaguanine synthase OS=Pseudoalteromonas denitrificans DSM 6059 OX=1123010 GN=queC PE=3 SV=1
MLRPAKRLLYESLRNMSQKVVVIYSGGMDSYTVLNKAIQDGYEVYALSFDYGQRHVKELDIAAKACKDLDVHHKIVNISAINQIIGGSSLTDDIDVPEGHYEAENMKSTIVPNRNMILLSLAVGYAVSLKACKVYYGAHSGDHAIYPDCRPEFVQKMDDVCRIANYDAVEIVSPYLKNSKIDILTDGLKMGLNYRDTWTCYNGREKACGKCGACQERLEAFKLNNVIDPIEYEI

SEQ ID NO: 41173 - protein, 218 aa, Pseudoalteromonas distincta
  REGION 1..218: note = tr|F3BKC0|F3BKC0_9GAMM 7-cyano-7-deazaguanine synthase OS=Pseudoalteromonas distincta OX=77608 GN=queC; PE = 3 SV=1
MTQKVVVIYSGGMDSFTVLNKALQQGHDVYALSFDYGQRHVKELKVAASVCEKLNVPHKIVDISAINQLIGGSSLTDDIDVPEGHYEEESMKSTIVPNRNMILLSLAVGYAVSLKASQVYYGAHSGDHAIYPDCRPEFVQKMDDVCRIANYDAVEIFSPYLNNTKIGILTDGIEMGLDYSQTWTCYNGREKACGKCGACQERLEAFALNNITDPLEYE

SEQ ID NO: 41174 - protein, 218 aa, Pseudoalteromonas elyakovii; identical to SEQ ID NO: 41173
  REGION 1..218: note = tr|A0A558I614|A0A558I614_9GAMM 7-cyano-7-deazaguanine synthase OS=Pseudoalteromonas elyakovii OX=81037 GN=queC PE=3 SV=1

SEQ ID NO: 41175 - protein, 218 aa, Pseudoalteromonas espejiana
  REGION 1..218: note = tr|A0A510XXT1|A0A510XXT1_9GAMM 7-cyano-7-deazaguanine synthase OS=Pseudoalteromonas espejiana OX=28107 GN=queC PE=3 SV=1
MTQKVVVIYSGGMDSFTVLNKALQQGHDVYALSFDYGQRHVKELEVAAQVCEKLNVPHKIVDISAINQLIGGSSLTDDIDVPEGHYEEESMKSTIVPNRNMILLSLAVGYAVSLKASQVYYGAHSGDHAIYPDCRPEFVQKMDDVCRIANYDAVEIFSPYLNNTKIDILTDGIKMGLDYSQTWTCYNGREKACGKCGACQERLEAFKLNNVTDPLEYE

SEQ ID NO: 41176 - protein, 218 aa, unidentified
  source 1..218: note = Pseudoalteromonas fuliginea
  REGION 1..218: note = tr|A0A063KKH8|A0A063KKH8_9GAMM 7-cyano-7-deazaguanine synthase OS=Pseudoalteromonas fuliginea OX=1872678 GN=queC PE=3 SV=1
MTQKVVVIYSGGMDSFTVLNKALQQGHDVYALSFDYGQRHVKELKVAASVCEKLNVPHKIVDISAINQLIGGSSLTDDIDVPEGHYEEESMKSTIVPNRNMILLSLAVGYAVSLKAGKVYYGAHSGDHAIYPDCRPEFVQKMDDVCRIANYDAVEIFSPYLNNTKIGILTDGIEMGLDYSQTWTCYNGREKACGKCGACQERLEAFALNNITDPLEYE

SEQ ID NO: 41177 - protein, 218 aa, Pseudoalteromonas haloplanktis
  REGION 1..218: note = sp|Q3IKE8|QUEC_PSEHT 7-cyano-7-deazaguanine synthase; OS = Pseudoalteromonas haloplanktis (strain TAC 125); OX = 326442 GN=queC PE=3 SV=1
MTQKVVVIYSGGMDSFTVLNKALQQGHDVYALSFDYGQRHVKELKVAAQVCKQLNVPHKIVDISAINQIIGGSSLTDDIDVPEGHYEEDSMKSTIVPNRNMILLSLAVGYAVSLKASQVYYGAHSGDHAIYPDCRPEFVQKMDDVCRIANYDAVEIFSPYLNNTKIDILTDGIAMGLDYSQTWTCYNGREKACGKCGACQERLEAFEVNNLTDPLEYE

SEQ ID NO: 41178 - protein, 215 aa, Pseudoalteromonas haloplanktis; identical to SEQ ID NO: 33098
  REGION 1..215: note = tr|Q3IKE7|Q3IKE7_PSEHT 7-carboxy-7-deazaguanine synthase OS=Pseudoalteromonas haloplanktis (strain TAC 125) OX=326442 GN=queC PE=3 SV=1

SEQ ID NO: 41179 - protein, 218 aa, Pseudoalteromonas issachenkonii
  REGION 1..218: note = tr|A0A290SKG9|A0A290SKG9_9GAMM 7-cyano-7-deazaguanine synthase OS=Pseudoalteromonas issachenkonii OX=152297 GN=queC PE=3 SV=1
MTQKVVVIYSGGMDSFTVLNKALQQGHDVYALSFDYGQRHVKELKVAASVCEKLNVPHKIVDISAINQLIGGSSLTDDIDVPEGHYEEESMKSTIVPNRNMILLSLAVGYAVSLKASKVYYGAHSGDHAIYPDCRPEFVKKMDDVCRIANYDAVEIFSPYLNNTKIDILTDGIKMGLDYSQTWTCYNGRDKACGKCGACQERLEAFELNNVTDPLEYE

SEQ ID NO: 41180 - protein, 218 aa, Pseudoalteromonas lipolytica
  REGION 1..218: note = tr|A0A0P7E6E0|A0A0P7E6E0_9GAMM 7-cyano-7-deazaguanine synthase OS=Pseudoalteromonas lipolytica OX=570156 GN=queC PE=3 SV=1
MTQKVVVIYSGGMDSFTVLNKALQQGHEVYALSFDYGQRHVKELKVAAQVCEKLGVSHKIVDISAINQLIGGSSLTDDIEVPEGHYEEESMKSTIVPNRNMILLSLAVGYAVSLKASKVYYGAHSGDHAIYPDCRPEFVQKMDDVCRIANYDAVEIFSPYLNNTKIDILTDGLKMGLDYSQTWTCYNGRDKACGKCGACQERLEAFALNNVTDPIEYE

SEQ ID NO: 41181 - protein, 218 aa, Pseudoalteromonas lipolytica
  REGION 1..218: note = tr|Z5XRX6|Z5XRX6_9GAMM 7-cyano-7-deazaguanine synthase OS=Pseudoalteromonas lipolytica SCSIO 04301; OX = 1452721 GN=queC PE=3 SV=1
MTQKVVVIYSGGMDSFTVLNKALQQGHEVYALSFDYGQRHVKELKVAAQVCEKLGVPHKIVDISAINQLIGGSSLTDDIDVPEGHYEEESMKSTIVPNRNMILLSLAVGYAVSLKASKVYYGAHSGDHAIYPDCRPEFVKKMDDVCRIANYDAVEIFSPYLNNTKIDILTDGLKMGLDYSQTWTCYNGRDKACGKCGACQERLEAFTLNNVTDPIEYE

SEQ ID NO: 41182 - protein, 218 aa, Pseudoalteromonas luteoviolacea
  REGION 1..218: note = tr|A0A167I4T9|A0A167I4T9_9GAMM 7-cyano-7-deazaguanine synthase OS=Pseudoalteromonas luteoviolacea CPMOR-1 OX=1365248 GN=queC PE=3 SV=1
MSEKVVVIYSGGMDSYTVLNKALQEGHEVYALSFNYGQRHVKELEVAKNVCDSLNVAHKIVDISAINQLLAGSSLTDDIEVPEGHYEEESMKSTIVPNRNMILLSLAVGYAVSLKANKVFYGAHSGDHAIYPDCRPEFVKKMDDVCRIANYDEVAIVCPYLNNTKIDILTDGLKMGLDYSHTWTCYNGREKACGKCGACQERLEAFELNNATDPLLYE

SEQ ID NO: 41183 - protein, 218 aa, Pseudoalteromonas luteoviolacea
  REGION 1..218: note = tr|A0A0F6AIA2|A0A0F6AIA2_9GAMM 7-cyano-7-deazaguanine synthase OS=Pseudoalteromonas luteoviolacea S4054 OX=1129367 GN=queC PE=3 SV=1
MSEKVVVIYSGGMDSYTVLNKALQEGHEVYALSFNYGQRHVKELEVAKNVCDSLNVAHKIVDISAINQLLAGSSLTDDIEVPEGHYEEESMKSTIVPNRNMILLSLAVGYAVSLKANKVFYGAHSGDHAIYPDCRPEFVKKMDDVCRIANYDEVAIVCPYLNNTKIDILTDGLKMGLDYSHTWTCYNGREKACGKCGACQERLEAFELNNATDPLPYE

SEQ ID NO: 41184 - protein, 218 aa, Pseudoalteromonas marina
  REGION 1..218: note = tr|U1KYB6|U1KYB6_9GAMM 7-cyano-7-deazaguanine synthase OS=Pseudoalteromonas marina DSM 17587 OX=1117316; GN = queC PE=3 SV=1
MTQKVVVIYSGGMDSFTVLNKALQQGHDVYALSFDYGQRHVKELKVAAQVCEKLNVPHKIVDISAINQLIGGSSLTDNIDVPEGHYEEESMKSTIVPNRNMILLSLAVGYAVSLKASQVYYGAHSGDHAIYPDCRPEFVKKMDDVCRIANYDAVEIFSPYLNNTKIDILTDGIKMGLDYSQTWTCYNGREKACGKCGACQERLEAFALNNITDPLEYE

SEQ ID NO: 41185 - protein, 218 aa, unidentified
  source 1..218: note = Pseudoalteromonas neustonica
  REGION 1..218: note = tr|A0A558IJD9|A0A558IJD9_9GAMM 7-cyano-7-deazaguanine synthase OS=Pseudoalteromonas neustonica OX=1840331 GN=queC PE=3 SV=1
MTQKVVVIYSGGMDSFTVLNKALQQGREVYALSFDYGQRHVKELKVAASVCEKLGVPHKIVDISAINQLIGGSSLTDDIDVPEGHYEAENMKSTIVPNRNMILLSLAVGYAVSLKASQVYYGAHSGDHAIYPDCRPEFVQKMDDLCRIANYDAVEIFSPYLNDTKIDILTDGLKMGLDYSQTWTCYNGREKACGKCGACQERLEAFSLNNITDPIEYE

SEQ ID NO: 41186 - protein, 218 aa, Pseudoalteromonas nigrifaciens; identical to SEQ ID NO: 41177
  REGION 1..218: note = tr|A0A379HCD3|A0A379HCD3_9GAMM 7-cyano-7-deazaguanine synthase OS=Pseudoalteromonas nigrifaciens OX=28109 GN=queC PE=3 SV=1

SEQ ID NO: 41187 - protein, 218 aa, Pseudoalteromonas peptidolytica
  REGION 1..218: note = tr|A0A510UA69|A0A510UA69_9GAMM 7-cyano-7-deazaguanine synthase OS=Pseudoalteromonas peptidolytica OX=61150 GN=queC PE=3 SV=1
MSEKVVVIYSGGMDSYTVLNKAVNEGHEVYALSFNYGQRHVKELQVAANVCKKLGVAHKVVDISAINQLLAGSSLTDDIEVPEGHYEEESMKSTIVPNRNMILLSLAVGYAVSLQASKVFYGAHSGDHAIYPDCRPEFVKKMDDVCRIANYDAVEIVSPYLNNSKIDILTDGLEMGLDYADTWTCYNGREKACGKCGACQERLEAFELNNATDPLPYE

SEQ ID NO: 41188 - protein, 219 aa, Pseudoalteromonas phenolica
  REGION 1..219: note = tr|A0A4Q7IIF5|A0A4Q7IIF5_9GAMM 7-cyano-7-deazaguanine synthase OS=Pseudoalteromonas phenolica OX=161398 GN=queC PE=3 SV=1
MSEKVVVIYSGGMDSYTVLNKAIKQGFDVYALSFNYGQRHVKELEVAASVCADLNVHHKVVDISAINQLIGGSSLTDDIEVPEGHYEEESMKSTVVPNRNMILLSLAVGYAVSLKANKVFYGAHSGDHAIYPDCRPEFVEKMSDVCRIANYEEVEIVCPYLNSSKIEILTDGLKMDLDYSNTWTCYNGRERACGKCGACQERLEAFSLNNASDPLPYEA

SEQ ID NO: 41189 - protein, 219 aa, Pseudoalteromonas phenolica
  REGION 1..219: note = tr|A0A0S2K1B3|A0A0S2K1B3_9GAMM 7-cyano-7-deazaguanine synthase OS=Pseudoalteromonas phenolica OX=161398 GN=queC PE=3 SV=1
MSEKVVVIYSGGMDSYTVLNKAIKSGFDVYALSFNYGQRHVKELEVAANVCADLNVHHKVVDISAINQLIGGSSLTDDIEVPEGHYEEESMKSTVVPNRNMILLSLAVGYAVSLKANKVFYGAHSGDHAIYPDCRPEFVEKMSDVCRIANYEEVEIVCPYLNNSKIEILTDGLKMGLDYSNTWTCYNGREKACGKCGACQERLEAFSLNNASDPLPYEA

SEQ ID NO: 41190 - protein, 220 aa, unidentified
  source 1..220: note = Pseudoalteromonas piratica
  REGION 1..220: note = tr|A0A0A7EGY1|A0A0A7EGY1_9GAMM 7-cyano-7-deazaguanine synthase OS=Pseudoalteromonas piratica OX=1348114 GN=queC PE=3 SV=1
MSQKVVVIYSGGMDSYTVLNKAIRQGFEVYALSFDYGQRHVKELKVAASVCAELGISHKVVDISAINQLIGGSSLTDDIDVPEGHYEEESMKSTVVPNRNMILLSLAVGYAVSLKANKVFYGAHSGDHAIYPDCRPEFVKKMDDVCRIANYEEVEIVSPYLNNTKIEILTDGLSMGLDYSKTWTCYNGREKACGKCGACQERLEAFELNKAHDPLAYESN

SEQ ID NO: 41191 - protein, 218 aa, Pseudoalteromonas piscicida
  REGION 1..218: note = tr|A0A2A5JP66|A0A2A5JP66_PSEO7 7-cyano-7-deazaguanine synthase OS=Pseudoalteromonas piscicida OX=43662 GN=queC PE=3 SV=1
MSEKVVVIYSGGMDSYTVLNKAINEGHEVYALSFNYGQRHVKELQVAANVCEKLGVAHKVVDISAINQLLAGSSLTDDIDVPEGHYEEESMKSTIVPNRNMILLSLAVGYAVSLKANKVFYGAHSGDHAIYPDCRPEFVRKMDDVCRIANYDAVEIVSPYLNNSKIDILTDGLRMGLDYSDTWTCYNGREKACGKCGACQERLEAFELNNATDPLPYE

SEQ ID NO: 41192 - protein, 218 aa, Pseudoalteromonas piscicida
  REGION 1..218: note = tr|A0A0F4NV79|A0A0F4NV79_PSEO7 7-cyano-7-deazaguanine synthase OS=Pseudoalteromonas piscicida OX=43662 GN=queC PE=3 SV=1
MSEKVVVIYSGGMDSYTVLNKAVREGHEVYALSFNYGQRHVKELQVAADVCAKLGVAHKVVDISAINQLLSGSSLTDDIDVPEGHYEEESMKSTIVPNRNMILLSLAVGYAVSLKANKVFYGAHSGDHAIYPDCRPEFVKKMDDVCRIANYDAVEIVSPYLNNSKIDILTDGLKMGLDYADTWTCYNGREKACGKCGACQERLEAFELNHATDPLPYE

SEQ ID NO: 41193 - protein, 218 aa, unidentified
  source 1..218: note = Pseudoalteromonas porphyrae
  REGION 1..218: note = tr|A0A0N0LYA9|A0A0N0LYA9_9GAMM 7-cyano-7-deazaguanine synthase OS=Pseudoalteromonas porphyrae OX=187330 GN=queC PE=3 SV=1
MTQKVVVIYSGGMDSFTVLNKALQQGHDVYALSFDYGQRHVKELKVAANVCEKLNVPHKIVDISAINQLIGGSSLTDDIEVPEGHYEAENMKSTIVPNRNMILLSLAVGYAVSLKASQVYYGAHSGDHAIYPDCRPEFVQKMDDVCRIANYDAVEIFSPYLNNTKIDILTDGIKMGLDYSQTWTCYNGREKACGKCGACQERLEAFTLNNITDPIEYE

SEQ ID NO: 41194 - protein, 218 aa, unidentified
  source 1..218: note = Pseudoalteromonas profundi
  REGION 1..218: note = tr|A0A3A3EZE4|A0A3A3EZE4_9GAMM 7-cyano-7-deazaguanine synthase OS=Pseudoalteromonas profundi OX=1774956 GN=queC PE=3 SV=1
MTQKVVVIYSGGMDSFTVLNKALQQGHEVYALSFDYGQRHVKELKVAAQVCEKLGVSHKIVDISAINQLIGGSSLTDDIDVPEGHYEEESMKSTIVPNRNMILLSLAVGYAVSLKASKVYYGAHSGDHAIYPDCRPEFVQKMDDVCRIANYDAVEIFSPYLNNTKIDILTDGLKMGLDYSQTWTCYNGRDKACGKCGACQERLEAFALNNVTDPIEYE

SEQ ID NO: 41195 - protein, 218 aa, Pseudoalteromonas rubra
  REGION 1..218: note = tr|A0A0F4QK01|A0A0F4QK01_9GAMM 7-cyano-7-deazaguanine synthase OS=Pseudoalteromonas rubra; OX = 43658 GN=queC PE=3 SV=1
MSEKVVVIYSGGMDSYTVLNKALKSGYEVYALSFNYGQRHVKELEVARQACDELGVAHKIVDISAINQLIGGSSLTDDIDVPEGHYEEESMKSTVVPNRNMILLSLAVGYAVSLKASKVFYGAHSGDHAIYPDCRPEFVKKMDDVCRIANYEEIEIVCPYLNNTKIGILTDGLKMGLDYSKTWTCYNGREKACGKCGACQERLEAFSLNQANDPLPYE

SEQ ID NO: 41196 - protein, 218 aa, Pseudoalteromonas rubra
  REGION 1..218: note = tr|U1K7T4|U1K7T4_9GAMM 7-cyano-7-deazaguanine synthase OS=Pseudoalteromonas rubra DSM 6842 OX=1117318; GN = queC PE=3 SV=1
MSEKVVVIYSGGMDSYTVLNKALKSGYEVYALSFNYGQRHVKELEVARQACDELGVAHKIVDISAINQLIGGSSLTDDIEVPEGHYEEESMKSTVVPNRNMILLSLAVGYAVSLKASKVFYGAHSGDHAIYPDCRPEFVKKMDDVCRIANYEEIEIVCPYLNNSKIEILTDGLKMGLDYSKTWTCYNGREKACGKCGACQERLEAFTLNQASDPLPYE

SEQ ID NO: 41197 - protein, 219 aa, Pseudoalteromonas ruthenica
  REGION 1..219: note = tr|A0A0F4PRZ3|A0A0F4PRZ3_9GAMM 7-cyano-7-deazaguanine synthase OS=Pseudoalteromonas ruthenica OX=151081 GN=queC PE=3 SV=1
MAEKVVVIYSGGMDSFTVLNKARMQGHEVYALSFNYGQRHVKELEVAKAVCERLGVDHKIVDISAINQLIGGSSLTDDIDVPEGHYEEESMKSTIVPNRNMILLSLAVGYAVSLKANKVYYGAHSGDHAIYPDCRPEFVKKMDDVCRIANYDEVEIVCPYLDSSKIDILRDGLAMDLDYSQTWTCYNGREQACGKCGACQERLEAFAENNATDPLPYES

SEQ ID NO: 41198 - protein, 219 aa, Pseudoalteromonas sp.; identical to SEQ ID NO: 41197
  REGION 1..219: note = tr|A0A4Q6Y6U1|A0A4Q6Y6U1_9GAMM 7-cyano-7-deazaguanine synthase OS=Pseudoalteromonas sp. CO325X OX=1777262 GN=queC PE=3 SV=1

SEQ ID NO: 41199 - protein, 218 aa, Pseudoalteromonas sp.
  REGION 1..218: note = tr|A0A4Z0SL39|A0A4Z0SL39_9GAMM 7-cyano-7-deazaguanine synthase OS=Pseudoalteromonas sp. KS88 OX=2109918 GN=queC PE=3 SV=1
MTQKVVVIYSGGMDSFTVLNKALQEGHDVYALSFDYGQRHVKELKVAAQVCEKLNVPHKIVDISAINQLIGGSSLTDDIDVPEGHYEEESMKSTIVPNRNMILLSLAVGYAVSLKASQVYYGAHSGDHAIYPDCRPEFVKKMDDLCRIANYDAVEIFSPYLNNTKIDILTDGIKMGLDYSETWTCYNGREKACGKCGACQERLEAFKLNNVTDPLEYE

SEQ ID NO: 41200 - protein, 221 aa, Pseudoalteromonas spongiae
  REGION 1..221: note = tr|A0A290T6G7|A0A290T6G7_9GAMM 7-cyano-7-deazaguanine synthase OS=Pseudoalteromonas spongiae UST010723-006 OX=1117319 GN=queC PE=3 SV=1
MSRAVVVFSGGQDSTTCLVQALDLYDEVHAITFDYGQRHKREIEVAKALAAKLNVTSHKVLDVTMFNELAVSALTKEDISVSHELMENGLPNTFVPGRNILFLTLAGVYAYQVEADIVITGVCETDFSGYPDCRDEFVKLMQETLCKGLDRKIVISTPLMWLNKAETWGLADKYQSVELIRNETLTCYNGVIGDGCGDCPSCLLRKRGLEEYLNSKGSTSK

SEQ ID NO: 41201 - protein, 220 aa, Pseudoalteromonas spongiae
  REGION 1..220: note = tr|A0A290T367|A0A290T367_9GAMM 7-cyano-7-deazaguanine synthase OS=Pseudoalteromonas spongiae UST010723-006 OX=1117319 GN=queC PE=3 SV=1
MSQKVVVIYSGGMDSYTVLNKAIRQGYEVYALSFDYGQRHVKELKVAADVCAELNISHKVVDISAINQLIGGSSLTDDIDVPEGHYEEESMKSTVVPNRNMILLSLAVGYAVSLKANKVFYGAHSGDHAIYPDCRPEFVQKMDDVCRIANYEEIEIVSPYLNNTKIEILTDGLNMGLDYSKTWTCYNGREKACGKCGACQERLEAFELNQASDPLPYEAN

SEQ ID NO: 41202 - protein, 218 aa, Pseudoalteromonas tetraodonis; identical to SEQ ID NO: 41179
  REGION 1..218: note = tr|A0A1E3WXW3|A0A1E3WXW3_9GAMM 7-cyano-7-deazaguanine synthase OS=Pseudoalteromonas tetraodonis OX=43659 GN=queC PE=3 SV=1

SEQ ID NO: 41203 - protein, 218 aa, Pseudoalteromonas translucida; identical to SEQ ID NO: 41177
  REGION 1..218: note = tr|A0A0U2WY43|A0A0U2WY43_9GAMM 7-cyano-7-deazaguanine synthase OS=Pseudoalteromonas translucida KMM 520 OX=1315283 GN=queC PE=3 SV=1

SEQ ID NO: 41204 - protein, 207 aa, Pseudoalteromonas tunicata
  REGION 1..207: note = tr|A4CBB2|A4CBB2_9GAMM 7-cyano-7-deazaguanine synthase OS=Pseudoalteromonas tunicata D2 OX=87626 GN=queC; PE = 3 SV=1
MDSFTVLNKAISEGHEVYALSFDYGQRHVKELKVAAQVCQALNVPHKIVDISAINQLIGGSSLTDDIDVPEGHYQEESMKSTIVPNRNMILLSLAVGYAVSLKASQVYYGAHSGDHAIYPDCRPEFVQKMSDVCKIANYDAVEIVSPYLNNTKIDILTDGLKMGLDYSHTWTCYNGREKACGKCGACQERLEAFRLNDVVDPLPYEA

SEQ ID NO: 41205 - protein, 219 aa, Pseudoalteromonas ulvae
  REGION 1..219: note = tr|A0A244CVE5|A0A244CVE5_9GAMM 7-cyano-7-deazaguanine synthase OS=Pseudoalteromonas ulvae; OX = 107327 GN=queC PE=3 SV=1
MPQKVVVIYSGGMDSFTVLNKAINQGHEVYALSFDYGQRHVKELEVAANVCKQLNVPHKIVDISAINQLIGGSSLTDDIDVPEGHYEEESMKSTIVPNRNMILLSLAVGYAVSLKASQVYYGAHSGDHAIYPDCRPEFVKKMDDVCKIANYDAVEIISPYLNNTKIDILTDGLKMGLDYSQTWTCYNGRQKACGKCGACQERLEAFSLNNVSDPLEYEA

SEQ ID NO: 41206 - protein, 227 aa, unidentified
  source 1..227: note = Pseudoarcobacter caeni
  REGION 1..227: note = tr|A0A363D101|A0A363D101_9PROT 7-cyano-7-deazaguanine synthase OS=Pseudoarcobacter caeni; OX = 1912877 GN=queC PE=3 SV=1
MSNIRTKKAICILSGGMDSTLASYMAKNDGYEIIAVHFNYGQRTQDRELKAFRDICNDLKILEKYEVDIPFFTQIGASALTDKNIDVPTGGIEAGVPITYVPFRNGIFLSIAAAIAEKEEATAMYIGVVQEDSSGYPDCTDEFIADMKKAINQGTREDTHINIITPLVHLSKAQIVLEAIKLNVPLEHTWSCYKEENEACGICDSCRLRLNGFKVANQTDPITYKVL

SEQ ID NO: 41207 - protein, 2141 aa, unidentified
  source 1..2141: note = Pseudobacteroides cellulosolvens
  REGION 1..2141: note = tr|A0A0L6JGW6|A0A0L6JGW6_9FIRM Amino acid adenylation domain protein OS=Pseudobacteroides cellulosolvens ATCC 35603 = DSM 2933 OX=398512; GN = Bccel_0221 PE=4 SV=1
MSTSKKLDKQNVEDILALTPVQEGMLFHYLSNPESELYFEQMSFGLLGEIEINLFKKAWSFVVETNEMLRTVYRWEGIEMPVQVVLKKQELLIREYDVSSASEEKRQELLDEIRIKDRKERVDISTEPFRITICKVDKNIYEMIVSSYHIIYDGWSNGILLKEFLKAYNELYFGLQPQKQVKTRYKEYIKWYGKQDKEERAKYWKRYLEGFQSKTILPVDRKKLDKTVIAQNYTKVINKTLSDKVKSFAKSQGITLASLLYCAWGILLKKYNDSYDVVFGTTVSGRTPEVKGIGDIVGLFINTPPIRIQSSPNEAVSNLISKVDTMLRERDDFEYTPLTEIKPLLEIDSMEELFDSIVVIENYPLDSSYNENDSKIKIRLNSIFEMTNYDLTFVISTFDNIGIRIIYDAKIFDHETMERLSDQYIKILKEMLEKPWQSISEIDILTEADKQQILFDFNNTGALYNIDKTMHELFEEQVINSPDRIAAVFENQSITYSELNEKSNQLARLLQKKGVKNETIVGVMVEPSLDMIISVLAVLKAGGAYLPIDLHVPADRITYILEDSGAKVLITTSHAVQNIHYTTLQNFESKDGSNIVVTSPRSHIQEFDALPVPDRSLIDIGSYKGKIGMASVNNCISLQTTRGCPYKCLYCHKVWSKHHVRRSAENIYEEIEYYYKNGVRNFAVIDDCFNLDMKNSAELFKLIVKNDLKIQIFFPNGLRGDILTPEYIDLMVEAGTRGINLSLETASPRLQQLLMKNLDLDKFKNVVDYIATKHSNIILEMATMHGFPTETEEEAMMTLNFIKDIKWLHFPYVHILKIFPNTEMEAFALENGISKADILKSKDRAFHELPETLPFPKSFTRRYQASFMNEYFLSKERLKHVLPVQMRILDEGALIQKYNAYLPVEINSIADIIKFTELNDFILPEDCRETIEIPYSVFDKPKQERKEIIGAKKIMFLDLSQHFSSSNMLYKVAEQPIGQIYLLTYLKKIFGEKIDGRIYKSGNDFDSFEELKNLVNEYKPDMIGIRTLTYFKEFFHETVSLLRQWGINVPIITGGPYASSDYDTILKDRNVNLVVFGEGEYTLAELVSKMLENSFKLPESIVLRNINGIAFAEESQHFTDTSCQIFMIDRIKDILAEEEKENLCLSVSSKNMAYVMYTSGSTGKPKGVMVEHRQVNNCISWMQNEFGLKSSDIIVQRTNLTFDPSVWEIFWPLYSGACVRLITQEQSRDAEFLLNLMSEENGPTMMYCPASLVTGMLYMLNNRAESPKLKMPWLIIGAEPIGIETVRGFYDYYDGKIVNTYGPTECTINNTYYHIDRDDKRSVVPIGKPIANNMIYILSRDKQLLPVKAPGEIYIAGDSVARGYIHNPEKTTECFIENPYGEGRLYKTGDIGRWLRDGNIEIMGRVDEQVKVRGYRIELGEIESALSRHKSIKDCVVVVKGGIKAQTVVKECKSCGITSKYPGIKISEEGLCDICQDSSIYKSYMNKYFKTLDDLNMLLKENSMSQKGKYDCLLLYSGGKGSAYALYRLVEMGYKVLALTYNNGYFTKSDMENIRMITSKLGVDHVVLTHKNTDEILKESLIAAHTVCRGCFHISSSLAGDYAYRNNISLVVGATLSRGQILENKLLMFYKQGISDVSEIERELLNIQKGARQMDKSIFDHMDIESISSGAVYDQVKFVDFYRYCDITNQEMISFLNQKDEYWIGRKNYAIYSTNCPVKQIGDYGHLHERGFHYYGSATSWEKRLNHITIENVKEDLKCYPTEKAFKNFSKRVGYEPVRQEQKIDTSYICAYYVSESEISATELREFLTDKLPGYMIPTYFVEMEKIPFTSNNKIDKKALPEPEENINSGVEYVAPESETEEILTEIWHRILDVDKVGVKDNFFDIGGNSILLIQMHSQVDRRFPGKTMMMDLFAYPTVSKLANFIDSKNEKICKYISVEPVDLPVSYFCGGEKDLKAASYSFTLNKQMSEKAKLMSKTENITTDDIWVAVYSYLFAQMAGKKEIAVQSITGDVNRVVSVKNDFDAMKDFIQLFKNVNRQHRDENQAEAYEIEEIKSIVMNKGNESVIPLIFKKGLTNVKGNLMDIYDISLEYDDGEEEMQFQFEYNGKVLKSDKMKELVNSYYKITKMIIDQYEPKGVVL

SEQ ID NO: 41208 - protein, 244 aa, unidentified
  source 1..244: note = Pseudobacteroides cellulosolvens
  REGION 1..244: note = tr|A0A0L6JNA2|A0A0L6JNA2_9FIRM 7-cyano-7-deazaguanine synthase OS=Pseudobacteroides cellulosolvens ATCC 35603 = DSM 2933 OX=398512 GN=queC; PE = 3 SV=1
MKRAVVLLSGGLDSTTCLSVAIKDGYEVFPISFDYGQRHRRELHCAGLIAKYHKLKTYNVFKLDNVGGSALTDMSINVPEYKGDKFIPITYVPARNIIFLSYAVGYAEVVNAEAIYIGVNAIDYSGYPDCRPEFIEAFQQMVAVGTKSGVEGRGVKIVTPLLNLSKSEIIKLACDKGAPLHLTWSCYKGGDKACGVCDSCVLRLKGFDEAGIEDPIEYSKNDMEIDIAGNQAVNKDVNERNRYE

SEQ ID NO: 41209 - protein, 228 aa, Pseudobutyrivibrio ruminis
  REGION 1..228: note = tr|A0A285RDU4|A0A285RDU4_9FIRM 7-cyano-7-deazaguanine synthase OS=Pseudobutyrivibrio ruminis DSM 9787 OX=1123011 GN=queC PE=3 SV=1
MKALVLVSGGLDSTTCLALAVKEYGHENVVGLSIFYGQRHDKEIKAADAVCEYYKVEHITLDLSTMFQFSDCTLLQHSDGEIPEESYDKQLEKTNGKPVSTYVPFRNGLFLSSAAAIALSKGCSKIYYGAHADDAAGNAYPDCSSDFNNAMNTAIYEGSGKQLTIEAPFINKNKAGVVKLGMELGVPYELTWSCYEGHDKACGKCGTCIDRIAAFELNGIKDPIEYEN

SEQ ID NO: 41210 - protein, 228 aa, Pseudobutyrivibrio ruminis
  REGION 1..228: note = tr|A0A2G3DYD1|A0A2G3DYD1_9FIRM 7-cyano-7-deazaguanine synthase OS=Pseudobutyrivibrio ruminis OX=46206 GN=queC PE=3 SV=1
MKALVLVSGGVDSTTCLGMAVKEYGHENVVGLSIFYGQRHDKEIKAADAVCDFYKVEHITLDLSTMFQFSDCTLLQHSDGEIPEESYAEQLSKTDGKPVSTYVPFRNGLFLSSASAIALSKGCSKIFYGAHSDDAAGNAYPDCSEAFNKAMNTAIYEGSGKQLEIVAPFISLNKSQVVKKGLEIGVPYELTWSCYEGHEKACGKCGTCIDRKAAFELNGVKDPIEYEN

SEQ ID NO: 41211 - protein, 228 aa, Pseudobutyrivibrio sp.; identical to SEQ ID NO: 41209
  REGION 1..228: note = tr|A0A1I5D4B4|A0A1I5D4B4_9FIRM 7-cyano-7-deazaguanine synthase OS=Pseudobutyrivibrio sp. JW11 OX=1855302 GN=queC PE=3 SV=1

SEQ ID NO: 41212 - protein, 228 aa, Pseudobutyrivibrio sp.
  REGION 1..228: note = tr|A0A1H3ZY61|A0A1H3ZY61_9FIRM 7-cyano-7-deazaguanine synthase OS=Pseudobutyrivibrio sp. ACV-2 OX=1520801 GN=queC PE=3 SV=1
MKALVLVSGGVDSTTCLGMAVKEYGNENVVALSIFYGQRHDKEIKAADAVCEHYNVEHITLDLSTMFQFSDCTLLQHSDGEIPEESYAKQLEKTDGKPVSTYVPFRNGLFLSSASAIALSKGCSKIYYGAHSDDAAGSAYPDCSEAFNNAMNTAIYEGSGKQLEIVAPFINLTKSQVVKKGLELGVPYELTWSCYEGHDKACGKCGTCIDRKAAFELNGVSDPIEYEI

SEQ ID NO: 41213 - protein, 228 aa, Pseudobutyrivibrio xylanivorans
  REGION 1..228: note = tr|A0A1M6FN48|A0A1M6FN48_PSEXY 7-cyano-7-deazaguanine synthase OS=Pseudobutyrivibrio xylanivorans DSM 14809 OX=1123012 GN=queC PE=3 SV=1
MKALVLVSGGVDSTTCLGMAVKEYGNENVVALSIFYGQRHDKEIKAADAVCNHYNVEHITLDLSTMFQFSDCTLLQHSDGEIPEESYAEQLAKTDGKPVSTYVPFRNGLFLSSASAIALSKGCSKIYYGAHSDDAAGNAYPDCSEAFHKAMNTAIYEGSGKQLEIVAPFISLTKSQVVKKGLEIGVPYELTWSCYEGHEKACGKCGTCIDRKAAFELNGVTDPIPYEN

SEQ ID NO: 41214 - protein, 228 aa, Pseudobutyrivibrio xylanivorans
  REGION 1..228: note = tr|A0A1G5S325|A0A1G5S325_PSEXY 7-cyano-7-deazaguanine synthase OS=Pseudobutyrivibrio xylanivorans OX=185007 GN=queC PE=3 SV=1
MKALVLVSGGVDSTTCLGMAVKEYGSENVVGLSIFYGQRHDKEIKAADAVCEHYNVEHITLDLSTMFQFSDCTLLQHSDGEIPEESYAEQLAKTEGKPVSTYVPYRNGLFLSSASAIALSKGCSKIYYGAHSDDAAGNAYPDCSEAFNNAMNTAIYEGSGKQLQIVAPFISLTKSQVVKKGLEIGVPYELTWSCYEGHEKACGKCGTCIDRKAAFELNGVTDPIPYEN

SEQ ID NO: 41215 - protein, 230 aa, unidentified
  source 1..230: note = Pseudocitrobacter faecalis
  REGION 1..230: note = tr|A0A366F420|A0A366F420_9ENTR 7-cyano-7-deazaguanine synthase OS=Pseudocitrobacter faecalis OX=1398493 GN=queC PE=3 SV=1
MKRAVVVFSGGQDSTTCLVQALHQYDEVHCVTFDYGQRHRAEIDVARELALKLGARAHKVLDVTLLNELAVSSLTRDSIPVPDYEPDADGIPNTFVPGRNILFLTLTAIYAYQVQAEAIITGVCETDFSGYPDCRDEFVKALNHAVNLGMAKDIRFETPLMWLDKAETWALADYWGKLDLVRNETLTCYNGIKGDGCGHCASCHLRANGLNHYLADKVGVAAAMKQKTGL

SEQ ID NO: 41216 - protein, 231 aa, unidentified
  source 1..231: note = Pseudocitrobacter sp.
  REGION 1..231: note = tr|A0A5B0KGH8|A0A5B0KGH8_9ENTR 7-cyano-7-deazaguanine synthase OS=Pseudocitrobacter sp. 73 OX=2605731 GN=queC PE=3 SV=1
MKRAVVVFSGGQDSTTCLVQALHQYDEVHCVTFDYGQRHRAEINVARELALKLGARAHKVLDVTLLNELAVSSLTRDSIPVPDYEPEADGIPNTFVPGRNILFLTLTAIYAYQVKAEAIITGVCETDFSGYPDCRDEFVKALHHAVSLGMAKDIRFETPLMWLDKAETWALADYWGKLDLVRSETLTCYNGIKGDGCGHCASCHLRANGLNHYLADKVGVAATMKQKTGLK

SEQ ID NO: 41217 - protein, 700 aa, unidentified
  source 1..700: note = Pseudodesulfovibrio aespoeensis
  REGION 1..700: note = tr|E6VX91|E6VX91_PSEA9 Uncharacterized protein; OS = Pseudodesulfovibrio aespoeensis (strain ATCC 700646 / DSM 10631 / Aspo-2) OX=643562 GN=Daes_1584 PE=4 SV=1
MQDKRYIICGNAPTDGIEENPDRDLRLRLWGKDGLDKITLRIEDIHKKMSKDVPDSFQDLLEIATYVYSADQAIPRGADDVDSFGHGWRRDLHFIIPVRKPDFWNGDDIHQALRSTLGFLSDDNYHFEFVKLKEAQAFQGYLKFDDDGRLFGYPEQVVMFSGGLDSLAGAIDEVLNEKHKVVLVTHKSTPKLNTRHRRLEKMIADKAGENAPLHIGVRVNKNKGLNYEYTQRSRSFLYVSIGATIAKMLNLKSVRFYENGVISLNLPVCAQVVGGRATRTTHPRVIRGFQEIISLVAGEPFTIENPYIWKTKAGVIEVITKAGCQDMIAASTTCTHTWEMTNHHTHCGTCSQCIDRRFAMIAAKADQHDPVEAYKADIFTQSRSKDEDKIMAAAYLERANQVRDQDDITQFIARFSEVSRVFRYLNGNPGSVAQKVYDLYKRHAKEVCDAMDTMVGRNITAIRQRTLPGDCLLRTVYESGSVISVPAIPVEQKQPDNYFRKRGGVWAARFNGNAEVLVTGVDKGAEYINFLLARPNKETSVYEIVCGFAIDSCNAVLNSNETDEGFQVTQGVPLGDTGFVADRKAVEQYRETAHELLREIEEARAENNDAEIQRLENEMTQITAAINEAVGLGGKLRKSNDKRKNIRDAFRSAVNRAITYLDKYDKPLAAHLKESIKCGNEPVYRTEEEIVWEVRPIVNE

SEQ ID NO: 41218 - protein, 275 aa, unidentified
  source 1..275: note = Pseudodesulfovibrio hydrargyri
  REGION 1..275: note = tr|A0A1J5N5X7|A0A1J5N5X7_9DELT tRNA(Ile)-lysidine synthase OS=Pseudodesulfovibrio hydrargyri OX=2125990; GN = tilS_1 PE=4 SV=1
MTLTQQQKKRYAALLAEIHGMERVLAAFSGGVDSTLLLHAAQRAVGEGVLAVTFATPYSPKEETACAVEFAKALGVRHMLVELPIPEDIRNNPPERCYLCKRTLFGELVRIAEEEGIRYILDGSNLDDLGDHRPGRKAVKELGVRSPLLDAGLTKQDIRDLSREYGLPTWDKPAGACLLTRLPHGSAVEEAELERIDKGETFLKDLGFAAVRLRSHGEVARIELPSEDIAACLESGVRKRIDDHLKELGYRYVSVDLAGYRMGSLNEPEAAGRKE

SEQ ID NO: 41219 - protein, 264 aa, unidentified
  source 1..264: note = Pseudodesulfovibrio profundus
  REGION 1..264: note = tr|A0A2C8F856|A0A2C8F856_9DELT Uncharacterized protein OS=Pseudodesulfovibrio profundus OX=57320; GN = DPRO_1319 PE=4 SV=1
MTTTTTKLFFTGGWDSTFRLLELLVAEKRPVQPIYVIDPDRWSLREEQKAMADIKTTVVERFPEAANLLKPTMIIDKTDLKPDPAFKACEQKLLETNIFGSQYEWLGRAAKQFGLEGAEVCVEYSEIKVAGCYVTINPLVEQIEDGSYYFAEEHKNTLEYQFFGMYSFPVMRTSKAEMMEKAEKYGFLDILEMSWFCHKPNFLGQACGMCNPCKDAMTMEMTHRVPPFGRFCYHLKRNLNPRTHLQHFPKVYDYLRTLKRKLKG

SEQ ID NO: 41220 - protein, 700 aa, unidentified
  source 1..700: note = Pseudodesulfovibrio profundus
  REGION 1..700: note = tr|A0A2C8F3X9|A0A2C8F3X9_9DELT Uncharacterized protein OS=Pseudodesulfovibrio profundus OX=57320; GN = DPRO_0546 PE=4 SV=1
MQDKRYIICGNAPTSGIEENPDRDLRLRLWGKDGPDKITLRIEDIHKKMSKDVPDSFQDLLEIATYVYSADQAIPRGADDVDSFGHGWRRNLHFIIPVRNPDFWNGEEIQQALCSTLGFLSDDSYHFEFTKLTEAQAFQGYLDFNDDGRLLGYPEQVVMFSGGLDSLAGAIDEVLNEKHRVVLVTHKSTPKLNKRHRRLEKMIADKAGENAPLHIGVRVNKNKGLNYEYTQRSRSFLYVSIGATIAKMINLKSVRFYENGVISLNLPVCAQVVGGRATRTTHPRVIRGFQEIISLVAGEPFTIENPYIWKTKADVVGVITKAGCQEMIAASTTCTHTWEMTNHHTHCGTCSQCIDRRFAVIAAKADQYDPVDAYKADIFTQSRSKDEDKIMAAAYLERANQVRDQDDITQFIARFSEVSRVFRYLNGNPGSVAQKVYDLYKRHAKEVCEAMDTMVARNITAIRQRTLPGDCLLRTVYESGSVISVPAIPVEQKQPDNYFRKRGGVWAARFNGNAEVLVTGVDKGAEYINFLLARPNKETSVYEIVCGFAIDSCNAVLNSNETDEGFQVTQGVPLGDTGFVADRKAVEQYRETAHELLREIEEARAENNDAEIQRLEDEMTQITAAINEAVGLGGKLRKSNDKRKNIRDAFRNAVNRAIKYLEKYDKPLAVHLKESIKCGNEPVYRTEEEIVWEVRPIVNE

SEQ ID NO: 41221 - protein, 250 aa, Pseudoflavonifractor sp.
  REGION 1..250: note = tr|A0A1Y4LEQ3|A0A1Y4LEQ3_9FIRM TIGR00268 family protein OS=Pseudoflavonifractor sp. An184 OX=1965576; GN = B5F19_09715 PE=4 SV=1
MTLNEFFSLVPKAAVAFSGGTDSAFLLWAARECGCEVRAYYGKTAFQPQFELEDARRLASELEVPMTVVEADILSVPEAAANGPQRCYHCKTALFSRLRQAAREDGYTVLLDGTNASDDAGDRPGMRALRELEVRSPLRECGLTKDEVRRRSREAGLFTWDKPAYACLATRIPTGALITKEDLEKVERAEGALHALGFRDFRVRLFHGAARLQVTEEQLPLVLEQREAISSSLGAAFDGVLLDLKPRGLE

SEQ ID NO: 41222 - protein, 248 aa, Pseudoflavonifractor sp.
  REGION 1..248: note = tr|A0A416R6T5|A0A416R6T5_9FIRM ATP-dependent sacrificial sulfur transferase LarE; OS = Pseudoflavonifractor sp. AF19-9AC OX=2292244 GN=larE; PE = 4 SV=1
MTLGEFFQMYPKVALAFSGGVDSAYLLYAAVSCGAQVRAYYVKSAFQPQFELEDAQRLAKELNADMRVLQVDVLANQHVASNPADRCYYCKRGIFTAILNAAAEDGFSVLIDGTNASDDAGDRPGMRALREMSVRSPLRECGLTKAEVRRLSKEAGLFTWDKPAYACLATRVPAGVEITEEMLQKTEAAEDFLFSQGFSDFRVRMMGNAARLQLPEAQLPLLLEKRQTVVSELKKSYGAVLLDLEVRG

SEQ ID NO: 41223 - protein, 235 aa, Pseudofulvimonas gallinarii
  REGION 1..235: note = tr|A0A4S3KX30|A0A4S3KX30_9GAMM 7-cyano-7-deazaguanine synthase OS=Pseudofulvimonas gallinarii OX=634155 GN=queC PE=3 SV=1
MNDSRQRKAVVLLSGGMDSAVVVAIAREMGFAVHALSILYGQRHAVELAAARRVAADLGVAEHKVLNLDLRAIGGSALTADIAVPESPSEGIPVTYVPARNTVFLSLALGYAEVIGADDLFVGVNAVDYSGYPDCRPAFVEAFERLANVATRAGVEGHQLRVHAPLMHLGKDEIVREGVRLGVDFAQTVSCYQADEQGLACGRCDACRLRAQGFAEAGVPDPTPYRADAGAAPAR

SEQ ID NO: 41224 - protein, 234 aa, unidentified
  source 1..234: note = Pseudogulbenkiania ferrooxidans
  REGION 1..234: note = tr|U0Z4J0|U0Z4J0_9NEIS 7-cyano-7-deazaguanine synthase OS=Pseudogulbenkiania ferrooxidans EGD-HP2; OX = 1388764 GN=queC PE=3 SV=1
MKQKSDEKALVVLSGGQDSTTCLYWALGRFGAGNVEAVTFDYGQRHRVELDCARKIAALAGVRQTVLPIDTFAAIGGNALTDDEITPEEGVRDDDALPNTFVPGRNLVFLTFAAAFAYTRGARHLVTGVAQTDYSGYPDCRENTLKALEVALRLGMDSRVELHTPLMYLSKAETVTLAQQVGALDALAWSHTCYNGEVPPCGHCASCELRAKGFAEAGVPDPLVERCQAEAQGH

SEQ ID NO: 41225 - protein, 230 aa, unidentified
  source 1..230: note = Pseudogulbenkiania ferrooxidans
  REGION 1..230: note = tr|B9Z1F7|B9Z1F7_9NEIS 7-cyano-7-deazaguanine synthase OS=Pseudogulbenkiania ferrooxidans 2002 OX=279714; GN = queC PE=3 SV=1
MNSSDKALVVLSGGQDSTTCLYWALQRFGADNVEAVTFDYGQRHRVELDSARTIAALAGVPHTVLPIDTFAAIGGNALTDASITPESGARADDDTALPNTFVPGRNLIFLNFAAAFGYTRGARHLVTGVAQTDYSGYPDCRENTLKALELALRLGLDARVELHTPLMYLSKADTVRLAQQVGAMEAMAFSHTCYNGEQPPCGHCAACELRAKGFAEAGVADPLVERFRQG

SEQ ID NO: 41226 - protein, 230 aa, Pseudogulbenkiania sp.
  REGION 1..230: note = tr|G2IYU7|G2IYU7_PSEUL 7-cyano-7-deazaguanine synthase OS=Pseudogulbenkiania sp. (strain NH8B) OX=748280; GN = queC PE=3 SV=1
MNSSDKALVVLSGGQDSTTCLYWALQRFGAGQVEAVTFDYGQRHRVELDSARTIAALAGVPHTVLPIDTFAAIGGNALTDASITPESGARADDDTALPNTFVPGRNLIFLNFAAAFGYTRGARHLVTGVAQTDYSGYPDCRENTLKALELALRLGLDARVELHTPLMYLSKADTVRLAQQVGAIAALAFSHTCYNGEQPPCGHCAACELRAKGFAEAGVADPLVERFRQG

SEQ ID NO: 41227 - protein, 230 aa, Pseudogulbenkiania subflava
  REGION 1..230: note = tr|A0A1Y6B9X5|A0A1Y6B9X5_9NEIS 7-cyano-7-deazaguanine synthase OS=Pseudogulbenkiania subflava DSM 22618 OX=1123014 GN=queC PE=3 SV=1
MNSSDKALVVLSGGQDSTTCLYWALQRFGADKVEAVTFDYGQRHRVELDSARAIAALAGVPHTVLPIDTFAAIGGNALTDASITPEQGARADDDTELPNTFVPGRNLIFLNFAAAFGYTRGARHLVTGVAQTDYSGYPDCRENTLKALELALRLGLDARVELHTPLMYLSKADTVHLAQQVGAMAALAYSHTCYNGEQPPCGHCAACELRAKGFAEAGVADPLVELFRQG

SEQ ID NO: 41228 - protein, 225 aa, unidentified
  source 1..225: note = Pseudohaliea rubra
  REGION 1..225: note = tr|A0A095VMD3|A0A095VMD3_9GAMM 7-cyano-7-deazaguanine synthase OS=Pseudohaliea rubra DSM 19751 OX=1265313 GN=queC PE=3 SV=1
MEKRAVILSSGGLDSTTVLAMARAEGYACYTLSFDYGQRHRAELNAAVRVAAALGDVEHKVVSLNLDSIGGSALTDAAIAVPEEASEGIPVTYVPARNTVFLAIALGWAEVLNARDIFIGVNAVDYSGYPDCRPAFIEAFERVANLATRVGVEEGGIRIRAPLMELGKDAIIRRGMELGVDYGLTVSCYQATDEGLACGRCDACRLRREGFAAAGVADPTRYRKG

SEQ ID NO: 41229 - protein, 238 aa, unidentified
  source 1..238: note = Pseudohongiella acticola
  REGION 1..238: note = tr|A0A1E8CGA8|A0A1E8CGA8_9GAMM 7-cyano-7-deazaguanine synthase OS=Pseudohongiella acticola OX=1524254 GN=queC PE=3 SV=1
MKESNPDNGGNNTKKAVILVSGGLDSATCLAIARAEGYDCYALSFNYGQRASSELDAAMRLASAFSVRQHQVIPLGIGQLGGSALTDASVAMPESGVVPDQIPVTYVPARNTVFLSYALAWAEVLEADSIFIGVNALDYSGYPDCRPEFILAFEQMANLATRIGVEGRPIRIKTPLIDLGKAQIIAMGHELGVNYGLTVSCYQADSKGRACGRCDSCRLRRKGFDDAGIADPTSYVSR

SEQ ID NO: 41230 - protein, 230 aa, unidentified
  source 1..230: note = Pseudohongiella sp.
  REGION 1..230: note = tr|A0A2D9DQC2|A0A2D9DQC2_9GAMM 7-cyano-7-deazaguanine synthase OS=Pseudohongiella sp.; OX = 1979412 GN=queC PE=3 SV=1
  VARIANT 7: note = Xaa can be any naturally occurring amino acid
  VARIANT 32..33: note = Xaa can be any naturally occurring amino acid
  VARIANT 37: note = Xaa can be any naturally occurring amino acid
  VARIANT 40..41: note = Xaa can be any naturally occurring amino acid
  VARIANT 47: note = Xaa can be any naturally occurring amino acid
  VARIANT 95: note = Xaa can be any naturally occurring amino acid
  VARIANT 98: note = Xaa can be any naturally occurring amino acid
  VARIANT 100: note = Xaa can be any naturally occurring amino acid
  VARIANT 105: note = Xaa can be any naturally occurring amino acid
  VARIANT 120: note = Xaa can be any naturally occurring amino acid
  VARIANT 122: note = Xaa can be any naturally occurring amino acid
  VARIANT 150: note = Xaa can be any naturally occurring amino acid
  VARIANT 174: note = Xaa can be any naturally occurring amino acid
  VARIANT 179: note = Xaa can be any naturally occurring amino acid
  VARIANT 200: note = Xaa can be any naturally occurring amino acid
  VARIANT 219: note = Xaa can be any naturally occurring amino acid
MEQHPTXKKAVILVSGGLDSATCLALAAEQGXXCYAXSFXXGQRASXELEAARRLAEAAGVARHLVIPIGMGQMGGSALTDHSVAMPEDGVKDNXIPXTXVPARXTIFLSYALGWAEVLXAXAIFIGVNALDYSGYPDCRPEFIAAFEAXANLATRAGVEGQSIKIETPLISLXKAQIXETGNRLGVDYALTVSCYQADXQGRACGRCDSCRLRRKGFXDAGVADPTHYA

SEQ ID NO: 41231 - protein, 230 aa, unidentified
  source 1..230: note = Pseudohongiella sp.
  REGION 1..230: note = tr|A0A355VAM1|A0A355VAM1_9GAMM 7-cyano-7-deazaguanine synthase OS=Pseudohongiella sp.; OX = 1979412 GN=queC PE=3 SV=1
MEQHPTTKKAVILVSGGLDSATCLALAAEQGYECYAMSFDYGQRASSELEAARRLAEAAGVARHLVIPIGMGQMGGSALTDHSVAMPEDGVKDNIIPITYVPARNTIFLSYALGWAEVLEARAIFIGVNALDYSGYPDCRPEFIAAFEALANLATRAGVEGQSIKIETPLISLSKAQIIETGNRLGVDYALTVSCYQADAQGRACGRCDSCRLRRKGFDDAGVADPTHYA

SEQ ID NO: 41232 - protein, 229 aa, unidentified
  source 1..229: note = Pseudohongiella spirulinae
  REGION 1..229: note = tr|A0A0S2KEF7|A0A0S2KEF7_9GAMM 7-cyano-7-deazaguanine synthase OS=Pseudohongiella spirulinae OX=1249552 GN=queC PE=3 SV=1
MNTSAIRKAVILVSGGLDSATCLALAKEAGFECYALSFDYGQRASSELLAAQRLADEAGVSRHLVIPIGMGQMGGSALTDSSLTMPEDGVQENVIPITYVPARNTVFLSYALGWAEVLGASDIYIGVNALDYSGYPDCRPEFIKAFETMANLATRVAVEGQPMRIHTPLIHLSKAQIIAEGVRLGVDYGLTVSCYQADAEGRACGRCDSCRLRRKGFADAGVTDPTRYV

SEQ ID NO: 41233 - protein, 237 aa, Pseudolabrys sp.
  REGION 1..237: note = tr|A0A0Q7TK81|A0A0Q7TK81_9RHIZ 7-cyano-7-deazaguanine synthase OS=Pseudolabrys sp. Root1462 OX=1736466 GN=queC PE=3 SV=1
MTIANDTALVLFSGGQDSTTCLGWALDRFARVETVGFNYGQRHVIELEMRPRLRDLIAGIKPAWRERLGEDHLIALDALSAISETALTRETAIAFADGGLPNTFVPARNLVFFTFAGALAYRRGARHIVAGMCETDYSGYPDCRDDTVKAMQVALSLGLDRRVTIHTPLMWVDKAGTFAMAREIAGQAFLDLIVEETHTCYLGDRSHRHPWGYGCGACPACELRAQGYAKFCADGPA

SEQ ID NO: 41234 - protein, 237 aa, Pseudolabrys sp.
  REGION 1..237: note = tr|A0A371BE31|A0A371BE31_9RHIZ 7-cyano-7-deazaguanine synthase OS=Pseudolabrys sp. GY_H; OX = 2292256 GN=queC PE=3 SV=1
MTIANDAALVLFSGGQDSTTCLGWALERFARVETVGFNYGQRHAVELEVRPRLRDLIAGLKPEWKARLGDDHMVSLDALAAISDTALTRETAIAVADSGLPNTFVPARNLIFFTFAGALAYRRGARHIVAGMCETDYSGYPDCRDDTIKAMQVALSLGLDRKLTIHTPLMWVDKAGTFEMARDIAGQAFLDLVVEHSHTCYLGDRSHRHPWGYGCGTCPACDLRRQGYAKFLVSHPN

SEQ ID NO: 41235 - protein, 239 aa, Pseudolabrys taiwanensis
  REGION 1..239: note = tr|A0A345ZTT8|A0A345ZTT8_9RHIZ 7-cyano-7-deazaguanine synthase OS=Pseudolabrys taiwanensis OX=331696 GN=queC PE=3 SV=1
MTIGSDTALVLFSGGQDSTVCLAWALERFSRVETVGFDYGQRHAIELSVRNSLREKMAALDPAWAMRLGEDHLVKIDALAAISETALTRDTAIEIADNGLPTTFVPGRNLLFLGFAGAIAYRRGARHLVAGMCETDYSGYPDCRDDTIKAMQLALTLGLDKRVTIHTPLMWIDKAETFALAEELGGEVFLDLVVEESHSCYLGDRSRRHAWGYGCGTCPACQLRAQGFAKFMRERETTK

SEQ ID NO: 41236 - protein, 229 aa, unidentified
  source 1..229: note = Pseudomonadaceae bacterium
  REGION 1..229: note = tr|A0A2E8IHU4|A0A2E8IHU4_9GAMM 7-cyano-7-deazaguanine synthase OS=Pseudomonadaceae bacterium OX=1914538 GN=queC PE=3 SV=1
MSDKKAVILLSGGLDSATVVAMAKADGYSCYTMSFDYGQRHRSELQAAERVARQLGVVEHKVIGLNLNGMGGSALTDASIAVPENAAGAAPAPGIPVTYVPARNTVFLSLALGWAEVLGARDIFIGVNAVDYSGYPDCRPEFVEAFERMANLATKAGVEGNGFRIQAPLQNMSKAEIVAAGIALGVDYAQTVSCYQADDDGRACGKCDSCSLRAAGFAAAGVADATRYV

SEQ ID NO: 41237 - protein, 241 aa, unidentified
  source 1..241: note = Pseudomonadaceae bacterium
  REGION 1..241: note = tr|A0A4Q9R507|A0A4Q9R507_9GAMM 7-cyano-7-deazaguanine synthase OS=Pseudomonadaceae bacterium P17C OX=2211397 GN=queC PE=3 SV=1
MHKRALVLFSGGQDSTTCLAWALDRYERVETIGFDYGQRHSVELACRQRILQRLRQRYPAWRDRLGDDHFLDLKLLGQISETAMTSEKAIEFEQNGLPNTFVPGRNLLFFTFAAALAYRRGISVLVGGMCETDYSGYPDCRDNTLKALQVSLSLGMDSALLIETPLMWLDKNRTWELAGQLGGNDFVELIREETHTCYLGERGQRHAWGYGCGTCPACQLRKSGYQQYAAGLPTAPQDAPE

SEQ ID NO: 41238 - protein, 225 aa, unidentified
  source 1..225: note = Pseudomonadales bacterium
  REGION 1..225: note = tr|A0A2E3D2E8|A0A2E3D2E8_9GAMM 7-cyano-7-deazaguanine synthase OS=Pseudomonadales bacterium OX=1891229 GN=queC PE=3 SV=1
MNESKRAVVLLSGGLDSATCLAIARSQGYECFAISFEYGQRHDSELAAAQRVVDALGAKELKTIHINMGDIGGSALTDRSIDVPESPTEGIPVTYVPARNTVFLSLALGWAEVLNADAIFIGVNAVDYSGYPDCRPEYIAAFENLAKLATKRGVEGNPISIEAPLLMLSKADIIQKGTALGLDYGLTVSCYQADQEGRACGVCDSCRLRKEGFAQAGVLDPTRYR

SEQ ID NO: 41239 - protein, 222 aa, unidentified; identical to SEQ ID NO: 35585
  source 1..222: note = Pseudomonadales bacterium
  REGION 1..222: note = tr|A0A1G3DM57|A0A1G3DM57_9GAMM 7-cyano-7-deazaguanine synthase OS=Pseudomonadales bacterium RIFCSPHIGHO2_12_FULL_40_16 OX=1802006 GN=queC; PE = 3 SV=1

SEQ ID NO: 41240 - protein, 224 aa, Pseudomonas abietaniphila
  REGION 1..224: note = tr|A0A1G8ATD1|A0A1G8ATD1_9PSED 7-cyano-7-deazaguanine synthase OS=Pseudomonas abietaniphila OX=89065 GN=queC PE=3 SV=1
MTEKRAVILLSGGLDSATVVAMAKADGFACYTMSFDYGQRHRAELQAAERVAKDLGVVEHKVIGLNLNGIGGSALTDSSIAVPETPGEGIPVTYVPARNTVFLSLALGWAEVLGARDIFIGVNAVDYSGYPDCRPEFVESFERMANLATKAGVEGQGFTIQAPLQMLSKADIVKAGTRLGVDYGLTVSCYQADDQGRACGKCDSCRLRAEGFSAAGVTDPTRYF

SEQ ID NO: 41241 - protein, 235 aa, unidentified
  source 1..235: note = Pseudomonas abyssi
  REGION 1..235: note = tr|A0A2A3MCY2|A0A2A3MCY2_9PSED 7-cyano-7-deazaguanine synthase OS=Pseudomonas abyssi; OX = 170540 GN=queC PE=3 SV=1
MSAKPDSSGRAVVLLSGGLDSATVLAMAQAEGRACYTMSFDYGQRHRVELEAAERVARAAGVVEHKVIGMNLNGIGGSALTDERIAVPESPQEGIPVTYVPARNTLFLALALGWAEVLEARDIYIGVNAVDYSGYPDCRPEFVSAFEQLANLATRAGVEGEGFRIRAPLQQLSKAQIILAGQALGVDYSQTVSCYQADEQGRACGVCDSCRLRAEGFAAAGVADPTRYQGKFAGH

SEQ ID NO: 41242 - protein, 243 aa, unidentified
  source 1..243: note = Pseudomonas acidophila
  REGION 1..243: note = tr|A0A2A4F0Z7|A0A2A4F0Z7_9PSED 7-cyano-7-deazaguanine synthase OS=Pseudomonas acidophila; OX = 1912599 GN=queC PE=3 SV=1
MTRKDAKSSALVLFSGGQDSATCLAWALERYETVETLGFDYGQRHRVELECREGFRQAMVQRFPAWAARLGDDHTIDLSVLGAISETAMTREIQIEATANGLPNTFVPGRNLMFMTIAAAIAYRRGLQVLVGGMCETDFSGYPDCRDDTMKALQVTLNLGMATRLLLETPLMWLDKADTWRLAHTLGGDELVELVRVETHTCYVGERAELHAWGFGCGECPACRLRKRGYEAYLVGEKVTAPA

SEQ ID NO: 41243 - protein, 224 aa, Pseudomonas aeruginosa
  REGION 1..224: note = sp|Q9I4Z2|QUEC_PSEAE 7-cyano-7-deazaguanine synthase; OS = Pseudomonas aeruginosa (strain ATCC 15692 / DSM 22644 / CIP 104116 / JCM 14847 / LMG 12228 / 1C / PRS 101 / P AO1); OX = 208964 GN=queC PE=3 SV=1
MNQKKAVILLSGGLDSATVVAMAKADGYACYTMSFDYGQRHRAELQAAERVARQLGVIEHKVIGLDLNGMGGSALTDESIAVPESPSEGIPVTYVPARNTVFLSLALGWAEVLDARDIFIGVNAVDYSGYPDCRPEFVEAFERMANLATKAGVEGNGFRIQAPLQYLSKAQIIQAGVARGVDYGLTVSCYQADEQGRACGKCDSCRLRADGFAAAGISDPTPYF

SEQ ID NO: 41244 - protein, 224 aa, Pseudomonas aeruginosa; identical to SEQ ID NO: 41243
  REGION 1..224: note = sp|Q02ID8|QUEC_PSEAB 7-cyano-7-deazaguanine synthase; OS = Pseudomonas aeruginosa (strain UCBPP-PA14) OX=208963; GN = queC PE=3 SV=1

SEQ ID NO: 41245 - protein, 231 aa, unidentified
  source 1..231: note = Pseudomonas aestusnigri
  REGION 1..231: note = tr|A0A1H5ZF99|A0A1H5ZF99_9PSED 7-cyano-7-deazaguanine synthase OS=Pseudomonas aestusnigri; OX = 857252 GN=queC PE=3 SV=1
MSHANPASEAPAAVVLLSGGLDSATVLAMAQAQGLRCYTMSFDYGQRHRAELQAAERVACTAGVVEHKVIGMNLGGIGGSALTDDSIAVPEGPQDGIPVTYVPARNTLFLSLALGWAEVLGAREIFIGVNAVDYSGYPDCRPEFIEAFERLANLATRAGVEGEGFHIRAPLQHMSKAEIVQAGAALGVDYSKTVSCYQADDQGRACGRCDSCRLRAEGFRAAGLADPTRYS

SEQ ID NO: 41246 - protein, 229 aa, Pseudomonas agarici
  REGION 1..229: note = tr|A0A0X1T1N3|A0A0X1T1N3_PSEAA 7-cyano-7-deazaguanine synthase OS=Pseudomonas agarici; OX = 46677 GN=queC PE=3 SV=1
MTTQANTEKKAVILLSGGLDSATVVAMARADGYRCYTMSFDYGQRHRAELQAAERVARDQGVIEHKVIGLNLNGIGGSALTDSAIEVPEAPGEGIPVTYVPARNTVFLSLALGWAEVLGARDIFIGVNAVDYSGYPDCRPEFVEAFETLANLATKAGVEGDGFRIRAPLQNLSKADIVQAGVKLGVDYSLTVSCYQADANGFACGKCDSCRLRAEGFSAAGIGDPTRYF

SEQ ID NO: 41247 - protein, 224 aa, Pseudomonas alcaligenes
  REGION 1..224: note = tr|A0A1N6S3F6|A0A1N6S3F6_PSEAC 7-cyano-7-deazaguanine synthase OS=Pseudomonas alcaligenes; OX = 43263 GN=queC PE=3 SV=1
MTDKKAVVLLSGGLDSATILAQAKAAGFACYSMSFDYGQRHRAELQAAERVARQMGVVEHKVIGLNLNGIGGSALTDSSIAVPEAPTEGIPVTYVPARNTVFLSLALGWAEVLGAHDIFIGVNAVDYSGYPDCRPEFIEAFERVANLATREGVEGRGFRIQAPLQNLSKAQIVQIGVQHGVDYGLTVSCYQADDDGRACGKCDSCRLRAAGFAAAGVADPTRYA

SEQ ID NO: 41248 - protein, 224 aa, Pseudomonas alcaligenes
  REGION 1..224: note = tr|U2ZM53|U2ZM53_PSEA4 7-cyano-7-deazaguanine synthase OS=Pseudomonas alcaligenes (strain ATCC 14909 / DSM 50342 / JCM 20561 / NBRC 14159 / NCIMB 9945 / NCTC 10367 /1577) OX=1215092 GN=queC PE=3 SV=1
MTDRKAVVLLSGGLDSATILAQAKAAGFACYSMSFDYGQRHHAELQAAERVAQQMGVVEHKVIGLNLNGIGGSALTDSSIAVPEAPTEGIPVTYVPARNTVFLSLALGWAEVLGAHDIFIGVNAVDYSGYPDCRPEFIEAFERVANLATREGVEGRGFRIQAPLQNLSKAQIVQIGVQHGVDYGLTVSCYQADDDGRACGKCDSCRLRAAGFAAAGVADPTRYA

SEQ ID NO: 41249 - protein, 224 aa, Pseudomonas alcaliphila
  REGION 1..224: note = tr|A0A1G6VM47|A0A1G6VM47_9PSED 7-cyano-7-deazaguanine synthase OS=Pseudomonas alcaliphila; OX = 101564 GN=queC PE=3 SV=1
MNDKKAVILLSGGLDSATVVAMAKAEGYSCYSMSFDYGQRHRAELQAAERVARQLGVVEHKVIGLNLNGIGGSALTDSSIAVPESPTEGIPATYVPARNTVFLALALGWAEVLEARDIFIGVNAVDYSGYPDCRPEFVEAFERMANLATKAGVEGQGFVIRAPLQQMSKGEIIQAGMRLGVDYALTVSCYQADDDGRACGKCDSCRLRAAGFAAAGVPDATRYF

SEQ ID NO: 41250 - protein, 224 aa, Pseudomonas alcaliphila
  REGION 1..224: note = tr|A0A1L7FWX9|A0A1L7FWX9_9PSED 7-cyano-7-deazaguanine synthase OS=Pseudomonas alcaliphila JAB1 OX=741155 GN=queC PE=3 SV=1
MNDKKAVILLSGGLDSATVVAMAKAEGYSCYSMSFDYGQRHRAELQAAERVARQLGVIEHKVIGLNLNGIGGSALTDSSIAVPESPTEGIPATYVPARNTVFLALALGWAEVLGARDIFIGVNAVDYSGYPDCRPEFVDAFERMANLATKAGVEGQGFVIRAPLQQMSKGEIIQAGMRLGVDYALTVSCYQADDHGRACGKCDSCRLRAAGFAAAGVPDATRYF

SEQ ID NO: 41251 - protein, 224 aa, unidentified
  source 1..224: note = Pseudomonas alkylphenolica
  REGION 1..224: note = tr|A0A443ZW54|A0A443ZW54_9PSED 7-cyano-7-deazaguanine synthase OS=Pseudomonas alkylphenolica OX=237609 GN=queC PE=3 SV=1
MTEKRAVILLSGGLDSATVVAMAKAEGYKCYTMSFDYGQRHRAELNAAARVARDLGVVEHKVIGLNLDGIGGSALTDSSIDVPEAPTEGIPVTYVPARNTVFLSLALGWAEVLEARDIFIGVNAVDYSGYPDCRPEFVEAFERMANLATKAGVEGQGFRIQAPLQNLSKAQIVQAGMARGVDYSLTVSCYQADDEGRACGKCDSCRLRADGFKAAGVEDPTRYF

SEQ ID NO: 41252 - protein, 224 aa, unidentified
  source 1..224: note = Pseudomonas alkylphenolica
  REGION 1..224: note = tr|A0A077FIY8|A0A077FIY8_9PSED 7-cyano-7-deazaguanine synthase OS=Pseudomonas alkylphenolica OX=237609 GN=queC PE=3 SV=1
MTEKRAVILLSGGLDSATVVAMAKAEGYKCYTMSFDYGQRHRAELNAAARVARDLGVVEHKVIGLSLDGIGGSALTDSSIDVPEAPSEGIPVTYVPARNTVFLSLALGWAEVLEARDIFIGVNAVDYSGYPDCRPEFVEAFERMANLATKAGVEGQGFRIQAPLQNLSKAQIVQAGMARGVDYSLTVSCYQADDEGRACGKCDSCRLRADGFKAAGVEDPTRYF

SEQ ID NO: 41253 - protein, 229 aa, Pseudomonas amygdali
  REGION 1..229: note = tr|A0A2S4IG33|A0A2S4IG33_PSEA0 7-cyano-7-deazaguanine synthase OS=Pseudomonas amygdali pv. morsprunorum OX=129138 GN=queC PE=3 SV=1
MSELTNTEKRAVILLSGGLDSATVVAMARAEGYACYTMSFDYGQRHRAELDAAARVARDLGAVEHKVIGLNLNGIGGSALTDSSIAVPESPSEGIPVTYVPARNTVFLSLALGWAEVLGARDIFIGVNAVDYSGYPDCRPEFVESFERMANLATKAGVEGQGFTIRAPLQNLSKSDIVKAGTALGVDYALTVSCYQADDEGRACGRCDSCRLRAEGFTAAGMADPTRYF

SEQ ID NO: 41254 - protein, 229 aa, Pseudomonas amygdali
  REGION 1..229: note = tr|A0A0P9S4S7|A0A0P9S4S7_PSEA0 7-cyano-7-deazaguanine synthase OS=Pseudomonas amygdali pv. hibisci OX=251723 GN=queC PE=3 SV=1
MSELTNTEKRAVILLSGGLDSATVVAMARAEGYACYTMSFDYGQRHRAELDAAARVARDLGAVEHKVIGLNLNGIGGSALTDSSIAVPESPSEGIPITYVPARNTVFLSLALGWAEVLGARDIFIGVNAVDYSGYPDCRPEFVESFERMANLATKAGVEGQGFTIRAPLQNLSKSDIVKAGAALGVDYSLTVSCYQADDQGRACGKCDSCRLRAEGFTAAGMADPTRYF

SEQ ID NO: 41255 - protein, 224 aa, Pseudomonas anguilliseptica
  REGION 1..224: note = tr|A0A1H5EMS9|A0A1H5EMS9_PSEAG 7-cyano-7-deazaguanine synthase OS=Pseudomonas anguilliseptica OX=53406 GN=queC PE=3 SV=1
MSDKKAVILLSGGLDSATVVALAKADGYSCYTMSFDYGQRHRSELQAAEQVARQLGVVEHKVIGLNLNGMGGSALTDSSIEVPESPVEGIPVTYVPARNTVFLSLALGWAEVLGARDIFIGVNAVDYSGYPDCRPEFVEAFERMANLATKAGVEGQGFCIQAPLQVMSKAEIVQVGVQHGVDYALTVSCYQADDQGRACGKCDSCRLRAAGFATAGLVDPTRYF

SEQ ID NO: 41256 - protein, 233 aa, Pseudomonas antarctica
  REGION 1..233: note = tr|A0A1G9XUP4|A0A1G9XUP4_9PSED 7-cyano-7-deazaguanine synthase OS=Pseudomonas antarctica; OX = 219572 GN=queC PE=3 SV=1
MERRTGALRWLINNLQSSCSLAASIPPRWWPWSAPKATAATPSFDYGQRHRAELEAAARVAHDLGVVEHKVIGLNLNGIGGSALTDSSIDVPEAPSEGIPLTYVPARNTVFLSLALGWAEVLNARDIFIGVNALDYNGYPDCRPEYVEAFERMANLATKAGVEGQGFRIQAPLQSMSKADIVKAGIALGVDYALTVSCYQADNAGRGCGKCDACRLRAEGFQAAGMTDPTRYF

SEQ ID NO: 41257 - protein, 225 aa, Pseudomonas antarctica
  REGION 1..225: note = tr|A0A172Z677|A0A172Z677_9PSED 7-cyano-7-deazaguanine synthase OS=Pseudomonas antarctica; OX = 219572 GN=queC PE=3 SV=1
MTDQKRAVILLSGGLDSATMVAMAQAQGYRCYTMSFDYGQRHRAELDAAARVARDLSVVEHKVIGLNLNGIGGSALTDSSIDVPEAPSEGIPLTYVPARNTVFLSLALGWAEVLNARDIFIGVNALDYNGYPDCRPEYVESFERMANLATKAGVEGQSFRIQAPLQNMSKADIVKAGVGLGVDYALTVSCYQADDAGRACGKCDACRLRAEGFQTAGITDPTRYF

SEQ ID NO: 41258 - protein, 224 aa, Pseudomonas argentinensis
  REGION 1..224: note = tr|A0A1I3K6I0|A0A1I3K6I0_9PSED 7-cyano-7-deazaguanine synthase OS=Pseudomonas argentinensis OX=289370 GN=queC PE=3 SV=1
MSEKKAVILLSGGLDSATVVAMAKAQGYSCFSMSFDYGQRHRSELQAAERVARQLGVIEHKVIGINLDGIGGSALTDASIDVPQAPTTGIPVTYVPARNTVFLSLALGWAEVLGAQDIFIGVNAVDYSGYPDCRPEFVEAFERMANLATKMGVEGQSIRIQAPLQMMSKAEIVQAGSRLGVDYGLTVSCYLADADGRACGRCDSCRLRAAGFAAAGMVDPTRYQ

SEQ ID NO: 41259 - protein, 234 aa, Pseudomonas argentinensis
  REGION 1..234: note = tr|A0A1I3GLA4|A0A1I3GLA4_9PSED 7-cyano-7-deazaguanine synthase OS=Pseudomonas argentinensis OX=289370 GN=queC PE=3 SV=1
MHKNALVLFSGGQDSTTCLAWALDRYDHVETIGFDYGQRHNVELECRRQVLQRLRTDYPRWGEKLGDDHFLDLKLLGQISDTAMTSEKEIEFKENGLPNTFVPGRNLLFFTFAAAIAYRRGLSVLVGGMCETDYSGYPDCRDNTLKSLQVSLGLGMDMPLVIETPLMWLDKKETWELAKSLGGSSFVELVQEETHTCYLGDRQRRHDWGYGCNECPACELRRTGFEAFKRDNDA

SEQ ID NO: 41260 - protein, 230 aa, Pseudomonas arsenicoxydans
  REGION 1..230: note = tr|A0A1H0SUI9|A0A1H0SUI9_9PSED 7-cyano-7-deazaguanine synthase OS=Pseudomonas arsenicoxydans OX=702115 GN=queC PE=3 SV=1
MTEQLNTTEKRAVILLSGGLDSATVVAMARAEGYSCYTMSFDYGQRSHAELHAAERVARDLGVVEHKVIGLNLNGIGGSALTDSSIDVPEVPGEGIPVTYVPARNTVFLSLALGWAEVLGARDIFIGVNAVDYSGYPDCRPEFIESFERMANLATKAGVEGNGFRIQAPLQNLSKAQIVQAGVKLGVDYGLTVSCYQADDNGRACGKCDSCRLRAEGFAAAGVSDPTPYF

SEQ ID NO: 41261 - protein, 230 aa, Pseudomonas arsenicoxydans
  REGION 1..230: note = tr|A0A502HYZ4|A0A502HYZ4_9PSED 7-cyano-7-deazaguanine synthase OS=Pseudomonas arsenicoxydans OX=702115 GN=queC PE=3 SV=1
MTEQLNTTEKRAVILLSGGLDSATVVAMARAEGYACYTMSFDYGQRSHAELHAAARVARDLGVVEHKVIGLNMNGMGGSALTDSSIDIPEALGEGIPVTYVPARNTVFLSLALGWAEVLGARDIFIGVNAVDYSGYPDCRPEFIESFERMANLATKAGVEGNGFRIQAPLQNLSKAQIVEAGVKLGVNYGLTVSCYQADDDGRACGKCDSCRLRAEGFAAAGISDPTPYF

SEQ ID NO: 41262 - protein, 229 aa, Pseudomonas asplenii
  REGION 1..229: note = tr|A0A438LD68|A0A438LD68_9PSED 7-cyano-7-deazaguanine synthase OS=Pseudomonas asplenii; OX = 53407 GN=queC PE=3 SV=1
MTTQASTDKKAVILLSGGLDSATVVAMARAEGYSCYTMSFDYGQRHRAELQAAERVARDLGVIEHKVIGLNLNGIGGSALTDSSIDVPETPSEGIPVTYVPARNTVFLSLALGWAEVLGARDIFIGVNAVDYSGYPDCRPEFVEAFETLANLATKAGVEGNGFRIQAPLQNLSKGDIVQAGIKLGVDYSLTVSCYQADANGFACGKCDSCRLRAEGFAAAGISDPTRYF

SEQ ID NO: 41263 - protein, 229 aa, Pseudomonas asplenii
  REGION 1..229: note = tr|A0A1H1VJ21|A0A1H1VJ21_9PSED 7-cyano-7-deazaguanine synthase OS=Pseudomonas asplenii; OX = 53407 GN=queC PE=3 SV=1
MTTQANIEKKAVILLSGGLDSATVVAMARAQGYSCYTMSFDYGQRHRAELQAAERVARDLGAIEHKVIGLNLNGIGGSALTDSSIDVPEAPSEGIPVTYVPARNTVFLSLALGWAEVLGAQDIFIGVNAVDYSGYPDCRPEFVEAFETLANLATKAGVEGEGFRIQAPLQNLSKADIVREGVRLGVDYSLTVSCYQADANGFACGKCDSCRLRAEGFNVAGIDDPTHYF

SEQ ID NO: 41264 - protein, 229 aa, unidentified
  source 1..229: note = Pseudomonas asturiensis
  REGION 1..229: note = tr|A0A1M7LZ79|A0A1M7LZ79_9PSED 7-cyano-7-deazaguanine synthase OS=Pseudomonas asturiensis; OX = 1190415 GN=queC PE=3 SV=1
MTELTMTEKKAVILLSGGLDSATVVAMARAEGYACYTMSFDYGQRHRAELDAAAQVARDLGAIEHKIIGLNLNGIGGSALTDSSIAVPEAPSEGIPVTYVPARNTVFLSLALGWAEVLGARDIFIGVNAVDYSGYPDCRPEFVESFERMANLATKAGVEGQGFTIRAPLQNLSKSDIVKAGTALGVDYALTVSCYQADDQGRACGKCDSCRLRAEGFAAAGVADPTRYF

SEQ ID NO: 41265 - protein, 229 aa, Pseudomonas avellanae; identical to SEQ ID NO: 41253
  REGION 1..229: note = tr|A0A2S3TG04|A0A2S3TG04_9PSED 7-cyano-7-deazaguanine synthase OS=Pseudomonas avellanae; OX = 46257 GN=queC PE=3 SV=1

SEQ ID NO: 41266 - protein, 279 aa, Pseudomonas avellanae
  REGION 1..279: note = tr|A0A3M5T2V1|A0A3M5T2V1_9PSED 7-cyano-7-deazaguanine synthase OS=Pseudomonas avellanae; OX = 46257 GN=queC PE=3 SV=1
MAVLAKCCSLPAITSLKAATWQTGSWPTICRYACRCSCIKFFGMTSRGADMSELTNTEKRAVILLSGGLDSATVVAMARAEGYACYTMSFDYGQRHRAELDAAARVARDLGAVEHKVIGLNLNGIGGSALTDSSIAVPESPSEGIPVTYVPARNTVFLSLALGWAEVLGARDIFIGVNAVDYSGYPDCRPEFVESFERMANLATKAGVEGQGFTIRAPLQNLSKSDIVKAGTALGVDYALTVSCYQADDQGRACGKCDSCRLRAEGFTAAGMADPTRYF

SEQ ID NO: 41267 - protein, 200 aa, Pseudomonas azotoformans
  REGION 1..200: note = tr|A0A4Q0I200|A0A4Q0I200_PSEAZ 7-cyano-7-deazaguanine synthase OS=Pseudomonas azotoformans OX=47878 GN=B4O85_05925 PE=3 SV=1
MSIVTLVSGGLDSTLVAKLAQEQGLQIFPLFVDYGQRARDRELAACKLAMQKLGLPEPEIAGLSGFGRLIRSGLTDPTLHIIDDAFTPGRNMLFLLTAAAYAHQKNADAISIGLLHESTSLFPDQTSGFLEEAERMITLCMGRNIKVLAPLSSFTKPDVVTLAAEKGISQTYSCHLGEEQPCGNCIACNEFKFEGANDGR

SEQ ID NO: 41268 - protein, 224 aa, Pseudomonas azotoformans
  REGION 1..224: note = tr|A0A1V2JUH7|A0A1V2JUH7_PSEAZ 7-cyano-7-deazaguanine synthase OS=Pseudomonas azotoformans OX=47878 GN=queC PE=3 SV=1
MDQKRAVILLSGGLDSATVVAMAQAEGYACYTMSFDYGQRHRAELNAAARVARDMGVVEHKVIGLNLDGIGGSALTDSSIDVPETPGEGIPVTYVPARNTVFLSLALGWAEVLNARDIFIGVNAVDYSGYPDCRPEFVESFERMANLATKAGVEGQGFRILAPLQNLSKADIVKAGVGLGVDYSLTVSCYQADDDGRACGKCDSCRLRAEGFQAAGITDPTRYF

SEQ ID NO: 41269 - protein, 230 aa, Pseudomonas baetica
  REGION 1..230: note = tr|A0A2N0DIG3|A0A2N0DIG3_9PSED 7-cyano-7-deazaguanine synthase OS=Pseudomonas baetica; OX = 674054 GN=queC PE=3 SV=1
MAEQLNTTEKRAVILLSGGLDSATVVAMARAEGYSCYTMSFDYGQRSHAELHAAARVARDLGVVEHKVIGLNLNGMGGSALTDSSIDIPEEQGEGIPVTYVPARNTVFLSLALGWAEVLGARDIFIGVNAVDYSGYPDCRPEFIASFERMANLATKAGVEGSGFRIQAPLQNLSKAQIVQAGVKLGVDYGLTVSCYQADDEGRACGKCDSCRLRAEGFAAAGVSDPTPYF

SEQ ID NO: 41270 - protein, 232 aa, Pseudomonas baetica
  REGION 1..232: note = tr|A0A2N0DIU5|A0A2N0DIU5_9PSED 7-cyano-7-deazaguanine synthase OS=Pseudomonas baetica; OX = 674054 GN=queC PE=3 SV=1
MSNKAVIVFSGGQDSTTCLIHALTHYDEVHCITFDYGQRHHAEIEVAQQLCKQLGVTVHKVMDVSLLNELAISSLTRDNIPVPTVNSSGESLPSTFVPGRNILFLTLASIYAYQVQARTVITGVCETDFSGYPDCRDEFVKALNNALELGMDYKLRLETPLMWLNKAETWALADYHNQLELIRHQTLTCYNGIAGSGCGDCDACNLRAKGLNEFLENKEQVANSLKLKLKLK

SEQ ID NO: 41271 - protein, 224 aa, Pseudomonas balearica
  REGION 1..224: note = tr|A0A1G9QGY0|A0A1G9QGY0_9PSED 7-cyano-7-deazaguanine synthase OS=Pseudomonas balearica DSM 6083 OX=1123016 GN=queC PE=3 SV=1
MNEKKAVVLLSGGLDSATVVAIARSQGFACYTMSFDYGQRHRAELQAAERVARQLGVAEHKVVGINLNGIGGSALTDTSIDVPEQPGEGVPVTYVPARNTVFLALALGWAEVLQAHDLFIGVNAVDYSGYPDCRPEFIEAFERMANLATKAGVEGNGFRIQAPLQHMSKAEIIRRGTELGVDYATTVSCYQADDDGRACGVCDSCRLRAAGFAQAGLADATRYR

SEQ ID NO: 41272 - protein, 229 aa, unidentified
  source 1..229: note = Pseudomonas batumici
  REGION 1..229: note = tr|A0A0C2IA42|A0A0C2IA42_9PSED 7-cyano-7-deazaguanine synthase OS=Pseudomonas batumici; OX = 226910 GN=queC PE=3 SV=1
MTTQASTEKKAVILLSGGLDSATVVAMARAQGYSCYTMSFDYGQRHRAELQAAERVARDLGVIEHKVIGLNLNGIGGSALTDSSIDVPEAPSEGIPVTYVPARNTVFLSLALGWAEVLGARDIFIGVNAVDYSGYPDCRPEFVEAFETLANLATKAGVEGEGFRIQAPLQNLSKADIVQAGVKLGVDYSLTVSCYQADANGFACGKCDSCRLRAEGFAAAGISDPTRYF

SEQ ID NO: 41273 - protein, 235 aa, Pseudomonas bauzanensis
  REGION 1..235: note = tr|A0A4U0YQT3|A0A4U0YQT3_9PSED 7-cyano-7-deazaguanine synthase OS=Pseudomonas bauzanensis; OX = 653930 GN=queC PE=3 SV=1
MNALLICSGGFDSVTLAYRLAAEQSLGTLLTFDYGQRHRKEIDAARLAAERLAVPHLIMDIGHIGRQLSGSALTDDIAVPHGHYSEENMKVTVVPNRNAIMLTIAFGVAATRGHDTVALAVHGGDHFIYPDCRPDFIRLFSEMQTKALDGVAEVALLAPYVATDKTEIARDAARYAVPVGDTWSCYEGGELHCGRCGTCVERIEAMALAGMADPTRYQDKQYWQEAVARVKSCTP

SEQ ID NO: 41274 - protein, 235 aa, Pseudomonas bauzanensis
  REGION 1..235: note = tr|A0A1I4P432|A0A1I4P432_9PSED 7-cyano-7-deazaguanine synthase OS=Pseudomonas bauzanensis; OX = 653930 GN=queC PE=3 SV=1
MNALLICSGGFDSVTLAYRLAAEQSLGTLLTFDYGQRHRKEIDAARLAAERLAVPHLIMDIGHIGRQLSGSALTDDIAVPHGHYSEENMKVTVVPNRNAIMLTIAFGVAAARGHDTVALAVHGGDHFIYPDCRPDFIRLFSEMQTKALDGVAEVALLAPYVTTDKTEIARDAARYAVPVGDTWSCYEGGELHCGRCGTCVERIEAMALAGMADPTPYQDKQYWQEAVARVKSCTP

SEQ ID NO: 41275 - protein, 224 aa, Pseudomonas benzenivorans
  REGION 1..224: note = tr|A0A1G7WG83|A0A1G7WG83_9PSED 7-cyano-7-deazaguanine synthase OS=Pseudomonas benzenivorans OX=556533 GN=queC PE=3 SV=1
MSEKKAVILLSGGLDSATVVALAKAEGYACYSMSFDYGQRHRAELQAAERVARQLGVVEHKVIGLNLNGIGGSALTDSSIAVPESPTEGIPVTYVPARNTVFLSLALGWAEVLGARDIFIGVNAVDYSGYPDCRPEFIEAFERMANLATKAGVEGQGFRIQAPLQNMSKAEIVQAGLRHGVDYALTVSCYQADDDGRACGKCDSCRLRAAGFAGAGVADPTRYR

SEQ ID NO: 41276 - protein, 224 aa, Pseudomonas borbori
  REGION 1..224: note = tr|A0A1I5LFZ8|A0A1I5LFZ8_9PSED 7-cyano-7-deazaguanine synthase OS=Pseudomonas borbori; OX = 289003 GN=queC PE=3 SV=1
MSDKKAVILLSGGLDSATVVALAKAEGYSCYSMSFDYGQRHRAELQAAERVARQLGVVEHKVVGLSLDGIGGSALTDSSIAVPESPTEGIPVTYVPARNTVFLALALGWAEVLGARDIFIGVNAVDYSGYPDCRPEFIAAFERMANLATKAGVEGQGFRIQAPLQNMSKAEIVQAGLRHGVDYALTVSCYQADEEGRACGKCDSCRLRAAGFAAAGVADPTRYR

SEQ ID NO: 41277 - protein, 230 aa, Pseudomonas brassicacearum
  REGION 1..230: note = tr|A0A423ID66|A0A423ID66_9PSED 7-cyano-7-deazaguanine synthase OS=Pseudomonas brassicacearum OX=930166 GN=queC PE=3 SV=1
MTEQLNTAEKRAVILLSGGLDSATVVAMARAEGYSCYTMSFDYGQRSQAELHAAARVARDLGVVEHKVIGLNLNGMGGSALTDSSIDIPEELGEGIPVTYVPARNTVFLSLALGWAEVLGARDIFIGVNAVDYSGYPDCRPEFIESFERMANLATKAGVEGNGFRIQAPLQNLSKAQIVEAGVKLGVDYGLTVSCYQADDNGRACGKCDSCRLRAEGFAAAGISDPTPYF

SEQ ID NO: 41278 - protein, 230 aa, Pseudomonas brassicacearum
  REGION 1..230: note = tr|A0A423GM49|A0A423GM49_9PSED 7-cyano-7-deazaguanine synthase OS=Pseudomonas brassicacearum OX=930166 GN=queC PE=3 SV=1
MTEQLNTTEKRAVILLSGGLDSATVVAMARADGYSCYTMSFDYGQRHRAELQAAERVARDLGVIEHKVIGLNLNGIGGSALTDSSIDVPEAPSEGIPITYVPARNTVFLSLALGWAEVLGARDIFIGVNAVDYSGYPDCRPEFIEAFERMANLATKAGVEGNGFRIQAPLQNLSKAQIVQAGVKLGVDYGLTVSCYQADDNGRACGKCDSCRLRAEGFLAAGISDPTAYF

SEQ ID NO: 41279 - protein, 229 aa, Pseudomonas brenneri
  REGION 1..229: note = tr|A0A176V511|A0A176V511_9PSED 7-cyano-7-deazaguanine synthase OS=Pseudomonas brenneri; OX = 129817 GN=queC PE=3 SV=1
MTEQTTDQKRAVILLSGGLDSATVVAMARAEGYSCYTMSFDYGQRSHAELHAAARVARDLGVVEHKVIGLNLNGIGGSALTDNTIDVPEAPTEGIPVTYVPARNTVFLSLALGWAEVLNARDIFIGVNAVDYSGYPDCRPEFVESFERMANLATKAGVEGHGFRIQAPLQNLSKADIVKAGVRLGVDYSLTVSCYQADNDGRACRKCDSCRLRAEGFQAAGITDPTRYF

SEQ ID NO: 41280 - protein, 229 aa, Pseudomonas brenneri
  REGION 1..229: note = tr|A0A5B2UWD9|A0A5B2UWD9_9PSED 7-cyano-7-deazaguanine synthase OS=Pseudomonas brenneri; OX = 129817 GN=queC PE=3 SV=1
MTEQTTDQKRAVILLSGGLDSATVVAMARAEGYSCYTMSFDYGQRSHAELDAAARVARDLGVVEHKVIGLNLNGIGGSALTDSTIDVPEAPTEGIPVTYVPARNTVFLSLALGWAEVLDARDIFIGVNAVDYSGYPDCRPEFVESFERMANLATKAGVEGRGFRIQAPLQNLSKADIVKAGVRLGVDYSLTVSCYQADNDGRACRKCDSCRLRAEGFQAAGITDPTRYF

SEQ ID NO: 41281 - protein, 224 aa, unidentified
  source 1..224: note = Pseudomonas canadensis
  REGION 1..224: note = tr|A0A423EWW7|A0A423EWW7_9PSED 7-cyano-7-deazaguanine synthase OS=Pseudomonas canadensis; OX = 915099 GN=queC PE=3 SV=1
MDQKRAVILLSGGLDSATVVAMAQAQGYSCYTMSFDYGQRHRAELNAAARVAREMGVVEHKVIGLNLNGIGGSALTDSSIDVPEAPSEGIPVTYVPARNTVFLSLALGWAEVLNARDIFIGVNAVDYSGYPDCRPEFVESFERMANLATKAGVEGQGFRILAPLQNLSKADIVKAGVGLGVDYSLTVSCYQADDDGRACGKCDSCRLRAEGFQAAGITDPTRYF

SEQ ID NO: 41282 - protein, 226 aa, Pseudomonas cannabina
  REGION 1..226: note = tr|A0A3M3QF19|A0A3M3QF19_PSECA 7-cyano-7-deazaguanine synthase OS=Pseudomonas cannabina; OX = 86840 GN=queC PE=3 SV=1
MTMTEKRAVILLSGGLDSATVVAMARAEGYACYTMSFDYGQRHRAELDAAARVARDLGAVEHKVIGLNLNGIGGSALTDSSIAVPEAPSEGIPVTYVPARNTVFLSLALGWAEVLGARDIFIGVNAVDYSGYPDCRPEFVESFERTANLATKAGVEGQGFTIRAPLQNLSKSDIVKAGAALGVDYSLTVSCYQADDQGRACGKCDSCRLRAEGFTNADMADPTRYF

SEQ ID NO: 41283 - protein, 229 aa, Pseudomonas cannabina
  REGION 1..229: note = tr|A0A0P9LHS6|A0A0P9LHS6_PSECA 7-cyano-7-deazaguanine synthase OS=Pseudomonas cannabina; OX = 86840 GN=queC PE=3 SV=1
MSELTMTEKRAVILLSGGLDSATVVAMARAEGYACYTMSFDYGQRHRAELDAAARVARDLGAVEHKVIGLNLNGIGGSALTDSSIAVPEAPSEGIPVTYVPARNTVFLSLALGWAEVLGARDIFIGVNAVDYSGYPDCRPEFVESFERTANLATKAGVEEQGFTVRAPLQNLSKSDIVKAGAALGVDYSLTVSCYQADDQGRACGKCDSCRLRAEGFTNAGMADPTRYF

SEQ ID NO: 41284 - protein, 224 aa, unidentified
  source 1..224: note = Pseudomonas capeferrum
  REGION 1..224: note = tr|A0A084CJC8|A0A084CJC8_9PSED 7-cyano-7-deazaguanine synthase OS=Pseudomonas capeferrum; OX = 1495066 GN=queC PE=3 SV=1
MTEKRAVILLSGGLDSATVVAMAKAEGYSCYTMSFDYGQRHRAELDAAARVARDLGVVEHKVIGLSLDGIGGSALTDSSIDVPETPGEGIPVTYVPARNTVFLSLALGWAEVLEARDIFIGVNAVDYSGYPDCRPEFVEAFERMANLATKAGVEGQGFRIQAPLQNLSKAQIVQEGIARGVDYSLTVSCYQADEQGRACGKCDSCRLRADGFKAAGVSDPTRYF

SEQ ID NO: 41285 - protein, 229 aa, Pseudomonas caricapapayae
  REGION 1..229: note = tr|A0A3M6F3S6|A0A3M6F3S6_9PSED 7-cyano-7-deazaguanine synthase OS=Pseudomonas caricapapayae OX=46678 GN=queC PE=3 SV=1
MSEFTNTEKRAVILLSGGLDSATVVAMARAEGYACYTMSFDYGQRHRAELDAAARVARDLGAVEHKVIGLNLNGIGGSALTDSTIAVPESPSEGIPVTYVPARNTVFLSLALGWAEVLGARDIFIGVNAVDYSGYPDCRPEFVESFERMANLATKAGVEGQGFTIRAPLQNLSKSDIVKAGTALGVDYSLTVSCYQADDQGRACGKCDSCRLRADGFTASGMADPTRYF

SEQ ID NO: 41286 - protein, 229 aa, Pseudomonas caricapapayae
  REGION 1..229: note = tr|A0A0P9JUR9|A0A0P9JUR9_9PSED 7-cyano-7-deazaguanine synthase OS=Pseudomonas caricapapayae OX=46678 GN=queC PE=3 SV=1
MSEFTNTEKRAVILLSGGLDSATVVAMARAEGFACYTMSFDYGQRHRAELDAAARVARDLGAVEHKVIGLNLNGIGGSALTDSTIAVPESPSEGIPVTYVPARNTVFLSLALGWAEVLGARDIFIGVNAVDYSGYPDCRPEFVESFERMANLATKAGVEGQGFTIRAPLQNLSKSDIVKAGTALGVDYSLTVSCYQADDQGRACGKCDSCRLRADGFTASGMADPTRYF

SEQ ID NO: 41287 - protein, 230 aa, unidentified
  source 1..230: note = Pseudomonas caspiana
  REGION 1..230: note = tr|A0A502J2X5|A0A502J2X5_9PSED 7-cyano-7-deazaguanine synthase OS=Pseudomonas caspiana; OX = 1451454 GN=queC PE=3 SV=1
MTEQLNTAEKRAVILLSGGLDSATVVAMARAEGYSCYTMSFDYGQRSHAELHAAARVARDLGVVEHKVIGLNLNGIGGSALTDTSIDVPEEAGEGIPVTYVPARNTVFLSLALGWAEVLGARDIFIGVNAVDYSGYPDCRPEFIESFERMANLATKAGVEGNGFRIQAPLQNLSKAQIVQAGVKLGVDYGLTVSCYQADDNGRACGKCDSCRLRAEGFAAAGISDPTPYF

SEQ ID NO: 41288 - protein, 224 aa, unidentified
  source 1..224: note = Pseudomonas caspiana
  REGION 1..224: note = tr|A0A1Y3NTK6|A0A1Y3NTK6_9PSED 7-cyano-7-deazaguanine synthase OS=Pseudomonas caspiana; OX = 1451454 GN=queC PE=3 SV=1
MTEKRAVILLSGGLDSATVVAMAREQGYTCYTMSFDYGQRHRAELDAAVRVARDLGVVEHKVIGLNLNGIGGSALTDDSIAVPETPGEGIPVTYVPARNTVFLSLALGWAEVLGARDIFIGVNAVDYSGYPDCRPEFIESFERMANLATKAGVEGQGFTIQAPLQNLSKADIVKAGVRLGVDYGLTVSCYQADDQGRACRKCDSCRLRAEGFAAAGISDPTRYF

SEQ ID NO: 41289 - protein, 232 aa, Pseudomonas cedrina
  REGION 1..232: note = tr|A0A2S9D7M9|A0A2S9D7M9_PSECE 7-cyano-7-deazaguanine synthase OS=Pseudomonas cedrina; OX = 651740 GN=queC PE=3 SV=1
MSKKAVMVFSGGQDSTTCLIQALPLYDEVHCITFDYGQRHVAEIEVAQKLAKQLGATVHKVMDVSLLNELAISSLTRDNIPVPTVNSSGESLPSTFVPGRNILFLTLAAIYAYQVKAETVITGVCETDFSGYPDCRDEFVKALNQALKLGMEYDVRLDTPLMWLNKAETWALADYHGQLELVREQTLTCYNGIIGTGCGECDACNLRARGLNDYLQNKTNVMQSLKHKLQLK

SEQ ID NO: 41290 - protein, 229 aa, Pseudomonas cedrina
  REGION 1..229: note = tr|A0A1V2KI25|A0A1V2KI25_PSECE 7-cyano-7-deazaguanine synthase OS=Pseudomonas cedrina subsp. cedrina OX=76762 GN=queC PE=3 SV=1
MTEHTMNQKRAVILLSGGLDSATVVAMAQAEGYSCYTMSFDYGQRHRAELSAAARVARDMGVVEHKVIGLNLNGIGGSALTDSSIDVPQAPSEGIPVTYVPARNTVFLSLALGWAEVLNARDIFIGVNAVDYSGYPDCRPEFVESFERMANLATKAGVEGQGFRILAPLQNLSKADIVKAGVGLGVDYSLTVSCYLADDDGRACGKCDSCRLRAEGFQAAGITDPTRYF

SEQ ID NO: 41291 - protein, 229 aa, unidentified
  source 1..229: note = Pseudomonas cerasi
  REGION 1..229: note = tr|A0A193SLA4|A0A193SLA4_9PSED 7-cyano-7-deazaguanine synthase OS=Pseudomonas cerasi; OX = 1583341 GN=queC PE=3 SV=1
MSELTKTEKRAVILLSGGLDSATVVAMARAEGYTCYTMSFDYGQRHRAELDAAARVAGDLGAVEHKVIGLNLNGIGGSALTDSSIAVPESPSEGIPVTYVPARNTVFLSLALGWAEVLGARDIFIGVNAVDYSGYPDCRPEFVESFERMANLATKAGVEGQGFTIRAPLQNLSKSDIVKAGTALGVDYSLTVSCYQADDQGRACGKCDSCRLRAEGFTAAGIADPTRYF

SEQ ID NO: 41292 - protein, 224 aa, unidentified
  source 1..224: note = Pseudomonas chengduensis
  REGION 1..224: note = tr|A0A1G6MKG6|A0A1G6MKG6_9PSED 7-cyano-7-deazaguanine synthase OS=Pseudomonas chengduensis OX=489632 GN=queC PE=3 SV=1
MNDNKAVILLSGGLDSATVVAMAKAEGYACYSMSFDYGQRHRAELQAAERVARQLGVVEHKVIGLNLNGIGGSALTDSSIAVPESPTEGIPATYVPARNTVFLALALGWAEVLGARDIFIGVNAVDYSGYPDCRPEFVAAFERMANLATKAGVEGQGFVIRAPLQQMSKGEIIQAGMRLGVDYALTVSCYQADDDGRACGKCDSCRLRAAGFAAAGVPDATRYC

SEQ ID NO: 41293 - protein, 224 aa, unidentified
  source 1..224: note = Pseudomonas chloritidismutans
  REGION 1..224: note = tr|V4QDV1|V4QDV1_PSECO 7-cyano-7-deazaguanine synthase OS=Pseudomonas chloritidismutans AW-1 OX=1263865; GN = queC PE=3 SV=1
MNEKKAVILLSGGLDSATVVAMARAQGYACYTMSFDYGQRHRAELQAAERVAQQLGVVEHKVIGLDLNGIGGSALTDDSINVPEVPGEGIPVTYVPARNTVFLSLALGWAEVLGARDIFIGVNAVDYSGYPDCRPEFVAAFERMANLATKAGVEGLGFRIQAPLQEMSKARIVQEGTRLGVDYAATVSCYQADTDGRACGKCDSCRLRAAGFAEAGLADPTRYF

SEQ ID NO: 41294 - protein, 233 aa, Pseudomonas chlororaphis
  REGION 1..233: note = tr|A0A3G7KBL9|A0A3G7KBL9_9PSED 7-cyano-7-deazaguanine synthase OS=Pseudomonas chlororaphis subsp. aurantiaca OX=86192 GN=queC PE=3 SV=1
MTDQAQNQVATEKRAVILLSGGLDSATVVAMARAEGYRCYTMSFDYGQRHRAELQAAERVARDLGVVEHKVIGLNLNGIGGSALTDSSIDVPEAPSEGIPVTYVPARNTVFLSLALGWAEVLGARDIFIGVNAVDYSGYPDCRPEFVEAFERMANLATKAGVEGQGFRIQAPLQNLSKADIVKAGVKLGVDYGLTVSCYQADDQGRACGKCDSCRLRAEGFAAAGISDPTAYF

SEQ ID NO: 41295 - protein, 233 aa, Pseudomonas chlororaphis
  REGION 1..233: note = tr|A0A3G7CSW1|A0A3G7CSW1_9PSED 7-cyano-7-deazaguanine synthase OS=Pseudomonas chlororaphis subsp. piscium OX=1513890 GN=queC PE=3 SV=1
MTEQAQNQVATEKRAVILLSGGLDSATVVAMARAEGYRCYTMSFDYGQRHRAELQAAERVARDLGVVEHKVIGLNLNGIGGSALTDSSIDVPEAPSEGIPVTYVPARNTVFLSLALGWAEVLGARDIFIGVNAVDYSGYPDCRPEFVEAFERMANLATKAGVEGQGFRIQAPLQNLSKADIVKTGVKLGVDYGLTVSCYQADDQGRACGKCDSCRLRAEGFAAAGVSDPTAYF

SEQ ID NO: 41296 - protein, 229 aa, Pseudomonas cichorii
  REGION 1..229: note = tr|A0A3M3TJ97|A0A3M3TJ97_PSECI 7-cyano-7-deazaguanine synthase OS=Pseudomonas cichorii; OX = 36746 GN=queC PE=3 SV=1
MSELTMTEKRAVILLSGGLDSATVVAMARAEGYACYTMSFDYGQRHRAELNAAARVARDLGVIEHKVIGLNLNGIGGSALTDSSIAVPEAPTEGIPVTYVPARNTVFLSLALGWAEVLEARDIFIGVNAVDYSGYPDCRPEFVESFERMANLATKAGVEGQGFSIRAPLQNLSKSDIVKAGVALGVDYGLTVSCYQADDEGRACGKCDSCRLRAEGFAAAGVADPTRYF

SEQ ID NO: 41297 - protein, 229 aa, Pseudomonas cichorii
  REGION 1..229: note = tr|A0A3M4VVQ3|A0A3M4VVQ3_PSECI 7-cyano-7-deazaguanine synthase OS=Pseudomonas cichorii; OX = 36746 GN=queC PE=3 SV=1
MSELTMTEKRAVILLSGGLDSATVVAMARAEGYACYTMSFDYGQRHRAELNAAARVARDLGVIEHKVIGLNLNGIGGSALTDSSIAVPEAPTEGIPVTYVPARNTVFLSLALGWAEVLEARDIFIGVNAVDYSGYPDCRPEFVESFERMANLATKAGVEGQGFTIRAPLQNLSKSDIVKAGVALGVDYGLTVSCYQADDEGRACGKCDSCRLRAEGFAAAGIADPTRYF

SEQ ID NO: 41298 - protein, 224 aa, Pseudomonas citronellolis
  REGION 1..224: note = tr|A0A1A9K8X3|A0A1A9K8X3_9PSED 7-cyano-7-deazaguanine synthase OS=Pseudomonas citronellolis OX=53408 GN=queC PE=3 SV=1
MTQKKAVILLSGGLDSATVVAMAKAEGYACYSMSFDYGQRHRAELQAAERVARQLGVVEHKVIGLNLDGIGGSALTDSSIAVPEAPSEGIPVTYVPARNTVFLSLALGWAEVLGARDIFIGVNAVDYSGYPDCRPEFVEAFERMANLATKAGVEGDGFRIQAPLQFLSKAQIIQAGVARGVDYALTVSCYQADDAGRACGKCDSCRLRAEGFAAAGISDPTRYF

SEQ ID NO: 41299 - protein, 224 aa, Pseudomonas citronellolis
  REGION 1..224: note = tr|A0A4Z0IH39|A0A4Z0IH39_9PSED 7-cyano-7-deazaguanine synthase OS=Pseudomonas citronellolis OX=53408 GN=queC PE=3 SV=1
MTQKKAVILLSGGLDSATVVAMAKAEGYACYSMSFDYGQRHRAELQAAERVARQLGVVEHKVIGLNLNGIGGSALTDSSIAVPEAPSEGIPVTYVPARNTVFLSLALGWAEVLGARDIFIGVNAVDYSGYPDCRPEFVEAFERMANLATKAGVEGDGFRIQAPLQFLSKAQIIQAGVARGVDYALTVSCYQADDAGRACGKCDSCRLRAEGFAAAGISDPTRYF

SEQ ID NO: 41300 - protein, 234 aa, unidentified
  source 1..234: note = Pseudomonas coleopterorum
  REGION 1..234: note = tr|A0A1H5DYH2|A0A1H5DYH2_9PSED 7-cyano-7-deazaguanine synthase OS=Pseudomonas coleopterorum OX=1605838 GN=queC PE=3 SV=1
MHSKALVLFSGGQDSTTCLAWALERYEHVETIGFDYGQRHEIELECRINVLQEIRNRFPNWAKRLGEDHVLDLKLLGQISDTAMTGGKTIEFEKNGLPNTFVPGRNLLFFTFAAAISYRRGLSVLVGGMCETDYSGYPDCRDNTLKSLQVSLGLGMDMPLVIETPLMWLDKRQTWELAKELGGTSFVEFVKEETHTCYLGDRQHRHNWGYGCNDCPACELRRTGFEAFLRDNNA

SEQ ID NO: 41301 - protein, 229 aa, unidentified
  source 1..229: note = Pseudomonas coleopterorum
  REGION 1..229: note = tr|A0A1H5F3I0|A0A1H5F3I0_9PSED 7-cyano-7-deazaguanine synthase OS=Pseudomonas coleopterorum OX=1605838 GN=queC PE=3 SV=1
MNDTTEHQKKAVILLSGGLDSATVVAMAKDQGYACYTMSFDYGQRHRAELNAAARVARDLGVVQHKVIGLNLDGMGGSALTDTSIDVPETLGEGIPVTYVPARNTVFLSLALGWAEVLEARDIFIGVNAVDYSGYPDCRPEFIEAFERLANLATKAGVEGNGFTIQAPLQNLSKAEIVKAGVALGVDYGLTVSCYQADDEGQACGKCDSCRLRAEGFTAAGVSDPTRYF

SEQ ID NO: 41302 - protein, 224 aa, Pseudomonas composti
  REGION 1..224: note = tr|A0A1I5NC22|A0A1I5NC22_9PSED 7-cyano-7-deazaguanine synthase OS=Pseudomonas composti; OX = 658457 GN=queC PE=3 SV=1
MSEKNAVILLSGGLDSATVVAMAKAEGYTCYSMSFDYGQRHRAELQAAERVARQLGVVEHKVIGLNLNGIGGSALTDSRIAVPEAPTEGIPATYVPARNTVFLALALGWAEVLEARDIFIGVNAVDYSGYPDCRPEFVEAFERMANLATKAGVEGQGFTIRAPLQQMSKGEIIQAGMRLGVDYALTVSCYQADDDGRACGKCDSCRLRAAGFAAAGVPDVTRYF

SEQ ID NO: 41303 - protein, 229 aa, Pseudomonas congelans
  REGION 1..229: note = tr|A0A0P9RFI5|A0A0P9RFI5_9PSED 7-cyano-7-deazaguanine synthase OS=Pseudomonas congelans; OX = 200452 GN=queC PE=3 SV=1
MSELTKTEKRAVILLSGGLDSATVVAMARAEGYVCYTMSFDYGQRHRAELDAAARVAGDLGAVEHKVIGLNLNGIGGSALTDSSIAVPESPSEGIPVTYVPARNTVFLSLALGWAEVLGARDIFIGVNAVDYSGYPDCRPEFVESFERMANLATKAGVEGQGFTIRAPLQNLSKSDIVKAGTALGVDYSLTVSCYQADDQGRACGKCDSCRLRAEGFTAAGIADPTRYF

SEQ ID NO: 41304 - protein, 229 aa, unidentified
  source 1..229: note = Pseudomonas coronafaciens
  REGION 1..229: note = tr|A0A3M3H6U1|A0A3M3H6U1_9PSED 7-cyano-7-deazaguanine synthase OS=Pseudomonas coronafaciens pv. striafaciens OX=235276 GN=queC PE=3 SV=1
MNELTNTGKRAVILLSGGLDSATVVAMALAEGYACYTMSFDYGQRHRAELDAAARVARDLGAVEHKVIGLNLNGIGGSALTDSSIAVPESPSEGIPVTYVPARNTVFLSLALGWAEVLGARDIFIGVNAVDYSGYPDCRPEFVESFERMANLATKAGVEGQGFTIRAPLQNLSKSDIVKAGSALGVDYSLTVSCYQADDQGRACGKCDSCRLRAEGFSAAGMTDPTRYF

SEQ ID NO: 41305 - protein, 229 aa, unidentified; identical to SEQ ID NO: 41304
  source 1..229: note = Pseudomonas coronafaciens
  REGION 1..229: note = tr|A0A0Q0H5Q1|A0A0Q0H5Q1_9PSED 7-cyano-7-deazaguanine synthase OS=Pseudomonas coronafaciens pv. zizaniae OX=251700 GN=queC PE=3 SV=1

SEQ ID NO: 41306 - protein, 230 aa, Pseudomonas corrugata
  REGION 1..230: note = tr|A0A3M3EVF1|A0A3M3EVF1_9PSED 7-cyano-7-deazaguanine synthase OS=Pseudomonas corrugata; OX = 47879 GN=queC PE=3 SV=1
MTEQTNTAEKRAVILLSGGLDSATVVAMARAEGYRCYTMSFDYGQRHRAELYAAERVARDLGVVEHKVIGLNLNGIGGSALTDSSIAVPEAPSEGIPVTYVPARNTVFLSLALGWAEVLEARDIFIGVNAVDYSGYPDCRPEFVEAFERMANLATKAGVEGQGFRIQAPLQNLSKADIVRAGVKLGVNYGLTVSCYQADDQGRACGKCDSCRLRAEGFAAAGVSDPTPYF

SEQ ID NO: 41307 - protein, 232 aa, Pseudomonas costantinii
  REGION 1..232: note = tr|A0A1S2UU96|A0A1S2UU96_9PSED 7-cyano-7-deazaguanine synthase OS=Pseudomonas costantinii; OX = 168469 GN=queC PE=3 SV=1
MSKKAVMVFSGGQDSTTCLIQALPLYDEVHCITFDYGQRHVAEIEVAQQLAKQLGATVHKVMDVSLLNELAISSLTRDNIPVPTVDSSGDSLPSTFVPGRNILFLTLASIYAYQVKAETVITGVCETDFSGYPDCRDEFVKALNKALELGMEYTLRLETPLMWLNKAETWALADYHNQLELVRHHTLTCYNGIIGSGCGNCDACNLRARGLNDYLQNKADVMKSLKHKLQLS

SEQ ID NO: 41308 - protein, 225 aa, Pseudomonas cremoricolorata
  REGION 1..225: note = tr|A0A089WTJ4|A0A089WTJ4_9PSED 7-cyano-7-deazaguanine synthase OS=Pseudomonas cremoricolorata OX=157783 GN=queC PE=3 SV=1
MNTEKRAVILLSGGLDSATVVAMAQAQGYSCYTMSFDYGQRHRAELNAAARVARDMGVVEHKVIGLDLNGMGGSALTDNSIDVPEAPTEGIPVTYVPARNTVFLALALGWAEVLQARDIFIGVNAVDYSGYPDCRPEFVEAFETMANLATKAGVEGQGFRIQAPLQNMSKAQIIQAGIERGVNYALTVSCYQADDQGRACGKCDSCRLRAEGFHAVGVADPTPYF

SEQ ID NO: 41309 - protein, 225 aa, Pseudomonas cuatrocienegasensis
  REGION 1..225: note = tr|A0A1H9LY47|A0A1H9LY47_9PSED 7-cyano-7-deazaguanine synthase OS=Pseudomonas cuatrocienegasensis OX=543360 GN=queC PE=3 SV=1
MMNDKKAVILLSGGLDSATVVAMAKAEGYACYSMSFDYGQRHRAELQAAEQVARQLGVVAHKVIGLDLDGMGGSALTDNAIAVPETPGEGIPVTYVPARNTVFLSLALGWAEVLGARDIFIGVNAVDYSGYPDCRPEFIEAFERLANLATKAGVEGEGFRIQAPLQHMSKADIVQAGVRLGVDYGLTVSCYQADAQGRGCGRCDSCRLRAAGFAAAGVADPTRYC

SEQ ID NO: 41310 - protein, 224 aa, unidentified
  source 1..224: note = Pseudomonas daroniae
  REGION 1..224: note = tr|A0A4Q9QIN2|A0A4Q9QIN2_9PSED 7-cyano-7-deazaguanine synthase OS=Pseudomonas daroniae; OX = 2487519 GN=queC PE=3 SV=1
MSEKKAVILLSGGLDSATVVAMAKEQGYSCYSMSFDYGQRHRSELQAAERVARQLGVVEHKVIGMNLGGIGGSALTDSSIDVPQSPTTGIPVTYVPARNTVFLALALGWAEVLEAQDIFIGVNAVDYSGYPDCRPEFVEAFERVANLATKMGVEGQSIRIQAPLQMMSKAEIVQAGSRLGVDYGLTVSCYLADDDGRACGKCDSCRLRSAGFAAAGVVDPTRYQ

SEQ ID NO: 41311 - protein, 230 aa, Pseudomonas deceptionensis
  REGION 1..230: note = tr|A0A0J6G4V0|A0A0J6G4V0_PSEDM 7-cyano-7-deazaguanine synthase OS=Pseudomonas deceptionensis OX=882211 GN=queC PE=3 SV=1
MTEQTVVTEKRAVILLSGGLDSATVVAMARAEGYSCYTMSFDYGQRHRSELDAAARVARDLGAIEHKVIGLNLDGIGGSALTDSSIDVPETLGEGIPVTYVPARNTVFLSLALGWAEVLQARDIFIGVNAVDYSGYPDCRPEFVQAFEIMANLATKAGVEGQGFRIKAPLQNLSKAQIVQAGIKLGVDYSLTVSCYQADSQGRACGKCDSCRLRAEGFAAAGITDPTRYF

SEQ ID NO: 41312 - protein, 224 aa, Pseudomonas delhiensis
  REGION 1..224: note = tr|A0A239MVU1|A0A239MVU1_9PSED 7-cyano-7-deazaguanine synthase OS=Pseudomonas delhiensis; OX = 366289 GN=queC PE=3 SV=1
MTQKKAVILLSGGLDSATVVAMAKAEGYACYSMSFDYGQRHRAELQAAERVARQLGVVEHKVIGLNLNGIGGSALTDSSIAVPEAPSEGIPVTYVPARNTVFLSLALGWAEVLGARDIFIGVNAVDYSGYPDCRPEFVEAFERMANLATKAGVEGDGFRIQAPLQFLSKAQIIQAGVARGVDYALTVSCYQADDEGRACGKCDSCRLRSEGFAAAGIPDPTRYF

SEQ ID NO: 41313 - protein, 224 aa, unidentified
  source 1..224: note = Pseudomonas denitrificans
  REGION 1..224: note = tr|A0A5J6RBA8|A0A5J6RBA8_PSEDE 7-cyano-7-deazaguanine synthase QueC OS=Pseudomonas denitrificans OX=43306 GN=queC PE=4 SV=1
MNGKKAVILLSGGLDSATVVAMAKAEGYDCYTMSFDYGQRHRAELQAAERVARQQGVIEHKVIGLNLNGIGGSALTDSRIDVPEAPGEGIPVTYVPARNTVFLSLALGWAEVLGSRDIFIGVNAVDYSGYPDCRPEFVEAFERMANLATKAGVEGDGFRIQAPLQFLSKAQIIEAGIAQGVDYSLTVSCYQADDDGRACGKCDSCRLRSEGFLAAGISDPTRYF

SEQ ID NO: 41314 - protein, 224 aa, unidentified
  source 1..224: note = Pseudomonas donghuensis
  REGION 1..224: note = tr|A0A2M9VHB0|A0A2M9VHB0_9PSED 7-cyano-7-deazaguanine synthase OS=Pseudomonas donghuensis; OX = 1163398 GN=queC PE=3 SV=1
MTEKRAVILLSGGLDSATVVAMAKAEGYSCYTMSFDYGQRHRAELNAAARVARDLGVVEHKVIGLNLDGIGGSALTDSSIDVPEAPSEGIPVTYVPARNTVFLSLALGWAEVLEARDIFIGVNAVDYSGYPDCRPEFVEAFERMANLATKAGVEGRGFRIQAPLQNLSKAQIVQAGMARGVDYSLTVSCYQADGEGRACGKCDSCRLRAEGFKAAGVEDPTRYF

SEQ ID NO: 41315 - protein, 224 aa, unidentified
  source 1..224: note = Pseudomonas dryadis
  REGION 1..224: note = tr|A0A4Q9QY75|A0A4Q9QY75_9PSED 7-cyano-7-deazaguanine synthase OS=Pseudomonas dryadis; OX = 2487520 GN=queC PE=3 SV=1
MNDNRAVILLSGGLDSATVVAMAKTQGYSCYSMSFDYGQRHRSELQAAERVARQLGVVEHKVIGLDLDGMGGSALTDSRIDVPESPTSGIPVTYVPARNTVFLALALGWAEVLGARDIFIGVNAVDYSGYPDCRPEFIEAFERMANLATKAGVEGQGVRIRAPLQMMSKAEIVQAGVRLGVDYGLTVSCYQADEQGRACGKCDSCRLRAAGFVAAGVTDPTRYR

SEQ ID NO: 41316 - protein, 224 aa, Pseudomonas duriflava
  REGION 1..224: note = tr|A0A562QPD3|A0A562QPD3_9PSED 7-cyano-7-deazaguanine synthase OS=Pseudomonas duriflava; OX = 459528 GN=queC PE=3 SV=1
MTQKKAVVLLSGGLDSATVVAMARAEGFACYTMSFDYGQRHRSELAAAQRVAQQLGVIEHKVIGLNLNGIGGSALTDTSIDVPEASTEGIPVTYVPARNTVFLSLALGWAEVLEARHIFIGVNAVDYSGYPDCRPEFVESFERTANLATKAGVEGEGFRIVAPLQYLSKAEIIKAGLAQGVDYSLTVSCYQADEAGRACGRCDSCRLRAEGFRSAGEKDPTRYQ

SEQ ID NO: 41317 - protein, 234 aa, Pseudomonas duriflava
  REGION 1..234: note = tr|A0A562PYW7|A0A562PYW7_9PSED 7-cyano-7-deazaguanine synthase OS=Pseudomonas duriflava; OX = 459528 GN=queC PE=3 SV=1
MHKSALVLFSGGQDSTTCLAWALTRYEHVETVGFDYGQRHEVELQCRMHILEKLRDEFPGWKSKLGEDHLLDLKLLSQISDTAMTAEKAIEVEENGLPNTFVPGRNLLFFTFAATLAYRRGLSVLVGGMCETDYSGYPDCRDNTLKALQVSLSLGMDMPLVIETPLMWLDKKQTWDLAKALGGPNFVALIQEHTHTCYLGDRQHRHDWGYGCNQCPACELRRTGFEAFQRDSVA

SEQ ID NO: 41318 - protein, 233 aa, unidentified
  source 1..233: note = Pseudomonas endophytica
  REGION 1..233: note = tr|A0A0Q0SQ59|A0A0Q0SQ59_9PSED 7-cyano-7-deazaguanine synthase OS=Pseudomonas endophytica; OX = 1563157 GN=queC PE=3 SV=1
MTNKAVIVFSGGQDSTTCLLQALPLYDEVHCVTFDYGQRHRAEIDVASALSKKLGATKHTVLDASLLNQLTVSSLTRDDMPVPDASAPVNGLPSTFVPGRNIVFLTLASIYAYQVQAKTVITGVCETDFSGYPDCRDEFVKSLNQAIALGMAYDVHIKTPLMWLNKAEVWALADTHHQLELVRDQTLTCYNGLIGAGCGHCAACSLRSKGLEDYLNDKAGVRQSLRAKQQQNA

SEQ ID NO: 41319 - protein, 230 aa, unidentified
  source 1..230: note = Pseudomonas endophytica
  REGION 1..230: note = tr|A0A0Q0T477|A0A0Q0T477_9PSED 7-cyano-7-deazaguanine synthase OS=Pseudomonas endophytica; OX = 1563157 GN=queC PE=3 SV=1
MTVQTTAAEKRAVILLSGGLDSATVVAMARAEGYSCYAMSFDYGQRHRAELDAAARVARDLGVIEHKVIGLNLNGIGGSALTDIAIDVPEAPSEGIPVTYVPARNTVFLSLALGWAEVLQARDIFIGVNAVDYSGYPDCRPEFVEAFEVMANLATKAGVEGQGLRIKAPLQNMSKAQIVQAGAKLGVDYSLTVSCYQADAQGYACGKCDSCRLRAEGFKAAGVDDPTRYF

SEQ ID NO: 41320 - protein, 224 aa, unidentified
  source 1..224: note = Pseudomonas entomophila
  REGION 1..224: note = sp|Q1I6F8|QUEC_PSEE4 7-cyano-7-deazaguanine synthase; OS = Pseudomonas entomophila (strain L48) OX=384676 GN=queC; PE = 3 SV=1
MTDKRAVILLSGGLDSATVVAMAKAEGYACYTMSFDYGQRHRAELDAAARVARDLGVVEHKVIGLNLNGIGGSALTDNSIDVPEAPGEGIPVTYVPARNTVFLSLALGWAEVLEARDIFIGVNAVDYSGYPDCRPEFVEAFERMANLATKAGVEGQGFRIQAPLQNLSKAQIVQAGIAQGVDYSLTVSCYQADDEGRACGKCDSCRLRADGFKAAGVEDPTRYF

SEQ ID NO: 41321 - protein, 224 aa, unidentified
  source 1..224: note = Pseudomonas entomophila
  REGION 1..224: note = tr|A0A3Q8U2M6|A0A3Q8U2M6_9PSED 7-cyano-7-deazaguanine synthase OS=Pseudomonas entomophila; OX = 312306 GN=queC PE=3 SV=1
MTEKRAVILLSGGLDSATVVAMAKAEGYACYTMSFDYGQRHRAELEAAARVAHDLGVVEHKVIGLNLNGIGGSALTDSSIDVPEAPSEGIPVTYVPARNTVFLSLALGWAEVLQARDIFIGVNAVDYSGYPDCRPEFVEAFERMANLATKAGVEGQGFRIQAPLQNLSKAQIVQAGIARGVDYSLTVSCYQADDDGRACGKCDSCRLRADGFSAAGVADPTRYF

SEQ ID NO: 41322 - protein, 229 aa, Pseudomonas extremaustralis
  REGION 1..229: note = tr|A0A5C5QG51|A0A5C5QG51_9PSED 7-cyano-7-deazaguanine synthase OS=Pseudomonas extremaustralis OX=359110 GN=queC PE=3 SV=1
MTEQTIDQKRAVILLSGGLDSATVVAMAQAEGYTCYTMSFDYGQRHRAELNAAARVAHDMGVAEHKVIGLNLNGIGGSALTDSSIDVPETPGEGIPVTYVPARNTVFLSLALGWAEVLNARDIFIGVNAVDYSGYPDCRPEFVESFERMANLATKAGVEGHGFRILAPLQNLSKADIVKAGIGLGVDYSLTVSCYQADNDGRACGKCDSCRLRAEGFQAAGIADPTRYF

SEQ ID NO: 41323 - protein, 224 aa, Pseudomonas extremorientalis
  REGION 1..224: note = tr|A0A1S2TPF6|A0A1S2TPF6_9PSED 7-cyano-7-deazaguanine synthase OS=Pseudomonas extremorientalis OX=169669 GN=queC PE=3 SV=1
MDQKRAVILLSGGLDSATVVAMAQAQGYSCYTMSFDYGQRHRAELNAAARVARDMGVVEHKVIGLNLNGIGGSALTDSSIDVPETPGEGIPVTYVPARNTVFLSLALGWAEVLHARDIFIGVNAVDYSGYPDCRPEFVESFERMANLATKAGVEGQGFRILAPLQNLSKADIVKAGVGLGVDYSLTVSCYQADDDGRACGKCDSCRLRAEGFQAAGITDPTRYF

SEQ ID NO: 41324 - protein, 229 aa, Pseudomonas ficuserectae; identical to SEQ ID NO: 41254
  REGION 1..229: note = tr|A0A0P9SPU6|A0A0P9SPU6_9PSED 7-cyano-7-deazaguanine synthase OS=Pseudomonas ficuserectae OX=53410 GN=queC PE=3 SV=1

SEQ ID NO: 41325 - protein, 201 aa, Pseudomonas ficuserectae
  REGION 1..201: note = tr|A0A0P9VWN9|A0A0P9VWN9_9PSED 7-cyano-7-deazaguanine synthase OS=Pseudomonas ficuserectae OX=53410 GN=ALO69_102532 PE=3 SV=1
MKIGLLLSGGMDSLALAWWKRPDIAFTLNYGQLAAQAEIEASRTICRQLNISHQVIEIDCRQLGSGDMAGTRADDLAPASDWWPYRNQMLVTLTAMKAISFGVTHLWLGTVRSDGFHKDGSPEFMTAISHLLSLQEGGIVVEAPAIGLSTAELVRLSGIPADLLAWAHSCHKSHVACGNCRGCNKYMEVFQEVGYDLDRPG

SEQ ID NO: 41326 - protein, 224 aa, Pseudomonas flavescens
  REGION 1..224: note = tr|A0A1G8JE65|A0A1G8JE65_9PSED 7-cyano-7-deazaguanine synthase OS=Pseudomonas flavescens; OX = 29435 GN=queC PE=3 SV=1
MTDKKAVILLSGGLDSATVVAMAREQGYACYSMSFDYGQRHRSELQAAERVARQLGVVEHKVIGMELGGIGGSALTDPSIDVPQSPTTGIPVTYVPARNTVFLALALGWAEVLEAQDIFIGVNAVDYSGYPDCRPEFVEAFERLANLATKMGVEGRGIRIQAPLQMLSKAEIVQAGSRLGVDYGLTVSCYLADDDGRACGKCDSCRLRSAGFAAAGVLDPTRYQ

SEQ ID NO: 41327 - protein, 235 aa, unidentified
  source 1..235: note = Pseudomonas flexibilis
  REGION 1..235: note = tr|A0A0B3C2M0|A0A0B3C2M0_9PSED 7-cyano-7-deazaguanine synthase OS=Pseudomonas flexibilis; OX = 706570 GN=queC PE=3 SV=1
MNALLICSGGFDSVTLAYRLAAEQSLGALLTFDYGQRHRKEIDAARLAAQRLAVPHLVMDIGQIGRQLSGSALTDDIAVPHGHYSEETMKVTVVPNRNAIMLTIAFGVAASRGLDTVALAVHGGDHFIYPDCRPDFIRLFGEMQARALDGVAEVALLAPYVNTDKTEIARDAARFGVPVADTWSCYEGGDLHCGRCGTCVERIEAMVLAGTPDPTPYKDSQYWRDAVARVNACTP

SEQ ID NO: 41328 - protein, 235 aa, unidentified
  source 1..235: note = Pseudomonas flexibilis
  REGION 1..235: note = tr|A0A1N6RBP8|A0A1N6RBP8_9PSED 7-cyano-7-deazaguanine synthase OS=Pseudomonas flexibilis; OX = 706570 GN=queC PE=3 SV=1
MNALLICSGGFDSVTLAYRLAAEHALGALLTFDYGQRHRKEIDAARLAAQRLAVPHLVMDIGPIGRQLSGSALTDDIAVPHGHYSEETMKVTVVPNRNAIMLTIAFGVAASRGLDTVALAVHGGDHFIYPDCRPDFIRLFGEMQARALDGVAEVALLAPYVHTDKTEIARDAARFAVPVADTWSCYEGGEIHCGRCGTCVERIEAMALAGTPDPSPYQDAQYWRDAVARVNACTR

SEQ ID NO: 41329 - protein, 229 aa, unidentified
  source 1..229: note = Pseudomonas floridensis
  REGION 1..229: note = tr|A0A1X0MZ71|A0A1X0MZ71_9PSED 7-cyano-7-deazaguanine synthase OS=Pseudomonas floridensis; OX = 1958950 GN=queC PE=3 SV=1
MTELTKTEKRAVILLSGGLDSATVVAMARAEGYACYTMSFDYGQRHRAELDAAAQVARDLGAIEHKVIGLNLNGIGGSALTDSSIAVPEAPSEGIPVTYVPARNTVFLSLALGWAEVLGARDIFIGVNAVDYSGYPDCRPEFVESFERMANLATKAGVEGQGFTIRAPLQNLSKSDIVKAGTTLGVDYALTVSCYQADDQGRACGKCDSCRLRAEGFAAAGVADPTRYF

SEQ ID NO: 41330 - protein, 232 aa, Pseudomonas fluorescens
  REGION 1..232: note = sp|Q4K6M3|QUEC2_PSEF5 7-cyano-7-deazaguanine synthase 2 OS=Pseudomonas fluorescens (strain ATCC BAA-477 / NRRL B-23932 / Pf-5) OX=220664 GN=queC2 PE=3 SV=1
MKKTAVIVFSGGQDSTTCLIHALPLYDEVHCITFDYGQRHHAEIETAQRLSKQLGATVHKVLDASLLNELAISSLTRDNIPVPTVNSSGESLPSTFVPGRNILFLTLASIYAYQVKAETVITGVCETDFSGYPDCRDEFVKALNKALELGMEYKLRLETPLMWLNKAETWALADYHNQLELVREQTLTCYNGIMGSGCANCDACNLRAKGLNAYLENKTQVMDSLKSKMGLK

SEQ ID NO: 41331 - protein, 230 aa, Pseudomonas fluorescens
  REGION 1..230: note = sp|Q3K7W9|QUEC_PSEPF 7-cyano-7-deazaguanine synthase; OS = Pseudomonas fluorescens (strain Pf0-1) OX=205922; GN = queC PE=3 SV=1
MTEQLNTSQKRAVILLSGGLDSATVVAMARAEGYACYTMSFDYGQRSHAELHAAARVARDLGVVEHKVIGLNLNGMGGSALTDTSIDIPEELGEGIPVTYVPARNTVFLSLALGWAEVLGARDIFIGVNAVDYSGYPDCRPEFIESFERMANLATKAGVEGNGFRIQAPLQNLSKAQIVQAGVKLGVDYGLTVSCYQADDDGRACGKCDSCRLRAEGFAAAGISDPTRYF

SEQ ID NO: 41332 - protein, 224 aa, Pseudomonas fragi
  REGION 1..224: note = tr|A0A267AU69|A0A267AU69_PSEFR 7-cyano-7-deazaguanine synthase OS=Pseudomonas fragi; OX = 296 GN=queC PE=3 SV=1
MTEKRAVILLSGGLDSATVVAMARAEGYSCYTMSFDYGQRHRAELDAAARVARDLGAIEHKVIGLNLDGIGGSALTDSSIDVPEAPSEGIPVTYVPARNTVFLSLALGWAEVLQARDIFIGVNAVDYSGYPDCRPEFVEAFEVMANLATKAGVEGQGFSIKAPLQNLSKAQIVQAGIKLGVDYSLTVSCYQADTQGRACGKCDSCRLRAEGFAAAGISDPTRYF

SEQ ID NO: 41333 - protein, 422 aa, Pseudomonas fragi
  REGION 1..422: note = tr|A0A1H2JNP6|A0A1H2JNP6_PSEFR Uncharacterized protein OS=Pseudomonas fragi OX=296 GN=CJU72_22615 PE=4; SV = 1
MKFVCGPVGFSVPGAEDAIQVVIYGKAEKGQVSVGGYARELLEKAHLEINPQAWDFLSIALAVVAADFTAIRAKSADAWTRVINLEIAVQDTVFWNSQARALEGALRFLTTDRWTLSFHAGGFGPPAQLQALHPSEDSVVLLSGGLDSLIGAIDLVEQGVKPYAVSQIVRGDGEKQATFAKSLGLNRIGLNHVTKSPGQQEPSQRARSIIFLAFGLAVATSLDRYHRGETVPLYICENGFIAINPPLTMSRLGSLSTRTAHPEYLGRLQQIFDAASINVQIRNPYALMTKGEMLAACRNQELLKEHAVASTSCGRFQRFGYKHCGRCVPCQVRRASFKRWAAIGDDTRYVYDNLSQDDLQHGKFEDVRSVGMALANVAQEGFEHWLGHCLFSPFIQDRAGYNAMLARGLNELGHLHRAYQIT

SEQ ID NO: 41334 - protein, 229 aa, Pseudomonas frederiksbergensis
  REGION 1..229: note = tr|A0A1H5GQI6|A0A1H5GQI6_9PSED 7-cyano-7-deazaguanine synthase OS=Pseudomonas frederiksbergensis OX=104087 GN=queC PE=3 SV=1
MTRKAVIVFSGGQDSTTCLIHALPLYDEIHCITFDYGQRHRAEIEVAQQLSKQLGVKVHKVLDTSLLNELAISSLTRDHIPIARSTGEGVPDTFVPGRNILFLTLASIYAYQVGAEAVITGVCETDFSGYPDCRDEFVKAMNKAIELGMDYKLRVETPLMWLNKAETWALADYHEKLDLVRYRTLTCYNGIMGSGCGDCDACTLRAKGLSEFLEDRAEVSKSLKTKIKQ

SEQ ID NO: 41335 - protein, 230 aa, Pseudomonas frederiksbergensis
  REGION 1..230: note = tr|A0A1H5IDQ6|A0A1H5IDQ6_9PSED 7-cyano-7-deazaguanine synthase OS=Pseudomonas frederiksbergensis OX=104087 GN=queC PE=3 SV=1
MTEQLNTAEKRAVILLSGGLDSATVVAMARAEGYSCYTMSFDYGQRSHAELHAAERVARDLGVVEHKVIGLNLNGIGGSALTDTSIDVPEEAGEGIPVTYVPARNTVFLSLALGWAEVLGARDIFIGVNAVDYSGYPDCRPEFIESFERMANLATKAGVEGNGFRIQAPLQNLSKAQIVRAGVKLGVDYGLTVSCYQADDNGRACGKCDSCRLRAEGFAAAGISDPTPYF

SEQ ID NO: 41336 - protein, 230 aa, Pseudomonas fulva
  REGION 1..230: note = tr|F6AGX6|F6AGX6_PSEF1 7-cyano-7-deazaguanine synthase OS=Pseudomonas fulva (strain 12-X) OX=743720; GN = queC PE=3 SV=1
MSRGIDMSDKKAVILLSGGLDSATVVAMAREQGYSCYSMSFDYGQRHRSELQAAERVARQLGVVEHKVIGINLDGIGGSALTDASIEVPQSPTTGIPVTYVPARNTVFLSLALGWAEVLEAQDIFIGVNAVDYSGYPDCRPEFVNAFEHMANLATKMGVEGRRIRIQAPLQMLSKAEIVQAGSRLRVDYGLTVSCYLADADGRACGKCDSCRLRAAGFAAAGMPDPTRYQ

SEQ ID NO: 41337 - protein, 224 aa, Pseudomonas fulva
  REGION 1..224: note = tr|A0A0D0KW44|A0A0D0KW44_9PSED 7-cyano-7-deazaguanine synthase OS=Pseudomonas fulva; OX = 47880 GN=queC PE=3 SV=1
MSEKKAVILLSGGLDSATVVAMAREQGYSCYSMSFDYGQRHRSELQAAERVARQLGVVEHKVIGMNLGGIGGSALTDSSIDVPQSPTTGIPVTYVPARNTVFLALALGWAEVLEAQDIFIGVNAVDYSGYPDCRPEFVEAFERVANLATRMGVEGQSIRIQAPLQMMSKAEIVQEGSRLGVDYGLTVSCYLADDDGRACGKCDSCRLRSAGFAAAAVPDPTRYQ

SEQ ID NO: 41338 - protein, 224 aa, unidentified
  source 1..224: note = Pseudomonas furukawaii
  REGION 1..224: note = tr|L8MEI9|L8MEI9_PSEFK 7-cyano-7-deazaguanine synthase OS=Pseudomonas furukawaii OX=1149133 GN=queC PE=3; SV = 1
MSEKKAVILLSGGLDSATVIALAKAEGYACYSMSFDYGQRHRAELQAANRVARQLGVVEHKVIGLNLNGIGGSALTDTRIAVPESPTEGIPVTYVPARNTVFLSLALGWAEVLGARDIFIGVNAVDYSGYPDCRPEFVEAFERMANLATKAGVEGDGFRIRAPLQNMSKAEIVQAGSRLGVDYGLTVSCYQADDEGHACGKCDSCRLRAAGFLAAGLNDPTRYQ

SEQ ID NO: 41339 - protein, 231 aa, Pseudomonas fuscovaginae
  REGION 1..231: note = tr|A0A0N0E1G2|A0A0N0E1G2_9PSED 7-cyano-7-deazaguanine synthase OS=Pseudomonas fuscovaginae OX=50340 GN=queC PE=3 SV=1
MTEKAVIVFSGGQDSTTCLIHVRPLYDEIHCITFDYGQRHRAEIEVARQLAKQLGVTTHKVLDTTVLNELAVSSLTRDAIPVPAANSLAGGVPSTFVPGRNILFLTLASIHAHQLGARTVVTGVCETDFSGYPDCRDHFIKALNPAIELGLDYPLRIETPLMWLSKAETWALADHHGELERIRRETLTCYRGVKGDGCAECDACHLRAKGLEQFLGHRREVMGSLKEKLGL

SEQ ID NO: 41340 - protein, 229 aa, Pseudomonas fuscovaginae
  REGION 1..229: note = tr|A0A1H6PA23|A0A1H6PA23_9PSED 7-cyano-7-deazaguanine synthase OS=Pseudomonas fuscovaginae OX=50340 GN=queC PE=3 SV=1
MTTQANVEKKAVILLSGGLDSATVVAMARAQGYSCYTMSFDYGQRHRAELQAAERVARDLGAIEHKVIGLNLNGIGGSALTDSSIDVPEAPSEGIPVTYVPARNTVFLSLALGWAEVLGAQDIFIGVNAVDYSGYPDCRPEFVEAFETLANLATKAGVEGEGFRIQAPLQNLSKADIVREGVRLGVDYSLTVSCYQADANGFACGKCDSCRLRAEGFNVAGIDDPTHYF

SEQ ID NO: 41341 - protein, 235 aa, unidentified
  source 1..235: note = Pseudomonas gallaeciensis
  REGION 1..235: note = tr|A0A395QX77|A0A395QX77_9PSED 7-cyano-7-deazaguanine synthase OS=Pseudomonas gallaeciensis OX=857227 GN=queC PE=3 SV=1
MSAKPDSSGRAVVLLSGGLDSATVLAVAQAEGRACYTMSFDYGQRHRVELEAAERVARAAGVVEHKVIGMNLNGIGGSALTDERIAVPESPQEGIPVTYVPARNTLFLALALGWAEVLEARDIYIGVNAVDYSGYPDCRPEFVSAFEQLANLATRAGVEGEGFRIRAPLQQLSKAQIILAGQALGVDYSQTVSCYQADEQGRACGVCDSCRLRAEGFATAGVADPTRYQGKFAGH

SEQ ID NO: 41342 - protein, 221 aa, unidentified
  source 1..221: note = [Pseudomonas] geniculata
  REGION 1..221: note = tr|A0A0L8A6H4|A0A0L8A6H4_9GAMM 7-cyano-7-deazaguanine synthase OS=[Pseudomonas] geniculata N1 OX=1167641 GN=queC PE=3 SV=1
MKKAVVLLSGGMDSAAVIAMAQEQGFAVHALSVRYGQRHTSELDAAARVAKAQGVVAHKTVDVDLRSIGGSALTDDIDVPEAGGAGIPVTYVPARNTIMLSLALGWAEVLGANDIFCGVNAVDYSGYPDCRPEFVAAFQALANLATKSGVEGAGIKVHAPLQFLSKGQIVSEGVRLGVDFGLTVSCYNADANGAACGHCDACRLRAQGFAEAGVPDPTLYA

SEQ ID NO: 41343 - protein, 422 aa, Pseudomonas gessardii
  REGION 1..422: note = tr|A0A1V2J152|A0A1V2J152_9PSED Uncharacterized protein OS=Pseudomonas gessardii OX=78544 GN=BLL38_20945; PE = 4 SV=1
MKFVCGPAGFRVPGDDGAMQVVIYGKAEQGQVSVGGYARELIDRAHLEISPRAWDFLSIALSVVAADFTAIRAKSADGWTRVIELAISVQDPVFWNSQARGLENALRFLTTDKWTLSFHPGGFGPPAQLQALHPTEDSVVLLSGGLDSLIGAIDLVAQGVRPYAVSQIVRGDGEKQDHFAQSLGLSRIGLNHVTRSPDAQKPSQRARSIIFLAFGLAVATSLDRYHRGETVPLYICENGFIAINPPLTSCRLGSLSTRTAHPDYLGRLQEIFNAAGINVRIHNPYALKTKGEMLAECRNQDLLKLHAIASTSCGRFQRFGYKHCGRCVPCQVRRASFKRWAAVKDDTPYVHENLGLRDKQHAWFDDVRSVGIALANVAENGFEEWLGHSLFSPFIQDRAGYRAMLARGLDELGQLHHSYQLT

SEQ ID NO: 41344 - protein, 229 aa, Pseudomonas gessardii
  REGION 1..229: note = tr|A0A1V2JLH8|A0A1V2JLH8_9PSED 7-cyano-7-deazaguanine synthase OS=Pseudomonas gessardii; OX = 78544 GN=queC PE=3 SV=1
MTEQITDQKRAVILLSGGLDSATVVAMARAEGYSCYTMSFDYGQRSHAELDAAARVARDLGVVEHKVIGLNLNGIGGSALTDSSIDVPEAPTEGIPVTYVPARNTVFLSLALGWAEVLNARDIFIGVNAVDYSGYPDCRPEFVESFERMANLATKAGVEGHGFRIQAPLQNLSKADIVKAGVRLGVDYSLTVSCYQADNDGRACRKCDSCRLRAEGFQAAGITDPTRYF

SEQ ID NO: 41345 - protein, 229 aa, unidentified
  source 1..229: note = Pseudomonas gingeri
  REGION 1..229: note = tr|A0A2K1F5W9|A0A2K1F5W9_9PSED 7-cyano-7-deazaguanine synthase OS=Pseudomonas gingeri NCPPB 3146 = LMG 5327 OX=707248 GN=queC PE=3 SV=1
MTLQASTEKKAVILLSGGLDSATVVAMARAEGYSCYTMSFDYGQRHRAELQAAERVARDQGVIEHKVIGLNLNGIGGSALTDSSIDVPETPGEGIPVTYVPARNTVFLSLALGWAEVLGARDIFIGVNAVDYSGYPDCRPEFVAAFETLANLATKAGVEGDGFRIRAPLQKLSKADIVQAGIKLGVDYSLTVSCYQADANGFACGKCDSCRLRAEGFAAAGISDPTRYF

SEQ ID NO: 41346 - protein, 224 aa, Pseudomonas graminis
  REGION 1..224: note = tr|A0A1I0JG87|A0A1I0JG87_9PSED 7-cyano-7-deazaguanine synthase OS=Pseudomonas graminis; OX = 158627 GN=queC PE=3 SV=1
MTEKRAVILLSGGLDSATVVAMAKADGFSCYTMSFDYGQRHRAELQAAERVAADMGVVEHKVIGLNLNGIGGSALTDSSIAVPETQGEGIPVTYVPARNTVFLSLALGWAEVLGARDIFIGVNAVDYSGYPDCRPEFVESFERMANLATKAGVEGQGFTIQAPLQMLSKADIVKAGTRLGVDYGLTVSCYQADEQGRACGKCDSCRLRAEGFAAAGVTDPTRYF

SEQ ID NO: 41347 - protein, 200 aa, Pseudomonas graminis
  REGION 1..200: note = tr|A0A1X0VV40|A0A1X0VV40_9PSED 7-cyano-7-deazaguanine synthase OS=Pseudomonas graminis; OX = 158627 GN=BW687_00535 PE=3 SV=1
MKRALLLSGGMDSLAIAWWLHPEVGITLNYGQLAAEAEISASSAICKQLQIEHHVISIDCRSVGSGDMAGGRADAHAPASDWWPYRNQMLVTLASMKAISLGVKTLYLGTVKSDGSHRDGTPEFVEAINQLMVIQEGEMTVEAPAIGLSTTELVRVAGVPSSVLAWAHSCHKSNVACGNCRGCNKYFEVWHELEHEQDHS

SEQ ID NO: 41348 - protein, 225 aa, Pseudomonas grimontii
  REGION 1..225: note = tr|A0A1H1BGR1|A0A1H1BGR1_9PSED 7-cyano-7-deazaguanine synthase OS=Pseudomonas grimontii; OX = 129847 GN=queC PE=3 SV=1
MTDQQRAVILLSGGLDSATLVAMVRAEGYSCYTMSFDYGQRHRAELEAAVRVARDLGVVEHKVIGLNLDGMGGSALTDSTIDVPEAPTQGIPVTYVPARNTVFLSLALGWAEVLNARDIFIGVNALDYNGYPDCRPAFVESFERMANLATKAGVEGQGVRIQAPLQNLSKADIVKAGVGLGVDYSLTVSCYQADDDGRACGKCDSCRLRAEGFQMAGITDPTRYF

SEQ ID NO: 41349 - protein, 232 aa, Pseudomonas grimontii
  REGION 1..232: note = tr|A0A1H1BXZ1|A0A1H1BXZ1_9PSED 7-cyano-7-deazaguanine synthase OS=Pseudomonas grimontii; OX = 129847 GN=queC PE=3 SV=1
MSKKAVMVFSGGQDSTTCLIQALPLYDEVHCITFDYGQRHVAEIEVAQQLARQLGATVHKVMDVSLLNELAISSLTRDNIPVPTLNSSGESLPSTFVPGRNILFLTLAAIYAYQVKAEAVITGVCETDFSGYPDCRDEFVKALNQALKLGMEYDVRLQTPLMWLNKAETWALADYHQQLDLVREQTLTCYNGIIGTGCGECDACNLRARGLNDYLQDKTAVMLSLKHKLQLN

SEQ ID NO: 41350 - protein, 38 aa, unidentified
  source 1..38: note = Pseudomonas guangdongensis
  REGION 1..38: note = tr|A0A1H2IHG0|A0A1H2IHG0_9PSED 7-cyano-7-deazaguanine synthase (Fragment) OS=Pseudomonas guangdongensis OX=1245526 GN=SAMN05216580_3009 PE=4 SV=1
VSCYQADDDGRACGRCDSCRLRAEGFAGAGVADPTRYR

SEQ ID NO: 41351 - protein, 188 aa, unidentified
  source 1..188: note = Pseudomonas guangdongensis
  REGION 1..188: note = tr|A0A1H2DUF6|A0A1H2DUF6_9PSED 7-cyano-7-deazaguanine synthase (Fragment) OS=Pseudomonas guangdongensis OX=1245526 GN=SAMN05216580_0001 PE=3 SV=1
MSEKKAVILLSGGLDSATVLAMARAEGYACYTMSFDYGQRHRAELQAAERVACQLGAVEHKVVGIDLNGIGGSALTDSSIAVPEGESSGAGVPVTYVPARNTLFLSLALGWAEVLQAGDIFIGVNAVDYSGYPDCRPEFVEAFERLANLATRAGTEGEGFRIRAPLQHLSKAAIIHAGLAHGVDYALT

SEQ ID NO: 41352 - protein, 224 aa, unidentified
  source 1..224: note = Pseudomonas guariconensis
  REGION 1..224: note = tr|A0A1G6XKK1|A0A1G6XKK1_9PSED 7-cyano-7-deazaguanine synthase OS=Pseudomonas guariconensis OX=1288410 GN=queC PE=3 SV=1
MTDKRAVILLSGGLDSATVVAMAKAEGYSCYTMSFDYGQRHRAELNAAARVARDLGVVEHKVIGLNLNGIGGSALTDTSIDVPETPGEGIPVTYVPARNTVFLSLALGWAEVLGARDIFIGVNAVDYSGYPDCRPEFVEAFERMANLATKAGVEGQGFRIQAPLQNLSKAQIVQAGIARGVDYSLTVSCYQADDEGRACGKCDSCRLRADGFAAAGVADPTRYF

SEQ ID NO: 41353 - protein, 224 aa, unidentified
  source 1..224: note = Pseudomonas guariconensis
  REGION 1..224: note = tr|A0A2N5Q839|A0A2N5Q839_9PSED 7-cyano-7-deazaguanine synthase OS=Pseudomonas guariconensis OX=1288410 GN=queC PE=3 SV=1
MTDKRAVILLSGGLDSATVVAMAKAEGYSCYTMSFDYGQRHRAELNAAARVARDLGVVEHKVIGLNLNGIGGSALTDTSIDVPETPGEGIPVTYVPARNTVFLSLALGWAEVLGARDIFIGVNAVDYSGYPDCRPEFVEAFERMANFATKAGVEGQGFRIQAPLQNLSKAQIVQAGIARGVDYSLTVSCYQADDEGRACGKCDSCRLRADGFAAAGVADPTRYF

SEQ ID NO: 41354 - protein, 224 aa, unidentified
  source 1..224: note = Pseudomonas guguanensis
  REGION 1..224: note = tr|A0A1H0XFY4|A0A1H0XFY4_9PSED 7-cyano-7-deazaguanine synthase OS=Pseudomonas guguanensis; OX = 1198456 GN=queC PE=3 SV=1
MSDKKAVILLSGGLDSATVVAMARAEGYACYSMSFDYGQRHRAELQAAERVARQLGVVEHKVIGLNLNGIGGSALTDSSIAVPETLGEGIPVTYVPARNTVFLSLALGWAEVLGARDIFIGVNAVDYSGYPDCRPEFVEAFERMANLATKAGVEGQGFAIRAPLQQMSKGEIIQAGMRLGVDYALTVSCYQADEDGRACGKCDSCRLRAAGFTAAGVPDATRYF

SEQ ID NO: 41355 - protein, 224 aa, Pseudomonas guineae
  REGION 1..224: note = tr|A0A1I3CCF3|A0A1I3CCF3_9PSED 7-cyano-7-deazaguanine synthase OS=Pseudomonas guineae; OX = 425504 GN=queC PE=3 SV=1
MSDKKAVILLSGGLDSATVVAMAKADGYSCYTMSFDYGQRHRSELQAAEQVAQQLGVVEHKVIGLNLDGMGGSALTDVSIDVPEVPSEGIPVTYVPARNTVFLSLALGWAEVLGARDIFIGVNAVDYSGYPDCRPEFIESFERMANLATKAGVEGQGFRIQAPLQSMSKAEIAQAGVRLGVDYALTVSCYQADDQGQACGKCDSCRLRAAGFVAAGIVDPTRYF

SEQ ID NO: 41356 - protein, 233 aa, unidentified
  source 1..233: note = Pseudomonas helleri
  REGION 1..233: note = tr|A0A0J6L1X4|A0A0J6L1X4_9PSED 7-cyano-7-deazaguanine synthase OS=Pseudomonas helleri; OX = 1608996 GN=queC PE=3 SV=1
MTNKAVIVFSGGQDSTTCLLQALPLYDEVHCITFDYGQRHRAEIDVARALSKQLGATKHTVLDASLLNQLTVSSLTREDMAVPNASAPENGLPSTFVPGRNIVFLTLASIYAYQVQANTVITGVCETDFSGYPDCRDAFVKSLNQAITLGMAYDVRIKTPLMWLNKAEVWALADEYQQLAVIRDQTLTCYNGIQGAGCTHCAACSLRAKGLAEYLSDTAGVRQRLQAKLLKAA

SEQ ID NO: 41357 - protein, 230 aa, unidentified
  source 1..230: note = Pseudomonas helleri
  REGION 1..230: note = tr|A0A0J6I8A9|A0A0J6I8A9_9PSED 7-cyano-7-deazaguanine synthase OS=Pseudomonas helleri; OX = 1608996 GN=queC PE=3 SV=1
MTEHTAVTEKRAVILLSGGLDSATVVAMARAEGYRCYTMSFDYGQRHRAELDAAARVARDLGAVEHKVIGLNLDGIGGSALTDSSIDVPEAPSEGIPVTYVPARNTVFLSLALGWAEVLQARDIFIGVNAVDYSGYPDCRPEFVEAFEAMANLATKAGVEGQGFSIKAPLQNMSKAQIVQAGIRLGVDYSLTVSCYQADAQGQACGKCDSCRLRAEGFQAAGVSDPTRYF

SEQ ID NO: 41358 - protein, 232 aa, unidentified
  source 1..232: note = Pseudomonas helmanticensis
  REGION 1..232: note = tr|A0A4R7UV59|A0A4R7UV59_9PSED 7-cyano-7-deazaguanine synthase OS=Pseudomonas helmanticensis OX=1471381 GN=queC PE=3 SV=1
MTNKAVIVFSGGQDSTTCLIHALTHYDEVHCITFDYGQRHHAEIEVAQQLSKKLGVTVHKTLDVSLLNELAISSLTRDNIPVPTVNSSGESLPSTFVPGRNILFLTLASIYAYQVQAKTVITGVCETDFSGYPDCRDEFVKALNKALELGMDYKLQLDTPLMWLNKAETWALADYHHQLDLVREETLTCYNGIKGTGCSDCDACNLRAKGLNEFLNNKVQVTQRLKEKLGLK

SEQ ID NO: 41359 - protein, 230 aa, unidentified
  source 1..230: note = Pseudomonas helmanticensis
  REGION 1..230: note = tr|A0A4R7V4W0|A0A4R7V4W0_9PSED 7-cyano-7-deazaguanine synthase OS=Pseudomonas helmanticensis OX=1471381 GN=queC PE=3 SV=1
MTEQLNTTEKRAVILLSGGLDSATVVAMARAEGYRCYTMSFDYGQRSHAELHAAARVARDLGVVEHKVIGLNLNGMGGSALTDSSIDIPEELGEGIPVTYVPARNTVFLSLALGWAEVLGARDIFIGVNAVDYSGYPDCRPEFIESFERMANLATKAGVEGNGFRIQAPLQNLSKAQIVQAGVKLGVDYGLTVSCYQADDDGRACGKCDSCRLRAEGFAAAGVDDPTPYF

SEQ ID NO: 41360 - protein, 230 aa, unidentified
  source 1..230: note = Pseudomonas hunanensis
  REGION 1..230: note = tr|A0A2I0C7R2|A0A2I0C7R2_9PSED 7-cyano-7-deazaguanine synthase OS=Pseudomonas hunanensis; OX = 1247546 GN=queC PE=3 SV=1
MEEHVHMTEKRAVILLSGGLDSATVVAMAKGEGYSCYTMSFDYGQRHRAELNAAARVARDLGVVEHKVIGLNLDGIGGSALTDSSIDVPEAPGEGIPVTYVPARNTVFLSLALGWAEVLEARDIFIGVNAVDYSGYPDCRPEFVEAFERMANLATKAGVEGQGFRIQAPLQNMSKAQIVQAGMARGVDYSLTVSCYQADDDGRACGKCDSCRLRADGFKAAGIEDPTRYF

SEQ ID NO: 41361 - protein, 225 aa, unidentified
  source 1..225: note = Pseudomonas hussainii
  REGION 1..225: note = tr|A0A1H7PTH2|A0A1H7PTH2_9PSED 7-cyano-7-deazaguanine synthase OS=Pseudomonas hussainii; OX = 1429083 GN=queC PE=3 SV=1
MSHEKRAVILLSGGLDSATILAMANAEGFACYTMAFDYGQRHRAELVAAERVSQALGAREHKVVGLNLNGIGGSALTDSSLAVPEGPTEGIPITYVPARNTTFLALALGWAEVLEASDIFIGVNAVDYSGYPDCRPEFIEAFERTANLATRAGVEGAGFKIRAPLQNLSKAEIIQAGVQLGVDYALTISCYQANSQGLACGKCDSCRLRAQGFAAAGVADPTPYA

SEQ ID NO: 41362 - protein, 224 aa, Pseudomonas indica
  REGION 1..224: note = tr|A0A1G8W2P0|A0A1G8W2P0_9PSED 7-cyano-7-deazaguanine synthase OS=Pseudomonas indica; OX = 137658 GN=queC PE=3 SV=1
MNEKKAVILLSGGLDSATVVALARAQGYACYSMSFDYGQRHRAELKAAERVARQLGVIEHKVVGLNLNGIGGSALTDESIAVPESPTEGIPVTYVPARNTVFLALALGWAEVLGARDIFIGVNAVDYSGYPDCRPEFIEAFERMANLATKAGVEGQGFRIQAPLQNLSKADIIQAGVRHGVDYALTVSCYQADEAGNACGKCDSCRLRAAGFSAAGVADPTRYR

SEQ ID NO: 41363 - protein, 457 aa, Pseudomonas indica
  REGION 1..457: note = tr|A0A1G9EK99|A0A1G9EK99_9PSED 7-cyano-7-deazaguanine synthase (Queuosine biosynthesis); OS = Pseudomonas indica OX=137658 GN=SAMN05216186_11090 PE=4; SV = 1
MKKFSPLKEMAVDVVESGVRPRKGVLPCHLGQNINFDLEALASFSSQKWQPRVYDALVVAAAVEFCDRTLTRSTMNWGRRFVVRIPVHDHEKWSENAVTRALVEALNLLTGDAWHFEFHARKAPAEPPVQDHMQFPSNAEAVIAYSDGMDSRAVAELESKRLGKRLVRVRVGSKQHDISRKERLKIPFTALPYSVKLDERKNTETSARSRGFKFAVVSAMAAYLVDAPATIVPESGQGALAPALLPVGHGYEDYRNHPVFTKLMERFVNALLDYPIQFQFPRLWKTKGETLREFVETCGDGAGWATTRSCWQQSRQTAVLGSRRQCGICAACILRRLSVHAAGLNEAPETYVWESLSATDFEAGAAKDFSRQTQALREYAIAGVLHFEHLSSIRESTQYELIKRLRTNELARALAETPQTVAENFDRLLQQHAIEWSAFTNDLGPESFVRKWIDYAS

SEQ ID NO: 41364 - protein, 224 aa, unidentified
  source 1..224: note = Pseudomonas indoloxydans
  REGION 1..224: note = tr|A0A2T5PH39|A0A2T5PH39_9PSED 7-cyano-7-deazaguanine synthase OS=Pseudomonas indoloxydans OX=404407 GN=queC PE=3 SV=1
MNDKKAVILLSGGLDSATVVAMAKAEGYSCYSMSFDYGQRHRAELQAAERVARQLGVVEHKMIGLNLNGIGGSALTDSSIAVPESPTEGIPATYVPARNTVFLALALGWAEVLEARDIFIGVNAVDYSGYPDCRPEFVEAFERMANLATRAGVEGQGFSIRAPLQQMSKGEIIQAGMRLGVDYALTVSCYQADDEGRACGKCDSCRLRAAGFAAAGVPDVTRYC

SEQ ID NO: 41365 - protein, 224 aa, Pseudomonas japonica
  REGION 1..224: note = tr|A0A239FI95|A0A239FI95_9PSED 7-cyano-7-deazaguanine synthase OS=Pseudomonas japonica; OX = 256466 GN=queC PE=3 SV=1
MTEKRAVILLSGGLDSATVVAMAKGEGYSCYTMSFDYGQRHRAELNAAARVARDLGVVEHKVIGLNLDGIGGSALTDSSIDVPEAPSEGIPVTYVPARNTVFLSLALGWAEVLEARDIFIGVNAVDYSGYPDCRPEFVEAFERMANLATKAGVEGQGFRIQAPLQNLSKAQIVQAGMARGVDYSLTVSCYQADDDGRACGKCDSCRLRAEGFAAAGVQDPTRYF

SEQ ID NO: 41366 - protein, 232 aa, Pseudomonas jessenii
  REGION 1..232: note = tr|A0A5C4L0Q9|A0A5C4L0Q9_9PSED 7-cyano-7-deazaguanine synthase OS=Pseudomonas jessenii; OX = 77298 GN=queC PE=3 SV=1
MSNKAVIVFSGGQDSTTCLIHALSHYDEIHCITFDYGQRHRAEIEVAQQLAKQLGVTVHKVMDVSLLNELAISSLTRDNIPVPTVNSSGESLPSTFVPGRNILFLTLASIYAYQVQARTVITGVCETDFSGYPDCRDEFVKALNKALELGMDYPLKLDTPLMWLNKAETWALADHYHQLDLVRHQTLTCYNGITGSGCANCDACNLRAKGLNEFLENKDEVMNSLKVKLNLQ

SEQ ID NO: 41367 - protein, 422 aa, Pseudomonas jessenii
  REGION 1..422: note = tr|A0A370SRG8|A0A370SRG8_9PSED 7-cyano-7-deazaguanine synthase in queuosine biosynthesis; OS = Pseudomonas jessenii OX=77298 GN=DEU51_104195 PE=4 SV=1
MKFVCGPAGFRVPGDDGAMQVVIYGKAEQGQVSVGGYARELIDRAHLEISPRAWDFLSIALSVVAADFTAIRAKSADGWTRVIELAISVQDPVFWNSQARGLENALRFLTTDKWTLSFHPGGFGPPAQLQALHPTEDSVVLLSGGLDSLIGAIDLVAQGVRPYAVSQIVRGDGEKQDHFAQSLGLSRIGLNHVTRSPDAQEPSQRARSIIFLAFGLAVATSLDRYHRGETVPLYICENGFIAINPPLTSCRLGSLSTRTAHPDYLGRLQEIFNAAGINVRIHNPYALKTKGEMLAECRNQDLLKLHAIASTSCGRFQRFGYKHCGRCVPCQVRRASFKRWAAVKDDTPYVHENLGLRDKQHAWFDDVRSVGIALANVAENGFEEWLGHSLFSPFIQDRAGYRAMLARGLDELGQLHHSYQLT

SEQ ID NO: 41368 - protein, 225 aa, Pseudomonas jinjuensis
  REGION 1..225: note = tr|A0A1H0A719|A0A1H0A719_9PSED 7-cyano-7-deazaguanine synthase OS=Pseudomonas jinjuensis; OX = 198616 GN=queC PE=3 SV=1
MTEQKKAVILLSGGLDSATVVAMAKAEGYQCYSMGFDYGQRHRAELQAAERVARQLGVVEHKVIGLNLNGIGGSALTDSSIDVPEAPSEGIPVTYVPARNTVFLSLALGWAEVLGARDIFIGVNAVDYSGYPDCRPEFVEAFERLANLATKAGVEGDGFRIQAPLQHLSKAQIIQAGLARGVDYSLTVSCYQADDEGRACGKCDSCRLRAEGFAAAGVADPTRYF

SEQ ID NO: 41369 - protein, 229 aa, unidentified
  source 1..229: note = Pseudomonas kairouanensis
  REGION 1..229: note = tr|A0A4Z0ASH4|A0A4Z0ASH4_9PSED 7-cyano-7-deazaguanine synthase OS=Pseudomonas kairouanensis OX=2293832 GN=queC PE=3 SV=1
MTEHTNDQKRAVILLSGGLDSATVVAMAQAEGYSCYTMSFDYGQRHRAELNAAARVARDMGVVEHKVIGLNLNGIGGSALTDSSIDVPETPGEGIPVTYVPARNTVFLSLALGWAEVLNARDIFIGVNAVDYSGYPDCRPEFVESFERMANLATKAGVEGQGFRILAPLQNLSKADIVKAGVGLGVDYSLTVSCYQADDDGRACGKCDSCRLRAEGFQAAGFTDPTRYF

SEQ ID NO: 41370 - protein, 230 aa, Pseudomonas kilonensis
  REGION 1..230: note = tr|A0A1H5CSY3|A0A1H5CSY3_9PSED 7-cyano-7-deazaguanine synthase OS=Pseudomonas kilonensis; OX = 132476 GN=queC PE=3 SV=1
MTEHSNIAEKRAVILLSGGLDSATVVAMAHAEGYRCYTMSFDYGQRHRAELHAAERVARDQGVVEHKVIGLNLNGIGGSALTDSSIDVPEAPGEGIPVTYVPARNTVFLSLALGWAEVLGARDIFIGVNAVDYSGYPDCRPEFVEAFERMANLATKAGVEGLGFRIQAPLQNLSKADIVKAGVKLGVDYGLTVSCYQADDQGRACGKCDSCRLRAEGFAAAGVSDPTRYF

SEQ ID NO: 41371 - protein, 230 aa, Pseudomonas kilonensis
  REGION 1..230: note = tr|A0A0F4XV17|A0A0F4XV17_9PSED 7-cyano-7-deazaguanine synthase OS=Pseudomonas kilonensis; OX = 132476 GN=queC PE=3 SV=1
MTEHSNIAEKRAVILLSGGLDSATVVAMARAEGYRCYTMSFDYGQRHRAELHAAERVARDQGVVEHKVIGLNLNGIGGSALTDSSIDVPETPGEGIPVTYVPARNTVFLSLALGWAEVLGARDIFIGVNAVDYSGYPDCRPEFVEAFERMANLATKAGVEGQGFRIQAPLQNLSKADIVKAGVKLGVDYGLTVSCYQADDQGRACGKCDSCRLRAEGFAAAGVSDPTRYF

SEQ ID NO: 41372 - protein, 224 aa, Pseudomonas knackmussii
  REGION 1..224: note = tr|A0A024HDR5|A0A024HDR5_PSEKB 7-cyano-7-deazaguanine synthase OS=Pseudomonas knackmussii (strain DSM 6978 / LMG 23759 / B13) OX=1301098 GN=queC; PE = 3 SV=1
MTQKKAVILLSGGLDSATVVAMAKADGYSCYTMSFDYGQRHRAELQAAERVARQLGVVEHKVIGFNLNGIGGSALTDSSIDVPEAPSEGIPVTYVPARNTVFLSLALGWAEVLGARDIFIGVNAVDYSGYPDCRPEFVEAFERMANLATKAGVEGDGFRIQAPLQYLSKAQIIQAGLARGVDYALTVSCYQADDEGRACGKCDSCRLRAEGFAAAGVQDPTKYF

SEQ ID NO: 41373 - protein, 213 aa, Pseudomonas knackmussii
  REGION 1..213: note = tr|A0A024HM59|A0A024HM59_PSEKB 7-cyano-7-deazaguanine synthase OS=Pseudomonas knackmussii (strain DSM 6978 / LMG 23759 / B13) OX=1301098 GN=PKB_4409; PE = 3 SV=1
MDCDARRKPQAGGYIFMSIVTLVSGGLDSTLVAKLALEKGLRIFPLFVDYGQRARNREFAACQLAMRKLGLPEPEVAALSGFGKLIRSGLTDPSLHIIDDAFTPGRNMLFLLTAAAYAYQKNADAISIGLLHESTSLFPDQTSQFLQQAEQMISLCMGKSIKVLAPLSSFTKQDVVALAEAKGISQTYSCHLGDDEPCGDCIACNEFKFGGAQ

SEQ ID NO: 41374 - protein, 230 aa, Pseudomonas koreensis
  REGION 1..230: note = tr|A0A142NGD2|A0A142NGD2_9PSED 7-cyano-7-deazaguanine synthase OS=Pseudomonas koreensis; OX = 198620 GN=queC PE=3 SV=1
MIEQLNTTEKRAVILLSGGLDSATVVAMARAEGYACYTMSFDYGQRSHAELHAAARVARDLGVVEHKVIGLNLNGMGGSALTDTSIDIPEELGEGIPVTYVPARNTVFLSLALGWAEVLGARDIFIGVNAVDYSGYPDCRPEFIESFERMANLATKAGVEGNGFRIQAPLQNLSKAQIVQAGVKLGVDYGLTVSCYQADDDGRACGKCDSCRLRAEGFAAAGVSDPTPYF

SEQ ID NO: 41375 - protein, 230 aa, Pseudomonas koreensis
  REGION 1..230: note = tr|A0A4U3EGR8|A0A4U3EGR8_9PSED 7-cyano-7-deazaguanine synthase OS=Pseudomonas koreensis; OX = 198620 GN=queC PE=3 SV=1
MTEQLNTTEKRAVILLSGGLDSATVVAMARAQGYSCYTMSFDYGQRSHAELHAAARVARDLGVVEHKVIGLNLNGMGGSALTDTSIDIPEELGEGIPVTYVPARNTVFLSLALGWAEVLGARDIFIGVNAVDYSGYPDCRPEFIESFERMANLATKAGVEGNGFRIQAPLQNLSKAQIVEAGVKLGVDYGLTVSCYQADDDGRACGKCDSCRLRAEGFAAAGVDDPTPYF

SEQ ID NO: 41376 - protein, 230 aa, unidentified
  source 1..230: note = Pseudomonas kribbensis
  REGION 1..230: note = tr|A0A345RUV7|A0A345RUV7_9PSED 7-cyano-7-deazaguanine synthase OS=Pseudomonas kribbensis; OX = 1628086 GN=queC PE=3 SV=1
MTEQLNTSQKRAVILLSGGLDSATVVAMARAEGYACYTMSFDYGQRSHAELHAAARVARDLGVVEHKVIGLNLNGMGGSALTDTSIEIPEELGEGIPVTYVPARNTVFLSLALGWAEVLGARDIFIGVNAVDYSGYPDCRPEFIESFERMANLATKAGVEGNGFRIQAPLQNLSKAQIVQTGVKLGVDYGLTVSCYQADDEGRACGKCDSCRLRSEGFAAAGVSDPTPYF

SEQ ID NO: 41377 - protein, 230 aa, unidentified
  source 1..230: note = Pseudomonas kribbensis
  REGION 1..230: note = tr|A0A4Y8VAM1|A0A4Y8VAM1_9PSED 7-cyano-7-deazaguanine synthase OS=Pseudomonas kribbensis; OX = 1628086 GN=queC PE=3 SV=1
MTEQLNTNAKRAVILLSGGLDSATVVAMARAEGYACYTMSFDYGQRSHAELHAAARVARDLGVVEHKVIGLNLNGMGGSALTDTSIDIPEELGEGIPVTYVPARNTVFLSLALGWAEVLGARDIFIGVNAVDYSGYPDCRPEFIESFERMANLATKAGVEGNGFRIQAPLQNLSKAQIVQTGVKLGVDYGLTVSCYQADDNGRACGKCDSCRLRAEGFAAAGISDPTPYF

SEQ ID NO: 41378 - protein, 224 aa, unidentified
  source 1..224: note = Pseudomonas kunmingensis
  REGION 1..224: note = tr|A0A2N8SF24|A0A2N8SF24_9PSED 7-cyano-7-deazaguanine synthase OS=Pseudomonas kunmingensis OX=1211807 GN=queC PE=3 SV=1
MNEKKAVILLSGGLDSATVVAMARAQGYACYTMSFDYGQRHRAELQAAERVAQQLGVVEHKVICLDLNGIGGSALTDDSIDVPEVPGEGIPVTYVPARNTVFLSLALGWAEVLGARDIFIGVNAVDYSGYPDCRPEFVAAFERMANLATKAGVEGLGFRIQAPLQEMSKARIVQEGTRLGVDYAATVSCYQADTDGRACGKCDSCRLRAAGFAEAGLADPTRYF

SEQ ID NO: 41379 - protein, 224 aa, unidentified
  source 1..224: note = Pseudomonas kuykendallii
  REGION 1..224: note = tr|A0A1H2ZFX2|A0A1H2ZFX2_9PSED 7-cyano-7-deazaguanine synthase OS=Pseudomonas kuykendallii OX=1007099 GN=queC PE=3 SV=1
MSDKKAVILLSGGLDSATVVAMAREQGYACYTMSFDYGQRHRTELAAAERVAKRAGVVEHKVIGLNLNGMGGSALTDTSIAVPEEPGEGIPVTYVPARNMLFLSLAVGWAEVVGARDIFIGVNAVDYSGYPDCRPEFIVAFERVANLATRAGIEGFDFRIQTPLQYLSKAQIIAAGLALGVDYALTVSCYQADDDGRACGRCDSCRLRASGFSAAGVADPTRYY

SEQ ID NO: 41380 - protein, 224 aa, unidentified
  source 1..224: note = Pseudomonas kuykendallii
  REGION 1..224: note = tr|A0A2W5D6B1|A0A2W5D6B1_9PSED 7-cyano-7-deazaguanine synthase OS=Pseudomonas kuykendallii OX=1007099 GN=queC PE=3 SV=1
MSDKKAVILLSGGLDSATVVAMAREQGYACYTMSFDYGQRHRAELVAAERVAKQAGVVEHKVIGLNLNGMGGSALTDTSIAVPEEPGEGIPVTYVPARNMLFLSLAVGWAEVVGARDIFIGVNAVDYSGYPDCRPEFIVAFERVANLATRAGIEGFDFRIQAPLQYLSKAQIIAAGVALGVDYALTVSCYQADDDGRACGRCDSCRLRASGFSAAGVADPTRYY

SEQ ID NO: 41381 - protein, 232 aa, unidentified
  source 1..232: note = Pseudomonas lactis
  REGION 1..232: note = tr|A0A219A4N4|A0A219A4N4_9PSED 7-cyano-7-deazaguanine synthase OS=Pseudomonas lactis; OX = 1615674 GN=queC PE=3 SV=1
MSKKAVMVFSGGQDSTTCLIQALPLYDEVHCITFDYGQRHVAEIEVAQKLAKQLGATVHKVMDVSLLNELAISSLTRDNIPVPTVNSSGESLPSTFVPGRNILFLTLAAIYAYQVKAETVITGVCETDFSGYPDCRDEFVKALNQALKLGMEYDVRLDTPLMWLNKAETWALADYHGQLELVREQTLTCYNGIIGTGCGECDACNLRARGLNDYLQNKTPVMQSLKHKLQLK

SEQ ID NO: 41382 - protein, 232 aa, unidentified
  source 1..232: note = Pseudomonas lactis
  REGION 1..232: note = tr|I4K962|I4K962_9PSED 7-cyano-7-deazaguanine synthase OS=Pseudomonas lactis OX=1615674 GN=queC PE=3 SV=1
MSKKAVMVFSGGQDSTTCLIQALPLYDEVHCITFDYGQRHVAEIEVAQKLAKQLGATVHKVMDVSLLNELAISSLTRDNIPVPTVNSSGESLPSTFVPGRNILFLTLAAIYAYQVKAETVITGVCETDFSGYPDCRDEFVKALNQALKLGMEYDVRLDTPLMWLNKAETWALADYHGQLELVREQTLTCYNGIIGTGCGECDACNLRARGLNDYLQNQTNVMQSLKHKLQLK

SEQ ID NO: 41383 - protein, 233 aa, unidentified
  source 1..233: note = Pseudomonas laurylsulfatiphila
  REGION 1..233: note = tr|A0A2S6FJK1|A0A2S6FJK1_9PSED 7-cyano-7-deazaguanine synthase OS=Pseudomonas laurylsulfatiphila OX=2011015 GN=queC PE=3 SV=1
MHSKALVLFSGGQDSTTCLAWALERYEHVETIGFDYGQRHLIELECRLNILQAVRNRFPNWAKRLGEDHVLDLKLLGQISDTAMTAEKTIEFEKNGLPNTFVPGRNLLFLTFAATIAYRRDLTVLVGGMCETDYSGYPDCRDNTLKATQVALSLGMDAPVIIETPLMWLNKAQTWRLAEELGDLDFVSLIQEESHTCYLGTRQQKHEWGYGCGTCPACELRKTGYEQYIQIRD

SEQ ID NO: 41384 - protein, 230 aa, unidentified
  source 1..230: note = Pseudomonas laurylsulfatiphila
  REGION 1..230: note = tr|A0A2S6FMF9|A0A2S6FMF9_9PSED 7-cyano-7-deazaguanine synthase OS=Pseudomonas laurylsulfatiphila OX=2011015 GN=queC PE=3 SV=1
MTEQLNTAEKRAVILLSGGLDSATVVAMARAKGYSCYTMSFDYGQRSHAELHAAERVARDLGVVEHKVIGLNLNGMGGSALTDSSIDIPEELGEGIPVTYVPARNTVFLSLALGWAEVLGARDIFIGVNAVDYSGYPDCRPEFIESFERMANLATKAGVEGNGFRIQAPLQNLSKAQIVQAGVKLGVNYGLTVSCYQADDDGRACGKCDSCRLRAEGFAAAGISDPTPYF

SEQ ID NO: 41385 - protein, 232 aa, unidentified
  source 1..232: note = Pseudomonas laurylsulfativorans
  REGION 1..232: note = tr|A0A2S3VIC9|A0A2S3VIC9_9PSED 7-cyano-7-deazaguanine synthase OS=Pseudomonas laurylsulfativorans OX=1943631 GN=queC PE=3 SV=1
MTKKAVIVFSGGQDSTTCLIHALPIYDEIHCITFDYGQRHRAEIEVAQQLSKKLGVTAHKVLDASLLNDLAISSLTRDNIPVPSANSADGGVPNTFVPGRNILFLTLASIYAYQVGAEAVITGVCETDFSGYPDCRNDFVTSLNNAVELGMDYKLRIETPLMYLSKAETWALADHHKQLDLIRDNTLTCYNGVKGNGCGDCDACSLRAKGLCTYFESKTEVLSSLKHKLNFN

SEQ ID NO: 41386 - protein, 230 aa, unidentified
  source 1..230: note = Pseudomonas laurylsulfativorans
  REGION 1..230: note = tr|A0A2S3VGR8|A0A2S3VGR8_9PSED 7-cyano-7-deazaguanine synthase OS=Pseudomonas laurylsulfativorans OX=1943631 GN=queC PE=3 SV=1
MTEQLNTAEKRAVILLSGGLDSATVVAMARAEGYNCYTMSFDYGQRSHAELYAAERVARDLGVVEHKVIGLNLNGMGGSALTDRSIDIPEELGEGIPVTYVPARNTVFLSLALGWAEVLGARDIFIGVNAVDYSGYPDCRPEFIESFERMANLATKAGVEGNGFRIQAPLQNLSKAQIVQAGVKLGVNYGLTVSCYQADDEGRACGKCDSCRLRAEGFAAAGISDPTPYF

SEQ ID NO: 41387 - protein, 232 aa, Pseudomonas libanensis
  REGION 1..232: note = tr|A0A0R2YDG8|A0A0R2YDG8_9PSED 7-cyano-7-deazaguanine synthase OS=Pseudomonas libanensis; OX = 75588 GN=queC PE=3 SV=1
MSKKAVMVFSGGQDSTTCLIQALPLYDEVHCITFDYGQRHVAEIEVARTLAKQLGATVHKVMDVSLLNELAISSLTRDNIPVPTVSSSGESLPSTFVPGRNILFLTLAAIYAYQVKAEAVITGVCETDFSGYPDCRDEFVKALNQALKLGMEYDVRLDTPLMWLNKAETWALADYHDQLELVREQTLTCYNGIIGTGCGNCDACNLRARGLNEYLQNKADVMQSLKHKLQLM

SEQ ID NO: 41388 - protein, 230 aa, Pseudomonas lini
  REGION 1..230: note = tr|A0A0J6HD12|A0A0J6HD12_9PSED 7-cyano-7-deazaguanine synthase OS=Pseudomonas lini; OX = 163011 GN=queC PE=3 SV=1
MTEQTNTAEKRAVILLSGGLDSATVVAMARAEGYSCYTMSFDYGQRSHAELHAAARVAQDLGVVEHKVIGLNLNGIGGSALTDTSIDVPETPGEGIPVTYVPARNTVFLSLALGWAEVLGARDIFIGVNAVDYSGYPDCRPEFIEAFERMANLATKAGVEGQGFRIQAPLQNLSKAQIVQAGVKLGVDYGLTVSCYQADDNGRACGKCDSCRLRAEGFAAAGVTDPTPYF

SEQ ID NO: 41389 - protein, 230 aa, Pseudomonas lini
  REGION 1..230: note = tr|A0A423IXH8|A0A423IXH8_9PSED 7-cyano-7-deazaguanine synthase OS=Pseudomonas lini; OX = 163011 GN=queC PE=3 SV=1
MTEQTNTAEKRAVILLSGGLDSATVVAMARAEGYRCYTMSFDYGQRSHAELHAAARVAQDLGVVEHKVIGLNLNGIGGSALTDTSIDVPETPGEGIPVTYVPARNTVFLSLALGWAEVLGARDIFIGVNAVDYSGYPDCRPEFIEAFERMANLATKAGVEGQGFRIQAPLQNLSKAQIVQAGVKLGVDYGLTVSCYQADDNGRACGKCDSCRLRAEGFAAAGVTDPTPYF

SEQ ID NO: 41390 - protein, 224 aa, unidentified
  source 1..224: note = Pseudomonas linyingensis
  REGION 1..224: note = tr|A0A1H7B277|A0A1H7B277_9PSED 7-cyano-7-deazaguanine synthase OS=Pseudomonas linyingensis OX=915471 GN=queC PE=3 SV=1
MTDKKAVILLSGGLDSATVLAMALAEGYACYTMSFDYGQRHRAELQAAERVARQLGAVEHKVVGIDLNGIGGSALTDDSIAVPEEPGEGIPVTYVPARNTLFLSLALGWAEVLGARDIFIGVNAVDYSGYPDCRPEFITAFERLANLATKAGVEGEGFRIRAPLQYLSKAQIIEAGLTRGVDFALTVSCYQADADGRACGRCDSCRLRAEGFRAAGVADPTRYV

SEQ ID NO: 41391 - protein, 219 aa, Pseudomonas litoralis
  REGION 1..219: note = tr|A0A1H1LNQ7|A0A1H1LNQ7_9PSED 7-cyano-7-deazaguanine synthase OS=Pseudomonas litoralis; OX = 797277 GN=queC PE=3 SV=1
MNALLICSGGFDSVTLAYRLAAENALGALLTFDYGQRHRKEIDAARLAAERLEVPHLVMDIASIGSQLSGSALTDDIAVPHGHYSEANMKLTVVPNRNAIMLTIAFGVASARSFDSVALAVHGGDHFIYPDCRPDFIQLFGQMQAKALDGVAEVALFAPYVNADKTEIARDAARFTVPVADTWSCYEGGRIHCGRCGTCVERIEAMAQACVADPTPYQD

SEQ ID NO: 41392 - protein, 236 aa, Pseudomonas lundensis
  REGION 1..236: note = tr|A0A2C8EPN1|A0A2C8EPN1_9PSED 7-cyano-7-deazaguanine synthase OS=Pseudomonas lundensis; OX = 86185 GN=queC PE=3 SV=1
MSRGAEMTEQSVVREKRAVILLSGGLDSATVVAMARAEGYRCYTMSFDYGQRHRAELDAAARVARDLGVIDHKVIGLNLDGIGGSALTDSSIDVPEAPSEGIPVTYVPARNTVFLSLALGWAEVLDAQDIFIGVNAVDYSGYPDCRPEFVEAFEVMANLATKAGVEGKPFSIKAPLQNLSKAQIVQAGIQLGVDYSLTVSCYQADDQGRACGKCDSCRLRADGFAAAGIKDPTRYF

SEQ ID NO: 41393 - protein, 230 aa, Pseudomonas lundensis
  REGION 1..230: note = tr|A0A266N5I9|A0A266N5I9_9PSED 7-cyano-7-deazaguanine synthase OS=Pseudomonas lundensis; OX = 86185 GN=queC PE=3 SV=1
MTEQSVVQEKRAVILLSGGLDSATVVAMARAEGYSCYTMSFDYGQRHRAELDAAARVARDLGVIDHKVIGLNLDGIGGSALTDSSIDVPEAPSEGIPVTYVPARNTVFLSLALGWAEVLEAQDIFIGVNAVDYSGYPDCRPEFVEAFEVMANLATKAGVEGKPFSIKAPLQSLSKAQIVQAGAKLGVDYSLTVSCYQADDQGRACGKCDSCRLRADGFAAAGIKDPTRYF

SEQ ID NO: 41394 - protein, 229 aa, Pseudomonas lurida
  REGION 1..229: note = tr|A0A2A9DGE8|A0A2A9DGE8_9PSED 7-cyano-7-deazaguanine synthase OS=Pseudomonas lurida; OX = 244566 GN=queC PE=3 SV=1
MTEHTMDQKRAVILLSGGLDSATVVAMAQEQGYSCYTMSFDYGQRHRAELNAAARVARDMGVVEHKVIGLNLNGIGGSALTDSSIDVPETPGEGIPVTYVPARNTVFLSLALGWAEVLNARDIFIGVNAVDYSGYPDCRPEFVESFERMANLATKAGVEGQGFRILAPLQNLSKADIVKAGVGLGVDYSLTVSCYQADDDGRACGKCDSCRLRAEGFQAAGITDPTRYF

SEQ ID NO: 41395 - protein, 224 aa, Pseudomonas lurida
  REGION 1..224: note = tr|A0A2R3I473|A0A2R3I473_9PSED 7-cyano-7-deazaguanine synthase OS=Pseudomonas lurida; OX = 244566 GN=queC PE=3 SV=1
MDQKRAVILLSGGLDSATVVAMAQEQGYSCYTMSFDYGQRHRAELNAAARVARDMGVVEHKVIGLNLNGIGGSALTDSSIDVPETPGEGIPVTYVPARNTVFLSLALGWAEVLNARDIFIGVNAVDYSGYPDCRPEFVESFERMANLATKAGVEGQGFRILAPLQNLSKADIVKAGVGLGVDYSLTVSCYQADDDGRACGKCDSCRLRAEGFQAAGITDPTRYF

SEQ ID NO: 41396 - protein, 229 aa, Pseudomonas lutea
  REGION 1..229: note = tr|A0A098STM5|A0A098STM5_9PSED 7-cyano-7-deazaguanine synthase OS=Pseudomonas lutea; OX = 243924 GN=queC PE=3 SV=1
MSEQSMSDKRAVILLSGGLDSATVVAMAKADGFDCYTMSFDYGQRHRAELQAAERVASDMGVIEHKVIGLNLNGIGGSALTDSSIPVPETAGEGIPVTYVPARNTVFLSLALGWAEVLGARDIFIGVNAVDYSGYPDCRPEFVEAFERMANLATKAGVEGQGFTIRAPLQMLSKADIVKAGTRLGVDYGLTVSCYQADEQGRACGKCDSCRLRAEGFAAAGVTDPTRYF

SEQ ID NO: 41397 - protein, 224 aa, Pseudomonas luteola
  REGION 1..224: note = tr|A0A3R8Y4R2|A0A3R8Y4R2_PSELU 7-cyano-7-deazaguanine synthase OS=Pseudomonas luteola; OX = 47886 GN=queC PE=3 SV=1
MNQKKAVILLSGGLDSATVVAMARAEGFACYTMSFDYGQRHRAELRAAERVATQLGVLEHKVIGLNLNGIGGSALTDSTIDVPEAPTEGIPVTYVPARNTVFLSLALGWAEVLEAQHIFIGVNAVDYSGYPDCRPEFVESFERMANLATKAGVEGNGFKIIAPLQFMSKAEIIQWGVANGVDYSLTVSCYKADDEGRACGRCDSCRLRAEGFRAAHLEDPTSYF

SEQ ID NO: 41398 - protein, 229 aa, Pseudomonas luteola
  REGION 1..229: note = tr|A0A2X2C9T0|A0A2X2C9T0_PSELU 7-cyano-7-deazaguanine synthase OS=Pseudomonas luteola; OX = 47886 GN=queC PE=3 SV=1
MNQKKAVILLSGGLDSATVVAMARAEGFACYTMSFDYGQRHRAELKAAERVATQLGVVEHKVIGLNLNGIGGSALTDSTIDVPEAPTEGIPVTYVPARNTVFLSLALGWAEVLEAQHIFIGVNAVDYSGYPDCRPEFVESFERMANLATKAGVEGNGFKIIAPLQFMSKAEIIQWGVANGVDYSLTVSCYKADDEGRACGRCDSCRLRAEGFRAAHLEDPTRYFLKKLR

SEQ ID NO: 41399 - protein, 230 aa, Pseudomonas mandelii; identical to SEQ ID NO: 41287
  REGION 1..230: note = tr|A0A502IJN0|A0A502IJN0_9PSED 7-cyano-7-deazaguanine synthase OS=Pseudomonas mandelii; OX = 75612 GN=queC PE=3 SV=1

SEQ ID NO: 41400 - protein, 332 aa, Pseudomonas mandelii
  REGION 1..332: note = tr|A0A4R7XUC6|A0A4R7XUC6_9PSED 7-cyano-7-deazaguanine synthase OS=Pseudomonas mandelii; OX = 75612 GN=queC PE=3 SV=1
MTKGAFRGALFANKLDCHSPAPAWLCDGWFTQDPQSLTNPIRAHRQYAQENEFAISPYWQLIKQEKAEHLISETSHSKTLSFPIGSMIQRPFRDLPRMKNMSTKAVIVFSGGQDSTTCLIHALPNYDEVHCITFDYGQRHRAEIEVALQLSEKFGITVHKILDASLLNELAISSLTRDNIPVPISSSSGDSLPNTFVPGRNILFLTLASIYAYQVGAQAVITGICGADFSDYPDCRNDFINSLNKSVDLGLGYRLRFENPLMWLNKSEIWALAEYYNQLDLIHYDTLSCYNGLKGSGCTSCSACTLRLNGLNDFLANKTNTMNSLKNKLQLK

SEQ ID NO: 41401 - protein, 225 aa, Pseudomonas marginalis
  REGION 1..225: note = tr|A0A3M5QE69|A0A3M5QE69_PSEMA 7-cyano-7-deazaguanine synthase OS=Pseudomonas marginalis pv. marginalis OX=97473 GN=queC PE=3 SV=1
MTDQKRAVILLSGGLDSATLVAMVRAQGYSCYTMSFDYGQRHRAELNAAARVARDLGVVEHKVVGLNLGGMGGSALTDSTIDLPEAPSEGIPVTYVPARNTVFLSLALGWAEVLNARDIFIGVNALDYSGYPDCRPEFVESFERMANLATKAGVEGQGFRIQAPLQNMSKADIVKAGVGLGVDYSLTVSCYQADEGGRACGKCDACRLRAEGFKMAGITDPTRYF

SEQ ID NO: 41402 - protein, 229 aa, Pseudomonas marginalis
  REGION 1..229: note = tr|A0A0W0LSN9|A0A0W0LSN9_PSEMA 7-cyano-7-deazaguanine synthase OS=Pseudomonas marginalis ICMP 11289 OX=1198318 GN=queC PE=3 SV=1
MTELNMTEKRAVILLSGGLDSATVVAMARAEGYACYTMSFDYGQRHRAELDAAAQVARDLGAVEHKVIGLNLNGIGGSALTDSSIAVPEAPSEGIPVTYVPARNTVFLSLALGWAEVLGARDIFIGVNAVDYSGYPDCRPEFVESFERMANLATKAGVEGQGFTIRAPLQNLSKSDIVKAGTALGVDYALTVSCYQADDQGRACGKCDSCRLRAEGFAAAGVADPTRYF

SEQ ID NO: 41403 - protein, 229 aa, Pseudomonas marincola
  REGION 1..229: note = tr|A0A1I7E7T8|A0A1I7E7T8_9PSED 7-cyano-7-deazaguanine synthase OS=Pseudomonas marincola; OX = 437900 GN=queC PE=3 SV=1
MSDKKAVILLSGGLDSATVVAMAKADGYSCYTMSFDYGQRHRSELQAAERVARQLGVVEHKVIGLNLNGMGGSALTDASIAVPENVAGAAPAPGIPVTYVPARNTVFLSLALGWAEVLGARDIFIGVNAVDYSGYPDCRPEFVEAFERMANLATKAGVEGNGFRIQAPLQNMSKAEIVAAGIALGVDYAQTVSCYQADDDGRACGKCDSCSLRAAGFAAAGVADATRYV

SEQ ID NO: 41404 - protein, 230 aa, Pseudomonas mediterranea
  REGION 1..230: note = tr|A0A0A4GIJ5|A0A0A4GIJ5_9PSED 7-cyano-7-deazaguanine synthase OS=Pseudomonas mediterranea CFBP 5447 OX=1348058 GN=queC PE=3 SV=1
MTEQTNIAEKRAVILLSGGLDSATVVAMARAEGYRCYTMSFDYGQRHRAELHAAERVARDLGVVEHKVIGLNLNGIGGSALTDSTIDVPEAPSEGIPVTYVPARNTVFLSLALGWAEVLEARDIFIGVNAVDYSGYPDCRPEFVEAFERMANLATKAGVEGQGFRIQAPLQNLSKADIVRAGVKLGVNYGLTVSCYQADDQGRACGKCDSCRLRAEGFAAAGVSDPTPYF

SEQ ID NO: 41405 - protein, 236 aa, unidentified
  source 1..236: note = Pseudomonas meliae
  REGION 1..236: note = tr|A0A0N8S241|A0A0N8S241_9PSED 7-cyano-7-deazaguanine synthase OS=Pseudomonas meliae; OX = 86176 GN=queC PE=3 SV=1
MTSRGADMSELTNTEKRAVILLSGGLDSATVVAMARAEGYACYTMSFDYGQRHRAELDAAARVARDLGAVEHKVIGLNLNGIGGSALTDSSIAVPESPSEGIPITYVPARNTVFLSLALGWAEVLGARDIFIGVNAVDYSGYPDCRPEFVESFERMANLATKAGVEGQGFTIRAPLQNLSKSDIVKAGAALGVDYSLTVSCYQADDQGRACGKCDSCRLRAEGFTAAGMADPTRYF

SEQ ID NO: 41406 - protein, 201 aa, unidentified
  source 1..201: note = Pseudomonas meliae
  REGION 1..201: note = tr|A0A0P9X693|A0A0P9X693_9PSED 7-cyano-7-deazaguanine synthase OS=Pseudomonas meliae; OX = 86176 GN=ALO64_03512 PE=3 SV=1
MKIGLLLSGGMDSLALAWWKRSDIAFTLNYGQLAAQAEIEASRTICRQLNISHQVIEIDCRQLGSGDMAGTRADDLAPASDWWPYRNQMLVTLTAMKAISFGVTHLWLGTVRSDGFHKDGSPEFMTAISHLLSLQEGGIVVEAPAIGLSTAELVRLSGIPADLLAWAHSCHKSHVACGNCRGCNKYMEVFQEVGYDLDRPG

SEQ ID NO: 41407 - protein, 224 aa, Pseudomonas mendocina
  REGION 1..224: note = sp|A4XRT0|QUEC_PSEMY 7-cyano-7-deazaguanine synthase; OS = Pseudomonas mendocina (strain ymp) OX=399739 GN=queC; PE = 3 SV=1
MSDKKAVILLSGGLDSATVVAMARAEGYACYSMSFDYGQRHRAELQAAERVARQLGVVEHKVVGLNLNGIGGSALTDSSIAVPETPGEGIPVTYVPARNTVFLSLALGWAEVLGARDIFIGVNAVDYSGYPDCRPEFVEAFERMANLATKAGVEGQGFAIRAPLQQMSKGEIIQAGMRLGVDYALTVSCYQADDDGRACGKCDSCRLRAAGFAAAGVPDATRYF

SEQ ID NO: 41408 - protein, 224 aa, Pseudomonas mendocina
  REGION 1..224: note = tr|A0A379IYA0|A0A379IYA0_PSEME 7-cyano-7-deazaguanine synthase OS=Pseudomonas mendocina; OX = 300 GN=queC PE=3 SV=1
MNDKKAVILLSGGLDSATVVAMARAEGYACYSMSFDYGQRHRAELQAAERVARQLGVVEHKVIGLNLNGIGGSALTDSSIAVPEAPTEGIPSTYVPARNTVFLALALGWAEVLEARDIFIGVNAVDYSGYPDCRPEFVEAFERMANLATRAGVQGQSFSIRAPLQQMSKAEIIQVGMSLDVDYALTVSCYQADDDGRACGKCDSCRLRAAGFVAAGVPDATRYF

SEQ ID NO: 41409 - protein, 244 aa, unidentified
  source 1..244: note = [Pseudomonas] mesoacidophila
  REGION 1..244: note = tr|A0A2A4FF47|A0A2A4FF47_9BURK 7-cyano-7-deazaguanine synthase OS=[Pseudomonas] mesoacidophila OX=265293 GN=queC PE=3 SV=1
MIRTDAKDGALVLFSGGQDSATCVAWALERYQTVETLGFDYGQRHRVELECREGVRDALKRQFPAWAGRLGDDHMIDLSVLGAISDTAMTRAIEIETSANGLPNTFVPGRNLLFMTIAAAIAYRRGLRVLVGGMCETDFSGYPDCRDDTMKALQVALNLGMDTRVVLETPLMWLDKAQTWQLAEQLGGQALVELIRVETHTCYVGERAELHDWGFGCGECPACKLRKRGYEAYLKGERVTEAPL

SEQ ID NO: 41410 - protein, 230 aa, Pseudomonas migulae
  REGION 1..230: note = tr|A0A1H5MKM9|A0A1H5MKM9_9PSED 7-cyano-7-deazaguanine synthase OS=Pseudomonas migulae; OX = 78543 GN=queC PE=3 SV=1
MTEQLNTAEKRAVILLSGGLDSATVVAMARAEGYSCYTMSFDYGQRSHAELHAAERVARDLGVVEHKVIGLNLNGIGGSALTDTSIDVPEETGEGIPVTYVPARNTVFLSLALGWAEVLGARDIFIGVNAVDYSGYPDCRPEFIESFERMANLATKAGVEGNGFRIQAPLQNLSKAQIVQAGVKLGVNYGLTVSCYQADDHGRACGKCDSCRLRAEGFAAAGISDPTPYF

SEQ ID NO: 41411 - protein, 230 aa, Pseudomonas mohnii
  REGION 1..230: note = tr|A0A1H4RKF9|A0A1H4RKF9_9PSED 7-cyano-7-deazaguanine synthase OS=Pseudomonas mohnii; OX = 395600 GN=queC PE=3 SV=1
MTEQLNTAEKRAVILLSGGLDSATVVAMARADGYSCYTMSFDYGQRHRAELHAAERVARDLGVVEHKVIGLNLNGIGGSALTDSSIDVPEAPSEGIPVTYVPARNTVFLSLALGWAEVLGARDIFIGVNAVDYSGYPDCRPEFVEAFERMANLATKAGVEGQGFRIQAPLQNLSKAQIVQAGVKLGVDYSLTVSCYQADDNGHACGKCDSCRLRAEGFAAAGISDPTPYF

SEQ ID NO: 41412 - protein, 224 aa, Pseudomonas monteilii
  REGION 1..224: note = tr|V9V6F5|V9V6F5_9PSED 7-cyano-7-deazaguanine synthase OS=Pseudomonas monteilii SB3101 OX=1435058; GN = queC PE=3 SV=1
MTDKRAVILLSGGLDSATVVAMAKAEGYSCYTMSFDYGQRHRAELNAAARVARDLGVVEHKVIGLNLDGIGGSALTDSSIDVPETPGEGIPVTYVPARNTVFLSLALGWAEVLEARDIFIGVNAVDYSGYPDCRPEFVEAFERMANLATKAGVEGQGFRIQAPLQNMSKAQIVQAGMARGVDYSLTVSCYQADDDGRACGKCDSCRLRADGFKAAGVEDPTRYF

SEQ ID NO: 41413 - protein, 224 aa, Pseudomonas monteilii
  REGION 1..224: note = tr|A0A2N1ISD7|A0A2N1ISD7_9PSED 7-cyano-7-deazaguanine synthase OS=Pseudomonas monteilii; OX = 76759 GN=queC PE=3 SV=1
MTEKRAVILLSGGLDSATVVAMAKAEGYSCYTMSFDYGQRHRAELNAAARVARDLGVVEHKVIGLNLDGIGGSALTDSSIDVPEAPSEGIPVTYVPARNTVFLSLALGWAEVLEARDIFIGVNAVDYSGYPDCRPEFVEAFERMANLATKAGVEGQGFRIQAPLQNMSKAQIVQAGMARGVDYSLTVSCYQADDDGRACGKCDSCRLRADGFKAAGIEDPTRYF

SEQ ID NO: 41414 - protein, 230 aa, Pseudomonas moorei
  REGION 1..230: note = tr|A0A1H1HKR1|A0A1H1HKR1_9PSED 7-cyano-7-deazaguanine synthase OS=Pseudomonas moorei; OX = 395599 GN=queC PE=3 SV=1
MTEQLNTAEKRAVILLSGGLDSATVVAMARAEGYSCYTMSFDYGQRHRAELHAAERVARDLGVVEHKVIGLNLNGIGGSALTDSSIDVPESPSEGIPVTYVPARNTVFLSLALGWAEVLGARDIFIGVNAVDYSGYPDCRPEFVEAFERMANLATKAGVEGQGFRIQAPLQNLSKAQIVQAGVKLGVDYSLTVSCYQADDNGRACGKCDSCRLRAEGFSAAGISDPTPYF

SEQ ID NO: 41415 - protein, 230 aa, Pseudomonas moorei
  REGION 1..230: note = tr|A0A4Q7H991|A0A4Q7H991_9PSED 7-cyano-7-deazaguanine synthase OS=Pseudomonas moorei; OX = 395599 GN=queC PE=3 SV=1
MTEQLNTAEKRAVILLSGGLDSATVVAMARADGYSCYTMSFDYGQRHRAELHAAERVARDLGVVEHKVIGLNLNGIGGSALTDSSIDVPEAPSEGIPVTYVPARNTVFLSLALGWAEVLGARDIFIGVNAVDYSGYPDCRPEFVEAFERMANLATKAGVEGQGFRIQAPLQNLSKAQIVQAGVKLGVDYSLTVSCYQADDNGRACGKCDSCRLRAEGFAAAGISDPTPYF

SEQ ID NO: 41416 - protein, 230 aa, Pseudomonas moraviensis
  REGION 1..230: note = tr|V8R531|V8R531_9PSED 7-cyano-7-deazaguanine synthase OS=Pseudomonas moraviensis R28-S OX=1395516; GN = queC PE=3 SV=1
MTEQLNTTQKRAVILLSGGLDSATVVAMARAEGYACYTMSFDYGQRSHAELHAAARVARDLGVVEHKVIGLNLNGMGGSALTDTSIDIPEELGEGIPVTYVPARNTVFLSLALGWAEVLGARDIFIGVNAVDYSGYPDCRPEFIESFERMANLATKAGVEGNGFRIQAPLQNLSKAQIVQAGVKLGVDYGLTVSCYQADDDGRACGKCDSCRLRAEGFAAAGVDDPTPYF

SEQ ID NO: 41417 - protein, 230 aa, Pseudomonas moraviensis
  REGION 1..230: note = tr|A0A1Q3I7Z6|A0A1Q3I7Z6_9PSED 7-cyano-7-deazaguanine synthase OS=Pseudomonas moraviensis; OX = 321662 GN=queC PE=3 SV=1
MIEQLNTTEKRAVILLSGGLDSATVVAMARAEGYACYTMSFDYGQRSHAELHAAARVARDLGVVEHKVIGLNLNGMGGSALTDTSIDIPEELGEGIPVTYVPARNTVFLSLALGWAEVLGARDIFIGVNAVDYSGYPDCRPEFIESFERMANLATKAGVEGNGFRIQAPLQNLSKAQIVQAGVKLGVDYGLTVSCYQADDDGRACGKCDSCRLRAEGFAAAGVDDPTPYF

SEQ ID NO: 41418 - protein, 224 aa, Pseudomonas mosselii
  REGION 1..224: note = tr|A0A2V4KYU8|A0A2V4KYU8_9PSED 7-cyano-7-deazaguanine synthase OS=Pseudomonas mosselii; OX = 78327 GN=queC PE=3 SV=1
MTDKRAVILLSGGLDSATVVAMAKADGYQCYTMSFDYGQRHRAELNAAARVARDLGVVEHKVIGLNLDGIGGSALTDSSIDVPEAPSEGIPVTYVPARNTVFLSLALGWAEVLEARDIFIGVNAVDYSGYPDCRPEFVEAFERMANLATKAGVEGQGFRIQAPLQNLSKAQIVQAGIARGVDYSLTVSCYQADDDGRACGKCDSCRLRADGFKAAGVEDPTRYF

SEQ ID NO: 41419 - protein, 224 aa, Pseudomonas mosselii
  REGION 1..224: note = tr|A0A1X1NT26|A0A1X1NT26_9PSED 7-cyano-7-deazaguanine synthase OS=Pseudomonas mosselii; OX = 78327 GN=queC PE=3 SV=1
MTDKRAVILLSGGLDSATVVAMAKADGYQCYTMSFDYGQRHRAELNAAARVARDLGVVEHKVIGLNLDGIGGSALTDSSIDVPEAPSEGIPVTYVPARNTVFLSLALGWAEVLEARDIFIGVNAVDYSGYPDCRPEFVEAFERMANLATKAGVQGQGFRIQAPLQNLSKAQIVQAGIARGVDYSLTVSCYQADDDGRACGKCDSCRLRADGFKAAGVEDPTRYF

SEQ ID NO: 41420 - protein, 229 aa, Pseudomonas mucidolens
  REGION 1..229: note = tr|A0A1H2LV94|A0A1H2LV94_9PSED 7-cyano-7-deazaguanine synthase OS=Pseudomonas mucidolens; OX = 46679 GN=queC PE=3 SV=1
MTEQTIEQKRAVILLSGGLDSATVVALARAEGYSCYTMSFDYGQRSRAELDAAARVARDLGVVEHKVIGLNLNGIGGSALTDSAIDVPESPTEGIPVTYVPARNTVFLSLALGWAEVINARDIFIGVNAVDYSGYPDCRPEFVESFERMANLATKAGVEGEGFRILAPLQNLSKADIIKAGVGLGVDYSLTVSCYQADADGRACGKCDSCRLRAEGFQAAGIEDPTRYF

SEQ ID NO: 41421 - protein, 231 aa, Pseudomonas mucidolens
  REGION 1..231: note = tr|A0A1H2NMU2|A0A1H2NMU2_9PSED 7-cyano-7-deazaguanine synthase OS=Pseudomonas mucidolens; OX = 46679 GN=queC PE=3 SV=1
MNRKAVIVFSGGQDSTTCLIHALPIYDEIHCITFDYGQRHRAEIEISQQLSKKLGVAVHKVLDVSLLNALASSSLTRDHIPAPSISSSTESLPDTFVPGRNILFLTLAAIYAYQVRAETVITGVCETDFSGYPDYRDEFVKTLNNAIELGMDYKLHIETPLMWLNKAETWALADHHNKLDLIREHTLSCYNGIKGNGCANCDACNLRAKGLKTFMENRTQIGLSLKTKLTL

SEQ ID NO: 41422 - protein, 229 aa, unidentified
  source 1..229: note = Pseudomonas nabeulensis
  REGION 1..229: note = tr|A0A4Z0BAJ4|A0A4Z0BAJ4_9PSED 7-cyano-7-deazaguanine synthase OS=Pseudomonas nabeulensis; OX = 2293833 GN=queC PE=3 SV=1
MTEPTNDQKRAVILLSGGLDSATVVAMAQAEGYSCYTMSFDYGQRHRAELNAAARVARDMGVVEHKVIGLNLNGIGGSALTDSSIDVPEAPGEGIPVTYVPARNTVFLSLALGWAEVLNARDIFIGVNAVDYSGYPDCRPEFVESFERMANLATKAGVEGQGFRILAPLQNLSKADIVKAGVGLGVDYSLTVSCYQADDDGRACGKCDSCRLRAEGFQAAGFTDPTRYF

SEQ ID NO: 41423 - protein, 224 aa, Pseudomonas nitroreducens
  REGION 1..224: note = tr|A0A246FD48|A0A246FD48_9PSED 7-cyano-7-deazaguanine synthase OS=Pseudomonas nitroreducens OX=46680 GN=queC PE=3 SV=1
MNGKKAVILLSGGLDSATVIAMAKADGYDCYTMSFDYGQRHRAELQAAERVARQLGVIEHKVIGLNLNGIGGSALTDTSIEVPEAPSEGIPVTYVPARNTVFLSLALGWAEVLGARDIFIGVNAVDYSGYPDCRPEFVEAFERMANLATKAGVEGDGFRIQAPLQFLSKAQIIEAGIAQGVDYSLTVSCYQADDDGRACGKCDSCRLRSEGFSAAGISDPTRYF

SEQ ID NO: 41424 - protein, 230 aa, Pseudomonas nitroreducens
  REGION 1..230: note = tr|A0A239BRH0|A0A239BRH0_9PSED 7-cyano-7-deazaguanine synthase OS=Pseudomonas nitroreducens OX=46680 GN=queC PE=3 SV=1
MSDKNAANDKKAVILLSGGLDSATVVAMAKAEGYACYTMSFDYGQRHRAELQAAERVARQLGVVEHKVIGLDLNGIGGSALTDSSIDVPQAPSEGIPVTYVPARNTVFLSLALGWAEVLGARDIFIGVNAVDYSGYPDCRPEFVEAFERMANLATKAGVEGDGFRIQAPLQFLSKAQIIEAGVARGVDYGLTVSCYQADDEGRACRKCDSCRLRSEGFSAAGISDPTRYF

SEQ ID NO: 41425 - protein, 231 aa, unidentified
  source 1..231: note = Pseudomonas oceani
  REGION 1..231: note = tr|A0A2P4EZ97|A0A2P4EZ97_9PSED 7-cyano-7-deazaguanine synthase OS=Pseudomonas oceani; OX = 1708783 GN=queC PE=3 SV=1
MSNANTVSDLPAAVVLLSGGLDSATVLAMAQAQGLRCYTMSFDYGQRHRAELQAAERVARAAEVIEHKVVGMNLNGIGGSALTDDSIAVPEGPQDGIPVTYVPARNTLFLSLALGWAEVLGAREIFIGVNAVDYSGYPDCRPEFVEAFERLANLATRAGVEGDGFRIRAPLQYMSKAEIVQAGVALGVDYSQTVSCYQADADGRACGRCDSCRLRAEGFSAAGLADPTRYR

SEQ ID NO: 41426 - protein, 105 aa, Pseudomonas oleovorans
  REGION 1..105: note = tr|A0A0F3GKG8|A0A0F3GKG8_PSEOL 7-cyano-7-deazaguanine synthase (Fragment) OS=Pseudomonas oleovorans OX=301 GN=N619_00350 PE=3 SV=1
IGVNAVDYSGYPDCRPEFVEAFERMANLATKAGVEGQGFAIRAPLQQMSKGEIIQAGMRLGVDYALTVSCYQADDDGRACGKCDSCRLRAAGFAAAGVPDATRYC

SEQ ID NO: 41427 - protein, 224 aa, Pseudomonas oleovorans
  REGION 1..224: note = tr|A0A3D9EFS2|A0A3D9EFS2_PSEOL 7-cyano-7-deazaguanine synthase OS=Pseudomonas oleovorans; OX = 301 GN=queC PE=3 SV=1
MSQPKAVILLSGGLDSATIVAMAKAQGFACYTMSFDYGQRHRAELQAAERVARQLGVVEHKVIGLDLNGIGGSALTDPDIAVPETPGEGIPVTYVPARNTVFLSLALGWAEVLGARHLFIGVNAVDYSGYPDCRPEFVEAFERLANLATKAGVEGDTFKIEAPLQFLSKAQIVQAGSQLGVDYALTVSCYQADDEGQACGRCDSCRLRAEGFKAAGISDPTRYQ

SEQ ID NO: 41428 - protein, 232 aa, Pseudomonas orientalis
  REGION 1..232: note = tr|A0A0R3A587|A0A0R3A587_9PSED 7-cyano-7-deazaguanine synthase OS=Pseudomonas orientalis; OX = 76758 GN=queC PE=3 SV=1
MSKKAVMVFSGGQDSTTCLIQALKQYDEVHCITFDYGQRHVAEIDVARTLAKQLGATVHKVMDVSLLNELAISSLTRDNIPVPTVNSSGESLPSTFVPGRNILFLTLAAIYAYQVKAESVITGVCETDFSGYPDCRDEFVKALNQALKLGMEYDVRLDTPLMWLNKAETWALADYYEQLKLVREQTLTCYNGVIGTGCGNCDACNLRARGLNEYLQNKADVMHSLKHKLQLT

SEQ ID NO: 41429 - protein, 232 aa, Pseudomonas orientalis
  REGION 1..232: note = tr|A0A3G7X4V9|A0A3G7X4V9_9PSED 7-cyano-7-deazaguanine synthase OS=Pseudomonas orientalis; OX = 76758 GN=queC PE=3 SV=1
MSKKAVMVFSGGQDSTTCLIQALKRYDEVHCITFDYGQRHVAEIDVARTLARQLGATVHKVMDVSLLNELAISSLTRDNIPVPTVNSSGESLPSTFVPGRNILFLTLAAIYAYQVKAESVITGVCETDFSGYPDCRDEFVKALNQALKLGMEYDVRLDTPLMWLNKAETWALADYYEQLELVREQTLTCYNGVIGTGCGNCDACNLRARGLNEYLQSKADVMHSLKHKLQLK

SEQ ID NO: 41430 - protein, 224 aa, unidentified
  source 1..224: note = Pseudomonas oryzae
  REGION 1..224: note = tr|A0A1H1UQC1|A0A1H1UQC1_9PSED 7-cyano-7-deazaguanine synthase OS=Pseudomonas oryzae; OX = 1392877 GN=queC PE=3 SV=1
MSDKKAVILLSGGLDSATVLAMARAEGYACYTMSFDYGQRHRAELQAAERVARQLGAVEHKVVGIDLNGIGGSALTDSSIAVPETPGEGIPVTYVPARNTLFLSLALGWAEVLGASDIFIGVNAVDYSGYPDCRPEFIDAFERLANLATRAGVEGEGFRIRAPLQYLSKAEIIRAGIDRGVDFALTVSCYQADGEGRACGRCDSCRLRAEGFRAAGVEDPTRYS

SEQ ID NO: 41431 - protein, 224 aa, Pseudomonas oryzihabitans
  REGION 1..224: note = tr|A0A2Z5AAK8|A0A2Z5AAK8_9PSED 7-cyano-7-deazaguanine synthase OS=Pseudomonas oryzihabitans OX=47885 GN=queC PE=3 SV=1
MNQPKAVILLSGGLDSATIVAMAKAQGFACYTMSFDYGQRHRAELQAAERVARQLGVVEHKVIGLDLNGIGGSALTDPDIAVPETPGEGIPVTYVPARNTVFLSLALGWAEVLGARHLFIGVNAVDYSGYPDCRPEFVEAFERLANLATKAGVEGDSFKIEAPLQFLSKAQIVQAGSQLGVDYGLTVSCYQADDEGKACGRCDSCRLRAEGFKAAGISDPTRYQ

SEQ ID NO: 41432 - protein, 224 aa, Pseudomonas oryzihabitans
  REGION 1..224: note = tr|A0A178LDZ0|A0A178LDZ0_9PSED 7-cyano-7-deazaguanine synthase OS=Pseudomonas oryzihabitans OX=47885 GN=queC PE=3 SV=1
MSQPKAVILLSGGLDSATIVAMAKAQGFACYTMSFDYGQRHRAELQAAERVARQLGVVEHKVIGLDLNGIGGSALTDPDIAVPETPGEGIPVTYVPARNTVFLSLALGWAEVIGARHLFIGVNAVDYSGYPDCRPEFVEAFERLANLATKAGVEGDTFRIEAPLQYLSKAQIVETGTRLGVDYGLTVSCYQANGEGEACGRCDSCRLRAEGFKAAKISDPTRYQ

SEQ ID NO: 41433 - protein, 224 aa, Pseudomonas otitidis
  REGION 1..224: note = tr|A0A1I0UKI9|A0A1I0UKI9_9PSED 7-cyano-7-deazaguanine synthase OS=Pseudomonas otitidis; OX = 319939 GN=queC PE=3 SV=1
MSDKKAVILLSGGLDSATVVALARADGYVCYTMSFDYGQRHRAELQAAERVARQLGVVEHKVIGLNLNGIGGSALTDDSIAVPESPTEGIPVTYVPARNTVFLSLALGWAEVLGARDIFIGVNAVDYSGYPDCRPEFVDAFERMANLATKAGVEGQGFRIQAPLQNLSKAEIIRAGIAQGVDYGLTVSCYQADDQGRACGKCDSCRLRAAGFAAAGVEDPTPYF

SEQ ID NO: 41434 - protein, 230 aa, Pseudomonas pachastrellae
  REGION 1..230: note = tr|A0A1S8DFX2|A0A1S8DFX2_9PSED 7-cyano-7-deazaguanine synthase OS=Pseudomonas pachastrellae OX=254161 GN=queC PE=3 SV=1
MSAKPDSSARAVVLLSGGLDSATVLAMAQAEGLACYTMSFDYGQRHRAELAAAERVASAAGVIEHKVIDMNLNGIGGSALTDDTIAVPEGPQQGIPVTYVPARNTLFLALALGWAEVLEARDIYIGVNAVDYSGYPDCRPAFVEAFERLANLATRAGVEGEGFRIRAPLQHLSKAQIIQAGQALGVDYSQTVSCYQADEQGRACGVCDSCRLRAAGFAAAGVPDATRYQR

SEQ ID NO: 41435 - protein, 232 aa, Pseudomonas palleroniana
  REGION 1..232: note = tr|A0A0X7K5M0|A0A0X7K5M0_9PSED 7-cyano-7-deazaguanine synthase OS=Pseudomonas palleroniana OX=191390 GN=queC PE=3 SV=1
MSKKAVVVFSGGQDSTTCLIQALTRYDEVHCITFDYGQRHVAEIEVAQQLAKQLGATVHKVMDVSLLGELAISSLTRDNIPVPTVNSSGESLPSTFVPGRNILFLTLASIYAYQVKAETVITGVCETDFSGYPDCRDEFVKALNKALELGMEYKLHLDTPLMWLNKAETWALADYHNQLELVRHQTLTCYNGIIGTGCGNCDACNLRARGLNDYLQNKAEVMQSLKQKLHLN

SEQ ID NO: 41436 - protein, 232 aa, Pseudomonas palleroniana
  REGION 1..232: note = tr|A0A1H5M167|A0A1H5M167_9PSED 7-cyano-7-deazaguanine synthase OS=Pseudomonas palleroniana OX=191390 GN=queC PE=3 SV=1
MSKKAVVVFSGGQDSTTCLIQALTRYDEVHCITFDYGQRHVAEIEVAQQLAKQLGATVHKVMDVSLLGELAISSLTRDNIPVPTVNSSGESLPSTFVPGRNILFLTLASIYAYQVKAETVITGVCETDFSGYPDCRDEFVKALNKALELGMEYKLHLDTPLMWLNKAETWALADYHNQLELVRHQTLTCYNGIIGTGCGNCDACNLRARGLNDYLQNKAEVMQSLKQKLQLN

SEQ ID NO: 41437 - protein, 229 aa, Pseudomonas panacis
  REGION 1..229: note = tr|A0A1H4IMW4|A0A1H4IMW4_PSEPA 7-cyano-7-deazaguanine synthase OS=Pseudomonas panacis; OX = 307251 GN=queC PE=3 SV=1
MTEQPIDQKRAVILLSGGLDSATVVAMAQAEGYTCYTMSFDYGQRHRAELNAAARVARDMGVAEHKVIGLNLNGIGGSALTDSSIDVPEAPSEGIPITYVPARNTVFLSLALGWAEVLNARDIFIGVNAVDYSGYPDCRPEFIESFERMANLATKAGVEGQGFRILAPLQNLSKADIVKAGVGLGVDYSLTVSCYQADDDGRACGKCDSCRLRAEGFKMAGITDPTRYF

SEQ ID NO: 41438 - protein, 224 aa, Pseudomonas panipatensis
  REGION 1..224: note = tr|A0A1G8GNP3|A0A1G8GNP3_9PSED 7-cyano-7-deazaguanine synthase OS=Pseudomonas panipatensis OX=428992 GN=queC PE=3 SV=1
MNEKKAVILLSGGLDSATVVAMAKAEGYACYTMSFDYGQRHRAELQAAERVARQLGVVEHKVIGLNLNGIGGSALTDSSIAVPEAPSAGIPVTYVPARNTVFLSLALGWAEVLGARDIFIGVNAVDYSGYPDCRPEFVEAFERMANLATKAGVEGDGFRIQAPLQFLSKAQIIEAGMARGVDYALTVSCYQADDQGQACGKCDSCRLRAEGFAAAGVQDPTRYF

SEQ ID NO: 41439 - protein, 224 aa, Pseudomonas parafulva
  REGION 1..224: note = tr|A0A0A7JQD1|A0A0A7JQD1_9PSED 7-cyano-7-deazaguanine synthase OS=Pseudomonas parafulva; OX = 157782 GN=queC PE=3 SV=1
MTDKRAVILLSGGLDSATVVAMAKADGYSCYTMSFDYGQRHRAELNAAARVARDQGVVEHKVIGLNLDGIGGSALTDSSIDVPEAPTEGIPVTYVPARNTVFLSLALGWAEVLQARDIFIGVNAVDYSGYPDCRPEFVEAFERMANLATKAGVEGQGFRIQAPLQNLSKAQIVQAGVARGVDYSLTVSCYQADDDGRACGKCDSCRLRAEGFKAAGVADPTRYF

SEQ ID NO: 41440 - protein, 224 aa, Pseudomonas parafulva
  REGION 1..224: note = tr|A0A147GFD8|A0A147GFD8_9PSED 7-cyano-7-deazaguanine synthase OS=Pseudomonas parafulva; OX = 157782 GN=queC PE=3 SV=1
MTDKRAVILLSGGLDSATVVAMAKAQGYACYTMSFDYGQRHRAELNAAARVAQDLGVVEHKVIGLNLDGIGGSALTDSSIDVPETPGEGIPVTYVPARNTVFLSLALGWAEVLQARDIFIGVNAVDYSGYPDCRPEFVEAFERMANLATKAGVEGQGFRIQAPLQNMSKAQIVQAGVAHGVDYSLTVSCYQADDDGRACGKCDSCRLRADGFKAASVADPTRYF

SEQ ID NO: 41441 - protein, 232 aa, unidentified
  source 1..232: note = Pseudomonas paralactis
  REGION 1..232: note = tr|A0A0R3A9T8|A0A0R3A9T8_9PSED 7-cyano-7-deazaguanine synthase OS=Pseudomonas paralactis; OX = 1615673 GN=queC PE=3 SV=1
MSKKAVMVFSGGQDSTTCLIQALKHYDEVHCITFDYGQRHVAEIEVARKLAKQLGATVHKVMDVSLLNELAISSLTRDNIPVPTVNSSGESLPSTFVPGRNILFLTLAAIYAYQVKAEAVITGVCETDFSGYPDCRDEFVKALNQALKLGMEYDVRLDTPLMWLNKAETWALADYHDQLELVREQTLTCYNGVIGTGCGNCDACNLRARGLNDYLQNKTHVMQSLKHKLQLK

SEQ ID NO: 41442 - protein, 240 aa, Pseudomonas pelagia
  REGION 1..240: note = tr|A0A2A4AWG2|A0A2A4AWG2_9PSED 7-cyano-7-deazaguanine synthase OS=Pseudomonas pelagia; OX = 553151 GN=queC PE=3 SV=1
MTSQDIDMTDAMKKKAVVLLSGGLDSATVLAMAQADGYSCYTLSFDYGQRHRAELDAAKRLAASAAVVEHKVIGLDLDGMGGSALTDDSLAVPESLQQGIPITYVPARNTVFLALALGWAEVLDAQDIFIGVNAVDYSGYPDCRPAFIEAFERVANLATKAGVEGVGFRILAPLQDMTKGEIVAEGTRLGIDYALTVSCYQADDLGRACGRCDSCRLRSAGFSAAGVADATVYQPSSNTV

SEQ ID NO: 41443 - protein, 224 aa, Pseudomonas peli
  REGION 1..224: note = tr|A0A1G4S817|A0A1G4S817_9PSED 7-cyano-7-deazaguanine synthase OS=Pseudomonas peli; OX = 592361 GN=queC PE=3 SV=1
MSDKKAVILLSGGLDSATVVALAKADGYSCYTMSFDYGQRHRSELQAAEQVARQLGVVEHKVIGLNLNGMGGSALTDSSIEVPESPTEGIPVTYVPARNTVFLSLALGWAEVLGARDIFIGVNAVDYSGYPDCRPEFVEAFERMANLATKAGVEGQGFRIQAPLQAMSKAEIVQAGVQQGVDYALTVSCYQADDQGRACGKCDSCRLRAAGFTAAGLVDPTRYF

SEQ ID NO: 41444 - protein, 224 aa, Pseudomonas plecoglossicida
  REGION 1..224: note = tr|A0A2R7UNE2|A0A2R7UNE2_9PSED 7-cyano-7-deazaguanine synthase OS=Pseudomonas plecoglossicida OX=70775 GN=queC PE=3 SV=1
MTEKRAVILLSGGLDSATVVAMAKAEGYSCYTMSFDYGQRHRAELNAAARVARNLSVVEHKVIGLNLDGIGGSALTDSSIDVPETPGEGIPVTYVPARNTVFLSLALGWAEVLEARDIFIGVNAVDYSGYPDCRPEFVEAFERMANLATKAGVEGQGFRIRAPLQNMSKAQIVQAGMARGVDYSLTVSCYQADDDGRACGKCDSCRLRADGFKAAGVEDPTRYF

SEQ ID NO: 41445 - protein, 224 aa, Pseudomonas plecoglossicida; identical to SEQ ID NO: 41412
  REGION 1..224: note = tr|A0A099N5F2|A0A099N5F2_9PSED 7-cyano-7-deazaguanine synthase OS=Pseudomonas plecoglossicida OX=70775 GN=queC PE=3 SV=1

SEQ ID NO: 41446 - protein, 229 aa, Pseudomonas poae
  REGION 1..229: note = tr|A0A2S9EYF1|A0A2S9EYF1_9PSED 7-cyano-7-deazaguanine synthase OS=Pseudomonas poae; OX = 200451 GN=queC PE=3 SV=1
MTEPTNDQKRAVILLSGGLDSATVVAMAQAEGYSCYTMSFDYGQRHRAELNAAARVARDMGVVEHKVIGLNLNGIGGSALTDSSIDVPETPGEGIPVTYVPARNTVFLSLALGWAEVLNARDIFIGVNAVDYSGYPDCRPEFVESFERMANLATKAGVEGQGFRILAPLQNLSKADIVKAGVGLGVDYSLTVSCYQADDDGRACGKCDSCRLRAEGFQAAGFTDPTRYF

SEQ ID NO: 41447 - protein, 229 aa, Pseudomonas poae
  REGION 1..229: note = tr|A0A3S9JTY4|A0A3S9JTY4_9PSED 7-cyano-7-deazaguanine synthase OS=Pseudomonas poae; OX = 200451 GN=queC PE=3 SV=1
MTEQTNDQKRAVILLSGGLDSATVVAMAQAEGYSCYTMSFDYGQRHRAELNAASRVARDMGVVEHKVIGLNLNGIGGSALTDSSIDVPETPGEGIPVTYVPARNTVFLSLALGWAEVLNARDIFIGVNAVDYSGYPDCRPEFVESFERMANLATKAGVEGQGFRILAPLQNLSKADIVKAGVGLGVDYSLTVSCYQADDDGRACGKCDSCRLRAEGFQAAGITDPTRYF

SEQ ID NO: 41448 - protein, 224 aa, Pseudomonas pohangensis
  REGION 1..224: note = tr|A0A1H2G3J8|A0A1H2G3J8_9PSED 7-cyano-7-deazaguanine synthase OS=Pseudomonas pohangensis; OX = 364197 GN=queC PE=3 SV=1
MNEKRAVILLSGGLDSATVVAMARADGFSCYSMSFDYGQRHRAELAAAEQIARQLGVIEHKVIGLNLNGIGGSALTDESIAVPETPGEGIPLTYVPARNTVFLALALGWAEVLQAQDIFIGVNAVDYSGYPDCRPEFISAFESMANLATRAGVEGPGFRIQAPLQYLSKAEIIQAGTRLGVDYGLTVSCYQADALGRACGRCDSCRLRAAGFAAAELADPTHYQ

SEQ ID NO: 41449 - protein, 230 aa, unidentified
  source 1..230: note = Pseudomonas prosekii
  REGION 1..230: note = tr|A0A3L8CR07|A0A3L8CR07_9PSED 7-cyano-7-deazaguanine synthase OS=Pseudomonas prosekii; OX = 1148509 GN=queC PE=3 SV=1
MTEQLNTTEKRAVILLSGGLDSATVVAMARAEGYSCYTMSFDYGQRSHAELHAAARVARDLGVVEHKVIGLNLDGMGGSALTDTNIDVPEEAGEGIPVTYVPARNTVFLSLALGWAEVLGARDIFIGVNAVDYSGYPDCRPEFIESFERMANLATKAGVEGNGFRIQAPLQNLSKAQIVQAGVKLGVDYGLTVSCYQADDKGYACGKCDSCRLRSEGFAAAGISDPTPYF

SEQ ID NO: 41450 - protein, 230 aa, unidentified
  source 1..230: note = Pseudomonas prosekii
  REGION 1..230: note = tr|A0A1H1ZYD3|A0A1H1ZYD3_9PSED 7-cyano-7-deazaguanine synthase OS=Pseudomonas prosekii; OX = 1148509 GN=queC PE=3 SV=1
MTEQLNTTEKRAVILLSGGLDSATVVAMARAEGYSCYTMSFDYGQRSHAELHAAARVARDLGVVEHKVIGLNLDGMGGSALTDTSIDVPEEAGEGIPVTYVPARNTVFLSLALGWAEVLGARDIFIGVNAVDYSGYPDCRPEFIESFERMANLATKAGVEGNGFRIQAPLQNLSKAQIVQAGVKLGVDYGLTVSCYQADDKGYACGKCDSCRLRSEGFAAAGISDPTPYF

SEQ ID NO: 41451 - protein, 224 aa, unidentified
  source 1..224: note = Pseudomonas protegens
  REGION 1..224: note = tr|A0A2J7U949|A0A2J7U949_9PSED 7-cyano-7-deazaguanine synthase OS=Pseudomonas protegens; OX = 380021 GN=queC PE=3 SV=1
MTEKRAVILLSGGLDSATVVAMARAEGYRCYTMSFDYGQRHRAELHAAERVARDLGVVEHKVIGLNLNGIGGSALTDSSIDVPETPGEGIPVTYVPARNTVFLSLALGWAEVLEARDIFIGVNAVDYSGYPDCRPEFVEAFERMANLATKAGVEGQGFRIQAPLQNLSKAEIIKAGVRLGVDYGLTVSCYQADDSGHACGKCDSCRLRAEGFNAAGISDPTPYF

SEQ ID NO: 41452 - protein, 233 aa, unidentified
  source 1..233: note = Pseudomonas protegens
  REGION 1..233: note = tr|A0A2T6GJ03|A0A2T6GJ03_9PSED 7-cyano-7-deazaguanine synthase OS=Pseudomonas protegens; OX = 380021 GN=queC PE=3 SV=1
MTEQAQNQSSTEKRAVILLSGGLDSATVVAMARAEGYRCYTMSFDYGQRHRAELHAAERVARDLGVVEHNVIGLNLNGIGGSALTDSSIDVPEAPGEGIPVTYVPARNTVFLSLALGWAEVLQARDIFIGVNAVDYSGYPDCRPEFVEAFERMANLATKAGVEGQGFRIQAPLQNLSKAEIIKAGVGLGVDYGLTVSCYQADDNGRACGKCDSCRLRAEGFDAAGVSDPTVYF

SEQ ID NO: 41453 - protein, 224 aa, Pseudomonas pseudoalcaligenes
  REGION 1..224: note = tr|W6QYS5|W6QYS5_PSEP5 7-cyano-7-deazaguanine synthase OS=Pseudomonas pseudoalcaligenes (strain CECT 5344) OX=1182590 GN=exsB PE=3 SV=1
MNDKKAVILLSGGLDSATVVAMAKAEGYSCYSMSFDYGQRHRAELQAAERVARQLGVVEHKVIGLNLNGIGGSALTDSSIAVPESPTEGIPATYVPARNTVFLALALGWAEVLGARDIFIGVNAVDYSGYPDCRPEFVDAFERMANLATRAGVEGQGFSIRAPLQQMSKGEIIQAGMRLGVDYALTVSCYRADDEGRACGKCDSCRLRAAGFAAAGVPDVTRYY

SEQ ID NO: 41454 - protein, 230 aa, Pseudomonas psychrophila
  REGION 1..230: note = tr|A0A3N2AAA1|A0A3N2AAA1_9PSED 7-cyano-7-deazaguanine synthase OS=Pseudomonas psychrophila OX=122355 GN=queC PE=3 SV=1
MTEHTAVTEKRAVILLSGGLDSATVVAMARAEGYRCYTMSFDYGQRHRAELDAAARVARDLGAVEHKVIGLNLDGIGGSALTDSSIDVPEAPSEGIPVTYVPARNTVFLSLALGWAEVLQARDIFIGVNAVDYSGYPDCRPEFVEAFEVMANLATKAGVEGEGFRIKAPLQNMSKAQIVQAGIKLGVDYSLTVSCYQADAQGQACGKCDSCRLRAEGFQAAGVSDPTRYF

SEQ ID NO: 41455 - protein, 230 aa, Pseudomonas psychrophila
  REGION 1..230: note = tr|S6I5Y4|S6I5Y4_9PSED 7-cyano-7-deazaguanine synthase OS=Pseudomonas psychrophila OX=122355 GN=queC; PE = 3 SV=1
MTEQTVVTEKRAVILLSGGLDSATVVAMARAEGYSCYTMSFDYGQRHRAELDAAARVARDLGAVEHKVIGLNLDGIGGSALTDSSIDVPEAPSEGIPVTYVPARNTVFLSLALGWAEVLQARDIFIGVNAVDYSGYPDCRPEFVEAFEVMANLATKAGVEGQGFRIQAPLQNMSKAQIVQAGTKLGVDYALTVSCYQADAQGRACGKCDSCRLRAEGFAAAGISDPTRYF

SEQ ID NO: 41456 - protein, 224 aa, Pseudomonas psychrotolerans
  REGION 1..224: note = tr|A0A147H635|A0A147H635_9PSED 7-cyano-7-deazaguanine synthase OS=Pseudomonas psychrotolerans OX=237610 GN=queC PE=3 SV=1
MSQPKAVILLSGGLDSATVVAMAKAQGFACYTMSFDYGQRHRAELQAAVRVARQLGVIEHKVIGLDLNGIGGSALTDLDIAVPETPGEGIPVTYVPARNTVFLSLALGWAEVLGARHLFIGVNAVDYSGYPDCRPEFVEAFERLANLATKAGVEGDTFKIEAPLQFMSKAQIVETGTQLGVDYGLTVSCYQANAEGAACGRCDSCRLRAEGFKAAGISDPTRYH

SEQ ID NO: 41457 - protein, 233 aa, Pseudomonas psychrotolerans
  REGION 1..233: note = tr|A0A4Y5W354|A0A4Y5W354_9PSED 7-cyano-7-deazaguanine synthase OS=Pseudomonas psychrotolerans OX=237610 GN=queC PE=3 SV=1
MERRAGTLSMSQPKAVILLSGGLDSATVVALAKAQGFACYTMSFDYGQRHRAELQAAVRVARQLGVIEHKVIGLDLNGIGGSALTDLDIAVPETPGEGIPVTYVPARNTVFLSLALGWAEVLGARHLFIGVNAVDYSGYPDCRPEFVEAFERLANLATKAGVEGDTFKIEAPLQFMSKAQIVETGTQLGVDYGLTVSCYQANAEGEACGRCDSCRLRAEGFKAAGISDPTRYQ

SEQ ID NO: 41458 - protein, 224 aa, unidentified
  source 1..224: note = Pseudomonas punonensis
  REGION 1..224: note = tr|A0A1M7G1A8|A0A1M7G1A8_9PSED 7-cyano-7-deazaguanine synthase OS=Pseudomonas punonensis; OX = 1220495 GN=queC PE=3 SV=1
MSEKKAVILLSGGLDSATVVAMAKEQGYSCYSMSFDYGQRHRSELQAAERVARQLGVVEHKVIGMNLGGIGGSALTDDSIDVPQAPTTGIPVTYVPARNTVFLSLALGWAEVLGAQDIFIGVNAVDYSGYPDCRPEFVEAFERMANLATKMGVEGQSLRIQAPLQMMSKAEIVQAGSRLGVDYGLTVSCYLADADGRACGKCDSCRLRAAGFAAAGMADPTRYQ

SEQ ID NO: 41459 - protein, 224 aa, Pseudomonas putida
  REGION 1..224: note = sp|Q88NI3|QUEC_PSEPK 7-cyano-7-deazaguanine synthase; OS = Pseudomonas putida (strain ATCC 47054 / DSM 6125 / NCIMB 11950 / KT2440) OX=160488 GN=queC PE=3 SV=1
MTEKRAVILLSGGLDSATVVAMAKAEGYSCYTMSFDYGQRHRAELNAAARVARDLGVVEHKVIGLNLDGIGGSALTDSSIDVPEAPGEGIPVTYVPARNTVFLSLALGWAEVLEARDIFIGVNAVDYSGYPDCRPEFVEAFERMANLATKAGVEGQGFRIQAPLQNMSKAQIVQAGMARGVDYSLTVSCYQADDDGRACGKCDSCRLRADGFKAAGIEDPTRYF

SEQ ID NO: 41460 - protein, 224 aa, Pseudomonas putida
  REGION 1..224: note = sp|B1JD61|QUEC_PSEPW 7-cyano-7-deazaguanine synthase; OS = Pseudomonas putida (strain W619) OX=390235 GN=queC PE=3; SV = 1
MTEKRAVILLSGGLDSATVVAMAKAEGYSCYTMSFDYGQRHRAELNAAARVARDLGVVEHKVIGLNLDGIGGSALTDSSIDVPETPGEGIPVTYVPARNTVFLSLALGWAEVLQARDIFIGVNAVDYSGYPDCRPEFVEAFERMANLATKAGVEGQGFRIQAPLQNMSKAQIVQAGMARGVDYSLTVSCYQADDEGRACGKCDSCRLRADGFKAAGVEDPTRYF

SEQ ID NO: 41461 - protein, 225 aa, unidentified
  source 1..225: note = Pseudomonas reidholzensis
  REGION 1..225: note = tr|A0A383RX06|A0A383RX06_9PSED 7-cyano-7-deazaguanine synthase OS=Pseudomonas reidholzensis OX=1785162 GN=queC PE=3 SV=1
MTDKRAVILLSGGLDSATVVAMAKADGYSCYTMSFDYGQRHRAELDAAARVARDLGVVEHKVIGLNLDGIGGSALTDSSIDVPEAPSEGIPVTYVPARNTVFLSLALGWAEVLEARDIFIGVNAVDYSGYPDCRPEFVEAFERMANLATKAGVEGQGFRIQAPLQNMSKAQIVQAGMARGVDYSLTVSCYQADDQGQACRKCDSCRLRAEGFKAAGVEDPTRYFS

SEQ ID NO: 41462 - protein, 230 aa, Pseudomonas reinekei
  REGION 1..230: note = tr|A0A1H0S4H6|A0A1H0S4H6_9PSED 7-cyano-7-deazaguanine synthase OS=Pseudomonas reinekei; OX = 395598 GN=queC PE=3 SV=1
MTEQLNTTDKRAVILLSGGLDSATVVAMARAEGYSCYTMSFDYGQRSHAELYAAERVARDLGVVEHKVIGLNFNGMGGSALTDSSIDIPEELGEGIPVTYVPARNTVFLSLALGWAEVLGARDIFIGVNAVDYSGYPDCRPEFIESFERMANLATKAGVEGNGFRIQAPLQNLSKAQIVQAGTKLGVNYGLTVSCYQADDDGRACGKCDSCRLRAEGFAAAGISDPTPYF

SEQ ID NO: 41463 - protein, 224 aa, Pseudomonas resinovorans
  REGION 1..224: note = tr|S6AV98|S6AV98_PSERE 7-cyano-7-deazaguanine synthase OS=Pseudomonas resinovorans NBRC 106553; OX = 1245471 GN=queC PE=3 SV=1
MSEKKAVILLSGGLDSATVVALARAEGYACYTMSFDYGQRHRAELQAAERVARQLGAVAHKVIGLNLNGIGGSALTDTSIDVPESPTEGIPVTYVPARNTVFLSLALGWAEVLGARDIFIGVNAVDYSGYPDCRPEFVDAFERMANLATKAGVEGQGFRIQAPLQNLSKAEIVQAGMRHGVDYALTVSCYQADDEGRACGKCDSCRLRAAGFAAAGMKDPTRYQ

SEQ ID NO: 41464 - protein, 229 aa, Pseudomonas rhizosphaerae
  REGION 1..229: note = tr|A0A089ZQ10|A0A089ZQ10_9PSED 7-cyano-7-deazaguanine synthase OS=Pseudomonas rhizosphaerae OX=216142 GN=queC PE=3 SV=1
MNHTIEQQKKAVILLSGGLDSATVVAMAKDQGYACYTMSFDYGQRHRAELNAAARVARDLGVVQHKVIGLNLDGMGGSALTDTSIDVPETLGEGIPVTYVPARNTVFLSLALGWAEVLEARDIFIGVNAVDYSGYPDCRPEFIEAFERLANLATKAGVEGNGFTIQAPLQNMSKAEIVKAGVELGVDYGLTVSCYQANDEGQACGKCDSCRLRAEGFTAAGVSDPTRYF

SEQ ID NO: 41465 - protein, 201 aa, Pseudomonas rhodesiae
  REGION 1..201: note = tr|A0A5C5NB80|A0A5C5NB80_9PSED 7-cyano-7-deazaguanine synthase OS=Pseudomonas rhodesiae; OX = 76760 GN=FIV35_25570 PE=3 SV=1
MKTGLLLSGGMDSLTIAWWKRPDIAFTLNYGQLAAQAEIEASRTICQLLEIPHHVIEIDCRQLGSGDMAGSQANSLAPASDWWPYRNQMLVTLAAMKAISFGVTHLWLGTVKSDGFHRDGSPEFMSAISHLLSLQEGGMVVEAPAIEFSTAELVRKSGIPASLLAWAHSCHKSHFACGNCRGCNKYMEVFQEVGYDLDRLG

SEQ ID NO: 41466 - protein, 232 aa, Pseudomonas rhodesiae
  REGION 1..232: note = tr|A0A5C5NUF2|A0A5C5NUF2_9PSED 7-cyano-7-deazaguanine synthase OS=Pseudomonas rhodesiae; OX = 76760 GN=queC PE=3 SV=1
MSKKAVMVFSGGQDSTTCLIQALALYDEVHCITFDYGQRHVAEIEVARQLAKQLGATVHKVMDVSLLNELAISSLTRDNIPVPTVNSSGESLPSTFVPGRNILFLTLAAIYAYQVKAETVITGVCETDFSGYPDCRDEFVKALNQALKLGMEYDVRLDTPLMWLNKAETWALADYHHQLDLVREHTLTCYNGVIGTGCGECDACNLRARGLNEYLQNKAQVMHSLKHKLQLN

SEQ ID NO: 41467 - protein, 228 aa, Pseudomonas sabulinigri
  REGION 1..228: note = tr|A0A1H1XJ59|A0A1H1XJ59_9PSED 7-cyano-7-deazaguanine synthase OS=Pseudomonas sabulinigri; OX = 472181 GN=queC PE=3 SV=1
MNPSPSRGKAVVLLSGGLDSATVLALAQAEGYQCYSMSFDYGQRHRAELDAAKALARAAGVVEHKVIGLDLDGMGGSALTDSTLAVPEQPQPGIPVTYVPARNTVFLALALGWAEVLDAQDIYIGVNAVDYSGYPDCRPEFVSAFEQLANLATRAGVEGRPFRIQAPLQHLSKAQIVQAGSRLGVDYALTVSCYQADDHGQACGCCDSCRLRAEGFAAANMPDPTRYR

SEQ ID NO: 41468 - protein, 224 aa, unidentified
  source 1..224: note = Pseudomonas sagittaria
  REGION 1..224: note = tr|A0A1I5VC81|A0A1I5VC81_9PSED 7-cyano-7-deazaguanine synthase OS=Pseudomonas sagittaria; OX = 1135990 GN=queC PE=3 SV=1
MTDKKAVILLSGGLDSATVLAMARAEGYACYTMSFDYGQRHRAELQAAERVARQLGAREHKVVGIDLNGIGGSALTDSSIAVPEEASEGIPVTYVPARNTLFLSLALGWAEVLGARDIFIGVNAVDYSGYPDCRPEFIEAFERLANLATKAGVEGEGFRIQAPLQYLSKAQIIEAGLARGVDFALTVSCYQADADGRACGRCDSCRLRAEGFHAAGIADPTRYV

SEQ ID NO: 41469 - protein, 233 aa, unidentified
  source 1..233: note = Pseudomonas salegens
  REGION 1..233: note = tr|A0A1H2G202|A0A1H2G202_9PSED 7-cyano-7-deazaguanine synthase OS=Pseudomonas salegens; OX = 1434072 GN=queC PE=3 SV=1
MTSRGIEMTDQKKAVVLLSGGLDSATVLAMAQAQGYICYSMSFDYGQRHRAELVAAEQIARHAGVVEHKVIGLDLNGMGGSALTDSSIAVPETPQEGIPVTYVPARNTVFLSLALGWAEVLGAQDIFIGVNAVDYSGYPDCRPDFIQAFEQVANLATRAGVEGTPFRIQTPLQMLSKADIIIAGINHGVDYSLTVSCYQADAAGRACGRCDSCRLRSQGFAQAGVADPTRYQH

SEQ ID NO: 41470 - protein, 225 aa, Pseudomonas salomonii
  REGION 1..225: note = tr|A0A3M4QDV5|A0A3M4QDV5_9PSED 7-cyano-7-deazaguanine synthase OS=Pseudomonas salomonii; OX = 191391 GN=queC PE=3 SV=1
MTEQKRAVILLSGGLDSATLVAMVRAQGYSCYTLSFDYGQRHRAELHAAERVARDLGVVEHKVIGLNLNGIGGSALTDSSIDVPEAPSEGIPLTYVPARNTVLLSLALGWAEVLKARDIFIGVNALDYNGYPDCRPEYVEAFERMANLATKAGVEGQGLRIQAPLQNMSKADIVKAGVGLGVDYALTVSCYQADDSGRACGKCDACRLRAEGFKNAAIADPTRYF

SEQ ID NO: 41471 - protein, 233 aa, Pseudomonas salomonii
  REGION 1..233: note = tr|A0A1H3U330|A0A1H3U330_9PSED 7-cyano-7-deazaguanine synthase OS=Pseudomonas salomonii; OX = 191391 GN=queC PE=3 SV=1
MHTKALVLFSGGQDSTTCLAWALERYEHVETIGFDYGQRHRIELECRLNILQEIRNRFPNWAQRLGEDHVLDLKLLGQISDTAMTAEKTIEFEENGLPNTFVPGRNLLFLTFAATIAYRRGLTVLVGGMCETDYSGYPDCRDNALKATQVALSLGMDAPVIIETPLMWLNKAQTWRLAEDLGSQDFVKLIQEESHTCYLGTRQQKHEWGYGCGTCPACELRKTGYEQYIQERD

SEQ ID NO: 41472 - protein, 239 aa, Pseudomonas saponiphila
  REGION 1..239: note = tr|A0A1H4KGS1|A0A1H4KGS1_9PSED 7-cyano-7-deazaguanine synthase OS=Pseudomonas saponiphila; OX = 556534 GN=queC PE=3 SV=1
MSRGAEMTEQAQNQSSTEKRAVILLSGGLDSATVVAMARAEGYRCYTMSFDYGQRHRAELHAAERVARDLGVVEHKVIGLNLNGIGGSALTDSSIDVPEAPGEGIPVTYVPARNTVFLSLALGWAEVLQARDIFIGVNAVDYSGYPDCRPEFVEAFERMANLATKAGVEGQGFRIQAPLQNLSKAEIIKAGMGLGVDYGLTVSCYQADDHGRACGKCDSCRLRAEGFDAAGVSDPTAYF

SEQ ID NO: 41473 - protein, 233 aa, unidentified
  source 1..233: note = Pseudomonas saudimassiliensis
  REGION 1..233: note = tr|A0A078M0G2|A0A078M0G2_9PSED 7-cyano-7-deazaguanine synthase OS=Pseudomonas saudimassiliensis OX=1461581 GN=queC PE=3 SV=1
MNALLICSGGFDSVTLAYRLAAQQSLGALLTFDYGQRHRKEIDAARRCAERLAVPHLVLDIGHIGRQLSGSALTDDIAVPHGHYTEENMKVTVVPNRNAIMLTIAFGVAAARSLDTVALAVHGGDHFIYPDCRPDFIRLFGEMQAKALEGVAEVALLAPYVDTDKTEIARDAARFAVPVADTWSCYEGGELHCGRCGTCVERIEAMALAGVTDTTAYQDDQYWRDAVARVSSN

SEQ ID NO: 41474 - protein, 224 aa, unidentified
  source 1..224: note = Pseudomonas saudiphocaensis
  REGION 1..224: note = tr|A0A078LRE8|A0A078LRE8_9PSED 7-cyano-7-deazaguanine synthase OS=Pseudomonas saudiphocaensis OX=1499686 GN=exsB PE=3 SV=1
MTEKKAVILLSGGLDSATVVAMAKAQGYACYSMSFDYGQRHRAELHAAERVAKQLGVVEHKVIGMNLNGIGGSALTDSSMDVPEEQVEGIPVTYVPARNTLFLSLALGWAEVLGARDIFIGVNAVDYSGYPDCRPEFVEAFERLANLATKAGVQGQGFRIRAPLQDLSKAQIIQEGIRLGVDYAMTVSCYQADDLGRACGKCDSCRLRAAGFEAAGIEDPTRYH

SEQ ID NO: 41475 - protein, 224 aa, unidentified
  source 1..224: note = Pseudomonas saudiphocaensis
  REGION 1..224: note = tr|A0A3R9B0Z1|A0A3R9B0Z1_9PSED 7-cyano-7-deazaguanine synthase OS=Pseudomonas saudiphocaensis OX=1499686 GN=queC PE=3 SV=1
MTEKKAVILLSGGLDSATVVAMAKAQGYACYSMSFDYGQRHRAELHAAERVAKQLGVVEHKVIGMNLNGIGGSALTDSSMDVPEEQVEGIPVTYVPARNTLFLSLALGWAEVLGARDIFIGVNAVDYSGYPDCRPEFVEAFERLANLATKAGVEGQGFRIRAPLQDLSKAQIIQEGVRLGVDYAMTVSCYQADDLGRACGKCDSCRLRAAGFEAAGIEDPTRYH

SEQ ID NO: 41476 - protein, 229 aa, Pseudomonas savastanoi
  REGION 1..229: note = tr|A0A3M4RGP0|A0A3M4RGP0_PSESG 7-cyano-7-deazaguanine synthase OS=Pseudomonas savastanoi pv. glycinea OX=318 GN=queC PE=3 SV=1
MSESTMTEKRAVILLSGGLDSATVVAMAREQGYACYTMSFDYGQRHRAELDAAARVARDLGVIEHKVIGLNLNGIGGSALTDDSIAVPETPGEGIPVTYVPARNTVFLSLALGWAEVLGARDIFIGVNAVDYSGYPDCRPEFIESFERMANLATKAGVEGQGFTIQAPLQNLSKADIVKAGVRLGVDYGLTVSCYQADDQGRACRKCDSCRLRAEGFAAAGISDPTRYF

SEQ ID NO: 41477 - protein, 229 aa, Pseudomonas savastanoi
  REGION 1..229: note = sp|Q48FD4|QUEC_PSE14 7-cyano-7-deazaguanine synthase; OS = Pseudomonas savastanoi pv. phaseolicola (strain 1448A / Race 6) OX=264730 GN=queC PE=3 SV=1
MSELTNTEKRAVILLSGGLDSATVVAMARAEGYACYTMSFDYGQRHRAELDAAARVARDLGAVEHKVIGLNLNGIGGSALTDSSIAVPESPSEGIPITYVPARNTVFLSLALGWAEVLGARDIFIGVNAVDYSGYPDCRPEFVESFERMANLATKAGVEGQGFTIRAPLQNLSKSDIVKAGAALGVDYSLTVSCYQADDQGRACGKCDSCRLRTEGFTAAGMADPTRYF

SEQ ID NO: 41478 - protein, 224 aa, Pseudomonas segetis
  REGION 1..224: note = tr|A0A238ZPP3|A0A238ZPP3_9PSED 7-cyano-7-deazaguanine synthase OS=Pseudomonas segetis; OX = 298908 GN=queC PE=3 SV=1
MSIKRAVILLSGGLDSATVVALAKAEGYACYTMSFDYGQRHRSELQAAERVAQQLGVVEHKVIGLNLNGMGGSALTDSSIDVPEAPSEGIPVTYVPARNTVFLSLALGWAEVLGARDIFIGVNAVDYSGYPDCRPEFVEAFERMANLATKAGVEGNGFRIQAPLQNMSKAQIVQAGVAQGVDYALTVSCYQADDQGRACGKCDSCRLRSEGFAAAGIADPTPYA

SEQ ID NO: 41479 - protein, 231 aa, Pseudomonas seleniipraecipitans
  REGION 1..231: note = tr|A0A1G7H7W1|A0A1G7H7W1_9PSED 7-cyano-7-deazaguanine synthase OS=Pseudomonas seleniipraecipitans OX=640205 GN=queC PE=3 SV=1
MSEKKAVILLSGGLDSATVVAMAKEQGYTCYSMSFDYGQRHRSELQAAERVARQLGVVEHKVIGMNLGGIGGSALTDSSIDVPQSPTTGIPVTYVPARNTVFLALALGWAEVLEAQDIFIGVNAVDYSGYPDCRPEFVEAFERVANLATRMGVEGQSIRIQAPLQMMSKAEIVQAGSRLGVDYALTVSCYLADDDGRACGRCDSCRLRSAGFAAAGVSDPTRYQEKFSSGC

SEQ ID NO: 41480 - protein, 224 aa, unidentified
  source 1..224: note = Pseudomonas sihuiensis
  REGION 1..224: note = tr|A0A1H2L526|A0A1H2L526_9PSED 7-cyano-7-deazaguanine synthase OS=Pseudomonas sihuiensis; OX = 1274359 GN=queC PE=3 SV=1
MNDKKAVILLSGGLDSATVVAMAKAEGYACYSMSFDYGQRHRAELQAAERVARQLGVVEHKVIGLNLNGIGGSALTDSSIAVPESPTEGIPATYVPARNTVFLALALGWAEVLGARDIFIGVNAVDYSGYPDCRPEFVEAFERMANLATKAGVERQGFVIRAPLQQMSKGEIIQAGMRLGVDYALTVSCYQADDDGRACGKCDSCRLRAAGFVAAGVPDATRYF

SEQ ID NO: 41481 - protein, 231 aa, unidentified
  source 1..231: note = Pseudomonas silesiensis
  REGION 1..231: note = tr|A0A191YMG0|A0A191YMG0_9PSED 7-cyano-7-deazaguanine synthase OS=Pseudomonas silesiensis; OX = 1853130 GN=queC PE=3 SV=1
MTKKAVIVFSGGQDSTTCLIHALPMYDEIHCITFDYGQRHRAEIEVAQQLCKKLGVVVHKVLDTSLLNELAISSLTRDSIPVPSANSAGDTLPSTFVPGRNILFLTLASIYAYQVGAETVITGVCETECSGYPDCRDEFVNTLNKAIKLGMDYTLRIDTPLMWLNKAETWALADYHQQLDLIRYHTLSCYNGIKGSGCSNCDACKLRAKGLNEFLKNRTEIMKGLKIKLEL

SEQ ID NO: 41482 - protein, 230 aa, unidentified
  source 1..230: note = Pseudomonas silesiensis
  REGION 1..230: note = tr|A0A191YYS9|A0A191YYS9_9PSED 7-cyano-7-deazaguanine synthase OS=Pseudomonas silesiensis; OX = 1853130 GN=queC PE=3 SV=1
MTEQLNTTEKRAVILLSGGLDSATVVAMARAEGYSCYTMSFDYGQRSHAELYAAERVARDLGVVEHKVIGLNLNGIGGSALTDSSIDVPEVAGEGIPVTYVPARNTVFLSLALGWAEVLGARDIFIGVNAVDYSGYPDCRPEFIESFERMANLATKAGVEGNGFRIQAPLQNLSKAQIVKAGVKLGVDYGLTVSCYQADDNGRACGKCDSCRLRAEGFAAAGISDPTPYF

SEQ ID NO: 41483 - protein, 224 aa, Pseudomonas simiae
  REGION 1..224: note = tr|A0A1N7UMM5|A0A1N7UMM5_9PSED 7-cyano-7-deazaguanine synthase OS=Pseudomonas simiae; OX = 321846 GN=queC PE=3 SV=1
MDQKRAVILLSGGLDSATVVAMAQAQGYSCYTMSFDYGQRHRAELNAAARVAREMGVVEHKVIGLNLNGIGGSALTDSSIDVPETPGEGIPVTYVPARNTVFLSLALGWAEVLNARDIFIGVNAVDYSGYPDCRPEFVESFERMANLATKAGVEGQGFRILAPLQNLSKADIVKAGVGLGVDYSLTVSCYQADDDGRACGKCDSCRLRAEGFQAAGITDPTRYF

SEQ ID NO: 41484 - protein, 229 aa, Pseudomonas simiae
  REGION 1..229: note = tr|U1T8P9|U1T8P9_9PSED 7-cyano-7-deazaguanine synthase OS=Pseudomonas simiae OX=321846 GN=queC PE=3 SV=1
MTEQTLDQKRAVILLSGGLDSATVVAMAQAQGYSCYTMSFDYGQRHRAELNAAARVAREMGVVEHKVIGLNLNGIGGSALTDSSIDVPETPGEGIPVTYVPARNTVFLSLALGWAEVLNARDIFIGVNAVDYSGYPDCRPEFVESFERMANLATKAGVEGQGFRILAPLQNLSKADIVKAGVGLGVDYSLTVSCYQADDDGRACGKCDSCRLRAEGFQAAGITDPTRYF

SEQ ID NO: 41485 - protein, 224 aa, unidentified; identical to SEQ ID NO: 41418
  source 1..224: note = Pseudomonas soli
  REGION 1..224: note = tr|A0A1H9A7M6|A0A1H9A7M6_9PSED 7-cyano-7-deazaguanine synthase OS=Pseudomonas soli; OX = 1306993 GN=queC PE=3 SV=1

SEQ ID NO: 41486 - protein, 224 aa, unidentified
  source 1..224: note = Pseudomonas songnenensis
  REGION 1..224: note = tr|A0A482U5H0|A0A482U5H0_9PSED 7-cyano-7-deazaguanine synthase OS=Pseudomonas songnenensis OX=1176259 GN=queC PE=3 SV=1
MSEQKAVILLSGGLDSATVVAMARDQGYACYTMSFDYGQRHRAELQAAERVAAQLGVVEHKVIGLNLNGIGGSALTDERIDVPEVVGEGIPVTYVPARNTVFLALALGWAEVLGARDIFIGVNAVDYSGYPDCRPEFVAAFEHMANLATKAGVEGQGFRIQAPLQQLSKAKIVQEGIRLGVDYAMTVSCYQADADGRACGKCDSCRLRAAGFAEAGVTDPTRYF

SEQ ID NO: 41487 - protein, 230 aa, Pseudomonas sp.
  REGION 1..230: note = tr|A0A2S9BCX4|A0A2S9BCX4_9PSED 7-cyano-7-deazaguanine synthase OS=Pseudomonas sp. MYb3; OX = 1848735 GN=queC PE=3 SV=1
MTEQLNTNEKRAVILLSGGLDSATVVAMARAEGYACYTMSFDYGQRSHAELHAAARVARDLGVVEHKVIGLNLNGMGGSALTDTSIDIPEELGEGIPVTYVPARNTVFLSLALGWAEVLGARDIFIGVNAVDYSGYPDCRPEFIESFERMANLATKAGVEGNGFRIQAPLQNLSKAQIVQAGVKLGVDYGLTVSCYQADDDGRACAKCDSCRLRAEGFAAAGVEDPTPYF

SEQ ID NO: 41488 - protein, 232 aa, Pseudomonas sp.
  REGION 1..232: note = tr|A0A3G8D7D1|A0A3G8D7D1_9PSED 7-cyano-7-deazaguanine synthase OS=Pseudomonas sp. LBUM920; OX = 2126069 GN=queC PE=3 SV=1
MSKKAVIVFSGGQDSTTCLIQALPLYDEVHCITFDYGQRHVAEIEVAQKLAKQLGATVHKVMDVSLLNELAISSLTRDNIPVPTVNSSGDSLPSTFVPGRNILFLTLASIYAYQVKAQTVITGVCETDFSGYPDCRDEFVKALNKALELGMEYTLRLDTPLMWLNKAETWALADYHNQLDLVQHQTLTCYNGVLGSGCGNCDACNLRARGLNDYLQNKADVMHSLKQKLQLN

SEQ ID NO: 41489 - protein, 230 aa, Pseudomonas straminea
  REGION 1..230: note = tr|A0A1I1UF38|A0A1I1UF38_PSEOC 7-cyano-7-deazaguanine synthase OS=Pseudomonas straminea; OX = 47882 GN=queC PE=3 SV=1
MSRGIDMSDKKAVILLSGGLDSATVVAMAREQGYSCYSMSFDYGQRHRSELQAAERVARQLGVVEHKVIGINLDGIGGSALTDASIEVPQSPTTGIPVTYVPARNTVFLSLALGWAEVLEAQDIFIGVNAVDYSGYPDCRPEFVSAFEHMANLATKMGVEGRRVRIQAPLQMLSKAEIVQAGSRLGVDYGLTVSCYLADVDGRACGKCDSCRLRAAGFVAAGMPDPTRYQ

SEQ ID NO: 41490 - protein, 224 aa, Pseudomonas stutzeri
  REGION 1..224: note = sp|A4VN94|QUEC_PSEU5 7-cyano-7-deazaguanine synthase; OS = Pseudomonas stutzeri (strain A1501) OX=379731 GN=queC; PE = 3 SV=2
MNEKKAVILLSGGLDSATVVAMARDEGYACYTMSFDYGQRHRAELQAAERVAKQLAVVEHKVIGLNLNGIGGSALTDTSIDVPEAPSEGIPVTYVPARNTVFLSLALGWAEVLGARDIFIGVNAVDYSGYPDCRPEFVAAFERMANLATKAGVEGQGFRIQAPLQNLSKAQIVRKGSRLGVDYAMTVSCYQADDDGRACGKCDSCRLRSAGFAEAGLADPTRYF

SEQ ID NO: 41491 - protein, 224 aa, Pseudomonas stutzeri
  REGION 1..224: note = tr|I4JI25|I4JI25_PSEST 7-cyano-7-deazaguanine synthase OS=Pseudomonas stutzeri TS44 OX=477228 GN=queC; PE = 3 SV=1
MSEKKAVILLSGGLDSATVVAIARDQGYSCYTMSFDYGQRHRAELQAAERVARQLGVVEHKVIGLTLDGIGGSALTDSRIGVPETPGEGIPVTYVPARNTVFLSLALGWAEVLDARDIFIGVNAIDYSGYPDCRPEFVEAFERLANLATKAGVEGQGFHIRAPLQQLSKAQIVREGGRLGVDYAMTVSCYQADDDGRACGKCDSCRLRAAGFAEAGIADPTRYQ

SEQ ID NO: 41492 - protein, 232 aa, Pseudomonas synxantha
  REGION 1..232: note = tr|A0A0E3GYG3|A0A0E3GYG3_9PSED 7-cyano-7-deazaguanine synthase OS=Pseudomonas synxantha; OX = 47883 GN=queC PE=3 SV=1
MSKKAVMVFSGGQDSTTCLIQALPLYDEVHCITFDYGQRHVAEIEVARTLAKQLGATVHKVMDVSLLNELAISSLTRDNIPVPTVNSSGESLPSTFVPGRNILFLTLASIYAYQVKAEAVITGVCETDFSGYPDCRDEFVKALNKALELGMEYKLRLDTPLMWLNKAETWALADYHDQLELVREQTLTCYNGIIGTGCGNCDACNLRARGLNEYLQNKADVMHSLKHKLQLK

SEQ ID NO: 41493 - protein, 232 aa, Pseudomonas synxantha
  REGION 1..232: note = tr|A0A3G7UD78|A0A3G7UD78_9PSED 7-cyano-7-deazaguanine synthase OS=Pseudomonas synxantha; OX = 47883 GN=queC PE=3 SV=1
MSKKAVMVFSGGQDSTTCLIQALPLYDEVHCITFDYGQRHVAEIEVARKLAKQLGATVHKVMDVSLLNELAISSLTRDNIPVPTVSSSGESLPSTFVPGRNILFLTLASIYAYQVKAEAVITGVCETDFSGYPDCRDEFVKALNQALKLGMEYDVRLDTPLMWLNKAETWALADYHDQLELVREQTLTCYNGVIGTGCGNCDACNLRARGLNEYLQNKADVMQSLKHKLQLK

SEQ ID NO: 41494 - protein, 226 aa, Pseudomonas syringae
  REGION 1..226: note = sp|Q87Y44|QUEC_PSESM 7-cyano-7-deazaguanine synthase; OS = Pseudomonas syringae pv. tomato (strain ATCC BAA-871 / DC3000) OX=223283 GN=queC PE=3 SV=1
MTNTEKRAVILLSGGLDSATVVAMARAEGYACYTMSFDYGQRHRAELDAAARVARDLGAVEHKVIGLNLSGIGGSALTDSSIAVPESPSEGIPVTYVPARNTVFLSLALGWAEVLGARDIFIGVNAVDYSGYPDCRPEFVESFERMANLATKAGVEGQGFTIRAPLQNLSKSDIVKAGIALGVDYALTVSCYQADDQGRACGKCDSCRLRAEGFTASGMSDPTRYF

SEQ ID NO: 41495 - protein, 251 aa, Pseudomonas syringae
  REGION 1..251: note = tr|A0A3M5U2U2|A0A3M5U2U2_9PSED 7-cyano-7-deazaguanine synthase OS=Pseudomonas syringae pv. primulae OX=251707 GN=queC PE=3 SV=1
MCRYACRCSCIKFFGMTSRGADMSELTNTEKRAVILLSGGLDSATVVAMARAEGYACYTMSFDYGQRHRAELDAAARVARDLGAVEHKVIGLNLNGIGGSALTDSSIAVPESPSEGIPVTYVPARNTVFLSLALGWAEVLGARDIFIGVNAVDYSGYPDCRPEFVESFERMANLATKAGVEGQGFTIRAPLQNLSKSDIVKAGTALGVDYALTVSCYQADDQGRACGKCDSCRLRTEGFTAAGMADPTRYF

SEQ ID NO: 41496 - protein, 224 aa, Pseudomonas taeanensis
  REGION 1..224: note = tr|A0A0A1YIX3|A0A0A1YIX3_9PSED 7-cyano-7-deazaguanine synthase OS=Pseudomonas taeanensis MS-3 OX=1395571 GN=queC PE=3 SV=1
MSEKKAVILLSGGLDSATVVALAKAEGYACYSMSFDYGQRHRSELQAAERVARQLGVVEHKVIGLNLNGIGGSALTDSSIEVPEGPSEGIPVTYVPARNTVFLSLALGWAEVLGARDVFIGVNAVDYSGYPDCRPEFVEAFQRMANLATKAGVEGQGFRIRAPLQSMSKAEIVQAGMQHGVDYALTVSCYQADDQGRACGKCDSCRLRAEGFVAAGLADPTRYA

SEQ ID NO: 41497 - protein, 233 aa, Pseudomonas taeanensis
  REGION 1..233: note = tr|A0A0A1YGJ6|A0A0A1YGJ6_9PSED 7-cyano-7-deazaguanine synthase OS=Pseudomonas taeanensis MS-3 OX=1395571 GN=queC PE=3 SV=1
MHTKALVLFSGGQDSTTCLAWALEHYEHVETIGFDYGQRHRIELECRLNVLREIRNRFPNWAQRLGEDHVLDLKLLGQISDTAMTAEKTIEFEKNGLPNTFVPGRNLLFLTFAATIAYRRGLTVIVGGMCETDYSGYPDCRDNTLKATQVALSLGMDAPVIIETPLMWLNKAQTWRLAEDLGNRDFVSLIQEESHTCYLGTRQQKHDWGYGCGTCPACELRKTGYEQYIQERD

SEQ ID NO: 41498 - protein, 230 aa, Pseudomonas taetrolens
  REGION 1..230: note = tr|A0A0J6GVA1|A0A0J6GVA1_PSETA 7-cyano-7-deazaguanine synthase OS=Pseudomonas taetrolens; OX = 47884 GN=queC PE=3 SV=1
MTEQTVVTEKRAVILLSGGLDSATVVAMARAEGYSCYTMSFDYGQRSRAELDAAAQVARDLGAVEHKVIGLNLNGIGGSALTDDSIDVPESPGEGIPVTYVPARNTVFLSLALGWAEVLQARDIFIGVNAVDYSGYPDCRPEFVEAFEVMANLATKAGVEGQGFRIKAPLQNMSKAQIVQAGVKLGVDYSLTVSCYQADAQGQACGKCDSCRLRAEGFAAAGITDPTRYF

SEQ ID NO: 41499 - protein, 230 aa, Pseudomonas thivervalensis
  REGION 1..230: note = tr|A0A176NRP3|A0A176NRP3_9PSED 7-cyano-7-deazaguanine synthase OS=Pseudomonas thivervalensis OX=86265 GN=queC PE=3 SV=1
MTEHSNIAEKRAVILLSGGLDSATVVAMAHAEGYRCYTMSFDYGQRHRAELHAAERVARDLGVAEHKVIGLNLNGIGGSALTDSSIDVPEAPGEGIPVTYVPARNTVFLSLALGWAEVLGARDIFIGVNAVDYSGYPDCRPEFVEAFERMANLATKAGVEGQGFRIQAPLQNLSKADIVKAGVKLGVDYGLTVSCYQADDQGRACGKCDSCRLRAEGFAAAGVSDPTRYF

SEQ ID NO: 41500 - protein, 225 aa, Pseudomonas tolaasii
  REGION 1..225: note = tr|A0A2N0DZW3|A0A2N0DZW3_PSETO 7-cyano-7-deazaguanine synthase OS=Pseudomonas tolaasii NCPPB 2192 OX=564423 GN=queC PE=3 SV=1
MVDQKRAVILLSGGLDSATLVAMVRAEGYSCYTLGFDYGQRHRAELAAAARVAHDLGVVEHKVIGLNLNGIGGSALTDSSIEVPEAPSEGIPLTYVPARNTVFLSLALGWAEVLNARDIFIGVNALDYNGYPDCRPEYIASFERMANLATKAGVEGQGFRIRAPLQNMSKADIVKTGVGLGVDYALTVSCYQADDSGRACGKCDACRLRAEGFKNAAIADPTRYF

SEQ ID NO: 41501 - protein, 232 aa, Pseudomonas tolaasii
  REGION 1..232: note = tr|A0A2N0E0G8|A0A2N0E0G8_PSETO 7-cyano-7-deazaguanine synthase OS=Pseudomonas tolaasii NCPPB 2192 OX=564423 GN=queC PE=3 SV=1
MTKKAVMVFSGGQDSTTCLIQALPLYDEVHCITFDYGQRHVAEIEVAQKLARQLGATVHKVMDVSLLNELAISSLTRDNIPVPTVDSSGGSLPSTFVPGRNILFLTLASIYAYQVKAETVITGVCETDFSGYPDCRDEFVKALNKALELGMEYTLRLDTPLMWLNKAETWALADYHGKLDLVREQTLTCYNGILGTGCGNCDACNLRARGLNEYLQDKAAVMQSLKQKLQLS

SEQ ID NO: 41502 - protein, 224 aa, Pseudomonas toyotomiensis
  REGION 1..224: note = tr|A0A1I5MT68|A0A1I5MT68_9PSED 7-cyano-7-deazaguanine synthase OS=Pseudomonas toyotomiensis OX=554344 GN=queC PE=3 SV=1
MNDKKAVILLSGGLDSATVVAMAKAEGYSCYSMSFDYGQRHRAELQAAERVARQLGVVEHKVIGLNLNGIGGSALTDSSIAVPESPTEGIPATYVPARNTVFLALALGWAEVLEARDIFIGVNAVDYSGYPDCRPEFVEAFERMANLATRAGVEGQGFAIRAPLQQMGKGEIIQTGMRLGVDYALTVSCYQADDDGRACGKCDSCRLRAAGFAAAGVPDATRYF

SEQ ID NO: 41503 - protein, 229 aa, Pseudomonas tremae; identical to SEQ ID NO: 41304
  REGION 1..229: note = tr|A0A0Q0DBF9|A0A0Q0DBF9_9PSED 7-cyano-7-deazaguanine synthase OS=Pseudomonas tremae; OX = 200454 GN=queC PE=3 SV=1

SEQ ID NO: 41504 - protein, 229 aa, Pseudomonas trivialis
  REGION 1..229: note = tr|A0A0H5ABB1|A0A0H5ABB1_9PSED 7-cyano-7-deazaguanine synthase OS=Pseudomonas trivialis; OX = 200450 GN=queC PE=3 SV=1
MTEQTMDQKRAVILLSGGLDSATVVAMAQAQGYSCYTMSFDYGQRHRAELNAAARVARDMGVVEHKVIGLNLNGIGGSALTDSSIDVPEAPSEGIPVTYVPARNTVFLSLALGWAEVLNARDIFIGVNAVDYSGYPDCRPEFVESFERMANLATKAGVEGQGFRILAPLQNLSKADIVKAGVGLGVDYSLTVSCYQADDDGRACGKCDSCRLRAEGFQAAGIADPTRYF

SEQ ID NO: 41505 - protein, 436 aa, Pseudomonas trivialis
  REGION 1..436: note = tr|A0A0H5ADJ8|A0A0H5ADJ8_9PSED Uncharacterized protein OS=Pseudomonas trivialis OX=200450 GN=AA957_24310; PE = 4 SV=1
MTDLIFHHEFDQLPPRSPNVIPVLMYGSRPLAKGTCSIGGPVRTAVRRLGAPVSRVGFDLLTIAMAVTAADTFVDKAEADDGWARQLRLVIPLADPDLWYAAVPLLQKALHFLSGDIWTIELLPDGPRQSKSQNRGHITVLAGHDCVSLFSGGMDSGIGALDLLGKGRRPILISHSYRGDSEKQILVSSQLPVKVSRFAAVANPTSWLGTTLDVQMRTRSFNFLAYGTLVAATLAQLRVASTPVELFVPENGLIALNPPMTPRRIGALSTRTTHPHFLGLFQQILDTVGLPVVVKNPYALKTKGEMLLGCSDQISLSALATDTVSCGKWKRTHQQCGKCVPCIIRRASFHAAGMKDGTSYNPKGQNLQAVFNDEKARDDLMAMVLSSRRLPKTSVSQWVSNAGPLPLNRRDRDDLLGVAERGMGEVSAYLDSLGLI

SEQ ID NO: 41506 - protein, 232 aa, Pseudomonas umsongensis
  REGION 1..232: note = tr|A0A1H2BKE1|A0A1H2BKE1_9PSED 7-cyano-7-deazaguanine synthase OS=Pseudomonas umsongensis; OX = 198618 GN=queC PE=3 SV=1
MTKKAVIVFSGGQDSTTCLIHALPLFDEIHCITFDYGQRHRAEIEVAQQLSKKLGIKVHKVLDTSLLNELAISSLTRDNIPVPSTSNAGHSLPSTFVPGRNILFLTLASIYAYQVQADTVITGVCETDYSGYPDCRHEFVEVLNNAIALGMNYKLHLETPLMWLNKAETWALADHHNSLDLIRDHTLTCYNGMKGSGCGNCDACNLRAKGLNDFLEDKEKTMKTLKSKISLK

SEQ ID NO: 41507 - protein, 230 aa, Pseudomonas umsongensis
  REGION 1..230: note = tr|A0A1H2C7E7|A0A1H2C7E7_9PSED 7-cyano-7-deazaguanine synthase OS=Pseudomonas umsongensis; OX = 198618 GN=queC PE=3 SV=1
MTEPLNTAEKRAVILLSGGLDSATVVAMARAEGYSCYTMSFDYGQRSHAELYAAERVARDLGVVEHKVIGLNLNGMGGSALTDTSIDIPEELGEGIPVTYVPARNTVFLSLALGWAEVLGARDIFIGVNAVDYSGYPDCRPEFIESFERMANLATKAGVEGNGFRIQAPLQNLSKAQIVQAGVKLGVNYGLTVSCYQADDNGRACGKCDSCRLRAEGFAAAGISDPTPYF

SEQ ID NO: 41508 - protein, 230 aa, Pseudomonas vancouverensis
  REGION 1..230: note = tr|A0A1H2P8A8|A0A1H2P8A8_9PSED 7-cyano-7-deazaguanine synthase OS=Pseudomonas vancouverensis OX=95300 GN=queC PE=3 SV=1
MTEQLNNAEKRAVILLSGGLDSATVVAMARAEGYSCYTMSFDYGQRSHAELHAAARVARDLGVVEHKVIGLNLNGMGGSALTDSSIDIPEELGEGIPVTYVPARNTVFLSLALGWAEVLGARDIFIGVNAVDYSGYPDCRPEFIESFERMANLATKAGVEGNGFRIQAPLQNLSKAQIVQAGVKLGVNYGLTVSCYQADDEGRACGKCDSCRLRAEGFVAAGISDPTPYF

SEQ ID NO: 41509 - protein, 229 aa, Pseudomonas veronii; identical to SEQ ID NO: 41437
  REGION 1..229: note = tr|A0A1D3K321|A0A1D3K321_9PSED 7-cyano-7-deazaguanine synthase OS=Pseudomonas veronii 1YdBTEX2 OX=1295141 GN=queC PE=3 SV=1

SEQ ID NO: 41510 - protein, 229 aa, Pseudomonas veronii; identical to SEQ ID NO: 41437
  REGION 1..229: note = tr|A0A0R3B181|A0A0R3B181_9PSED 7-cyano-7-deazaguanine synthase OS=Pseudomonas veronii; OX = 76761 GN=queC PE=3 SV=1

SEQ ID NO: 41511 - protein, 230 aa, unidentified
  source 1..230: note = Pseudomonas versuta
  REGION 1..230: note = tr|A0A0M4QH69|A0A0M4QH69_9PSED 7-cyano-7-deazaguanine synthase OS=Pseudomonas versuta; OX = 1788301 GN=queC PE=3 SV=1
MTEHTVVTEKRAVILLSGGLDSATVVAMARAEGYSCYTMSFDYGQRHRSELDAAARVARDLGAIEHKVIGLNLDGIGGSALTDSSIDVPETLGEGIPVTYVPARNTVFLSLALGWAEVLQARDIFIGVNAVDYSGYPDCRPEFVQAFEVMANLATKAGVEGNGFRIQAPLQNLSKAQIVQAGVKLGVDYSLTVSCYQADAQGRACGKCDSCRLRAEGFAAAGITDPTRYF

SEQ ID NO: 41512 - protein, 229 aa, Pseudomonas viridiflava
  REGION 1..229: note = tr|A0A1Y6JP16|A0A1Y6JP16_PSEVI 7-cyano-7-deazaguanine synthase OS=Pseudomonas viridiflava; OX = 33069 GN=queC PE=3 SV=1
MTELNMTEKRAVILLSGGLDSATVVAMARAEGYACYTMSFDYGQRHRAELDAAAQVARDLGAIEHKVIGLNLNGIGGSALTDSSIAVPETPSEGIPVTYVPARNTVFLSLALGWAEVLGARDIFIGVNAVDYSGYPDCRPEFVESFERMANLATKAGVEGQGFTIRAPLQNLSKSDIVKAGTALGVDYALTVSCYQADDQGRACGKCDSCRLRAEGFAAAGVADPTRYF

SEQ ID NO: 41513 - protein, 229 aa, Pseudomonas viridiflava
  REGION 1..229: note = tr|A0A3M4JB21|A0A3M4JB21_PSEVI 7-cyano-7-deazaguanine synthase OS=Pseudomonas viridiflava; OX = 33069 GN=queC PE=3 SV=1
MIELTNTEKRAVILLSGGLDSATVVAMARAEGYACYTMSFDYGQRHRAELDAAARVARDLGAVEHKVIGLNLNGIGGSALTDSSIAVPESPSEGIPVTYVPARNTVFLSLALGWAEVLGARDIFIGVNAVDYSGYPDCRPEFVESFERMANLATKAGVEGQGFTIRAPLQNLSKSDIVKAGAALGVDYSLTVSCYQADDQGRACGKCDSCRLRAEGFTAAGMADPTRYF

SEQ ID NO: 41514 - protein, 234 aa, Pseudomonas vranovensis
  REGION 1..234: note = tr|A0A423DU58|A0A423DU58_9PSED 7-cyano-7-deazaguanine synthase OS=Pseudomonas vranovensis; OX = 321661 GN=queC PE=3 SV=1
MHNKALVLFSGGQDSTTCLAWALERYEHVETIGFDYGQRHEIELECRINILQEIRNRFPNWAKRLGEDHVLDLKLLGQISDTAMTVEKTIEFEKNGLPNTFVPGRNLLFFTFAAAIAYRRGLSVLVGGMCETDYSGYPDCRDNTLKSLQVSLGLGMDLPLVIETPLMWLDKKQTWNLAKDLGGPGFVEFVQEETHTCYLGDRQRRHEWGYGCNDCPACELRRTGFEAFQRDNDV

SEQ ID NO: 41515 - protein, 224 aa, Pseudomonas vranovensis
  REGION 1..224: note = tr|A0A423DSR2|A0A423DSR2_9PSED 7-cyano-7-deazaguanine synthase OS=Pseudomonas vranovensis; OX = 321661 GN=queC PE=3 SV=1
MTEKRAVILLSGGLDSATVVAMAKAEGYSCYTMSFDYGQRHRAELNAAARVARDLGVVEHKVIGLSLDGIGGSALTDSSIDVPEAPSEGIPVTYVPARNTVFLSLALGWAEVLEARDIFIGVNAVDYSGYPDCRPEFVEAFERMANLATKAGVEGNGFRIQAPLQNLSKAQIVQAGMARGVDYSLTVSCYQADDQGRACGKCDSCRLRADGFKAAGVEDPTRYF

SEQ ID NO: 41516 - protein, 224 aa, unidentified
  source 1..224: note = Pseudomonas wadenswilerensis
  REGION 1..224: note = tr|A0A380T5C7|A0A380T5C7_9PSED 7-cyano-7-deazaguanine synthase OS=Pseudomonas wadenswilerensis OX=1785161 GN=queC PE=3 SV=1
MTEKRAVILLSGGLDSATVVAMAKAEGYSCYTMSFDYGQRHRAELNAAARVARDLGVVEHKVIGLSLDGIGGSALTDSSIDVPEAPSEGIPVTYVPARNTVFLSLALGWAEVLEARDIFIGVNAVDYSGYPDCRPEFVEAFERMANLATKAGVEGQGFRIQAPLQNLSKAQIVQAGMARGVDYSLTVSCYQADDEGRACGKCDSCRLRADGFKAAGVEDPTRYF

SEQ ID NO: 41517 - protein, 230 aa, unidentified
  source 1..230: note = Pseudomonas weihenstephanensis
  REGION 1..230: note = tr|A0A0J6IKR0|A0A0J6IKR0_9PSED 7-cyano-7-deazaguanine synthase OS=Pseudomonas weihenstephanensis OX=1608994 GN=queC PE=3 SV=1
MTEQSLATEKRAVILLSGGLDSATVVAMARAEGYSCYTMSFDYGQRHRAELDAAARVARDLGAIEHKVIGLSLDGIGGSALTDSSIDVPEAPSEGIPVTYVPARNTVFLSLALGWAEVLSARDIFIGVNAVDYSGYPDCRPEFVEAFEVMANLATKAGVEGQGFKIQAPLQNMSKAQIVQAGVKLGVDYSLTVSCYQADGQGRACGKCDSCRLRAEGFAAAGIKDPTRYF

SEQ ID NO: 41518 - protein, 224 aa, Pseudomonas xanthomarina
  REGION 1..224: note = tr|A0A098FRL3|A0A098FRL3_9PSED 7-cyano-7-deazaguanine synthase OS=Pseudomonas xanthomarina OX=271420 GN=queC PE=3 SV=1
MNEKKAVILLSGGLDSATVVAMARAQGYACYTMSFDYGQRHRAELQAAERVAQQLGVVEHKVIGLDLNGIGGSALTDDSIDVPEVPGEGIPVTYVPARNTVFLSLALGWAEVLGAHDIFIGVNAVDYSGYPDCRPEFVAAFERMANLATKAGVEGLGFRIQAPLQEMSKARIVQEGARLGVDYAATVSCYQADTDGRACGKCDSCRLRAAGFAEAGLADPTRYF

SEQ ID NO: 41519 - protein, 224 aa, Pseudomonas xanthomarina
  REGION 1..224: note = tr|A0A1M5P8I0|A0A1M5P8I0_9PSED 7-cyano-7-deazaguanine synthase OS=Pseudomonas xanthomarina DSM 18231 OX=1403346 GN=queC PE=3 SV=1
MTGKKAVILLSGGLDSATVVAMAKADGYACYSMSFDYGQRHRAELQAAERVAQQLGVVEHKVIGMSLNGIGGSALTDSRIAVPESLGEGIPVTYVPARNTLFLSLALGWAEVLDAQDIFIGVNAVDYSGYPDCRPAFIEAFEQLANLATKAGVEGRRFSIRAPLQNLSKSEIVQAGVRLGVDYSMTVSCYQADEDGRACGRCDSCRLRAAGFDEAGVADPTRYM

SEQ ID NO: 41520 - protein, 227 aa, Pseudomonas xinjiangensis
  REGION 1..227: note = tr|A0A1H1UGT8|A0A1H1UGT8_9PSED 7-cyano-7-deazaguanine synthase OS=Pseudomonas xinjiangensis OX=487184 GN=queC PE=3 SV=1
MTYPDERKAVVLLSGGLDSATILAMAQAEGYVCYTMSFDYGQRHRVELDAAAIIARAAGAADHKVIGLNLDGMGGSALTDPGIAVPESEQAGIPVTYVPARNTVFLSLALGWAEVLGAADIFIGVNAVDYSGYPDCRPEFIEAFERVANLATREGVEGEGFTIRAPLQQMSKGEIIQAGLARGVDYSLTVSCYQADDQGRACGRCDSCRLRSAGFAAAGVVDPTRYA

SEQ ID NO: 41521 - protein, 225 aa, unidentified
  source 1..225: note = Pseudomonas yamanorum
  REGION 1..225: note = tr|A0A1H2I0Z8|A0A1H2I0Z8_9PSED 7-cyano-7-deazaguanine synthase OS=Pseudomonas yamanorum; OX = 515393 GN=queC PE=3 SV=1
MTDQKRAVILLSGGLDSATVVAMARAEGYSCYTLSFDYGQRHRAELNAAARVARDLGVVEHKVIGLNLDGMGGSALTDSSIDVPQGPSEGIPVTYVPARNTVFLSLALGWAEVLEARDIFIGVNALDYAGYPDCRPEYIESFERMANLATKAGVEGPGFRILAPLQNRSKADIVKAGVGLGVDYSLTVSCYQADIDGRACGKCDSCRLRAEGFQAAGITDPTRYF

SEQ ID NO: 41522 - protein, 230 aa, unidentified
  source 1..230: note = Pseudomonas yamanorum
  REGION 1..230: note = tr|A0A143GCX4|A0A143GCX4_9PSED 7-cyano-7-deazaguanine synthase OS=Pseudomonas yamanorum; OX = 515393 GN=queC PE=3 SV=1
MSKKAVIVFSGGQDSTTCLIQALPLYDEVHCITFDYGQRHVAEIEVAQKLSKQLGATVHKVMDVSLLNELAISSLTRDNIPVPTVNSSGESLPSTFVPGRNILFLTLAAIYAYQVKAQTVITGVCETDFSGYPDCRDEFVKALNKALQLGMEYDVRLETPLMWLNKAETWALADYHHQLDLIRNQTLTCYNGIIGTGCGNCDACNLRARGLNDYLENKAAVMQSLKSKLA

SEQ ID NO: 41523 - protein, 225 aa, unidentified
  source 1..225: note = Pseudomonas yangmingensis
  REGION 1..225: note = tr|A0A1I4RJX5|A0A1I4RJX5_9PSED 7-cyano-7-deazaguanine synthase OS=Pseudomonas yangmingensis OX=1720063 GN=queC PE=3 SV=1
MKKAVCLLSGGLDSTTTLAIAQAEGFDVHAMSFRYGQRHSVELDRASAFARQRGVAEHIIVDFDLRLIGGSALTADIQVPKHDSADGMGTDIPVTYVPARNTIFLSFALGWAEVLGAEDIFIGVNALDYSGYPDCRPEYIATFETLGNLATRAGVEGRQNLRIHAPLMQMSKAQIICRGLELGVDFAQTSSCYDPGADGRPCARCDSCLLRARGFEALGLTDPLL

SEQ ID NO: 41524 - protein, 229 aa, unidentified; identical to SEQ ID NO: 41398
  source 1..229: note = Pseudomonas zeshuii
  REGION 1..229: note = tr|A0A1M6AHV6|A0A1M6AHV6_9PSED 7-cyano-7-deazaguanine synthase OS=Pseudomonas zeshuii; OX = 1076620 GN=queC PE=3 SV=1

SEQ ID NO: 41525 - protein, 223 aa, unidentified
  source 1..223: note = Pseudomonas zhaodongensis
  REGION 1..223: note = tr|A0A3M2HPT1|A0A3M2HPT1_9PSED 7-cyano-7-deazaguanine synthase OS=Pseudomonas zhaodongensis OX=1176257 GN=queC PE=3 SV=1
MNHKKAVILLSGGLDSATVLAIAKEQGYSCYTMSFDYGQRHRAELQAAERVSRQHAVEHKVIGINLDGIGGSALTDSAIAVPEQLGEGIPVTYVPARNTVFLSLALGWAEVLGAQDIFIGVNAVDYSGYPDCRPEFIDAFERMANLATKAGVEGSGFSIRAPLQNLSKAEIVKMGVQLGVDYSSTVSCYQADDDGRACRVCDSCRLRAAGFEAAGVEDPTRYY

SEQ ID NO: 41526 - protein, 224 aa, unidentified
  source 1..224: note = Pseudomonas zhaodongensis
  REGION 1..224: note = tr|A0A365PXP9|A0A365PXP9_9PSED 7-cyano-7-deazaguanine synthase OS=Pseudomonas zhaodongensis OX=1176257 GN=queC PE=3 SV=1
MTSKKAVILLSGGLDSATVVAMAKADGYACYSMSFDYGQRHRAELQAAERVAQHLGVVEHKVIGMNLNGIGGSALTDSSIAVPEELGEGIPVTYVPARNTLFLSLALGWAEVLGARDIFIGVNAVDYSGYPDCRPEFVEAFERLANLATKAGVEGRGFSIHAPLQDLSKGEIIQAGERLGVDYSMTVSCYQADEDGRACGKCDSCRLRAAGFSEAGVPDPTRYK

SEQ ID NO: 41527 - protein, 191 aa, Pseudonocardia autotrophica
  REGION 1..191: note = tr|A0A1Y2MHE9|A0A1Y2MHE9_PSEAH 7-cyano-7-deazaguanine synthase OS=Pseudonocardia autotrophica OX=2074 GN=queC PE=3 SV=1
MIWQGPGVSRVRHPCLLLSGGVDSALVARFLIEAGTPPTGLFVDYGQPAAKAEAHASTAIAAAFGLSRECVTIGGLSVPSSGEIIGRNDLLIAVARAAAPGRDVALGVHGGTGYADCSPEHRDAWQSLLDAQHGGAVRLLAPLLHLTKPEVLALAVDGSIPLGLTHSCEAGDTACGRCRSCLDRAILDARA

SEQ ID NO: 41528 - protein, 440 aa, unidentified
  source 1..440: note = Pseudopedobacter saltans
  REGION 1..440: note = tr|F0SEA6|F0SEA6_PSESL Uncharacterized protein; OS = Pseudopedobacter saltans (strain ATCC 51119 / DSM 12145 / JCM 21818 / LMG 10337 / NBRC 100064 / NCIMB 13643); OX = 762 903 GN=Pedsa_3496 PE=4 SV=1
MKKIKVEIPKYDSKSGILYTKLTEENGDSSIISTDYKTLLPFAISVNPEIRDFFLMTCSVYGIDRFVNRKENSVDGWSRELNISFPVSEIKVWSNVKNDLEELFSFLTGDYWKIDFYESNFVNPEIDLPIDFKEKYKQVNLFSGGLDSLIGAIDFLSTHPKDKILLASHYDPQMKGPLSDQTVLLDKLEVKYKGQFNYVPSIKVTLSQTTTKRETTFRSRSILFIGIALLISQGKKINEIIVPENGSVSLNYPLSPSRRTSCSTRTTHSFVLEKTNLIISTLKINSNIYNPYEFKTKGEMVDDCEDLEFLRKIIGFSNSCGKRGHRKTWVNRSATHCGVCMPCIYRQASLQNQKDPTIYGSHIDSLIPFKRKKTQDVGICLDFLRKKLTKDDIKTELIVNGIKNINKLNRYVDVVWRTRIELSKWVDLNGNSIIKSKAGL

SEQ ID NO: 41529 - protein, 240 aa, Pseudorhodoferax soli
  REGION 1..240: note = tr|A0A368XY81|A0A368XY81_9BURK 7-cyano-7-deazaguanine synthase OS=Pseudorhodoferax soli; OX = 545864 GN=queC PE=3 SV=1
MSLPRNALVLFSGGQDSTTCLAHALEQYARVETIAFDYGQRHRIELDARLEVLRQFRAQFPHWAERLGEDHLLAVPVLGEISETSLTRDIAMEMQEQGLPNSFVPGRNLLFLTLAAALAYRRGLDVLVTGVCETDFSGYPDCRDDTIKAMQIALSLGMDRRILIDTPLMWIDKADTWRLAERLGGSALVGLIVEHTHTCYLGERGALHAWGYGCGDCPACQLRARGWHQYQSPGATPPGG

SEQ ID NO: 41530 - protein, 232 aa, Pseudorhodoferax sp.
  REGION 1..232: note = tr|A0A0S9L844|A0A0S9L844_9BURK 7-cyano-7-deazaguanine synthase OS=Pseudorhodoferax sp. Leaf265 OX=1736315 GN=queC PE=3 SV=1
MSLPRQALVLFSGGQDSTTCLAHALVQYERVETIAFDYGQRHRIELDARLEVLRQFRVQFPHWAARLGEDHLLAVPVLGEISETSLTRDIAMEMQEQGLPNSFVPGRNLLFLTLAAALAYRRGLDVLVTGVCETDFSGYPDCRDDTIKAMQIALSLGMDRRILIDTPLMWIDKADTWRMAERLGGPALVDLIVEHTHTCYLGERGALHAWGYGCATCPACVLRAKGWERYSA

SEQ ID NO: 41531 - protein, 235 aa, Pseudorhodoferax sp.
  REGION 1..235: note = tr|A0A0Q4YG68|A0A0Q4YG68_9BURK 7-cyano-7-deazaguanine synthase OS=Pseudorhodoferax sp. Leaf267 OX=1736316 GN=queC PE=3 SV=1
MPRRALVLFSGGQDSTTCLAHALARYAHVETIAFDYGQRHRIELDARLVVLQQLREQFPAWSPRLGDDHLLAVPVLGEISETALTRDIALKMEDAGLPNTFVPGRNLLFLTLAAALAYRRDLDVLVTGVCETDFSGYPDCRDDTMKAMQLALSLGMDRRILVDTPLMWIDKAATWALAASLGGPALVELIVEHTHTCYLGERGARHRWGYGCGQCPACELRARGHGLYSASRASS

SEQ ID NO: 41532 - protein, 241 aa, unidentified
  source 1..241: note = Pseudorhodoplanes sinuspersici
  REGION 1..241: note = tr|A0A1W6ZVN9|A0A1W6ZVN9_9RHIZ 7-cyano-7-deazaguanine synthase OS=Pseudorhodoplanes sinuspersici OX=1235591 GN=queC PE=3 SV=1
MGLSVAASERAIVLFSGGQDSTVCLAWALERFAEVETIGFDYGQRHAVELAVRPVIREKMRSLKPEWGGRLRDDHVIDLSVLGEISETALTRDVAIDMADSGLPTTFVPGRNLMFLTFAGALAYRRGAKNLVAGMCETDYSGYPDCRDDTVKAMQVALTLGMDRRFVVHTPLMWIDKAATFALAYEIGGQALLELVVEDTHSCYLGDRSQRHDWGYGCGECPACQLRAAGFAKWNDECRKS

SEQ ID NO: 41533 - protein, 455 aa, unidentified
  source 1..455: note = Pseudoroseicyclus aestuarii
  REGION 1..455: note = tr|A0A318SN12|A0A318SN12_9RHOB 7-cyano-7-deazaguanine synthase in queuosine biosynthesis; OS = Pseudoroseicyclus aestuarii OX=1795041 GN=DFP88_1146; PE = 4 SV=1
MRRFSLIGRLGSDDKSKINLVQTDSEVFEIDFLDGDLRMGFGIGHALDQLASLGLQPSERGIDLVVLAALVNAGDTRVSRKSNAQDGWTREIDLYVPMSASAAWSANTRSIEAMLRFLTGDRWRVFIRDRTKRTKTLVVAPKRLAIDGLTKVSLLSGGLDSLVGAIDLLSVGERPLFVSHYWDSETAKAQAYVLDRLETRFGQEAFKSLRVRLGFDKHHLTTGETENTQRGRSFLFYSLATLAASAIDGRTTVDIPENGLIALNVPLDPLRFGALSTRTAHPHFIASMQKLLDALALDVELNNPYRHMTKGEMVANCADKILLEKIVANSMSCSSPAKARYKKLSPRHCGYCVPCLIRRASLEVGLDGDDMTPYLVEDLKGHVLASDQPEGEHVRSFQLMAKRIKAKPDLAKILVHKPGPLHDEPDATPDYADVFRRGVLEVAELLKGVRARPGG

SEQ ID NO: 41534 - protein, 203 aa, unidentified
  source 1..203: note = Pseudoroseicyclus aestuarii
  REGION 1..203: note = tr|A0A318SR37|A0A318SR37_9RHOB 7-cyano-7-deazaguanine synthase OS=Pseudoroseicyclus aestuarii OX=1795041 GN=queC PE=3 SV=1
MKTLVICSGGLDSVTLADKVAAERDLTRLVSFDYGQRHARELDFAREAADRLEVPHHLIDLRAVGAALTGSALTDDLAVPDGHYAEETMRITVVPNRNAIMLAVAFGVAAAQGDAAVAAAVHGGDHFIYPDCRPGFIDAFHRMQAAALEGYADVALHTPFVERTKADIVRDGAALGTPFDRTWSCYKGGAQHCGRCGTCVERR

SEQ ID NO: 41535 - protein, 197 aa, Pseudosphingobacterium domesticum
  REGION 1..197: note = tr|A0A1H7GN01|A0A1H7GN01_9SPHI 7-cyano-7-deazaguanine synthase OS=Pseudosphingobacterium domesticum OX=407022 GN=SAMN05661044_00139 PE=3 SV=1
MSKGLLLSGGLDSISLAYMVRPEIAFTVDYGQKPAQTEIKISENICKILKIRHEVIVVDCSSLGSGDLTNNPSLNTSPSSEWWPYRNQLLVTLVAMRAISLNVRELLVGSVRSDNFHKDGTIPFYQKLDSLMQYQEGNMKILYPVIDLYTHELIITSGIPLDMILMAHSCHTSNEPCGFCRGCLKYLTVKQKLNIEN

SEQ ID NO: 41536 - protein, 218 aa, Pseudospirillum japonicum
  REGION 1..218: note = tr|A0A1H6TVG2|A0A1H6TVG2_9GAMM 7-cyano-7-deazaguanine synthase OS=Pseudospirillum japonicum OX=64971 GN=queC PE=3 SV=1
MNARKAVVIYSGGMDSFTLLHQVIQQGYQVYPVSFDYGQRHARELAAAKHVCQMLNLPHQCIDLRSIQPLLDQSALTGQHPVPQGTYAPENLQITLVPNRNMILLSLAIAYAVNLGANECFYGAHGGDHVLYPDCRPEFVTGMDQMAQISNLQPVRIRAPFLHYDKADILRLGQAMHLDYALTWTCYQGAEQPCGTCSACHERAQAFAACGCADPLIG

SEQ ID NO: 41537 - protein, 232 aa, unidentified
  source 1..232: note = Pseudovibrio axinellae
  REGION 1..232: note = tr|A0A165UN91|A0A165UN91_9RHOB 7-cyano-7-deazaguanine synthase OS=Pseudovibrio axinellae; OX = 989403 GN=queC PE=3 SV=1
MKTIVICSGGLDSVTLAYKVAREHELLGLVSFDYGQRHKKELDYAAHAAKQLGVPHYILNMSQIGTHLSGSALTDDLDVPDGHYAEENMKVTVVPNRNAIMLSIGFGIAAAQQADAVAAAVHGGDHFIYPDCRPEFIKSFEAMQKLALAGYADVSLYTPFVEISKGAIVTEGAKHNVPFEDTWSCYKGGEKHCGRCGTCVERREAFDLAGVDDPTDYADPDYWKSAVERADT

SEQ ID NO: 41538 - protein, 232 aa, Pseudovibrio denitrificans
  REGION 1..232: note = tr|A0A1I6XQB5|A0A1I6XQB5_9RHOB 7-cyano-7-deazaguanine synthase OS=Pseudovibrio denitrificans OX=258256 GN=queC PE=3 SV=1
MKTIVICSGGLDSVTLAYKVAREHELLGLVSFDYGQRHKKELDYAAHAAKQLGVPHHILDMSQIGAHLSGSALTDDVDVPDGHYAEENMKVTVVPNRNAIMLSIGFGIAAAQQADAVAAAVHGGDHFIYPDCRPGFIKSFEAMQKLALDGYANVSLYTPFVEISKGAIVAEGARINVPFEDTWSCYKGGEKHCGRCGTCVERREAFDLAGVEDPTDYADPDYWKSAVERAEP

SEQ ID NO: 41539 - protein, 232 aa, Pseudovibrio sp.
  REGION 1..232: note = tr|A0A1H1FAW0|A0A1H1FAW0_9RHOB 7-cyano-7-deazaguanine synthase OS=Pseudovibrio sp. Tun.PSC04-5.I4 OX=1798213 GN=queC PE=3 SV=1
MKTIVICSGGLDSVTLAYKVAHEQTLLGLVSFDYGQRHKIELDYAAHAAKQLGVPYSLLDMSQIGRHLSGSALTDDIDVPDGHYAEENMKVTVVPNRNAIMLSIGFGIAAAQQADAVAAAVHGGDHFIYPDCRPGFIKNFEDMQKLALDGYANVSLYTPFLEIPKSAIVTEGVKHNVPFADTWSCYKGGDTHCGRCGTCVERREAFAIAGVVDPTIYADPDYWKSALERAPL

SEQ ID NO: 41540 - protein, 232 aa, Pseudovibrio sp.
  REGION 1..232: note = tr|A0A161XN91|A0A161XN91_9RHOB 7-cyano-7-deazaguanine synthase OS=Pseudovibrio sp. WM33; OX = 1735585 GN=queC PE=3 SV=1
MKTIVICSGGLDSVTLAYKVARENELLGLVSFDYGQRHKKELDYAAHAAKQLGVPHHILDMSQIGAHLSGSALTDDVDVPDGHYAEENMKVTVVPNRNAIMLSIGFGIAAAQQADAVAAAVHGGDHFIYPDCRPGFIKSFEAMQKLALDGYANVSLYTPFVEISKGAIVEEGARINVPFEDTWSCYKGGEKHCGRCGTCVERREAFDLAGVEDPTEYADPDYWKSVVERAEP

SEQ ID NO: 41541 - protein, 221 aa, unidentified
  source 1..221: note = Pseudoxanthomonas composti
  REGION 1..221: note = tr|A0A4Q1JTR1|A0A4Q1JTR1_9GAMM 7-cyano-7-deazaguanine synthase OS=Pseudoxanthomonas composti OX=2137479 GN=queC PE=3 SV=1
MKKAVVLVSGGMDSAVVLAMAREQGFTPYALSVSYGQRHTSELDAAARVAQTQHAAAHKTVNVDLRSIGGSALTDDIDVPESGGAGIPVTYVPARNTVMLSVALGWAEVLGAADIFCGVNAVDYSGYPDCRPEFIAAFQALANLATKAGVEGAGLRVHAPLQFLSKADIVRQGVRLGVDFAETVSCYSADAQGRACGHCDACTLRRAGFIDAGVADPTRYT

SEQ ID NO: 41542 - protein, 231 aa, Pseudoxanthomonas dokdonensis
  REGION 1..231: note = tr|A0A0R0D033|A0A0R0D033_9GAMM 7-cyano-7-deazaguanine synthase OS=Pseudoxanthomonas dokdonensis OX=344882 GN=queC PE=3 SV=1
MKKAVVLLSGGMDSAVVVAMAREQGFAVHALSVRYGQRHTSELEAADRVATALGAVEHKTVHVDLRSIGGSALTADIDVPLDTQANPDADPGVEHIPVTYVPARNTIMLSVALGWAEVLGATDIFCGVNAVDYSGYPDCRPAFIQAFEQLANLATKAGVEGAGLRIHAPLQMLSKADIVREGVRLGVDFSQTVSCYQADDAGRACGHCDACRLRADGFVQAGVADPTRYVP

SEQ ID NO: 41543 - protein, 221 aa, Pseudoxanthomonas indica
  REGION 1..221: note = tr|A0A1T5LH78|A0A1T5LH78_9GAMM 7-cyano-7-deazaguanine synthase OS=Pseudoxanthomonas indica OX=428993 GN=queC PE=3 SV=1
MKKAVVLLSGGMDSAVVVAIAREQGYAVHALSVRYGQRHTSELAAAERVAQALGVAAHKTVTVDLRSIGGSALTDDIDVPESGGAGIPVTYVPARNTIMLSMALGWAEVLGAADIFCGVNAVDYSGYPDCRPEFIAAFEQLANLATKAGVEGAGLRIHAPLMRMGKDTIVREGLRLGVDFSRTVSCYQADEQGRACGHCDACRLRAAGFAEAGVADPTRYA

SEQ ID NO: 41544 - protein, 221 aa, Pseudoxanthomonas sp.
  REGION 1..221: note = tr|A0A543DBY7|A0A543DBY7_9GAMM 7-cyano-7-deazaguanine synthase OS=Pseudoxanthomonas sp. 3HH-4 OX=1690214 GN=queC PE=3 SV=1
MKKAVVLLSGGMDSAVVVAIAREQGFAVHALSVRYGQRHTSELDAAARVAATLGAAAHKTVHVDLRSIGGSALTDDIDVPEAGGPGIPVTYVPARNTIMLSVALGWAEVLGANDIFCGVNAVDYSGYPDCRPEFIEAFEKLANLATKAGVEGAGLRIQAPLLHMSKADIVREGVRLGVDFAQTVSCYQADGQGHACGHCDACRLRAAGFADAGVPDPTHYA

SEQ ID NO: 41545 - protein, 221 aa, Pseudoxanthomonas sp.
  REGION 1..221: note = tr|A0A4Q8LQ73|A0A4Q8LQ73_9GAMM 7-cyano-7-deazaguanine synthase OS=Pseudoxanthomonas sp. NML171202 OX=2480817 GN=queC PE=3 SV=1
MNNAVVLVSGGLDSAVVLAIAREHGFRTYALSVQYGQRHTSELDAAARVSQQLGAAAHKTVHVDLRSIGGSALTDDIEVPQAGGEGIPVTYVPARNTIMLSIALGWAEVLGAADIFCGVNAVDYSGYPDCRPEFISAFQTLANLATKAGVEGAGLRVHAPLQFMSKADIVREGVRLGVDFGATVSCYNADASGAACGRCDACRLRAAGFADAGVPDPTRYA

SEQ ID NO: 41546 - protein, 226 aa, Pseudoxanthomonas spadix
  REGION 1..226: note = tr|A0A3M6PU62|A0A3M6PU62_9GAMM 7-cyano-7-deazaguanine synthase OS=Pseudoxanthomonas spadix OX=415229 GN=queC PE=3 SV=1
MKNAVVLVSGGMDSAVVLAMARAQGFVPYALSVQYGQRHTSELDAAARMAAALGAAAHKVVNVDLRSIGGSALTDDIQVPVRTGEEPGGEGIPVTYVPARNTIMLSIALGWAEVLGAADIFCGVNAVDYSGYPDCRPEFIAAFQALANLATKAGVEGAGIVVHAPLQFMGKAQIVREGVALGVDFSSTVSCYNADAAGRACGHCDACRLRAAGFAEAGVADPTRYA

SEQ ID NO: 41547 - protein, 226 aa, Pseudoxanthomonas spadix
  REGION 1..226: note = tr|G7UPU6|G7UPU6_PSEUP 7-cyano-7-deazaguanine synthase OS=Pseudoxanthomonas spadix (strain BD-a59); OX = 1045855 GN=queC PE=3 SV=1
MKNAVVLVSGGMDSAVVLAMARAQGFVPYALSVQYGQRHTSELDAAARMAAALGAAAHKVVNVDLRSIGGSALTDDIQVPVRTGEEPGGEGIPVTYVPARNTIMLSIALGWAEVLGAADIFCGVNAVDYSGYPDCRPEFIAAFQTLANLATKAGVEGAGIVVHAPLQFMGKAQIVREGVALGVDFSSTVSCYNADAAGRACGHCDACRLRAAGFAEAGVADPTRYA

SEQ ID NO: 41548 - protein, 221 aa, Pseudoxanthomonas suwonensis
  REGION 1..221: note = tr|A0A0E3Z2C6|A0A0E3Z2C6_9GAMM 7-cyano-7-deazaguanine synthase OS=Pseudoxanthomonas suwonensis OX=314722 GN=queC PE=3 SV=1
MKNAVVLVSGGMDSAVVLAIAREQGYAVHALSVRYGQRHTSELDAADRVARALGAAAHKTVVVDLRSIGGSALTDDIEVPDAGGEGIPVTYVPARNTIMLSVALGWAEVLGAADIFCGVNAVDYSGYPDCRPEFIEAFERLANLATKAGVEGAGIRVHAPLIRMGKDEIVREGLRLGVDFAQTVSCYRADAEGRACGHCDACRLRAAGFAAAGVADPTRYV

SEQ ID NO: 41549 - protein, 224 aa, Pseudoxanthomonas suwonensis
  REGION 1..224: note = tr|E6WQT4|E6WQT4_PSEUU 7-cyano-7-deazaguanine synthase OS=Pseudoxanthomonas suwonensis (strain 11-1); OX = 743721 GN=queC PE=3 SV=1
MKKAVALVSGGMDSAVVLAIAREQGFAVHALSVRYGQRHTSELDAAARVASALGAAAHKTVAIDLRSIGGSALTDDIEVPEAGGEGIPVTYVPARNTIMLSAALGWAEVLGAADIFCGVNAVDYSGYPDCRPEFIEAFERLANLATKAGVEGAGIRVHAPLLHMGKDEIVREGLRLGVDFAQTVSCYRADDQGLACGHCDACQLRAAGFATAGVADPTRYITGA

SEQ ID NO: 41550 - protein, 225 aa, Pseudoxanthomonas taiwanensis
  REGION 1..225: note = tr|A0A562CX47|A0A562CX47_9GAMM 7-cyano-7-deazaguanine synthase OS=Pseudoxanthomonas taiwanensis J19 OX=935569 GN=queC PE=3 SV=1
MKKAVALVSGGMDSAVVLAIAREQGFAVHALSVRYGQRHTSELDAAARVASALGAVEHKTVAIDLRSIGGSALTDDIEVPEAGGEGIPVTYVPARNTIMLSVALGWAEVLGAADIFCGVNAVDYSGYPDCRPEFVAAFERLANLATKAGVEGAGIRVHAPLIRMGKDEIVREGLRLGVDFAQTVSCYRADEQGRACGHCDACQLRAAGFAAAGVADPTRYVAAAG

SEQ ID NO: 41551 - protein, 221 aa, unidentified
  source 1..221: note = Pseudoxanthomonas wuyuanensis
  REGION 1..221: note = tr|A0A286D4M2|A0A286D4M2_9GAMM 7-cyano-7-deazaguanine synthase OS=Pseudoxanthomonas wuyuanensis OX=1073196 GN=queC PE=3 SV=1
MKKAVVLLSGGMDSAVVVAIAREQGYAVHALSVRYGQRHTSELEAAVRVADSLGAVAHKTVHVDLRSIGGSALTDDIEVPEAGGGGIPVTYVPARNTIMLSVALGWAEVLGATDIFCGVNAVDYSGYPDCRPEFIDAFEKLANLATKAGVEGAGLRIHAPLLKLSKADIVREGVRLGVDFAQTVSCYRADEQGRACGHCDACQLRAAGFADADVPDPTRYA

SEQ ID NO: 41552 - protein, 1375 aa, Pseudozobellia sp.
  REGION 1..1375: note = tr|A0A2E5BK78|A0A2E5BK78_9FLAO Carrier domain-containing protein OS=Pseudozobellia sp. OX=2024854; GN = CML05_18895 PE=4 SV=1
MNNSNKTRLPLTQSQLSLWAGQRIHSEVPLHNVVYTFEIQGDIDGVIFKRSFEQLVEETDILRMTFSEIAGEPFQEINSTIPFQFEYLDFTEKSQEEIDQWVRVNTQSPINLAEIVFDSRLLKCDESKFIWFLKIHHLVTDAVTYQLLFHRLSDIYQARLNNNESKNELRVYRSYLEYEREQVADQELNSNKEYWDKKTSKVNSRPALYGEKWSKNSTEAKRIEITLTPTQTEKLNNLCQKTGVRSWTKSATLYNLFVTVFATYLHRTSGLSKFNIGSPAHNRSTLDFSKTAGLFIEVLPLTIKIDDDETFISLLDKIKIEGNSFLKNVHPSMVGCLNGEPPSNILNFINVEFKDFNGWPTQVRWIHNGHIDASHDIRCHVYDFKGEGDYTIAFDINTSVCPQKDYDKVALHFNSILDSLLENLENAIDQKGLEPISQSTILSGTHTPLKDSFLKKFEEFAAKTPNKVAVQSFEQTLTYSNLNKKANQLAGYLAERGIENQSRVAVFLHRSPDYLISILAIMKLGGVFVPIASDQPLERVQYILRKADCSLIITEQKLAVGLDFEKENIVSTSHFSELENQNEFSSFGHDLENLSYILFTSGSTGKPKGVGISNKSLNNYLNWARTAYSIDQNSVFPLFTSIGFDLTLTSVFLPILCGGRIIVYKENPSGPDTSVLNVFSDNLVNKIKLTPSHLDLVKEHDFSPSVLETMILGGEDLKTTSVSKIQSQFSEKLEIFNEYGPTEATVGCIVSKYDAKEHKSFSVPIGLPIDNTQVLLLDTHKNLVPQGVVGEIYLSGACLANGYINDQELTNEKFLENPFSNQSKIYRTGDLGRLNSKGELEYHGRIDSQIKLRGYRIELNDIEANLSEFEGIDSCAVMLVDNKDQKTEEKVFNCTNCGLPSNYPSTDFDENGVCHLCRAFENYEEKVHQYFKRDEELVRLLTSKRDINPNYDCISLLSGGKDSTYVLARLVGMGLRVLAFTMDNGYISEQAKENIDRIVKRLGVDHVYGKTPHMNAIFVDSLQRHHNVCNGCFKTIYTLSTKIAVEKQIPFIVTGLSRGQFFETRLTEELFWDQQLDSEKIDNTILEARKLYHQENDAVKELLDVSMFDSDEVFDQVQFVDFYRFSDVSLEEMLVYLKKQVGWKRPTDTGRSTNCLINQVGIYVHKKDLGYSNYSFPYSWDVRLGHKTRDESLEEINEVIDETEVKRIMNEIGYDPSAQQENDKKLVAYFTGAEGLSIEKLRKFMNQRVPSYMVPTLFHFVAEMPLTNNGKIDRAKLSENKIKPIPTDCPYVAPSNEIEELVQKIWMDVLLLDRIGIKEDFISLGGHSLAAIRVTARINEEIETNFPLNKIFEYPTIESYSKYVEETLIELMNKN

SEQ ID NO: 41553 - protein, 221 aa, Psychrilyobacter sp.
  REGION 1..221: note = tr|A0A369XUR6|A0A369XUR6_9FUSO 7-cyano-7-deazaguanine synthase OS=Psychrilyobacter sp. S5; OX = 2283384 GN=queC PE=3 SV=1
MNKNSCVLVFSGGQDSTTLLFHAKKLYKEVIAISFNYGQKHSLELECAKELCRKNEVEHHILDMGLLNQLAPNALTRSDLEVEKGEVAEDEVPNTFVDGRNMIFLTFAGVFAKQRDINVIMTGVSQSDFSGYPDCRDVFIKSLNTTLNLAMDYTFVLETPLMWLDKAETWNMAYELGVLDIIKNETLTCYNGVVGNGCGDCPACALRKNGYLEFKEKFLKV

SEQ ID NO: 41554 - protein, 219 aa, Psychrobacillus insolitus
  REGION 1..219: note = tr|A0A2W7N2P6|A0A2W7N2P6_9BACI 7-cyano-7-deazaguanine synthase OS=Psychrobacillus insolitus OX=1461 GN=queC PE=3 SV=1
MKQEKAIIVFSGGQDSTTCLFWAKERFKEIEAVTFDYGQRHSLEIECAKEIAKELGIKHHILDMSLLNQLAPNALTRDDIVVEDGGEGELPSTFVPGRNLLFLSFAGVLASQVGARHIVTGVCETDFSGYPDCRDIFVKSLNVTLNLSMDTSFVIDTPLMWLNKAQTWELADQLGVLEFVRERTLTCYNGVIADGCGECPACKLRKRGLDEYLSFKKGS

SEQ ID NO: 41555 - protein, 557 aa, unidentified
  source 1..557: note = Psychrobacillus lasiicapitis
  REGION 1..557: note = tr|A0A544TE00|A0A544TE00_9BACI Uncharacterized protein OS=Psychrobacillus lasiicapitis OX=1636719; GN = FG382_03015 PE=4 SV=1
MDCIHDPSIDRSNGQIFCEKKIMGDKDMANKCKLNLRHKEFYPIQGAGYEGFFRGYFYYENQYVTHENFVDIVKEASSEEITKWNGEFALILQTEDETTLVTDKKRTIPLFYSKHETNSWIVQDFIEPKPSMSIRKDSEEELLLAGFVSGDKTLFDGWYQLEVASIVHLKENASKYCYYSYVTEKDQDSLDNFAEELAHILHHIFDDLVERLDGRKIILPLSGGYDSRIVALLLKDKGLSDSIITFTYGRPGNGEATVSKQIADRLGLQWKYFAYDKAMWEELYKSKLWKDYVVYACNGTSVAHLQDFPSTKLLVEEEGLENAVFIPGHSLDFLGGSHLPYEAILDKEFTSQEVVDFIIPKHFRLWQLENGLSHTTSDIGKSVTKDVSSYKTLTNERVTSIIDEWNWKERQAKFIINSVRVYEYFDQDWTLPLWDDRLIYFFSKIPADLKYKKYLYDFALHKMYPDFYPLPPKPGAENSLKNKYGVLYPLLRKVYRKRKLYRQYFEEPMEWYGIYPTYKQYKQSLSFKRNGTKYTHPYNINAFIAKDMIQMMKELAK

SEQ ID NO: 41556 - protein, 219 aa, unidentified
  source 1..219: note = Psychrobacillus lasiicapitis
  REGION 1..219: note = tr|A0A544T6X9|A0A544T6X9_9BACI 7-cyano-7-deazaguanine synthase OS=Psychrobacillus lasiicapitis OX=1636719 GN=queC PE=3 SV=1
MKQEKAIIVFSGGQDSTTCLFWAKERFREIEAVTFDYGQRHSLEIECAKAITEELGIKHHILDMSLLNQLAPNALTREDIQVDDGEEGGLPSTFVPGRNMLFLSFAGVLASQVGAKHIVTGVCETDFSGYPDCRDIFVKSLNVTLNLAMDDTFVVDTPLMWLNKAQTWELADELGALEFVREKTLTCYNGVMADGCGECPACKLRQRGLDEYLSFKKES

SEQ ID NO: 41557 - protein, 219 aa, Psychrobacillus psychrodurans
  REGION 1..219: note = tr|A0A1I4X8P5|A0A1I4X8P5_9BACI 7-cyano-7-deazaguanine synthase OS=Psychrobacillus psychrodurans OX=126157 GN=queC PE=3 SV=1
MRQEKAIIVFSGGQDSTTCLFWAKERFKEIEAVTFDYGQRHSLEIECAKEITKELGVKHHILDMSLLNQLAPNALTRDDIKVENGEDGGLPSTFVPGRNLLFLSFAGVLASQVGAKHIVTGVCETDFSGYPDCRDIFVKSLNVTLNLSMDTTFVIDTPLMWLNKAQTWELADQLGALDFVREKTLTCYNGVIADGCGECPACKLRNKGLNEYLSFKKGS

SEQ ID NO: 41558 - protein, 224 aa, Psychrobacillus psychrotolerans
  REGION 1..224: note = tr|A0A1I5XZG1|A0A1I5XZG1_9BACI 7-cyano-7-deazaguanine synthase OS=Psychrobacillus psychrotolerans OX=126156 GN=queC PE=3 SV=1
MKQEKAIIVFSGGQDSTTCLFWAKERFKEIEAVTFDYGQRHSLEIECAMEIAKELGVKHHILDMSLLNQLAPNALTRDDIKVEDGEDGGLPSTFVPGRNLLFLSFAGVLASQVGAKHIVTGVCETDFSGYPDCRDIFVKSLNVTLNLSMDTTFVIDTPLMWLDKAQTWELADQLGALEFVREKTLTCYNGVIADGCGECPACKLRNKGLEDYLTSSKSIEGVTL

SEQ ID NO: 41559 - protein, 219 aa, unidentified
  source 1..219: note = Psychrobacillus soli
  REGION 1..219: note = tr|A0A544TGA8|A0A544TGA8_9BACI 7-cyano-7-deazaguanine synthase OS=Psychrobacillus soli; OX = 1543965 GN=queC PE=3 SV=1
MKQEKAIIVFSGGQDSTTCLFWAKERFREIEAVTFDYGQRHRLEIECAKAITEELGIKHHILDMSLLNQLAPNALTRDDIEVEDGEEGGLPSTFVPGRNLLFLSFAGVLASQVGAKHIVTGVCETDFSGYPDCRDIFVKSLNVTLNLSMDDTFVIDTPLMWLNKAQTWELADQLGALEFVRKRTLTCYNGVIADGCGECPACKLRKRGLDEYLSFKKES

SEQ ID NO: 41560 - protein, 535 aa, unidentified
  source 1..535: note = Psychrobacillus soli
  REGION 1..535: note = tr|A0A544SM31|A0A544SM31_9BACI Uncharacterized protein OS=Psychrobacillus soli OX=1543965 GN=FG383_19025; PE = 4 SV=1
MGDKDMANKCKLNLRHKDFYPIKGVGYEGFFRGYFYYENQYVTHENFVDLFKEVSLTEAAAWNGEFALILQTEDEITLVTDKKRTIPLFYSKSETNGWIVQDYIEPKTSMSIREDAEEELLLAGFVTGEKTLFKDWYQLEVATIVHLTEDASKQSYYSYVTEKDHDSIDNFAEELAHILHNIFDELVVRLAGRKIILPLSGGYDSRIMALLLKDKGLSDSIITFTYGRPGNGEATVSKEIADRLDLKWKYFAYDKAMWEDLYKSKLWKDYVVYACNGTSVAHLQDFPSTKLLVEEEELENAVFIPGHSLDFLGGSHLPYEAILDKEFTSSEVVDFIIPKHFRLWQLANGLSHTTSDIGKSVAKDVSAYTALTNERVTSIIDEWNWKERQAKFIINSVRVYEYFDQDWSMPLWDDRLIYFFSKIPADLKYKKYLYDYTLHKMYPDFYPLPQKPGAENSLKNKYGVLYPLLRKVYRKRKLYKQYFDEPMEWYGIYPTYKQYKHSLSFKRNGTKYNNPYNINSFIAKDMIQMMKELTK

SEQ ID NO: 41561 - protein, 530 aa, Psychrobacillus sp.
  REGION 1..530: note = tr|A0A1H9QZX8|A0A1H9QZX8_9BACI Asparagine synthase (Glutamine-hydrolysing) OS=Psychrobacillus sp. OK032; OX = 1884358 GN=SAMN05518872_101529 PE=4 SV=1
MANKCITNLRHKDFYPIRGAGYEGFFRGYFYYENQYVTHENFVDIFKESSLNEVAAWNGEFALILQAEDEVILVTDKKRTIPLFYTKSETNDWIVQDYIEPKASMSIRKEAEEELLLAGFVTGDKTLFDGWYQLEVATIVRLKENASKESYYSYVAEKEQDSIETFAEELAHILHNIFDDLVVRLAGRKIILPLSGGYDSRIIALLLKDKGLSDSIITFTYGRPGNGEATVSKEIADRLGLKWKYFAYDKAMWENLYRSKLWKDYVVYACNGTSVAHLQDFPSTKLLVEEEGLEDAVFIPGHSLDFLGGSHLPYEAILDKEFTSSEVVDFIIPKHFRLWQLANGLSHTTSDIGKAVTKDVSAYKTLTNERVTSIIDEWNWKERQAKFIINSVRVYEYFDQDWSMPLWDDRLIYFFSKIPADLKYKKYLYDYALHKMYPDFYPSPQKPGAENSLKNKYGVLYPLLRKVYRKRKLYRQYFEEPMEWYGIYPTYKQYKQSLSFKRNGTKYTHPYNINAFIAKDMIQMMKELTK

SEQ ID NO: 41562 - protein, 219 aa, Psychrobacillus sp.
  REGION 1..219: note = tr|A0A544TMJ1|A0A544TMJ1_9BACI 7-cyano-7-deazaguanine synthase OS=Psychrobacillus sp. Z8; OX = 2325572 GN=queC PE=3 SV=1
MKQEKAIIVFSGGQDSTTCLFWAKERFKEIEAVTFDYGQRHSLEIECAKEITEELGIKHHILDMSLLNQLAPNALTRDDIEVEEGEEGELPSTFVPGRNLLFLSFAGVLASQVGAKHIVTGVCETDFSGYPDCRDIFVKSLNVTLNLSMDDTFVIDTPLMWLNKAQTWELADQLGALEFVRERTLTCYNGVIADGCGECPACKLRKKGLDEYLSFKKES

SEQ ID NO: 41563 - protein, 259 aa, Psychrobacter alimentarius
  REGION 1..259: note = tr|A0A144PNA1|A0A144PNA1_9GAMM 7-cyano-7-deazaguanine synthase OS=Psychrobacter alimentarius OX=261164 GN=queC PE=3 SV=1
MTNATTQDTSINPISDANVSDLHKRQNAVVLLSGGLDSVTCLYWAKARYASVTAVSFNYGQRHNSELVAAKAIAEAAEVNHRIIDIDIAQLGGSSLTDHSMIVPDGDADKFPNKKHDEIDNDAIPNTYVPARNTIFLSYALAVAEVTDANHIVIGVSSVDYSGYPDCRPEYIAAFEHMANLATKAGVTGHHLSIQTPLQQLSKAQTIELGLSLGVDYGQTISCYRADASGLACGVCDSCALRRQGFAQAGVADPTHYQA

SEQ ID NO: 41564 - protein, 294 aa, Psychrobacter aquaticus
  REGION 1..294: note = tr|U4T6Q5|U4T6Q5_9GAMM 7-cyano-7-deazaguanine synthase OS=Psychrobacter aquaticus CMS 56 OX=1354303; GN = queC PE=3 SV=1
MTLNYKGIFIIAIWFCNGRIFAKITNFRKPIIDITMTNVTTQSTFSNQQSDATLTTLHKSQNAVVLLSGGLDSVTCLYWAKARYASVTAVSFNYGQRHNSELVAAQAIAQAAEVNHRIIDIDIAQLGGSSLTDHSMIVPDGDTDKFPNKKRDEIDNDAIPNTYVPARNTIFLSYALAVAEVTDANHIVIGVSSVDYSGYPDCRPEYIAAFEHMANLATKAGVTGHHLTVQTPLQQLSKAKTIELGLSLGVDYGQTISCYRADVNGLACGVCDSCALRRQGFEQAGVTDPTHYQP

SEQ ID NO: 41565 - protein, 259 aa, Psychrobacter arcticus
  REGION 1..259: note = sp|Q4FTN4|QUEC_PSYA2 7-cyano-7-deazaguanine synthase; OS = Psychrobacter arcticus (strain DSM 17307 / 273-4); OX = 259536 GN=queC PE=3 SV=2
MTNTALPTSSADQENDTQLNELHKSQNAVVLLSGGLDSVTCLYWAKARYASVTAVSFDYGQRHNSELIAAKAIAETAGVNHRIIDIDIAQLGGSSLTDHSMIVPDGDTDKFPDKKRDEIDNDAIPNTYVPARNTIFLSYALAVAEVTDSNHIVIGVSSVDYSGYPDCRPEYIAAFQHMANLATKAGVTGHHLSIQTPLQQLSKAKTIELGLSLGVDYGQTISCYQADANGFACGVCDSCALRRQGFAQAGVADPTHYQS

SEQ ID NO: 41566 - protein, 259 aa, Psychrobacter cryohalolentis
  REGION 1..259: note = sp|Q1QCP3|QUEC_PSYCK 7-cyano-7-deazaguanine synthase; OS = Psychrobacter cryohalolentis (strain K5) OX=335284; GN = queC PE=3 SV=1
MTNTALPTSSADQENDTQLNELHKSQNAVVLLSGGLDSVTCLYWAKARYASVTAVSFDYGQRHNSELVAAKAIAETAGVNHRIIDIDIAQLGGSSLTDHSMIVPDGDTDKFPDKKRDEIDNDAIPNTYVPARNTIFLSYALAVAEVTDSNHIVIGVSSVDYSGYPDCRPEYIAAFQHMANLATKAGVTGHHLSIQTPLQQLSKAKTIELGLSLGVDYGQTISCYQADANGLACGVCDSCALRRQGFAQAGVADPTHYQS

SEQ ID NO: 41567 - protein, 284 aa, Psychrobacter fozii
  REGION 1..284: note = tr|A0A2V4VLF6|A0A2V4VLF6_9GAMM 7-cyano-7-deazaguanine synthase OS=Psychrobacter fozii; OX = 198480 GN=queC PE=3 SV=1
MASWFCNGWIFAKITVFRKPIIDTIMTNVTSQSTADNTTLDSELDSLHNYQNAVVLLSGGLDSVTCLYWAKARYASVTAVSFNYGQRHNSELVAAKTIAETAEVNHRIIDIDIAQLGGSSLTDHSMIVPDGDSDKFPNKNRDEIDNDAIPNTYVPARNTIFLSYALAVAEVADANHIVIGVSSVDYSGYPDCRPEYIAAFEHMANLATKAGVTGHHLSIQTPLQQLSKAKTIELGLSLGVDYGQTISCYRADENGLACGVCDSCTLRRQGFEQAGVADPTHYQS

SEQ ID NO: 41568 - protein, 249 aa, Psychrobacter frigidicola
  REGION 1..249: note = tr|A0A5C7A3V0|A0A5C7A3V0_9GAMM 7-cyano-7-deazaguanine synthase OS=Psychrobacter frigidicola OX=45611 GN=queC PE=3 SV=1
MTNIKLNNPTEKTQNAVVLLSGGLDSVTCLYWAKARYATVTALSFDYGQRHNSELVAAKTIAELAGVNHRIIDIDIAQLGGSSLTDHSMIVPDGDADKFPNKKHDVIDNDAIPNTYVPARNTIFLSYALAVAEVTDANHIVIGVSSVDYSGYPDCRPEYIAAFEHMANLATKAGVTGHHLSIQTPLQQLSKAQTIELGLSLGVDYGQTISCYQADSHGLACGVCDSCALRRQGFAQVGIADPTHYQSQP

SEQ ID NO: 41569 - protein, 259 aa, Psychrobacter immobilis
  REGION 1..259: note = tr|A0A2V2AAW4|A0A2V2AAW4_PSYIM 7-cyano-7-deazaguanine synthase OS=Psychrobacter immobilis; OX = 498 GN=queC PE=3 SV=1
MTNVTSQSASNNQAFDTDLNALHKSQNAVVLLSGGLDSVTCLYWAKARYASVTAVSFNYGQRHNSELVAAKAISETAGVNHRIIDIDIAQLGGSSLTDHSMIVPDGDTDKFPNKKRDEIDNDAIPNTYVPARNTIFLSYALAVAEVTDANHIVIGVSSVDYSGYPDCRPEYIAAFEHMANLATKAGVTGHHLSIQTPLQQLSKAKTIELGLSLGVDYGQTISCYQADAQGLACGVCDSCALRRQGFSQAGITDPTHYQS

SEQ ID NO: 41570 - protein, 259 aa, Psychrobacter pacificensis
  REGION 1..259: note = tr|A0A1G6UUD0|A0A1G6UUD0_9GAMM 7-cyano-7-deazaguanine synthase OS=Psychrobacter pacificensis OX=112002 GN=queC PE=3 SV=1
MTNVTLQNPSMNQASNSNDTPHKNQNAVVLLSGGLDSVTCLYWAKAHYASVTAVSFDYGQRHNSELVAAKRIAETASVNHRIIDIDIAQLGGSSLTDHSMIVPDGDTDKFPNKKRDEIDNDAIPNTYVPARNTIFLSYALAVAEVTDANHIVIGVSSVDYSGYPDCRPEYIEAFEHMANLATKAGVTGHRLSIQTPLQKLSKAQTIELGLSLGVDYGQTISCYRADVNGLACGVCDSCALRRQGFAQAGVTDPTHYQAG

SEQ ID NO: 41571 - protein, 255 aa, unidentified
  source 1..255: note = Psychrobacter pasteurii
  REGION 1..255: note = tr|A0A1R4EG02|A0A1R4EG02_9GAMM 7-cyano-7-deazaguanine synthase OS=Psychrobacter pasteurii; OX = 1945520 GN=queC PE=3 SV=1
MTDALTSTAPTNSSTASDTANENAVVLLSGGLDSVTCLYWAKDRYAKVTAVSFNYGQRHNSELVAAKNIANTAGVDHKIIDIDIAQLGGSSLTDHDMTIPDGDADKFPTHTDSIDNDAIPNTYVPARNTIFLSYALAVAEVTEANHIVIGVSSVDYSGYPDCRPEYIEAFEVMANLATKAGVTGHKLHIQTPLQQLSKAQTIQLGNSLGVDYSQTISCYKADSEGRACGICDSCTLRKRGFSDAGLADPTRYSAG

SEQ ID NO: 41572 - protein, 254 aa, Psychrobacter phenylpyruvicus
  REGION 1..254: note = tr|A0A379LKD1|A0A379LKD1_9GAMM 7-cyano-7-deazaguanine synthase OS=Psychrobacter phenylpyruvicus OX=29432 GN=queC PE=3 SV=1
MTDALTSISPTNHTASDSCNENAVVLLSGGLDSVTCLYWAKDRYAKVTAVSFNYGQRHNSELVAAKNIANQAGVDHKIIDIDIAQLGGSSLTDHDMTVPDGDADKFPSHTDDIDNDAIPNTYVPARNTIFLSYALAVAEVTEANHIVIGVSSVDYSGYPDCRPEYINAFEVMANLATKAGVTGHKLYIQTPLQKLSKAQTIQLGNSLGVDYSQTISCYKADSEGRACGICDSCTLRKRGFSDAGLADPTRYATN

SEQ ID NO: 41573 - protein, 255 aa, unidentified
  source 1..255: note = Psychrobacter piechaudii
  REGION 1..255: note = tr|A0A1R4GG14|A0A1R4GG14_9GAMM 7-cyano-7-deazaguanine synthase OS=Psychrobacter piechaudii OX=1945521 GN=queC PE=3 SV=1
MTDALTSPTPSTTHTASDSSNENAVVLLSGGLDSVTCLYWAKDRYAKVTAVSFNYGQRHNSELVAAKNIANQAGVDHKIIDIDIAQLGGSSLTDHDMTIPDGDADKFPTHTDNIDNDAIPNTYVPARNTIFLSYALAVAEVTEANHIVIGVSSVDYSGYPDCRPEYINAFEVMANLATKAGVTGHKLHIQTPLQQLSKAQTIQLGNSLGVDYSQTISCYKADSEGRACGICDSCTLRKRGFSDGGLADPTRYSAN

SEQ ID NO: 41574 - protein, 260 aa, Psychrobacter piscatorii
  REGION 1..260: note = tr|A0A0T6DS15|A0A0T6DS15_9GAMM 7-cyano-7-deazaguanine synthase OS=Psychrobacter piscatorii OX=554343 GN=queC PE=3 SV=1
MTNVTLHNNSANQASDAELDTLNKNQNAVVLLSGGLDSVTCLYWAKARYASVTAVSFDYGQRHNSELVAAKRIAETAGVNHRIIDIDIAQLGGSSLTDHSMIVPDGDTDKFPNKKRDEIDNDAIPNTYVPARNTIFLSYALAVAEVTDANHIVIGVSSVDYSGYPDCRPEYIEAFEHMANLATKAGVTGHRLSIQTPLQKLSKAQTIELGLSLGVDYGQTISCYRADVNGLACGVCDSCALRRQGFAQAGVTDPTHYQAG

SEQ ID NO: 41575 - protein, 249 aa, Psychrobacter sp.
  REGION 1..249: note = tr|A0A1D9CXG0|A0A1D9CXG0_9GAMM 7-cyano-7-deazaguanine synthase OS=Psychrobacter sp. AntiMn-1 OX=1720344 GN=queC PE=3 SV=1
MNQASNSNDTPHKNQNAVVLLSGGLDSVTCLYWAKARYASVTAVSFDYGQRHNSELVAAKTIAETAGVNHRIIDIDIAQLGGSSLTDHSMIVPDGDTDKFPSKKHDEIDNDAIPNTYVPARNTIFLSYALAVAEVTDANHIVIGVSSVDYSGYPDCRPEYIEAFEHMANLATKAGVTGHRLSIQTPLQKLSKAQTIELGLSLGVDYGQTISCYRADANGLACGVCDSCALRRQGFAQAGVTDPTHYQAG

SEQ ID NO: 41576 - protein, 256 aa, Psychrobacter sp.
  REGION 1..256: note = sp|A5WGB5|QUEC_PSYWF 7-cyano-7-deazaguanine synthase; OS = Psychrobacter sp. (strain PRwf-1) OX=349106 GN=queC; PE = 3 SV=1
MTDASADALTSPSNSGASQDTSQQNAVVLLSGGLDSVTCLYWAKARYAKVTAVSFNYGQRHNSELVAAKSIAGQAGVNHKIIDIDIAQLGGSSLTDHDMTVPDGDADKFPTHTDDIDNQAIPNTYVPARNTIFLSYALAVAEVTDANHIVIGVSSVDYSGYPDCRPEYIEAFEVMANLATKAGVTGHKLHIQTPLQKLSKAQTIQLGNSLGVDYSQTISCYKADSEGRACGICDSCTLRKRGFSDAGLADPTRYAG

SEQ ID NO: 41577 - protein, 252 aa, Psychrobacter urativorans
  REGION 1..252: note = tr|A0A0M4TG49|A0A0M4TG49_9GAMM 7-cyano-7-deazaguanine synthase OS=Psychrobacter urativorans OX=45610 GN=queC PE=3 SV=1
MTDLTMTNATLTASTDKTQNAVVLLSGGLDSVTCLYWAKSRYASVTALSFNYGQRHNSELIAAKAIAESAGVNHRIIDIDIAQLGGSSLTDHSMIVPDGDADKFPNKKHDEIDNDAIPNTYVPARNTIFLSYALAVAEVTDANHIVIGVSSVDYSGYPDCRPEYIAAFEHMANLATKAGVTGHHLKIQTPLQQLSKAQTIELGLSLGVDYGQTISCYQADSQGHACGVCDSCALRRQGFAQVGIADPTHYQA

SEQ ID NO: 41578 - protein, 221 aa, Psychromonas ingrahamii
  REGION 1..221: note = sp|A1STX3|QUEC_PSYIN 7-cyano-7-deazaguanine synthase; OS = Psychromonas ingrahamii (strain 37) OX=357804 GN=queC; PE = 3 SV=1
MSKKVVVIYSGGMDSFTVLHKAMQQGLTPYALTFDYGQRHIKEIEVAREVCEELGVHHKVIDISAINQLIGGSSLTDSSIDVAQGHYQQESMKSTVVPNRNMILLSLAIGYAVSLGAEQVYYGAHSGDHEIYPDCRPIFVEKMNDVAAVANYEKVEIFSPYLNNNKSGILKDGLAMGLDYSKTWTCYNGREKACGKCGSCVERLEAFAANGLKDPIAYEDT

SEQ ID NO: 41579 - protein, 221 aa, Psychromonas sp.
  REGION 1..221: note = tr|A0A4Y8A0B0|A0A4Y8A0B0_9GAMM 7-cyano-7-deazaguanine synthase OS=Psychromonas sp. RZ22; OX = 2555643 GN=queC PE=3 SV=1
MSKKVVVIYSGGMDSYTVLHKAIEEGLTPFALTFDYGQRHVKEIKVASDVCKELGIHHKVIDITAINQLIGGSSLTDNSIDVALGHYQNDNMKSTVVPNRNMILLSLAIGYAVSIGAEKVYYGAHSGDHEIYPDCRPIFVEKMNEVAAVANYEATEIYSPYLNSNKIGILKDGIRMGLDYSKTWTCYNGREKACGQCGSCVERLEAFEQNGIKDPIAYEIE

SEQ ID NO: 41580 - protein, 220 aa, Psychromonas sp.
  REGION 1..220: note = tr|A0A366WAZ8|A0A366WAZ8_9GAMM 7-cyano-7-deazaguanine synthase OS=Psychromonas sp. B3M02; OX = 2267226 GN=queC PE=3 SV=1
MSKKVVVIYSGGMDSYTVLHKAIEEGLTPFALTFDYGQRHVKEIQVASEVCQSLDINHKIIDITAINQLIGGSSLTDSSIEVATGDYDNNNMVNTVVPNRNMILLSLAIGYAVSIGAEQVYYGAHSGDHEIYPDCRPIFVDKMNEVAAVANYEKTQIHSPYLKSDKVGILKDGLRMGLDYSKTWTCYNGREKACGQCGSCKERLEAFASNGLTDPISYEA

SEQ ID NO: 41581 - protein, 219 aa, Psychrosphaera saromensis
  REGION 1..219: note = tr|A0A2S7UY56|A0A2S7UY56_9GAMM 7-cyano-7-deazaguanine synthase OS=Psychrosphaera saromensis OX=716813 GN=queC PE=3 SV=1
MFEKVVVIFSGGMDSYTVLNHALKQGYDVHALTFDYGQRHVKEIEYAKNACEELNVHHKIVDISAINSIIAGSSLTDNIDIPEGHYEAETMQSTVVPNRNMILLSLAVGYAVSLKATKVFYGAHSGDHAIYPDCRPEFVKRMQDVCAIANYDAVDIVVPYLHSDKIEILADGLNMKLDYNKTWTCYNGREKACGKCGACQERLEAFEKNNMTDPLEYEA

SEQ ID NO: 41582 - protein, 235 aa, unidentified
  source 1..235: note = Puniceibacterium antarcticum
  REGION 1..235: note = tr|A0A2G8RET3|A0A2G8RET3_9RHOB 7-cyano-7-deazaguanine synthase OS=Puniceibacterium antarcticum OX=1206336 GN=queC PE=3 SV=1
MKMKTIVICSGGLDSVSLAHMVASEHQLTRLVSFDYGQRHRKELDFAALCAKRLDVAHEVIDLRAIGMALTGSALTDDIDVPDGHYAEESMRITVVPNRNAIMLAVAFGVAAARGDEAVATAVHGGDHFIYPDCRPAFTEAFEAMQKFALDGYADVSLYTPFVNRTKADIVTAGTLHNTPFAETWSCYKGGTQHCGRCGTCVERREAFDLADVVDPTTYEDPDFWIQAVARKAFG

SEQ ID NO: 41583 - protein, 643 aa, unidentified
  source 1..643: note = Puniceibacterium sp.
  REGION 1..643: note = tr|A0A0J5TEQ6|A0A0J5TEQ6_9RHOB Putative PP-loop superfamily ATPase OS=Puniceibacterium sp. IMCC21224; OX = 1618204 GN=IMCC21224_113480 PE=4 SV=1
MGGAAPLPELVVTCFAPLADREGDEKLRFEIDGKVKSISLRISQMSRQLVTHLPDMAIDLIELAAFVYGIDSSVSRGGLADQQMGAKWHRSFLVEVPVRALDRWSDPDLKRELEETLMFLSGDRFTFRFVQIQGGSSGPTGYFDFGPNSSWKPDSVLMFSGGLDSFAGALEEIIDRRHRVALISHFSSTKIAPIQNALQKHMAQELGTEMLKHIPMRVQLGGGTNAEGTHRSRSFLFAALGMATAVAFGRERVSFYENGVVSLNLPPVGNVLGTRATRTTHPQTLQRFQSLFSRIFDASLRVDNPFFWRTKTDVVETIARLGMADQIAFTRSCADVHNQTKQHPHCGRCSQCIDRRFAIMAADLTAFDPEEAYRIDLMTGRRERVQDKEVALSYVRSAQGYEMMSGTDLVAQYPAILNAVDHLGEPPDTALTRMASLLRRHGRSVSTVMRKELAAQRPDQFSLDSLARMFGDLQRAQVMPAEQIIVSNVDTIERGEPASLVFDRKRKLVVINDAITIKGTAYRLLDCLANEFLAGAGKGLDLLDYPMTDAWKLAKCAGLSDDAALRQAVSRSRKQLGLKFSAAGFEAAEGEALIENIPWSGYRLNPELAKIRMLSAKDNHSKTSKSSSSGSGPRLRKRASRST

SEQ ID NO: 41584 - protein, 218 aa, unidentified
  source 1..218: note = Puniceicoccaceae bacterium
  REGION 1..218: note = tr|A0A2E6TMV5|A0A2E6TMV5_9BACT 7-cyano-7-deazaguanine synthase OS=Puniceicoccaceae bacterium OX=2026784 GN=queC PE=3 SV=1
  VARIANT 163: note = Xaa can be any naturally occurring amino acid
  VARIANT 170: note = Xaa can be any naturally occurring amino acid
  VARIANT 172..173: note = Xaa can be any naturally occurring amino acid
  VARIANT 185: note = Xaa can be any naturally occurring amino acid
MKAVVLFSGGLDSTVLAQQLIQQEASVRLLSIDYGQRHEKELQHSSFIAEKLKVPHRILTLPNLADILGGSSLTDPNIELPEGHYAEESMKATVVPNRNMILLALAAGYALAVDFDTIAYAAHAGDHTIYPDCRPAFANAMETALSLADWKNLDLHRPFVNLXKADLVKXGXXLGAPLHLSWSCXAGRKLHCGKCGTCVERKEAFAIAKVPDPTEYEA

SEQ ID NO: 41585 - protein, 240 aa, unidentified
  source 1..240: note = Puniceicoccaceae bacterium
  REGION 1..240: note = tr|A0A2D7F4C2|A0A2D7F4C2_9BACT 7-cyano-7-deazaguanine synthase OS=Puniceicoccaceae bacterium OX=2026784 GN=queC PE=3 SV=1
  VARIANT 43: note = Xaa can be any naturally occurring amino acid
  VARIANT 169: note = Xaa can be any naturally occurring amino acid
MQKQNTILIYSGGMDSTVLLYKLLNDNYTVRCLSIDYGQKHKXELNYAKSLCEQVSVEHKIIDLTSVTELLSNSSLINPEQAIPQGHYEKESMKATVVPNRNMILLSLATAWAINCKASSVSYAAHAGDHTIYPDCRESFANGMNEVMQLCDWHSVKLNRPFVDMTKAXICKLGAQLQVPYEKTWSCYQGNELHCGRCGTCVERREAFYLAGVEDPTEYEAQAPTIEQMLETNWKLNEEY

SEQ ID NO: 41586 - protein, 236 aa, Pusillimonas ginsengisoli
  REGION 1..236: note = tr|A0A4U5LIM5|A0A4U5LIM5_9BURK 7-cyano-7-deazaguanine synthase OS=Pusillimonas ginsengisoli OX=453575 GN=queC PE=3 SV=1
MSTSWQPHRRALVLFSGGQDSTTCLAWALARYGYVETIGFDYGQRHRVELDCRTTLRLRLAAQRDDWALRLGDDHLLSVDVLGQLGASAMTDDIAIATQADGLPNTFVPGRNLLFFTLAAALAYRRGLDVLVGGMSQTDYSGYPDCRDNTLKALQVALSLGIDRPLTLETPLMWLNKADTWELAQQLGGPALVELVRTETHTCYLNQRDTLHTWGYGCGTCPACVLRAQGHRQWCA

SEQ ID NO: 41587 - protein, 236 aa, Pusillimonas sp.
  REGION 1..236: note = tr|A0A4R1LP46|A0A4R1LP46_9BURK 7-cyano-7-deazaguanine synthase OS=Pusillimonas sp. YR330; OX = 2135726 GN=queC PE=3 SV=1
MSRALVLFSGGQDSTACLAWALARYSHVETVGFDYGQRHMVEMECRLIVRQEMKNQFPEWASRLGDDHVLDLRLLGQLSDCALTAEKEIAFANNGLPNTFVPGRNLLFLTYAAALAYRRDINVLIGGMCETDYSGYPDCRDNTMQALQLALNLGMDQHFRIETPLMWLDKAATWRLAGEVGGQKLIALTQEHTHTCYLGDRSVRHDWGYGCGTCPACELRARGYQEFSADAEASHD

SEQ ID NO: 41588 - protein, 235 aa, Pusillimonas sp.
  REGION 1..235: note = tr|A0A2N4U5L3|A0A2N4U5L3_9BURK 7-cyano-7-deazaguanine synthase OS=Pusillimonas sp. JR1/69-3-13 OX=2045210 GN=queC PE=3 SV=1
MSRALVLFSGGQDSTACLAWALARYTHVETIGFNYGQRHIVEMECRQDVLRELRNQFPEWSGRLGDDHVLDLSLLGQLSDCALTAEKEIAFADNGLPNTFVPGRNLLFLTYAAALAYRRSIDILVGGMCETDYSGYPDCRDNTMQALQLALNLGMDQHFRIETPLMWLDKAATWQFADATGGQKLIALTQEHTHSCYLGDRSIRHDWGYGCGKCPACELRARGYLQFMATASRAE

SEQ ID NO: 41589 - protein, 231 aa, unidentified
  source 1..231: note = Unknown
  REGION 1..231: note = tr|A0A1E4ZJX4|A0A1E4ZJX4_9BACT 7-cyano-7-deazaguanine synthase OS=PVC group bacterium (ex Bugula neritina AB1) OX=1868283 GN=queC PE=3 SV=1
MLKKAIILYSGGLDSSTLLALLHYRGYEIYTLTFDYGQKHSVELEKSTLLSKDYSVKDSKVITIDLRSFGGSSLTSNVPVNKHLSENFTTNEIPLTYVPARNILFLSYALAWGEVNEVYDIFIGVSQIDYSGYPDCRKNFIDSFVKMANLGTKAGVSGRSFNVHTPFIYLSKSEIITLGTFLDLNYGKTHSCYDPSSDGNACGFCESCLLRKKGFKEAEVEDPTKYTENLL

SEQ ID NO: 41590 - protein, 249 aa, unidentified
  source 1..249: note = Pyrinomonas methylaliphatogenes
  REGION 1..249: note = tr|A0A0B6X0L5|A0A0B6X0L5_9BACT 7-cyano-7-deazaguanine synthase OS=Pyrinomonas methylaliphatogenes OX=454194 GN=queC PE=3 SV=1
MGGSNEIVDQSVTEVGSEFEGSRTTSDPRFAVCLVSGGMDSCVTAAIAREENDRLAFLHVSYGQRTQARERRAFEDLADFYGVEQRLTVSLESLARIGGSSLTDERIPVAEANLASRQIPTSYVPFRNAHLLATAVSWAEVLGAGRIYIGAVAEDSSGYPDCRPEFYAAFQRAIDVGTRPETRIEIRTPVIHMRKSAIVRRGIELGAPFALTWSCYRNEDRACGHCDSCALRLRAFREAGIADPIPYAD

SEQ ID NO: 41591 - protein, 218 aa, unidentified
  source 1..218: note = Quasibacillus thermotolerans
  REGION 1..218: note = tr|A0A0F5I9L6|A0A0F5I9L6_9BACI 7-cyano-7-deazaguanine synthase OS=Quasibacillus thermotolerans OX=1221996 GN=queC PE=3 SV=1
MKNEKAVVVFSGGQDSTTCLFWAKERFAEVIAVTFDYGQRHRLELECAADIARDLQVPHHILDMSLLNQLAPNALTRSDIEITEKEGQPPSTFVEGRNLLFLSFAAVLAKQYDARHIVTGVCETDFSGYPDCRDVFIKSLNVTLNLSMDTNFVIHTPLMWLDKAETWELADELGAFEYVRERTLTCYNGVKGDGCGECPACKLRQNGLQTYLARKEEK

SEQ ID NO: 41592 - protein, 242 aa, unidentified
  source 1..242: note = Quisquiliibacterium sp.
  REGION 1..242: note = tr|A0A5C8P5K6|A0A5C8P5K6_9BURK 7-cyano-7-deazaguanine synthase OS=Quisquiliibacterium sp. CC-CFT501 OX=2498847 GN=queC PE=3 SV=1
MSHERAPGGARAVVLLSGGLDSATVLAIARSRGFDCYALSVDYGQRHRAELDAAVRVAGALGAARHVIADVDLSRFGGSALTDTSIAVPEGADAGAPASASSNPSIPITYVPARNTIMLSIALGWAEVLQADDIFFGANAVDYSGYPDCRPGYVQAFERMANLATKSAVEGRPMRINAPIIDLSKAQIIREGARLGVDFSLTVSCYQADAAGRACGRCDSCRIRREGFAAAGLPDSTRYQTG

SEQ ID NO: 41593 - protein, 232 aa, Rahnella aquatilis
  REGION 1..232: note = tr|H2IZI0|H2IZI0_RAHAC 7-cyano-7-deazaguanine synthase OS=Rahnella aquatilis (strain ATCC 33071 / DSM 4594 / JCM 1683 / NBRC 105701 / NCIMB 13365 / CIP 78.65); OX = 745 277 GN=queC PE=3 SV=1
MKRAVVVFSGGQDSTTCLIQALKQYDEVHCVTFDYGQRHRAEIEIAQKLSVELGARAHKLLDVGLLNELAVSSLTRDNIPVPSFGDESNGGLPSTFVPGRNILFLTLAAIYAYQIQAEAVITGVCETDFSGYPDCRDEFVKALNTAVSLGLARDIRFETPLMWLNKAETWALADYYQQLDRVRHKTLTCYNGIAGDGCGECAACHLRANGLQQYQQDKAGVMGNMKQKTGLR

SEQ ID NO: 41594 - protein, 232 aa, Rahnella aquatilis
  REGION 1..232: note = tr|H8NYK2|H8NYK2_RAHAQ 7-cyano-7-deazaguanine synthase OS=Rahnella aquatilis HX2 OX=1151116 GN=queC PE=3; SV = 1
MKRAVVVFSGGQDSTTCLIQALKQYDEVHCVTFDYGQRHRAEIEIAQKLSVELGARAHKVLDVGLLNELAVSSLTRDNIPVPNFGDENNGGLPSTFVPGRNILFLTLAAIYAYQIQAEAVITGVCETDFSGYPDCRDEFVKALNTAVSLGLARDVRFETPLMWLNKAETWALADYYQQLDLVRHKTLTCYNGIAGDGCGECAACHLRANGLQQYQQDKTGVMTSLKKKTGLR

SEQ ID NO: 41595 - protein, 232 aa, unidentified
  source 1..232: note = Rahnella inusitata
  REGION 1..232: note = tr|A0A419MC04|A0A419MC04_9GAMM 7-cyano-7-deazaguanine synthase OS=Rahnella inusitata; OX = 58169 GN=queC PE=3 SV=1
MKRAVVVFSGGQDSTTCLIQALKEYDEVHCVTFDYGQRHRAEIEIAQKLSVQLGARAHKVLDVGLLNELAVSSLTRDNIPVPGFGEETEGGLPSTFVPGRNILFLTLAAIYAYQIQAEAVITGVCETDFSGYPDCRDEFVKALNHAVSLGLARDVRFETPLMWLNKAETWALADYYQQLDLVRHHTLTCYNGIAGDGCGECAACHLRANGLQQYQQDNAGVMASLKKKTGLK

SEQ ID NO: 41596 - protein, 232 aa, Rahnella sp.
  REGION 1..232: note = tr|A0A2N0W8E5|A0A2N0W8E5_9GAMM 7-cyano-7-deazaguanine synthase OS=Rahnella sp. AA; OX = 2057180 GN=queC PE=3 SV=1
MKRAVVVFSGGQDSTTCLIQALKQYDEVHCVTFDYGQRHRAEIEIAQKLSVELGARAHKVLDVGLLNELAVSSLTRDNIPVPNFGDENDGGLPSTFVPGRNILFLTLAAIYAYQIQAEAVITGVCETDFSGYPDCRDEFVKALNTAVSLGLARDVHFETPLMWLNKAETWALADYYQQLDLVRHQTLTCYNGIAGDGCGECAACHLRANGLQQYQQDKSGVIASLKKKTGLR

SEQ ID NO: 41597 - protein, 232 aa, Rahnella sp.
  REGION 1..232: note = tr|A0A4R7GJX3|A0A4R7GJX3_9GAMM 7-cyano-7-deazaguanine synthase OS=Rahnella sp. BIGb0236; OX = 2485117 GN=queC PE=3 SV=1
MKRAVVVFSGGQDSTTCLIQALKQYDEVHCVTFDYGQRHRAEIDIAQTLSVKLGARAHKVLDVGLLNELAVSSLTRDNIPVPNFGDENNGGLPSTFVPGRNILFLTLAAIYAYQIQAEAVITGVCETDFSGYPDCRDEFVKALNTAVSLGLARDVRFETPLMWLNKAETWALADYYQQLDLVRHQTLTCYNGIAGDGCGECAACHLRANGLQQYQQDKTGVMASLKKKTGLR

SEQ ID NO: 41598 - protein, 232 aa, unidentified
  source 1..232: note = Rahnella woolbedingensis
  REGION 1..232: note = tr|A0A419N6W5|A0A419N6W5_9GAMM 7-cyano-7-deazaguanine synthase OS=Rahnella woolbedingensis OX=1510574 GN=queC PE=3 SV=1
MKRAVVVFSGGQDSTTCLIQALKQYDEVHCVTFDYGQRHRAEIEIAQKLSVELSARAHKVLDVGLLNELAVSSLTRDNIPVPNFGDENDGGLPSTFVPGRNILFLTLTAIYAYQIQAEAVITGVCETDFSGYPDCRDEFVKALNTAVSLGLARDIRFETPLMWLNKAETWALADYYQQLDLVRHKTLTCYNGIAGDGCGECAACHLRANGLQQFQQDKVGVMNSLKQKTGLN

SEQ ID NO: 41599 - protein, 224 aa, Ralstonia insidiosa
  REGION 1..224: note = tr|A0A191ZU28|A0A191ZU28_9RALS 7-cyano-7-deazaguanine synthase OS=Ralstonia insidiosa; OX = 190721 GN=queC PE=3 SV=1
MKKRAIVLLSGGLDSATVLAMANADGFETYALSMRYGQRHSSELEAAKKVAAALGAVRHEIVDLDLRKFGGSALTDDTLDVPTEGAHDGIPITYVPARNTIMLSLALGWAEAVGARDLFFGANAVDYSGYPDCRPEYVAAYETLANLATKAGVEGERIRVNAPIIAMTKAEIIQAGVRLGVDYGMTVSCYKADDEGRACGVCDSCRIRKAGFEAAGVPDPTRYV

SEQ ID NO: 41600 - protein, 703 aa, Ralstonia mannitolilytica
  REGION 1..703: note = tr|A0A160BSS9|A0A160BSS9_9RALS Uncharacterized protein OS=Ralstonia mannitolilytica OX=105219; GN = VZ52_07970 PE=4 SV=1
MQTKKFVICGNASAKGISDDPKNEIRLRLSGVKGEGNVTLRIEDIHSKMFGTVPTKFHDLLEIAAYVYSADQVILRGADDVDSFGDGWRRDLHFVVPVRNPDFWNGEEVKNALTSTLGFLSDDNYAFSFVKLEQDHSFQDYLEFNDAQTLYGKPDQVVMFSGGLDSLAGALDEVLGQRRRVVLVTHKATPKLNTRHKTLQDLLAQKAGDNAPHQISVRVHKKKPLNREYTQRSRSFLFVSIGATIAKMLGLSSVRFYENGVISLNLPVCAQVVGGRATRTTHPKVMKGFQDIITLVAEAPFTVENPYIWKTKAEVVEQIVKLGCADLIKHSMTCTHTWEMTNQHTHCGLCSQCIDRRFAVIAAKADQYDPIEHYKTDVFTQSRNKDDDKIMSASYLERANQVRSLENVGQFLAKYAEVNRVLRFIGGSTAQAAQLVFDLYKRHASEVNAALDEMVRRHATAIRERTMPGDALLRTVHESASVISVPTVSPKEKQPDNFFRKRGGGWEARFNRGNTINIIGVDKGAEYINLLLAHPDREASVYEVVCGYALGVADHANSGLEHDDIEEGFQVTTGAPLGNAGVVVDRKAVEQYRAKYQSLVTEKAEAEQDGDHQRVEEIEDEMAQIADAITAGVGKGGKLRKAGDKRKNVRDAFRNAVNRAIKQIEKWDKPLAEHLKASIKFGNEVVYRPGVPITWDVRPIVNE

SEQ ID NO: 41601 - protein, 224 aa, Ralstonia mannitolilytica
  REGION 1..224: note = tr|A0A160BW35|A0A160BW35_9RALS 7-cyano-7-deazaguanine synthase OS=Ralstonia mannitolilytica OX=105219 GN=queC PE=3 SV=1
MKKRAIVLLSGGLDSATVLAMANADGFETYALSMRYGQRHSSELEAAKKVAAALGAVRHEIVDLDLRKFGGSALTDDKLDVPTDGAQSGIPITYVPARNTIMLSLALGWAEAVGARDLFFGANAVDYSGYPDCRPEYVAAYETLANLATKAGVEGERIRVNAPIIDMTKAEIIQAGTRLGVDYSLTVSCYQADDAGRACGVCDSCRIRKAGFEAAGVPDPTRYV

SEQ ID NO: 41602 - protein, 224 aa, Ralstonia pickettii
  REGION 1..224: note = sp|B2U7H6|QUEC_RALPJ 7-cyano-7-deazaguanine synthase; OS = Ralstonia pickettii (strain 12J) OX=402626 GN=queC PE=3; SV = 1
MKKRAIVLLSGGLDSATVLAMANADGFETYALSMRYGQRHSSELEAAKKVAAALGAVRHEIVDLDLRKFGGSALTDDALDVPTDGVQSGIPITYVPARNTIMLSLALGWAEAVGARDLFFGANAVDYSGYPDCRPEYVAAYETLANLATKAGVEGERIRVNAPIINMTKAEIIQAGVRLGVDYGLTVSCYKADDAGRACGVCDSCRIRKAGFEAAGVPDPTRYV

SEQ ID NO: 41603 - protein, 224 aa, Ralstonia pickettii
  REGION 1..224: note = tr|C6BE72|C6BE72_RALP1 7-cyano-7-deazaguanine synthase OS=Ralstonia pickettii (strain 12D) OX=428406; GN = queC PE=3 SV=1
MKKRAIVLLSGGLDSATVLAMANADGFETYALSMRYGQRHSSELEAAKKVAAALGAVRHEIVDLDLRKFGGSALTDDALDVPTDGAQTGIPITYVPARNTIMLSLALGWAEAVGARDLFFGANAVDYSGYPDCRPEYVAAYETLANLATKAGVEGERIRVNAPIIDMTKAEIIQAGVRLGVDYGLTVSCYKADDAGRACGVCDSCRIRKAGFEAAGVPDPTRYV

SEQ ID NO: 41604 - protein, 224 aa, unidentified
  source 1..224: note = Ralstonia pseudosolanacearum
  REGION 1..224: note = tr|A0A454TK97|A0A454TK97_9RALS 7-cyano-7-deazaguanine synthase OS=Ralstonia pseudosolanacearum OX=1310165 GN=queC PE=3 SV=1
MKKRAIVLLSGGLDSATVLAMANAQGFETYALSMRYGQRHSSELEAAKKVAAALGAVRHEIVDLDLRRFGGSALTDDALEVPTTGVQEGIPITYVPARNTIMLSLALGWAEAVGARDLFFGANAVDYSGYPDCRPEYVAAYETLANLATKAGVEGDHIRVNAPIIAMTKAEIIQAGARLGVDYSLTVSCYQADDEGRACGVCDSCRIRRAGFEAAGVPDPTRYR

SEQ ID NO: 41605 - protein, 224 aa, unidentified
  source 1..224: note = Ralstonia pseudosolanacearum
  REGION 1..224: note = tr|A0A223GK04|A0A223GK04_9RALS 7-cyano-7-deazaguanine synthase OS=Ralstonia pseudosolanacearum OX=1310165 GN=queC PE=3 SV=1
MKKRAIVLLSGGLDSATVLAMANAQGFETYALSMRYGQRHSSELEAAKKVAAALGAVRHEIVDLDLRRFGGSALTDDALEVPTTGVQEGIPITYVPARNTIMLSLALGWAEAVGARDLFFGANAVDYSGYPDCRPEYVAAYETLANLATKAGVEGDHIRVNAPIIAMTKAEIIQAGARLGVDYSLTVSCYQADDEGRACGVCDSCRIRRAGFEAAAVPDPTRYR

SEQ ID NO: 41606 - protein, 224 aa, Ralstonia solanacearum
  REGION 1..224: note = tr|F6G4W4|F6G4W4_RALS8 7-cyano-7-deazaguanine synthase OS=Ralstonia solanacearum (strain Po82); OX = 1031711 GN=queC PE=3 SV=1
MKKRAIVLLSGGLDSATVLAMANAQGFETYALSMRYGQRHSSELEAAKKVAAALGAVRHEIVDLDLRRFGGSALTDDALEVPTTGVKEGIPITYVPARNTIMLSLALGWAEAVGARDLFFGANAVDYSGYPDCRPEFVAAYETLANLATKAGVEGDRIRINAPIIAMTKAEIIQAGARLGVDYSLTVSCYQADDAGRACGVCDSCRIRRAGFEAAGVPDPTRYR

SEQ ID NO: 41607 - protein, 224 aa, Ralstonia solanacearum; identical to SEQ ID NO: 41605
  REGION 1..224: note = sp|Q8Y1F2|QUEC_RALSO 7-cyano-7-deazaguanine synthase; OS = Ralstonia solanacearum (strain GMI1000) OX=267608; GN = queC PE=3 SV=1

SEQ ID NO: 41608 - protein, 224 aa, Ralstonia sp.; identical to SEQ ID NO: 41603
  REGION 1..224: note = tr|U3GAT3|U3GAT3_9RALS 7-cyano-7-deazaguanine synthase OS=Ralstonia sp. 5_2_56FAA OX=658080 GN=queC PE=3; SV = 1

SEQ ID NO: 41609 - protein, 224 aa, Ralstonia sp.
  REGION 1..224: note = tr|A0A0J9GE25|A0A0J9GE25_9RALS 7-cyano-7-deazaguanine synthase OS=Ralstonia sp. MD27; OX = 1676617 GN=queC PE=3 SV=1
MKKRAIVLLSGGLDSATVLAMANADGFETYALSMRYGQRHSSELEAAKKVAAALGAVRHEIVDLDLRKFGGSALTDDTLDVPTEGAHDGIPITYVPARNTIMLSLALGWAEAVGARDLFFGANAVDYSGYPDCRPEYVAAYETLANLATKAGVEGEHIRVNAPIIAMTKAEIIQAGARLGVDYGMTVSCYKADEEGRACGVCDSCRIRKAGFEAAGVPDPTRYV

SEQ ID NO: 41610 - protein, 194 aa, Ralstonia syzygii
  REGION 1..194: note = tr|G3A2B2|G3A2B2_9RALS 7-cyano-7-deazaguanine synthase OS=Ralstonia syzygii R24 OX=907261 GN=RALSY_20147; PE = 3 SV=1
MNLVSGGLDSTLVGVMAKEDRIDHYPLFIDYGQRAARKEWETCKAVHKALGLPAPTRMDLSGFGQVIVSGLTSEQLHVKDDAFTPGRNLMFLLMGSSYAYQFGLSSVAIGLLAEQFSIFPDQRPPFLAQAEIAIAAALGRQIKVLTPLIEFGKADVVRLAQARGVTGTYSCHTGNSESCGQCIACLEFLFNKEE

SEQ ID NO: 41611 - protein, 224 aa, Ralstonia syzygii
  REGION 1..224: note = tr|G3A5A0|G3A5A0_9RALS 7-cyano-7-deazaguanine synthase OS=Ralstonia syzygii R24 OX=907261 GN=queC PE=3; SV = 1
MKKRAIVLLSGGLDSATVLAMANAQGFETYALSMRYGQRHSSELEAAKKVAAALGAVRHEIVDLDLRRFGGSALTDDALEVPTTGVKEGIPITYVPARNTIMLSLALGWAEAVGARDLFFGANAVDYSGYPDCRPEFVAAYETLANLATKAGVEGDRIRVNAPIIAMTKAEIIQAGARLGVDYSLTVSCYQADDEGRACGVCDSCRIRRAGFEAAGVPDPTRYR

SEQ ID NO: 41612 - protein, 236 aa, unidentified
  source 1..236: note = Ramlibacter rhizophilus
  REGION 1..236: note = tr|A0A4Z0BFL1|A0A4Z0BFL1_9BURK 7-cyano-7-deazaguanine synthase OS=Ramlibacter rhizophilus; OX = 1781167 GN=queC PE=3 SV=1
MNTHKAIVLFSGGQDSTTCLAWALERYERVETVGFDYGQKHRIELDCRLAVLARVREAFPHWAPRLGEDHLLEIGVLGQISDTALTRDAQIVLQADGLPNTFVPGRNLLFLTLAAALAYRRGCEVLVGGMCETDYSGYPDCRDATMKAMQAALSLGLARPLAIETPLMWIDKAATWQLAADLGGEALVDLVRKETHTCYLGQREPRHDWGAGCGTCPACALRAAGYRAWQAAQNPS

SEQ ID NO: 41613 - protein, 230 aa, Ramlibacter sp.
  REGION 1..230: note = tr|A0A4Y7BKN6|A0A4Y7BKN6_9BURK 7-cyano-7-deazaguanine synthase OS=Ramlibacter sp. WS9; OX = 1882741 GN=queC PE=3 SV=1
MHTTALVLFSGGQDSTTCLAWALEKYERVETIAFDYGQRHRIELQARLTVLEQLRQQFPQWAMRLGEDHLLDLAVLGQVSETSLTRDMAFSMEQSGLPNTFVPGRNLMFLTLAAALAYRRGLQVLVTGVCETDFSGYPDCRDDTMKAMQLALSLGMDRRFLIETPLMWIDKAATWELALKLGGDALVGLIVEHTHTCYLGERGQRHEWGYGCGTCPACELRQRGWERWRA

SEQ ID NO: 41614 - protein, 238 aa, Ramlibacter tataouinensis
  REGION 1..238: note = tr|A0A127JTL2|A0A127JTL2_9BURK 7-cyano-7-deazaguanine synthase OS=Ramlibacter tataouinensis OX=94132 GN=queC PE=3 SV=1
MPHLHTRALVLFSGGQDSATCLAWALARYAHVETIGFDYGQRHRVELESRQTFLRKLKAQFPPWVPKLGPDHLLDLGLLGQVSDTALTADKAIAFDTSGLPNTFVPGRNLIFFTFAAALAYRRDISVLVGGMCETDYSGYPDCRDDTLKALQVTLGLGLDTRMVIDTPLMRIDKAATWRLARDLGGDALVELIKEDTHTCYVGDHGTRHEWGYGCGVCPACELRGQGYRSFTAAAIPR

SEQ ID NO: 41615 - protein, 205 aa, Ramlibacter tataouinensis
  REGION 1..205: note = tr|F5Y298|F5Y298_RAMTT 7-cyano-7-deazaguanine synthase OS=Ramlibacter tataouinensis (strain ATCC BAA-407 / DSM 14655 / LMG 21543 / TTB310) OX=365046 GN=queC PE=3; SV = 1
METVGFDYGQRHRVELEVRLRFLDQLKARFPHWAVRLGTDHVLQLPTLGQLSDTALTADKAIEFEASGLPNTFVPGRNLLFFTYAAALAYRRGLSVLVGGMCETDYSGYPDCRDDTLKALQVALGLGLDTRLVIETPLMWIDKAATWRLAHELGGGALVHLVRDCTHTCYLGDHATRHDWGYGCGSCPACELRARGWAQFTTAGP

SEQ ID NO: 41616 - protein, 231 aa, unidentified
  source 1..231: note = Raoultella electrica
  REGION 1..231: note = tr|A0A514EVN8|A0A514EVN8_9ENTR 7-cyano-7-deazaguanine synthase OS=Raoultella electrica; OX = 1259973 GN=queC PE=3 SV=1
MKRAVVVFSGGQDSTTCLVQALQQYDEVHCVTFDYGQRHRAEIDVARALALKLGAVAHKVLDVTLLNELAVSSLTRDNIPVPDYEPEASGIPNTFVPGRNILFLTLTAIYAYQVKAEAIITGVCETDFSGYPDCRDEFVKALHHAVSLGMAKDIRFETPLMWLNKAETWALADYWGQLALVRHETLTCYNGIKGDGCGQCAACNLRANGLSQYEADRPGIMAVMKQKTGLQ

SEQ ID NO: 41617 - protein, 201 aa, Raoultella ornithinolytica
  REGION 1..201: note = tr|A0A4R2XPY6|A0A4R2XPY6_RAOOR 7-cyano-7-deazaguanine synthase OS=Raoultella ornithinolytica OX=54291 GN=EC841_108214 PE=3 SV=1
MKTALLLSGGMDSIAIAWWKRPDIAITLDYGQRAAEAEIKAASATCSALKIDHHVIKVDCSSLGSGDMAGAEADSNAPSSDWWPYRNQMLISLAAMKAITLGVTRLWIGTVKSDSSHLDGTLDFIYKISELMSFQEGNMIVEAPAIELSTTELVRISGVTPGGLAWAHSCHKANIPCGNCRGCNKYFQVLDEVGYELDRLR

SEQ ID NO: 41618 - protein, 231 aa, Raoultella ornithinolytica
  REGION 1..231: note = tr|A0A1Y6GSS0|A0A1Y6GSS0_RAOOR 7-cyano-7-deazaguanine synthase OS=Raoultella ornithinolytica OX=54291 GN=queC PE=3 SV=1
MKRAVVVFSGGQDSTTCLVQALQQYDEVHCVTFDYGQRHRAEIDVARSLALKLGAVAHKVLDVTLLNELAVSSLTRDNIPVPDYEPEASGIPNTFVPGRNILFLTLTAIYAYQVKAEAIITGVCETDFSGYPDCRDEFVKALHHAVSLGMAKDIRFETPLMWLNKAETWALADYWGQLALVRHETLTCYNGIKGDGCGQCAACNLRANGLSQYEADRPGIMAVMKQKTGLQ

SEQ ID NO: 41619 - protein, 231 aa, Raoultella planticola
  REGION 1..231: note = tr|A0A2X2E584|A0A2X2E584_RAOPL 7-cyano-7-deazaguanine synthase OS=Raoultella planticola; OX = 575 GN=queC PE=3 SV=1
MKRAVVVFSGGQDSTTCLVQALQQYDEVHCVTFDYGQRHRAEIDVARSLALKLGAVAHKVLDVTLLNELAVSSLTRDNIPVPDYEPEASGIPNTFVPGRNILFLTLTAIYAYQVKAEAIITGVCETDFSGYPDCRDEFVKALHHAVSLGMAKDIRFETPLMWLNKAETWALADYWGQLALVRHETLTCYNGIKGDGCGQCAACNLRANGLSQYEADRPGIMAVMKHKTGLQ

SEQ ID NO: 41620 - protein, 191 aa, Raoultella planticola
  REGION 1..191: note = tr|A0A0D8NE65|A0A0D8NE65_RAOPL 7-cyano-7-deazaguanine synthase OS=Raoultella planticola; OX = 575 GN=UA70_21580 PE=3 SV=1
MDSIAIAWWKRPDIALTLDYGQQAANAEIKAATATCEALGIEHHIIRIDCRSLGSGDMAGTTMDPNAPSSDWWPYRNQMLISLAAMKAITLGVTHLWIGTVKSDETHLDGTIGFISRISELMSFQEGGMVVEAPAITLSTSELIRISDVTPGGLAWAHSCHKANIPCGNCRGCNKYFQVLDDVGYDLDRSR

SEQ ID NO: 41621 - protein, 231 aa, Raoultella sp.
  REGION 1..231: note = tr|A0A509CPH1|A0A509CPH1_9ENTR 7-cyano-7-deazaguanine synthase OS=Raoultella sp. NCTC 9189 OX=2583577 GN=queC PE=3 SV=1
MKRAVVVFSGGQDSTTCLVQALKQYDEVHCVTFDYGQRHRAEIDVARELALKLGAVAHKVLDVTLLNELAVSSLTRDSIPVPDYEPDASGIPNTFVPGRNILFLTLTAIYAYQVKAEAIITGVCETDFSGYPDCRDEFVKALNHAVNLGMAKDIRFETPLMWLNKAETWALADYWGQLELIRSETLTCYNGIKGDGCGQCASCNLRANGLNQYQADKVGIMALMKQKTGLR

SEQ ID NO: 41622 - protein, 231 aa, Raoultella sp.
  REGION 1..231: note = tr|A0A4R3ZFZ5|A0A4R3ZFZ5_9ENTR 7-cyano-7-deazaguanine synthase OS=Raoultella sp. BIGb0138; OX = 2485115 GN=queC PE=3 SV=1
MKRAVVVFSGGQDSTTCLVQALKQYDEVHCVTFDYGQRHRAEIDVARELALTLGAVAHKVLDVTLLNELAVSSLTRDNIPVPDYAPDASGIPNTFVPGRNILFLTLAAIYAYQVKAEAIITGVCETDFSGYPDCRDEFVKALHHAVSLGMAKDIRFETPLMWLNKAETWALADYWGQLERVRRETLTCYNGIKGDGCGQCAACNLRANGLHQYLADKVGVMTVMKQKTGLK

SEQ ID NO: 41623 - protein, 231 aa, Raoultella terrigena; identical to SEQ ID NO: 41621
  REGION 1..231: note = tr|A0A1V2BSL5|A0A1V2BSL5_RAOTE 7-cyano-7-deazaguanine synthase OS=Raoultella terrigena; OX = 577 GN=queC PE=3 SV=1

SEQ ID NO: 41624 - protein, 247 aa, Raoultella terrigena
  REGION 1..247: note = tr|A0A4U9DAA2|A0A4U9DAA2_RAOTE 7-cyano-7-deazaguanine synthase OS=Raoultella terrigena; OX = 577 GN=queC PE=3 SV=1
MKRAVVVFSGGQDSTTCLVQALKQYDEVHCVTFDYGQRHRAEIDVARELALKLGAVAHKVLDVTLLNELAVSSLTRDSIPVPDYEPDASGIPNTFVPGRNILFLTLTAIYAYQVKAEAIITGVCETDFSGYPDCRDEFVKALNHAVNLGMAKDIRFETPLMWLNKAETWALADYWGQLELIRSETLTCYNGIKGDGCGQCASCNLRANGLNQYQADKVGNHGPDEAKNGLTLIIAGRFPRPRFAKRG

SEQ ID NO: 41625 - protein, 282 aa, unidentified
  source 1..282: note = Raphidiopsis brookii
  REGION 1..282: note = tr|D4TUG3|D4TUG3_9CYAN 7-cyano-7-deazaguanine synthase OS=Raphidiopsis brookii D9 OX=533247 GN=queC PE=3; SV = 1
MLRLLAIILNCQTLSVQNHPNGNIVAQFMKNFKIFQIYVFFYVQFPIYLEVYQKSIMKAVILLSGGLDSSTVLYQARADGYECYVISFDYHQRHRRELQSAISIAQSLEVVEHQLVTFDLRSWGGSALTDNSIPVPQNRPLDQMSGSIPITYVPARNTIFLSFALAYAEAIRAERVYIGVNALDYSGYPDCRPDYIHAMQEVFRLGTKQGREGKRIDIVAPLINLTKSQIIQLGNLLGVPWELTWSCYSGDQQPCGVCDSCQLRWAAFHELGLEDPVKQQGM

SEQ ID NO: 41626 - protein, 222 aa, unidentified
  source 1..222: note = Raphidiopsis curvata
  REGION 1..222: note = tr|A0A1Z4VG07|A0A1Z4VG07_9CYAN 7-cyano-7-deazaguanine synthase OS=Raphidiopsis curvata NIES-932 OX=1973482 GN=queC PE=3 SV=1
MKAVILLSGGLDSSTVLYQARADGYECYAISFDYHQRHRRELQSAMSIAQSLGVVEHQLVTFDLRSWGGSALTDNSIPVPQNRLLDQMSESIPITYVPARNSIFLSFALGYAEAIGAERVYIGVNALDYSGYPDCRPDYIHAMQEVFRLGTKQGREGKPIDIIAPLINLTKIQIIQLGNRLGVPWELTWSCYTGGEHPCGVCDSCQLRWAAFHELGLKDPGV

SEQ ID NO: 41627 - protein, 227 aa, Reinekea blandensis
  REGION 1..227: note = tr|A4BHW9|A4BHW9_9GAMM 7-cyano-7-deazaguanine synthase OS=Reinekea blandensis MED297 OX=314283 GN=queC; PE = 3 SV=1
MSENKSKAVVLLSGGLDSTTVLAKAKADGCEVYALSFDYGQRHDSELDAARKIAANAQVAEHKIVPMNLRSIGGSALTDDAIDVPEQESEGIPATYVPARNTVFLSIALGWAEVIDADAIYIGVSAVDYSGYPDCRPEYIEAYETLANLATKRGVEGRRVEIRTPLINLTKADTVKLGQSLGVDYAETVSCYQANANGEACGVCDSCRLRKKGFADAGMTDPTRYAV

SEQ ID NO: 41628 - protein, 231 aa, unidentified
  source 1..231: note = Reinekea forsetii
  REGION 1..231: note = tr|A0A2K8KMY2|A0A2K8KMY2_9GAMM 7-cyano-7-deazaguanine synthase OS=Reinekea forsetii; OX = 1336806 GN=queC PE=3 SV=1
MPLKESPMAQKAVVLLSGGLDSTTVLAQAQMDGYEVYALSFDYGQRHDSELDAARIVAQRAGVVEHKVVPMSLRSIGGSALTDMAMDVPEVASEGIPVTYVPARNTVFLSIALGWAEVIDADAIFIGVSAVDYSGYPDCRPEYIAAFEKMANLATKRGVEGRPVRILTPLIDLTKADTVRLGVRLGVDYAATVSCYQANSLGEACGLCDSCRLRIKGFAEAGVADSTRYVG

SEQ ID NO: 41629 - protein, 224 aa, Reinekea marinisedimentorum
  REGION 1..224: note = tr|A0A4R3I966|A0A4R3I966_9GAMM 7-cyano-7-deazaguanine synthase OS=Reinekea marinisedimentorum OX=230495 GN=queC PE=3 SV=1
MTKKAIVLLSGGLDSSTVLAKAKKDGYEVYALSFDYGQRHDAELDAARNIARRENVAEHKVVPMNLRTIGGSALTDDTIDVPTEESEGIPATYVPARNTVFLSIALGWAEVVDADAIFIGVSAVDYSGYPDCRPEYIAAYETMANLATKRGVEGRPVKIETPLINLTKAQTVELGLSLGVDYSLTVSCYQANENGEACGQCDSCRLRKKGFEQLGVQDPTRYAV

SEQ ID NO: 41630 - protein, 225 aa, Reinekea sp.
  REGION 1..225: note = tr|A0A5C8ZA24|A0A5C8ZA24_9GAMM 7-cyano-7-deazaguanine synthase OS=Reinekea sp. SSH23; OX = 2593301 GN=queC PE=3 SV=1
MTKKAIVLLSGGLDSSTVLAKAKHDGYQVYALSFDYGQRHDAELDAAKKIAEQAAVAEHKVVPMNLRTIGGSALTDDSIDVPTQESEGIPATYVPARNTVFLSIALGWAEVIEADAIFVGVSAVDYSGYPDCRPEYIAAFETMANLATKRGVEGNPIKIVTPLIDLTKAETVKLGLSLGVDYSLTVSCYQANSQGEACGECDSCRLRKKGFEELAVSDPTRYAAS

SEQ ID NO: 41631 - protein, 209 aa, Reyranella sp.
  REGION 1..209: note = tr|A0A521M8N8|A0A521M8N8_9PROT 7-cyano-7-deazaguanine synthase OS=Reyranella sp.; OX = 1929291 GN=queC PE=3 SV=1
MAKRIVVLHSGGMDSTTCLYEAHAAGHEVTSLGFEYGQRLSVELLFAARQCERLGIRRDVVSLSWQKPNRPMPIGRAIEEMPKSVSPAFLPARNVVFLSVACAHAAGVSADEVHIGLNSIDYSGYPDCTPEFLKSFQSMMSLAHPGGPTIVAPLMSMSKAEIATLAKQHGLGEYDTWSCYRPQVANGGVVPCGNCDACRLHSHAWKTIK

SEQ ID NO: 41632 - protein, 241 aa, Reyranella sp.
  REGION 1..241: note = tr|A0A521LMZ0|A0A521LMZ0_9PROT 7-cyano-7-deazaguanine synthase OS=Reyranella sp.; OX = 1929291 GN=queC PE=3 SV=1
MNDALNNSGAALVLFSGGQDSTTCLAWALERFAHVETVAFDYRQRHRIELDQRLVVLDEIRRASPQWADRLGEDHFVDMGVLGQISETSLTRNVAFAMEKDGLPNSFVPGRNLLFFTFAAAVAWRRGIRNLIGGMCETDFSGYPDCRDNTIKALQVALNLGMDRSFVLHTPLMWLDKAETWQLARELGGASLVDLILEHTHTCYDSVRGPRNDWGYGCGECPACALRKRGFVAYREGKSSL

SEQ ID NO: 41633 - protein, 218 aa, Rheinheimera nanhaiensis
  REGION 1..218: note = tr|I1E1P4|I1E1P4_9GAMM 7-cyano-7-deazaguanine synthase OS=Rheinheimera nanhaiensis E407-8 OX=562729; GN = queC PE=3 SV=1
MPNKVVVIYSGGMDSFTVLHKAVQAGHDVYALSFNYGQRHVKELQCAATVCQQLGIKHKIVDISAINQLLAGSSLTDDIDIPEGHYAADNMKSTVVPNRNMILLSLAVGYAVSIGANQVYYGAHSGDHFIYPDCRPEFVQKMHDVCQIANYEPVDIVSPYLQQTKIEILADGLAMGLDYSQTWTCYNGRDKACGKCGSCQERLEAFALNHTTDPLPYE

SEQ ID NO: 41634 - protein, 222 aa, Rheinheimera pacifica
  REGION 1..222: note = tr|A0A1H6NG64|A0A1H6NG64_9GAMM 7-cyano-7-deazaguanine synthase OS=Rheinheimera pacifica; OX = 173990 GN=queC PE=3 SV=1
MPNKVVVIYSGGMDSFTVLHKAVQAGHDVYALSFNYGQRHVKELQCAAQVCQELGIKHKIVDISAINQLLAGSSLTDDIDIPEGHYAADNMKSTVVPNRNMILLSLAVGYAVSLGASQVYYGAHSGDHFIYPDCRPEFVQKMHDVCQIANYEPVDIISPYLAQTKIEILADGLAMGLDYSKTWTCYNGREKACGKCGSCQERLEAFTLNNVTDPLPYEQNLS

SEQ ID NO: 41635 - protein, 219 aa, unidentified
  source 1..219: note = Rheinheimera salexigens
  REGION 1..219: note = tr|A0A1E7Q717|A0A1E7Q717_9GAMM 7-cyano-7-deazaguanine synthase OS=Rheinheimera salexigens; OX = 1628148 GN=queC PE=3 SV=1
MPNKVVVIYSGGMDSFTVLHKALQAGHEVYALSFNYGQRHVKELEFASSVCQELNINHKIVDISAINQLLAGSSLTDDIDIPEGHYAADNMKSTIVPNRNMILLSLAAGYAVSIGADQVYYGAHSGDHFIYPDCRPEFVQKMHDVCQIANYEPIAIVSPYLTQTKIEILADGIKMGLDYNKTWTCYNGREKACGKCGSCQERLEAFSLNNVTDPIAYEV

SEQ ID NO: 41636 - protein, 218 aa, Rheinheimera sp.
  REGION 1..218: note = tr|A0A4P6VUE6|A0A4P6VUE6_9GAMM 7-cyano-7-deazaguanine synthase OS=Rheinheimera sp. D18; OX = 2545632 GN=queC PE=3 SV=1
MPNKVVVIYSGGMDSFTVLHKAIQAGHDVYALSFNYGQRHVKELQCAAQVCAELGINHKIVDISAINQLLAGSSLTDNIDIPEGHYAADNMKSTIVPNRNMILLSLAVAYAVSIGASQVYYGAHSGDHFIYPDCRPEFVQKMHDVCQIANYEAVDIVSPYLSHTKIDILADGIAMGLDYSKTWTCYNGREKACGKCGSCQERLEAFTLNHATDPLPYE

SEQ ID NO: 41637 - protein, 220 aa, Rheinheimera sp.
  REGION 1..220: note = tr|A0A1B7UL71|A0A1B7UL71_9GAMM 7-cyano-7-deazaguanine synthase OS=Rheinheimera sp. SA_1; OX = 1827365 GN=queC PE=3 SV=1
MPQKVVVIYSGGMDSFTVLHNAIRAGHDVYALSFNYGQRHVKELICAQSVCQELGIHHKIVDISAINQLIGGSSLTDDIEVPEGHYAADNMKSTVVPNRNMILLSLAVGYAVSLDAQAVYYGAHSGDHFIYPDCRPEFVQKMNDVCQIANYEPVDIISPYLQQTKIEILKDGLAMGLDYGKTWTCYNGREQACGKCGSCQERLEAFTLNNTIDPLPYEPQ

SEQ ID NO: 41638 - protein, 218 aa, unidentified
  source 1..218: note = Rheinheimera tuosuensis
  REGION 1..218: note = tr|A0A285IV61|A0A285IV61_9GAMM 7-cyano-7-deazaguanine synthase OS=Rheinheimera tuosuensis; OX = 1323745 GN=queC PE=3 SV=1
MSQKVVVIYSGGMDSFTILHKAVAAGHDVYALSFNYGQRHVKELICAASVCKELNINHKIVDISAINQLISGSSLTSDIDVPEGHYAADNMKSTVVPNRNMILLSLAVGYADSIGARAVYYGAHSGDHFIYPDCRPEFVQKMNDVCQIANYQPVDIVSPYLYQTKIEILADGLAMGLDYSKTWTCYNGREKACGKCGSCQERLEAFALNNATDPLPYE

SEQ ID NO: 41639 - protein, 248 aa, unidentified
  source 1..248: note = Rhizobacter gummiphilus
  REGION 1..248: note = tr|A0A1W6LG91|A0A1W6LG91_9BURK 7-cyano-7-deazaguanine synthase OS=Rhizobacter gummiphilus; OX = 946333 GN=queC PE=3 SV=1
MKPSRRALVLFSGGQDSTACLAWALEHHDHVETIGFDYGQRHSVELQCRTAVRAQIVANFPRWAPRLGDDHLLDLSLLGQISDTALTSERELEMTNSGLPNTFVPGRNLLFFTFAATVAYRRGLNVLVGGMCETDFSGYPDCRDNTLKALQVAISLGMDTKMTVETPLMWLDKAQTWAFSADLGGEALNDLIVEHTHTCYLGDRQQRHEWGYGCGQCPACALRRRGYKGWRESGQPEFADTDRLGLMP

SEQ ID NO: 41640 - protein, 248 aa, Rhizobacter sp.
  REGION 1..248: note = tr|A0A0Q6XQ57|A0A0Q6XQ57_9BURK 7-cyano-7-deazaguanine synthase OS=Rhizobacter sp. Root1221 OX=1736433 GN=queC PE=3 SV=1
MRPSRRALVLFSGGQDSTACLAWALEHHDHVETIGFDYGQRHAIELECRKAVREHLVAGFPQWARRLGDDHLLDLSLLGQISDTALTSEREIEMTRNGLPNTFVPGRNLLFFTFAATVAYRRGLNVLVGGMCETDFSGYPDCRDNTLKALQVAISLGMDTPMTVETPLMWLDKAQTWAFSAALGGEALNALIVDHTHTCYLGDRSQRHEWGYGCGQCPACALRRRGYKGWRERGQPEFADTDPLGLAP

SEQ ID NO: 41641 - protein, 240 aa, Rhizobacter sp.
  REGION 1..240: note = tr|A0A0Q7AEI5|A0A0Q7AEI5_9BURK 7-cyano-7-deazaguanine synthase OS=Rhizobacter sp. Root404; OX = 1736528 GN=queC PE=3 SV=1
MVAAVDPRRALVLFSGGQDSTACLAWALTRYAHVETIGFDYGQRHRIELDARREVRGALVAAFQHWAARLGDDHLLDLALLGQLSDTALTDTRAIEMTAKGLPNTFVPGRNLLFFNFAAAVAYRRGASVLVGGMCETDYSGYPDCRDNTLRALQVAISLGLDAPMAIETPLMWLDKAQTWALAEQLGGDALVDLTIEHTHTCYLGDRAHRHAWGYGCGECPACVLRRDGHARWVRERAPA

SEQ ID NO: 41642 - protein, 236 aa, unidentified
  source 1..236: note = Rhizobiaceae bacterium
  REGION 1..236: note = tr|A0A4U5ZK48|A0A4U5ZK48_9RHIZ 7-cyano-7-deazaguanine synthase OS=Rhizobiaceae bacterium LC148 OX=1120689 GN=queC PE=3 SV=1
MKTIVVCSGGLDSVSLAHRIAAEHELIGLISFDYGQRHRKELDYAAACAQRLGVFHEIIDMRGIGSRLTGSALTDDVDVPDGHYAEETMRITVVPNRNAIMLAIAFGVAAAREADAVAIAVHGGDHFIYPDCRPGFIDAFQAMQDHALEGYASVKLLAPYVHGSKAEIVKDGAAHGTPFAETWSCYKGGERHCGRCGTCVERREAFHLAGIADPTEYEDPDFWIAATEGFRAEEVR

SEQ ID NO: 41643 - protein, 284 aa, unidentified
  source 1..284: note = Rhizobiales bacterium
  REGION 1..284: note = tr|A0A431PKP4|A0A431PKP4_9RHIZ 7-cyano-7-deazaguanine synthase OS=Rhizobiales bacterium; OX = 1909294 GN=EKK29_15460 PE=3 SV=1
MEPAKVSMGLFTGSRVAWSFECSLPLSTARRFFRRRRKPRSFQMARDVLLVLSGGLDSTTMAYVLAEQYSCRAVYVDYGKEISPRELAAAKLVSHMLDMPIDIVGSEGITRMQYGYLPWTHVRSDESDIKGWDGITRVITQEEAEALSKYPAGSPHWYHVSGLHQLVSIATYLAQLIGISDIALAITKEQSIAMPGLGRALIKWSECIELLNPASGKFNVLTPFIDHKKSEIVKTGAATNVPFEITWSCITRTDMHCGKCIRCIERKEAFQDASIPDPTSYAPP

SEQ ID NO: 41644 - protein, 273 aa, unidentified
  source 1..273: note = Rhizobiales bacterium
  REGION 1..273: note = tr|A0A1H4U8Q6|A0A1H4U8Q6_9RHIZ 7-cyano-7-deazaguanine synthase OS=Rhizobiales bacterium GAS188 OX=1884351 GN=queC PE=3 SV=1
MLDDEKAIVLFSGGQDSTTCLAWALERFKAVETVGFDYGQRHRVELDMRPRLTAALRQGFPAWAARLGEDTLIDLAVLGQISETSLTRDVAFALEANGLPNTFVPGRNLLFMGFAAALAYRRGAKHLVTGVCETDFSGYPDCRDDTMKAMQLALNLGMDARFVIHTPLMWIDKAQSWALADELGGEKLVSLIGARRIPAIRTTGRSCMPGAMAAANARPASYARRASRNGERVSALRSRGRLEAGDPGCAGPPASSRHRGIMHELAQIPAYHS

SEQ ID NO: 41645 - protein, 236 aa, unidentified
  source 1..236: note = Rhizobium acidisoli
  REGION 1..236: note = tr|A0A0N1DQI1|A0A0N1DQI1_9RHIZ 7-cyano-7-deazaguanine synthase OS=Rhizobium acidisoli; OX = 1538158 GN=queC PE=3 SV=1
MKTIVVCSGGLDSVSLAHKIAAEQQLIGLVSFDYGQRHRKELDFAARCAARLAVPHHIIDISAIGGHLSGSALTDDIEVPDGHYAEETMKATVVPNRNAIMLAIAFGLAAAQKADAVAVAVHGGDHFIYPDCRPGFIDAFQRMQNEALDGYANVRLLAPYVDISKAAIVTDGEKHATPFAETWSCYKGGRLHCGRCGTCVERREAFHLAGIPDPTEYEDQDFWKAAVSQYSAAEVR

SEQ ID NO: 41646 - protein, 236 aa, unidentified
  source 1..236: note = Rhizobium aethiopicum
  REGION 1..236: note = tr|A0A1C3YCW8|A0A1C3YCW8_9RHIZ 7-cyano-7-deazaguanine synthase OS=Rhizobium aethiopicum; OX = 1138170 GN=queC PE=3 SV=1
MKTIVVCSGGLDSVSLAHRMAAEERLIGLVSFDYGQRHRKELDFAARCAARLAVPHHIIDIAAIGGHLSGSALTDDVEVPDGHYAEETMKATVVPNRNAIMLAIAFGLAAAQKADAVAVAVHGGDHFIYPDCRPGFIDAFQRMQNEALDGYASIKLLAPYVEVSKAAIVADGAKHGTPFAETWSCYKGGSLHCGRCGTCVERREAFHLAAVDDPTEYQDRDFWKAAVSQYSASEVR

SEQ ID NO: 41647 - protein, 233 aa, unidentified
  source 1..233: note = Rhizobium album
  REGION 1..233: note = tr|A0A2U2DKI7|A0A2U2DKI7_9RHIZ 7-cyano-7-deazaguanine synthase OS=Rhizobium album; OX = 2182425 GN=queC PE=3 SV=1
MSATALVLFSGGQDSTTCLAWALDRFERVETVGFDYGQRHRIELECRETLRTQLSNLNPSWGERLGDDHTISLAALGEISDTALTSGMQIEMAASGLPNTFVPGRNLIFLTFAAALAYRRGLKHIVGGMCETDYSGYPDCRDDTIKALQVALNIGMEKRFVLDTPLMWIDKAETWRLAKTLGGRALVDIIVKDSHTCYLGERGEFHAWGYGCGTCPACDLRAKGYEKFSAEEV

SEQ ID NO: 41648 - protein, 236 aa, unidentified
  source 1..236: note = Rhizobium altiplani
  REGION 1..236: note = tr|A0A109JB20|A0A109JB20_9RHIZ 7-cyano-7-deazaguanine synthase OS=Rhizobium altiplani; OX = 1864509 GN=queC PE=3 SV=1
MKTIVICSGGLDSISLAHRVAAEHQLISLLSFDYGQRHRKELDFATACAKRLGVPHQIIDIRTIGRHLTGSALTDDVDVPDGHYAEETMKATVVPNRNSIMLAIAFGLAAAQKADAVAVAVHGGDHFIYPDCRPGFIDAFQEMQNQALDGYASVSLLAPYVNVSKADIVTDGAKYGTPFAETWSCYKGGTRHCGRCGTCVERREAFHLAGVADPTEYEDPDFWVAATAGYSAREVK

SEQ ID NO: 41649 - protein, 236 aa, unidentified
  source 1..236: note = Rhizobium anhuiense
  REGION 1..236: note = tr|A0A3S0X879|A0A3S0X879_9RHIZ 7-cyano-7-deazaguanine synthase OS=Rhizobium anhuiense; OX = 1184720 GN=queC PE=3 SV=1
MKTIVVCSGGLDSVSLAHRIAAEKQLIGLISFDYGQRHRKELEFAAKCAARLSVRHHIIDIASIGGHLSGSALTDNVEVPDGHYAEETMKATVVPNRNAIMLAIAFGLAAAQKADAVAVAVHGGDHFIYPDCRPGFIDAFQRMQNEALEGYASVKLLAPYVDVPKAAIVVDGAKHGTPFSETWSCYKGGRLHCGRCGTCVERREAFHLAGVPDPTEYEDRDFWKAAVSQYSATEVH

SEQ ID NO: 41650 - protein, 236 aa, unidentified
  source 1..236: note = Rhizobium azibense
  REGION 1..236: note = tr|A0A4R7ZSG5|A0A4R7ZSG5_9RHIZ 7-cyano-7-deazaguanine synthase OS=Rhizobium azibense; OX = 1136135 GN=queC PE=3 SV=1
MKTIVICSGGLDSVSLAHKVAAEHQLIGLLSFDYGQRHRKELDFAAACAKRLGVPHQIIDITNIGSHLTGSALTDDIDVPDGHYAEETMKATVVPNRNAIMLAIAFGLAAAQKANAVAVAVHGGDHFIYPDCRPGFIQSFQDMQNQALDGYANVSLFAPYVTVSKADIVIDGARNGTRFAETWSCYKGGSRHCGRCGTCVERREAFHLAGIDDPTDYEDADFWVAATAGFAAKEVK

SEQ ID NO: 41651 - protein, 236 aa, unidentified
  source 1..236: note = Rhizobium azibense
  REGION 1..236: note = tr|A0A4R3R9X4|A0A4R3R9X4_9RHIZ 7-cyano-7-deazaguanine synthase OS=Rhizobium azibense; OX = 1136135 GN=queC PE=3 SV=1
MKTIVICSGGLDSVSLAHKVAAEHQLIGLLSFDYGQRHRKELDFAAACAKRLGVVHQIIDIRNIGNHLTGSALTDDIDVPDGHYAEETMKATVVPNRNAIMLAIAFGLAAAQKADAVAVAVHGGDHFIYPDCRPGFIQAFQDMQNQALEGYAKVLLFAPYVTVSKADIVIDGARNGTRFAQTWSCYKGGARHCGRCGTCVERREAFHLAGIDDPTDYEDPNFWVGATAGFAAEEVK

SEQ ID NO: 41652 - protein, 236 aa, unidentified
  source 1..236: note = Rhizobium esperanzae
  REGION 1..236: note = tr|A0A246DL91|A0A246DL91_9RHIZ 7-cyano-7-deazaguanine synthase OS=Rhizobium esperanzae; OX = 1967781 GN=queC PE=3 SV=1
MKTIVVCSGGLDSVSLAHRMAAEEQLIGLVSFDYGQRHRKELDFAAKCAARLAVPHHIIDIAAIGGHLSGSALTDNVDVPDGHYAEETMKATVVPNRNAIMLAIAFGLAAAQKADAVAVAVHGGDHFIYPDCRPGFIDAFQHMQNEALDGYASVRLLAPYVDVPKAAIVADGARHGTPFAETWSCYKGGSLHCGRCGTCVERREAFHLAGVSDPTEYEDRDFWKAAVSQYSAAEVR

SEQ ID NO: 41653 - protein, 236 aa, Rhizobium etli
  REGION 1..236: note = tr|S5S7Y5|S5S7Y5_RHIET 7-cyano-7-deazaguanine synthase OS=Rhizobium etli bv. mimosae str. Mim1; OX = 1328306 GN=queC PE=3 SV=1
MKTIVVCSGGLDSVSLAHRTASEEQLIGLVSFDYGQRHRKELDFAARCAARLAVPHHIIDIAAIGGHLSGSALTDNVEVPDGHYAEETMKATVVPNRNAIMLAIAFGLAAAQKADAVAVAVHGGDHFIYPDCRPGFIDAFQRMQNEALDGYASVKLLAPYVEVSKAAIVADGARHGTPFAETWSCYKGGSLHCGRCGTCVERREAFHLAGVSDPTEYEDRDFWKAAVSQYSAAEAR

SEQ ID NO: 41654 - protein, 236 aa, Rhizobium etli
  REGION 1..236: note = sp|B3Q0Y0|QUEC_RHIE6 7-cyano-7-deazaguanine synthase; OS = Rhizobium etli (strain CIAT 652) OX=491916 GN=queC PE=3; SV = 1
MKTIVVCSGGLDSVSLAHKMAAEQQLIGLVSFDYGQRHRKELDFAARCAARLAVPHHIIDIAAIGGHLSGSALTDNVEVPDGHYAEETMKATVVPNRNAIMLAIAFGLAAAQKADAVAVAVHGGDHFIYPDCRPGFIDAFQRMQNAALDGYASVRLLAPYVDVSKAAIVADGEKHATPFAETWSCYKGGRLHCGRCGTCVERREAFHLAGISDPTDYEDRDFWKAAVSQYSAKEVR

SEQ ID NO: 41655 - protein, 236 aa, unidentified
  source 1..236: note = Rhizobium favelukesii
  REGION 1..236: note = tr|W6RD30|W6RD30_9RHIZ 7-cyano-7-deazaguanine synthase OS=Rhizobium favelukesii OX=348824 GN=exsB PE=3; SV = 1
MKTIVICSGGLDSISLAHRVAAEHQLIGLLSFDYGQRHRKELDFATACAKRLGVPHQIIDIRTIGRHLTGSALTDDVDVPDGHYAEETMKATVVPNRNAIMLAIAFGLAAAQKADAVAVAVHGGDHFIYPDCRPGFIDAFQEMQNQALDGYASVSLHAPYVNISKADIVADGAKYGTPFAETWSCYKGGTRHCGRCGTCVERREAFHLAGVADPTEYEDPDFWVAATSGYSAREVK

SEQ ID NO: 41656 - protein, 236 aa, unidentified
  source 1..236: note = Rhizobium fredii
  REGION 1..236: note = tr|A0A2L0HEG2|A0A2L0HEG2_RHIFR 7-cyano-7-deazaguanine synthase OS=Rhizobium fredii OX=380; GN = queC PE=3 SV=1
MKTIVICSGGLDSVSLAHKIATEHELVGLLSFDYGQRHRKELDFAAACARRLGVPHQIIDIREIGRHLTGSALTDDVDVPDGHYAEETMKTTIVPNRNAIMLAIAFGVAAARKADAVAAAVHGGDHFIYPDCRPGFIAAFQTMQNHALEGYADITLHTPYVNVSKADIVADGAKHGTPFAETWSCYKGGARHCGRCGTCVERREAFHLAGVADATEYEDPDFWVAATRAFAAAEVR

SEQ ID NO: 41657 - protein, 236 aa, unidentified
  source 1..236: note = Rhizobium fredii
  REGION 1..236: note = tr|G9AFM5|G9AFM5_RHIFH 7-cyano-7-deazaguanine synthase OS=Rhizobium fredii (strain HH103) OX=1117943; GN = exsB PE=3 SV=1
MKTIVICSGGLDSVSLAHRIAAEHELLGLLSFDYGQRHRKELDFAAACARRLGVPHQVIDIREIGRHLTGSALTDDIDVPDGHYAEETMKTTVVPNRNAIMLAIAFGVAAAGKADAVAAAVHGGDHFIYPDCRPGFIDAFQTMQNHALDGYADVTLHTPYVNVSKADIVADGAKHHTPFAETWSCYKGGARHCGRCGTCVERREAFHLAGVVDPTEYEDPDFWVAATRAFSAEEVK

SEQ ID NO: 41658 - protein, 424 aa, unidentified
  source 1..424: note = Rhizobium freirei
  REGION 1..424: note = tr|N6UYB3|N6UYB3_9RHIZ 7-cyano-7-deazaguanine synthase OS=Rhizobium freirei PRF 81 OX=363754; GN = RHSP_18773 PE=3 SV=1
MRLVCGPGSFELPLEEGDLRVVLYGQPRIPSEASAGEAVKAELRRKGLNPHRRAWDLLSIALSIITADFSVLRDDSADGWTREIELDVAVSDRAFWNTMANEFRQALAFLTTDRWKLRFHDGGVLPAPPKKISVLKEDCVVLLSGGLDSLVGAIDLTRDGLKPVAVSQNVRGDGLKQRDFAQEIGLTKHLQLNHVATSPTVQETSQRARSLIFLTFGVVVATSLEKYAKGNTAPLYVCENGFIAINPPLTGSRLGSLSTRTAHPVFLTRFQKILDAASLNVKIENPYAQKTKGEMLIECKDQIFLQTEAAHSTSCGRFQRFNYRHCGRCVPCQVRRAAFVAWDAKRDTTDYVYEPLGKDDEDHASFDDVRSVAIALASVKADGLDRWLGHTLSPPDIGDRNGVRGMLDRGLNELGELHRLYGVK

SEQ ID NO: 41659 - protein, 236 aa, unidentified
  source 1..236: note = Rhizobium freirei
  REGION 1..236: note = tr|N6UV40|N6UV40_9RHIZ 7-cyano-7-deazaguanine synthase OS=Rhizobium freirei PRF 81 OX=363754 GN=exbB; PE = 3 SV=1
MKTIVICSGGLDSVSLAHKVAAEHRLIGLVSFDYGQRHRKELEFAAACAKRLSVPHQIIDITAIGKHLTGSALTDNVDVPDGHYAEETMKATVVPNRNAIMLAIAFGLAAAQKADAVAVAVHGGDHFIYPDCRPGFIAAFQQMQNHALEGYASVSLYAPYVTISKADIVADGAKHRTPFAETWSCYKGGERHCGRCGTCVERREAFHLAGIEDPTEYEDPDFWRSATSGFSAAEVK

SEQ ID NO: 41660 - protein, 236 aa, Rhizobium galegae
  REGION 1..236: note = tr|A0A5J5KQJ7|A0A5J5KQJ7_RHIGA 7-cyano-7-deazaguanine synthase QueC OS=Rhizobium galegae; OX = 399 GN=queC PE=4 SV=1
MKTIVVCSGGLDSVSLAHRIAAAQELLGLISFDYGQRHRKELDFAAACAVRLGVFHEIIDMRGIGSRLTGSALTDDLDVPDGHYAEETMRVTVVPNRNAIMLSIAFGVAAARNADAVAIAVHGGDHFIYPDCRPGFIDAFQAMQDHALDGYASVRLIAPYVNGSKADIVVDGARHGTPFAETWSCYKGGARHCGRCGTCVERREAFHLAGIEDPTEYEDPDFWKAATEGFRAEETR

SEQ ID NO: 41661 - protein, 236 aa, Rhizobium gallicum
  REGION 1..236: note = tr|A0A1L5NXR1|A0A1L5NXR1_9RHIZ 7-cyano-7-deazaguanine synthase OS=Rhizobium gallicum; OX = 56730 GN=queC PE=3 SV=1
MKTIVICSGGLDSVSLAHKVAAEHELIGLLSFDYGQRHRKELDFAAACAKRLNVAHQIIDIRNIGSHLTGSALTDDIDVPDGHYAEETMKATVVPNRNAIMLTIAFGLAAAQKADAVAVAVHGGDHFIYPDCRPSFIQSFQDMQNQALDGYASVSLFAPYVTVSKAEIVIDGARNGTPFAETWSCYKGGSRHCGRCGTCVERREAFHLAGIDDPTDYEDPDFWVTATAGFVAEEVK

SEQ ID NO: 41662 - protein, 236 aa, Rhizobium gallicum
  REGION 1..236: note = tr|A0A0B4XI10|A0A0B4XI10_9RHIZ 7-cyano-7-deazaguanine synthase OS=Rhizobium gallicum bv. gallicum R602 OX=1418105 GN=queC PE=3 SV=1
MKTIVICSGGLDSVSLAHKVAAEHQLIGLLSFDYGQRHRKELDFAAACAKRLGVPHQIIDITNIGSHLTGSALTDDIDVPDGHYAEETMKATVVPNRNAIMLAIAFGLAAAQKADAVAVAVHGGDHFIYPDCRPGFIQSFQDMQNQALDGYANVSLFAPYVTVSKADIVIDGARNGTRFAETWSCYKGGSRHCGRCGTCVERREAFHLAGIDDPTDYEDADFWVAATAGFAAEEVK

SEQ ID NO: 41663 - protein, 236 aa, unidentified
  source 1..236: note = Rhizobium grahamii
  REGION 1..236: note = tr|A0A370KL34|A0A370KL34_9RHIZ 7-cyano-7-deazaguanine synthase OS=Rhizobium grahamii; OX = 1120045 GN=queC PE=3 SV=1
MKTIVICSGGLDSISLAHRVAAEHQLIGLLSFDYGQRHRKELDFATACAKRLGVPHQIIDIRTIGRHLTGSALTDDVDVPDGHYAEETMKTTVVPNRNAIMLAIAFGLAAAQKADAVAVAVHGGDHFIYPDCRPGFIDAFQEMQNQALDGYASVSLLAPYVNISKADIVTDGAKYGTPFAETWSCYKGGTRHCGRCGTCVERREAFHLAGVADPTEYEDPDFWKAATSGYAAREVK

SEQ ID NO: 41664 - protein, 236 aa, unidentified
  source 1..236: note = Rhizobium grahamii
  REGION 1..236: note = tr|S3H9W4|S3H9W4_9RHIZ 7-cyano-7-deazaguanine synthase OS=Rhizobium grahamii CCGE 502 OX=990285 GN=queC; PE = 3 SV=1
MKTIVICSGGLDSISLAHRVAAEHQLIGLLSFDYGQRHRKELDFATACAKRLGVPHQIIDIRTIGRHLTGSALTDDVDVPDGHYAEETMKTTVVPNRNAIMLAIAFGLAAAQKADAVAVAVHGGDHFIYPDCRPGFIDAFQEMQNQALDGYASVSLFAPYVTVSKADIVTDGAKYGTPFAETWSCYKGGTRHCGRCGTCVERREAFHLAGVADPTEYEDPDFWKAATSGYAAREVK

SEQ ID NO: 41665 - protein, 233 aa, Rhizobium hainanense
  REGION 1..233: note = tr|A0A1C3WCC9|A0A1C3WCC9_9RHIZ 7-cyano-7-deazaguanine synthase OS=Rhizobium hainanense; OX = 52131 GN=queC PE=3 SV=1
MSSTALVLFSGGQDSTTCLAWALDRFEQVETVGFDYGQRHRIELECRDSLRAQMRTLNPLWADRLGEDHTISLAALGKISDTALTSGMQIEMAESGLPNTFVPGRNLIFLTFAAALAYRRGLKHIVGGMCETDYSGYPDCRDDTIKALQVALNIGMEKRFVLDTPLMWIDKAETWQLAKDLGGRALVDIIVKDSHTCYLGERGALHQWGHGCGTCPACELRAKGYEKFVAQEV

SEQ ID NO: 41666 - protein, 236 aa, Rhizobium hainanense
  REGION 1..236: note = tr|A0A1C3W2S1|A0A1C3W2S1_9RHIZ 7-cyano-7-deazaguanine synthase OS=Rhizobium hainanense; OX = 52131 GN=queC PE=3 SV=1
MKTIVICSGGLDSVSLAQKVAAEHQLIGLVSFDYGQRHRKELEFAAACAKRLGVPHEIIDITAIGKHLTGSALTDDIEVPDGHYAEETMKATVVPNRNAIMLAIAFGLAAAQKADAVAVAVHGGDHFIYPDCRPGFIDAFQQMQNHALDGYASVSLYAPYVTISKADIVTDGDRHKTPFAETWSCYKGGKSHCGRCGTCVERREAFHLAGIADPTEYEDADFWVAATSGFSAEEVK

SEQ ID NO: 41667 - protein, 236 aa, unidentified
  source 1..236: note = Rhizobium hidalgonense
  REGION 1..236: note = tr|A0A2A6K4D8|A0A2A6K4D8_9RHIZ 7-cyano-7-deazaguanine synthase OS=Rhizobium hidalgonense; OX = 1538159 GN=queC PE=3 SV=1
MKTIVVCSGGLDSVSLAHKIAAEQQLIGLVSFDYGQRHRKELDFAARCAARLAVPHHIIDIATIGGHLGGSALTDNVEVPDGHYAEETMKATVVPNRNAIMLAIAFGLAAAQKADAVAVAVHGGDHFIYPDCRPGFIDAFQHMQNEALDGYASVRLLAPYVDAPKAAIVADGAKHATPFVETWSCYKGGRLHCGRCGTCVERREAFHLAEIPDPTEYEDGDFWKAAVSQYSAAEVR

SEQ ID NO: 41668 - protein, 234 aa, unidentified
  source 1..234: note = Rhizobium ipomoeae
  REGION 1..234: note = tr|A0A4S8NT16|A0A4S8NT16_9RHIZ 7-cyano-7-deazaguanine synthase OS=Rhizobium ipomoeae; OX = 1210932 GN=queC PE=3 SV=1
MSQSKAVVLVSGGLDSATALAIAKHQGFEVYALSFRYGQRHAVELEAAKKVAAEAGVSDHVIASIDLRQFGGSALTQDIEVPKGRAASEMGVGIPVTYVPARNTIFLSFALAWAEVLKASDIFIGVNALDYSGYPDCRPEYIEAYTRMANLATKAGVTGETKLTIHTPLIHMTKAEIIRQGTALNVDYGLTHSCYDPTPEGHACGECDSCLLRLKGFSEAGLKDPVVYAQRGAA

SEQ ID NO: 41669 - protein, 186 aa, unidentified
  source 1..186: note = Rhizobium ipomoeae
  REGION 1..186: note = tr|A0A4S8P4R2|A0A4S8P4R2_9RHIZ 7-cyano-7-deazaguanine synthase OS=Rhizobium ipomoeae; OX = 1210932 GN=FAA97_02445 PE=3 SV=1
MGRGAAMARATVLLSGGVDSTSCIHFLQTRAFEVRAIYVDFGQPAAVIEWAKVVAVSRLFGIPSTKVTCSSDSEFGVGELGGRNAFLLFAAMLLGKCEDGLLVMGIHSGSPYFDCSPEFVDMVARLVSACSSDRLQVHMPFLSWTKADVYAYFRSTGINPQLTYSCEAGTDSPCGDCLSCRDRRLL

SEQ ID NO: 41670 - protein, 236 aa, unidentified
  source 1..236: note = Rhizobium jaguaris
  REGION 1..236: note = tr|A0A387G5Y0|A0A387G5Y0_9RHIZ 7-cyano-7-deazaguanine synthase OS=Rhizobium jaguaris; OX = 1312183 GN=queC PE=3 SV=1
MKTIVICSGGLDSVSLAQKVAAEHQLIGLVSFDYGQRHRKELDFAAACAKRLSVPHHIIDITAIGRHLTGSALTDDVEVPDGHYAEETMKATVVPNRNAIMLAIAFGLAAAQKADAVAVAVHGGDHFIYPDCRPGFIDAFQQMQNHALDGYASVSLYAPYVNVSKADIVTDGVRNGTPFADTWSCYKGGIRHCGRCGTCVERREAFHLAGVEDPTEYDDPDFWVAATAGFSAEEVK

SEQ ID NO: 41671 - protein, 255 aa, unidentified
  source 1..255: note = Rhizobium jaguaris
  REGION 1..255: note = tr|A0A387G7Z5|A0A387G7Z5_9RHIZ 7-cyano-7-deazaguanine synthase OS=Rhizobium jaguaris; OX = 1312183 GN=queC PE=3 SV=1
MAASALVLFSGGQDSTTCLAWALDRFERVETVGFDYGQRHRIELKCRETLRTKVGKINAMWSERLGDDHRIPLAALEDISNSALTSSMAIEMADTGLPNTFVPGRNLIFLTVAAALAHRRELEHIVGGMCETDFSGYPDCRNDTMKALQTALNLGMEKRLVLDTPLMWIDKARTWQLAKDLGGKELVDTIIENSHTCHLGVRGDRHEWGYGCGICPACDLRAKGYRTFLAQEVRNLAKSLPSNHAQDGGSKVDDT

SEQ ID NO: 41672 - protein, 236 aa, unidentified
  source 1..236: note = Rhizobium laguerreae
  REGION 1..236: note = tr|A0A4V2V8B6|A0A4V2V8B6_9RHIZ 7-cyano-7-deazaguanine synthase OS=Rhizobium laguerreae; OX = 1076926 GN=queC PE=3 SV=1
MKTIVVCSGGLDSVSLAHKVAAEKQLIGLVSFDYGQRHRKELDFAASCAVRLSVPHHIIDIASIGGHLSGSALTDNVEVPDGHYAEETMKATVVPNRNAIMLAIAFGLAAAQKADAVAVAVHGGDHFIYPDCRPGFIDAFQRMQNEALDGYASVTLLAPYVDVSKAAIVVDGEKHGTPFSETWSCYKGGELHCGRCGTCVERREAFHLADVPDPTEYEDRDFWKAAVSRYSATEVR

SEQ ID NO: 41673 - protein, 461 aa, unidentified
  source 1..461: note = Rhizobium laguerreae
  REGION 1..461: note = tr|A0A1S9GLZ2|A0A1S9GLZ2_9RHIZ Uncharacterized protein OS=Rhizobium laguerreae OX=1076926 GN=BS630_23435; PE = 4 SV=1
MKAEALAEVQQEKLLFAVEKGQAVQCPGFDKTVIAEIGKHIQFVPDILDTFDVKGFAAKHYDLMVLAAAIEFADRRWRRPASWLRNLHVTIPVIDHACWSRPEVQSSLRSAMNFLTGDSWRFTFLKAANASPIGWRQVPLMFEQPKTFAIAYSNGLDSRAVSALSGPPSEALCIRVASTKQRRMDGDSHFTQIPFRVKGFKGKESSFRSRGFQFAAMATIASHLSNISRIIVPESGQGALGPVLVPLYNIYTDYRNFPAFFRKMERFTRALLDCIIKFEQPRLWSTKGETMKAFLGLPGRKHQHLINTRSCWQTRRIVNAEHRRQCGLCAACLLRRMSLHAAEILEPIDTYVVSDLSAAEVDSALASITNDADRAIMVEYGSVGARHLDHLATMSELPDAALRPFASQIAAATGEAYEQTLRNLRIMLMTHAQEWRTFLSAQGEKSFLKNWMDGGRYECSE

SEQ ID NO: 41674 - protein, 234 aa, Rhizobium leguminosarum
  REGION 1..234: note = tr|A0A179C1S8|A0A179C1S8_RHILE 7-cyano-7-deazaguanine synthase OS=Rhizobium leguminosarum; OX = 384 GN=queC PE=3 SV=1
MSKSKAVVLLSGGLDSATTLAIAKQQGFDLYALSFRYGQRHVAELEAAKQVAAEAGVRDHMIASIDLRQFGGSALTQDIDVPKGRATSEMSEGIPVTYVPARNTIFLSFALAWAEVLKAPDIFIGVNALDYSGYPDCRPEYIDAYVRMANLATKTGVTGETTLKIHTPLIQMTKAQIIRRGTELGVKYGLTHSCYDPTVEGLSCGECDSCLLRLKGFSEAGLKDPARYAQRGAA

SEQ ID NO: 41675 - protein, 236 aa, Rhizobium leguminosarum
  REGION 1..236: note = sp|B5ZR38|QUEC_RHILW 7-cyano-7-deazaguanine synthase; OS = Rhizobium leguminosarum bv. trifolii (strain WSM2304); OX = 395492 GN=queC PE=3 SV=1
MRTIVVCSGGLDSVSLAHKIAAEQQLIGLVSFDYGQRHRKELDFAARCAARLAVPHHIIDISAIGGHLSGSALTDDIEVPDGHYAEETMKATVVPNRNAIMLAIAFGLAAAQKADAVAVAVHGGDHFIYPDCRPGFIDAFQRMQNEALDGYASVRLLAPYVEVSKAAIVTDGEKHATPFAETWSCYKGGRLHCGRCGTCVERREAFHLAGIPDPTEYEDQDFWKAAVSQYSAAEVR

SEQ ID NO: 41676 - protein, 236 aa, Rhizobium loessense
  REGION 1..236: note = tr|A0A1G4U8H3|A0A1G4U8H3_9RHIZ 7-cyano-7-deazaguanine synthase OS=Rhizobium loessense; OX = 158890 GN=queC PE=3 SV=1
MKTIVICSGGLDSVSLAHKVAAEHELIGLLSFDYGQRHRKELDFAAACAKRLNVAHQIIDIRNIGSHLTGSALTDDVDVPDGHYAEETMKATVVPNRNAIMLAIAFGLAAAQKADAVAVAVHGGDHFIYPDCRPGFIQSFQDMQNQALDGYASVSLFAPYVTISKADIVTDGARNGTPFAQTWSCYKGGPRHCGRCGTCVERREAFHLAGIDDPTDYEDPDFWVAATAGFAADEVK

SEQ ID NO: 41677 - protein, 245 aa, unidentified
  source 1..245: note = Rhizobium loti
  REGION 1..245: note = tr|A0A1A5QLI5|A0A1A5QLI5_RHILI 7-cyano-7-deazaguanine synthase OS=Rhizobium loti OX=381; GN = queC PE=3 SV=1
MQRDPGTALVLFSGGQDSTTCLAWALENFERVETIGFDYGQRHRIELDVRPYLLGRIRTDFPAWRGRLGEDHMIDMAVLGQISDTALTRDVEIARNANGLPNTFVPGRNLLFLGFAAAIAYRMGAKHLVIGVSEADCSGYPDCRDDAVKAMQLALNLGMETRFVIHTPLIRRDKAQTWALADWLGGEALVKLICEGSHTCYSGDREHRHSWGFGCGTCIECNLRAAGWEQFRSCKEAPVAANEMT

SEQ ID NO: 41678 - protein, 232 aa, unidentified
  source 1..232: note = Rhizobium loti
  REGION 1..232: note = tr|M5AME6|M5AME6_RHILI 7-cyano-7-deazaguanine synthase OS=Rhizobium loti OX=381 GN=exsB PE=3 SV=1
MNALVICSGGLDSVSLAHKVATEQKLIGLLSFDYGQRHKKELGFAAICAKRLGVPHQIVDIRDVGRNLSGSALTDNVDVPDGHYAEDSMRITVVPNRNAIMLAIAFGVAAAQKADAVATAVHGGDHFIYPDCRPAFIDAFQTMQNHALAGYADICLYAPYVNISKADIVSEGAKYATPFEATWSCYKGGARHCGRCGTCVERREAFDLAGITDPTDYEDADFWLHAIQTRSA

SEQ ID NO: 41679 - protein, 236 aa, Rhizobium lusitanum
  REGION 1..236: note = tr|A0A1C3WJN9|A0A1C3WJN9_9RHIZ 7-cyano-7-deazaguanine synthase OS=Rhizobium lusitanum; OX = 293958 GN=queC PE=3 SV=1
MKTIVVCSGGLDSVSLAHKVAAEHQLIGLVSFDYGQRHRKEVEFAAACARRLGVPHEIIDITAIGKHLTGSALTDDIDVPDGHYAEETMKATVVPNRNAIMLAIAFGLAAAQKADAVAVAVHGGDHFIYPDCRPGFIDAFQQMQNHALEGYASVSLYAPFVTISKADIVTNGARHQTPFAETWSCYKGGTRHCGRCGTCVERREAFHLAGVEDPTDYEDPDFWEAATTGFSAQEVK

SEQ ID NO: 41680 - protein, 424 aa, Rhizobium lusitanum; identical to SEQ ID NO: 41658
  REGION 1..424: note = tr|A0A1C3X6Q2|A0A1C3X6Q2_9RHIZ 7-cyano-7-deazaguanine synthase OS=Rhizobium lusitanum; OX = 293958 GN=GA0061101_1269 PE=3 SV=1

SEQ ID NO: 41681 - protein, 236 aa, unidentified
  source 1..236: note = Rhizobium meliloti
  REGION 1..236: note = sp|Q92UN9|QUEC_RHIME 7-cyano-7-deazaguanine synthase; OS = Rhizobium meliloti (strain 1021) OX=266834 GN=queC PE=3; SV = 1
MKTIVICSGGLDSVSLAHKVAAEQELSGLLSFDYGQRHRKELDFAAACARRLGVPHQIIDIREIGRRLTGSALTDEVDVPDGHYAEETMKATVVPNRNAIMLAIAFGVAAARKADAVATAVHGGDHFIYPDCRPGFIDAFQAMQDHALDGYADVALYAPFVNVSKADIVADGARHDTPFAETWSCYKGGARHCGRCGTCVERREAFHLAGVPDPTEYDDPDFWVAATGSFVAEEVK

SEQ ID NO: 41682 - protein, 236 aa, unidentified
  source 1..236: note = Rhizobium meliloti
  REGION 1..236: note = tr|A0A3S5KXS5|A0A3S5KXS5_RHIML 7-cyano-7-deazaguanine synthase OS=Rhizobium meliloti; OX = 382 GN=queC PE=3 SV=1
MKTIVICSGGLDSVSLAHKVAAEQELFGLLSFDYGQRHRKELDFAAACARHLGVPHQIIDIREIGRHLTGSALTDDVDVPDGHYAEETMKATVVPNRNAIMLAISFGVAAARKADAVATAVHGGDHFIYPDCRPGFIDAFQAMQNHALDSYADVALYAPFVNVSKADIVADGARHDTPFAETWSCYKGGARHCGRCGTCVERREAFHLAGVPDPTEYDDPDFWVTATGSFVAEEVK

SEQ ID NO: 41683 - protein, 236 aa, unidentified
  source 1..236: note = Rhizobium mesoamericanum
  REGION 1..236: note = tr|K0PXK1|K0PXK1_9RHIZ 7-cyano-7-deazaguanine synthase OS=Rhizobium mesoamericanum STM3625 OX=1211777; GN = queC PE=3 SV=1
MKTIVICSGGLDSVSLAHRVAAEHQLISLLSFDYGQRHRKELDFATACAKRLGVPHQIIDIRTIGRHLTGSALTDDVDVPDGHYAEETMKATVVPNRNAIMLAIAFGLAAAQKADAVAVAVHGGDHFIYPDCRPGFIDAFQEMQNQALDGYARVSLLAPYISVSKADIVTDGAKFGTPFAETWSCYKGGTRHCGRCGTCVERREAFHLAGISDPTEYDDPDFWEAATSGYSAREVK

SEQ ID NO: 41684 - protein, 236 aa, Rhizobium miluonense
  REGION 1..236: note = tr|A0A1C3VMT7|A0A1C3VMT7_9RHIZ 7-cyano-7-deazaguanine synthase OS=Rhizobium miluonense; OX = 411945 GN=queC PE=3 SV=1
MKTIVVCSGGLDSVSLAHKVAAEHRLIGLVSFDYGQRHRKEVEFAAACAKRLGVPHQIIDITAIGRHLTGSALTDNVDVPDGHYAEETMKATVVPNRNAIMLAIAFGLAAAQKADAVAVAVHGGDHFIYPDCRPGFIDAFQQMQNHALDGYASVSLYAPYVTVSKADIVTDGARHRTPFAETWSCYKGGERHCGRCGTCVERREAFHLAGVEDPTDYEDPDFWVSATSGFSAEEVK

SEQ ID NO: 41685 - protein, 236 aa, Rhizobium mongolense
  REGION 1..236: note = tr|A0A559TH41|A0A559TH41_9RHIZ 7-cyano-7-deazaguanine synthase OS=Rhizobium mongolense USDA 1844 OX=1079460 GN=queC PE=3 SV=1
MKTIVICSGGLDSVSLAHKVAAEHELIGLLSFDYGQRHRKELDFAAACAKRLNVAHQIIDIRNIGSHLTGSALTDDIDVPDGHYAEETMKATVVPNRNAIMLAIAFGLAAAQKADAVAVAVHGGDHFIYPDCRPGFIQSFQDMQNQALDGYASVSLFAPYVTVSKADIVTDGARNGTPFAQTWSCYKGGSRHCGRCGTCVERREAFHLARIDDPTDYEDPDFWVAATAGFAADEVK

SEQ ID NO: 41686 - protein, 236 aa, Rhizobium multihospitium
  REGION 1..236: note = tr|A0A1C3XAD4|A0A1C3XAD4_9RHIZ 7-cyano-7-deazaguanine synthase OS=Rhizobium multihospitium OX=410764 GN=queC PE=3 SV=1
MKTIVICSGGLDSVSLAHKVAAEHQLIGLVSFDYGQRHRKELEFASACARRLGVPHEIIDITAIGKHLTGSALTDDIEVPDGHYAEETMKATVVPNRNAIMLAIAFGLAAAQKADAVAVAVHGGDHFIYPDCRPGFIDAFQQMQNHALDGYASVSLYAPYVTISKADIVADGARHETPFAETWSCYKGGERHCGRCGTCVERREAFHLAGAADPTEYEDADFWVAATSRFSAEEVK

SEQ ID NO: 41687 - protein, 236 aa, unidentified
  source 1..236: note = Rhizobium nepotum
  REGION 1..236: note = tr|A0A0D8KHX0|A0A0D8KHX0_9RHIZ 7-cyano-7-deazaguanine synthase OS=Rhizobium nepotum 39/7; OX = 1368418 GN=queC PE=3 SV=1
MKTIVICSGGLDSVSLAHKIAAEHELLALVSFDYGQRHKKELDFAADCARRFGVPHHVIDIRTIGAHLTGSALTDDIAVPDGHYAEETMRSTVVPNRNAIMLTIAFGLAAAQQADAVAIAVHGGDHFIYPDCRPGFIDSFNAMQAHALEGYADVTLFAPYVTVSKAAIVTDGVKYGTPFGETWSCYKGGLRHCGRCGTCVERREAFHLAGVTDPTDYEDPDFWVAATHAYAAQEVR

SEQ ID NO: 41688 - protein, 236 aa, Rhizobium oryzae
  REGION 1..236: note = tr|A0A1X7CYN9|A0A1X7CYN9_9RHIZ 7-cyano-7-deazaguanine synthase OS=Rhizobium oryzae; OX = 464029 GN=queC PE=3 SV=1
MKTIVVCSGGLDSVSLAHKIAAEHELLGLISFDYGQRHRKELDFAGACARRLGVFHQIIDMRSIGRELSGSALTDDVDVPDGHYAEETMRITVVPNRNAIMLSVAFGVAAARQADAVAIAVHGGDHFIYPDCRPGFIDAFQTMQDHALDGYASVRLLAPYVNGSKADIVADGARHGTPFAETWSCYKGGERHCGRCGTCVERREAFHLAGVEDPTDYEDPDFWKTATEGFRATEIR

SEQ ID NO: 41689 - protein, 235 aa, Rhizobium oryzae
  REGION 1..235: note = tr|A0A1Q9B101|A0A1Q9B101_9RHIZ 7-cyano-7-deazaguanine synthase OS=Rhizobium oryzae; OX = 464029 GN=queC PE=3 SV=1
MKTIVVCSGGLDSVTLAHRIAATQTLMGLLSFDYGQRHKKELDFAARAAARLGVPHDVIDLSPVGRQLTGSALTDDVDVPDGHYAEETMKATVVPNRNAIMLAVAFGLAAARGAEAVAAAVHGGDHFIYPDCRPAFIDAFQAMQDAALDGYASIQLVTPYVRLSKADIVSDGARYQVPFAETWSCYKGDLRHCGRCGTCVERREAFHLAGIADPTDYADPDFWQAAIKGFRAEEV

SEQ ID NO: 41690 - protein, 235 aa, unidentified
  source 1..235: note = Rhizobium oryziradicis
  REGION 1..235: note = tr|A0A1Q8ZQ40|A0A1Q8ZQ40_9RHIZ 7-cyano-7-deazaguanine synthase OS=Rhizobium oryziradicis; OX = 1867956 GN=queC PE=3 SV=1
MKTLVVCSGGLDSVSLAYKIASEQQLIGLLSFDYGQRHKKELEFAARAAKALGVPHQIIDITTIGKSLTGSALTDDLDVPDGHYAEETMKITVVPNRNAIMLAIAFGVAAAKKADAVAVAVHGGDHFIYPDCRPGFIDAFQTMQNHALEGYADVTLLSPFVTVPKSEIVVQGAKYGTPFADTWSCYKGGARHCGRCGTCVERREAFHLAGVVDPTEYEDPDFWRAATSGFKAEGV

SEQ ID NO: 41691 - protein, 236 aa, Rhizobium phaseoli
  REGION 1..236: note = tr|A0A0M3GQA3|A0A0M3GQA3_9RHIZ 7-cyano-7-deazaguanine synthase OS=Rhizobium phaseoli Ch24-10 OX=1128399 GN=exsB PE=3 SV=1
MKTIVVCSGGLDSVSLAHKMAAEQQLIGLVSFDYGQRHRKELDFAARCAARLAVPHHIIDIAAIGGHLSGSALTDNVEVPDGHYAEETMKATVVPNRNAIMLAIAFGLAAAQKADAVAVAVHGGDHFIYPDCRPGFIDAFQRMQNEALDGYASVRLLAPYVDVSKAAIVADGEKHATPFAETWSCYKGGRLHCGRCGTCVERREAFHLAGISDPTDYEDRDFWKAAVSQYSAAEVR

SEQ ID NO: 41692 - protein, 236 aa, Rhizobium phaseoli
  REGION 1..236: note = tr|A0A2U3CU13|A0A2U3CU13_9RHIZ 7-cyano-7-deazaguanine synthase OS=Rhizobium phaseoli; OX = 396 GN=queC PE=3 SV=1
MKTIVVCSGGLDSVSLAHKMASEQQLIGLVSFDYGQRHRKELDFAARCAARLAVPHHIIDISAIGGHLSGSALTDNVEVPDGHYAEETMKATVVPNRNAIMLAIAFGLAAAQKADAVAVAVHGGDHFIYPDCRPGFIDAFQRMQNEALDGYASVRLLAPYVDVSKAAIVADGEKHATPFAETWSCYKGGRLHCGRCGTCVERREAFHLAGISDPTDYEDRDFWKAAVSQYSAAEVR

SEQ ID NO: 41693 - protein, 236 aa, Rhizobium pisi
  REGION 1..236: note = tr|A0A427M665|A0A427M665_9RHIZ 7-cyano-7-deazaguanine synthase OS=Rhizobium pisi; OX = 574561 GN=queC PE=3 SV=1
MKTIVVCSGGLDSVSLAHKIAAEEQLIGLVSFDYGQRHRKELDFAAKCAVRLAVPHHIIDIAAIGGHLSGSALTDDVEVPDGHYAEETMKATVVPNRNAIMLAIAFGLAAAQKADAVAVAVHGGDHFIYPDCRPGFIDAFQRMQNEALEGYASVKLLAPYVDVSKAAIVADGAKHATPFAETWSCYKGGKLHCGRCGTCVERREAFHLAGVTDPTEYEDLDFWKAAVSRYSATEAR

SEQ ID NO: 41694 - protein, 236 aa, Rhizobium pusense
  REGION 1..236: note = tr|A0A4U1JYF7|A0A4U1JYF7_9RHIZ 7-cyano-7-deazaguanine synthase OS=Rhizobium pusense; OX = 648995 GN=queC PE=3 SV=1
MKTIVICSGGLDSVSLAHKIAAEHELLALVSFDYGQRHRKELDFAADCARRLGVPHHVIDIRTIGSHLTGSALTDDVEVPDGHYAEETMRSTVVPNRNAIMLTIAFGLAAAQQAEAVAIAVHGGDHFIYPDCRPGFIDSFNAMQAHALEGYADVKLFAPYVTVSKAAIVTDGAKYGTPFGETWSCYKGGLRHCGRCGTCVERREAFHLAGVTDPTDYEDPDFWAVATHAFAAQEVR

SEQ ID NO: 41695 - protein, 236 aa, Rhizobium pusense; identical to SEQ ID NO: 35763
  REGION 1..236: note = tr|A0A1L9CLF5|A0A1L9CLF5_9RHIZ 7-cyano-7-deazaguanine synthase OS=Rhizobium pusense; OX = 648995 GN=queC PE=3 SV=1

SEQ ID NO: 41696 - protein, 236 aa, Rhizobium radiobacter; identical to SEQ ID NO: 35746
  REGION 1..236: note = tr|A0A2L2LG90|A0A2L2LG90_RHIRD 7-cyano-7-deazaguanine synthase OS=Rhizobium radiobacter; OX = 358 GN=exsB PE=3 SV=1

SEQ ID NO: 41697 - protein, 236 aa, Rhizobium radiobacter; identical to SEQ ID NO: 35762
  REGION 1..236: note = tr|A0A4V5PRZ0|A0A4V5PRZ0_RHIRD 7-cyano-7-deazaguanine synthase OS=Rhizobium radiobacter; OX = 358 GN=queC PE=3 SV=1

SEQ ID NO: 41698 - protein, 235 aa, unidentified
  source 1..235: note = Rhizobium rhizosphaerae
  REGION 1..235: note = tr|A0A1Q9AK60|A0A1Q9AK60_9RHIZ 7-cyano-7-deazaguanine synthase OS=Rhizobium rhizosphaerae; OX = 1672749 GN=queC PE=3 SV=1
MKTIVVCSGGLDSVTLAHRIAAEATLVGLLSFDYGQRHKKEITFAARAAERLGVPHDVIDLSPVGRHLTGSALTDDVDVPDGHYAEETMKTTVVPNRNAIMLAVAFGLAAARGADAVAAAVHGGDHFIYPDCRPGFIDAFQAMQDRALEGYASVRLVTPYVTRSKADIVADGARLSVPFAQTWSCYKGGARHCGRCGTCVERREAFHLAGIADPTDYEDPDFWQAATSAYAAREV

SEQ ID NO: 41699 - protein, 232 aa, Rhizobium selenitireducens
  REGION 1..232: note = tr|A0A376ABD3|A0A376ABD3_9RHIZ 7-cyano-7-deazaguanine synthase OS=Rhizobium selenitireducens ATCC BAA-1503 OX=1336235 GN=queC PE=3 SV=1
MKCFVICSGGLDSVSLAHRVAAEYDIAGLISFDYGQRHRKELDFATACAERLKVPHDIVDIRTVGRNLSDSALTDDVDVPDGHYAEESMRITVVPNRNAIMLAIAFGIAAARKVDAVATAVHGGDHFIYPDCRPGFIDAFQRMQDHALEGYANIRLYAPYVTVPKAEIVKDGARHGTPFALTWSCYKGGEHHCGRCGTCVERREAFHLAGVPDPTDYEDAGFWCEAVARGAL

SEQ ID NO: 41700 - protein, 236 aa, unidentified
  source 1..236: note = Rhizobium smilacinae
  REGION 1..236: note = tr|A0A5C4XH86|A0A5C4XH86_9RHIZ 7-cyano-7-deazaguanine synthase OS=Rhizobium smilacinae; OX = 1395944 GN=queC PE=3 SV=1
MKTLVVCSGGLDSVSLAHNIDAKGDLMGLISFDYGQRHRKELEFAAAAAKRLGVFHQIIDMRAIGSQLTGSALTGDLDVPDGHYAEETMRITVVPNRNAIMLTIAFGVAAARQVDAVAIAVHGGDHFIYPDCRPGFIESFDTMQRHALEGYASVKLLAPYVTGSKADIVTDGAKHHTPFGETWSCYKGGERHCGRCGTCVERREAFHLAGVDDPTDYEDPDFWKSATEGFKAEEVR

SEQ ID NO: 41701 - protein, 236 aa, unidentified
  source 1..236: note = Rhizobium sophoriradicis
  REGION 1..236: note = tr|A0A2A5KJA5|A0A2A5KJA5_9RHIZ 7-cyano-7-deazaguanine synthase OS=Rhizobium sophoriradicis OX=1535245 GN=queC PE=3 SV=1
MKTLVVCSGGLDSVSLAHKIAAEQQLIGLVSFDYGQRHRKELDFAARCAARLSVPHHIIDIAAIGGHLSGSALTDNVEVPDGHYAEETMKATVVPNRNAIMLAIAFGLAAAQKADAVAAAVHGGDHFIYPDCRPGFIDAFQRMQNEALDGYASVRLLAPYVDVPKAAIVADGAKHGTPFAETWSCYKGGRLHCGRCGTCVERREAFHLAGISDPTDYEDRDFWKAAVSHYSAAEVR

SEQ ID NO: 41702 - protein, 236 aa, unidentified
  source 1..236: note = Rhizobium sophoriradicis
  REGION 1..236: note = tr|A0A3R9BS54|A0A3R9BS54_9RHIZ 7-cyano-7-deazaguanine synthase OS=Rhizobium sophoriradicis OX=1535245 GN=queC PE=3 SV=1
MKTLVVCSGGLDSVSLAHKIAAEQQLIGLVSFDYGQRHRKELGFAARCAARLAVPHHIIDIAAIGGHLSGSALTDNVEVPDGHYAEETMKATVVPNRNAIMLAIAFGLAAAHKADAVAVAVHGGDHFIYPDCRPGFIDAFQRMQNEALDGYANVRLLAPYVDVPKAAIVADGAKHGTPFSETWSCYKGGRLHCGRCGTCVERREAFHLAGISDPTDYEDRDFWKAAVSQYSAAEVR

SEQ ID NO: 41703 - protein, 236 aa, Rhizobium sp.
  REGION 1..236: note = tr|A0A246U570|A0A246U570_9RHIZ 7-cyano-7-deazaguanine synthase OS=Rhizobium sp. R72; OX = 1764278 GN=queC PE=3 SV=1
MKTIVICSGGLDSISLAHRVAAEHQLISLLSFDYGQRHRKELDFATACAKRLGVPHQIIDIRTIGRHLTGSALTDDVDVPDGHYAEETMKATVVPNRNAIMLAIAFGLAAAQKADAVAVAVHGGDHFIYPDCRPGFIDAFQEMQNQALDGYASVSLLAPYVNISKADIVTDGAKYGTPFAETWSCYKGGTRHCGRCGTCVERREAFHLAGISDPTEYEDPDFWEAATSGYSAREVK

SEQ ID NO: 41704 - protein, 198 aa, Rhizobium sp.
  REGION 1..198: note = tr|A0A4R1S8R5|A0A4R1S8R5_9RHIZ 7-cyano-7-deazaguanine synthase OS=Rhizobium sp. BK251; OX = 2512125 GN=EV286_102446 PE=3 SV=1
MRRALLLSGGMDSTCLAYWRRPDLAITIDYGHKAAEGEIRAATAICRHLGIEHRIIRCDLSALGSGDMAGKPADPNAPASEWWPYRNQMLATIAAMECIKHGIDVLEVGALRTDGFHVDGRREFVEALSALLSMQEGGLRLEAPAAAYSAEELVKASGTPIEILAWSHSCHTNEYSCGYCRGCQKHYVTMEAIGVGPY

SEQ ID NO: 41705 - protein, 235 aa, unidentified
  source 1..235: note = Rhizobium straminoryzae
  REGION 1..235: note = tr|A0A549SQX4|A0A549SQX4_9RHIZ 7-cyano-7-deazaguanine synthase OS=Rhizobium straminoryzae; OX = 1387186 GN=queC PE=3 SV=1
MKTLVVCSGGLDSVSLAYKVAAEHTLIGLISFDYGQRHRKELEFAALAAKRLGVPHEIIDISNIGRHLSGSALTDDVAVPDGHYAEETMKVTVVPNRNAIMLAIAFGLAAARQAEAVAIAVHGGDHFIYPDCRPGFIDSFQVMQDHALEGYADVVLHSPFVMGSKADIVTEGARVGTPFAETWSCYKGGERHCGRCGTCVERREAFHLAGVEDPTAYDDPDFWKAATAGFRADEV

SEQ ID NO: 41706 - protein, 236 aa, Rhizobium sullae
  REGION 1..236: note = tr|A0A4V2VAA9|A0A4V2VAA9_RHISU 7-cyano-7-deazaguanine synthase OS=Rhizobium sullae; OX = 50338 GN=queC PE=3 SV=1
MKTIVICSGGLDSVSLAHKVAAEHELTGLLSFDYGQRHRKELDFAAACAKRLGVPHQIIDIRNIGRHLTGSALTDDIDVPDGHYAEETMKATVVPNRNAIMLSIAFGLAAAQKADAVAVAVHGGDHFIYPDCRPGFIQAFQEMQKQALDGYASVSLFAPYVTVSKADIVTDGARNGTPFAETWSCYKGGARHCGRCGTCVERREAFHLAGIEDPTDYEDPDFWAAATAGFLAKEVK

SEQ ID NO: 41707 - protein, 236 aa, Rhizobium sullae
  REGION 1..236: note = tr|A0A2N0DF49|A0A2N0DF49_RHISU 7-cyano-7-deazaguanine synthase OS=Rhizobium sullae; OX = 50338 GN=queC PE=3 SV=1
MKTIVICSGGLDSVSLAHKVAAERELTGLLSFDYGQRHRKELDFAAACAKRLGVPHQIIDIRNIGRHLTGSALTDDIDVPDGHYAEETMKATVVPNRNAIMLSIAFGLAAAQKADAVAVAVHGGDHFIYPDCRPGFIQAFQDMQKQALDGYASVSLFAPYVTVSKADIVTDGARNGTPFAETWSCYKGGVRHCGRCGTCVERREAFHLAGIEDPTDYEDSDFWAAATAGFLAKEVK

SEQ ID NO: 41708 - protein, 235 aa, Rhizobium taibaishanense
  REGION 1..235: note = tr|A0A1Q9A4X0|A0A1Q9A4X0_9RHIZ 7-cyano-7-deazaguanine synthase OS=Rhizobium taibaishanense OX=887144 GN=queC PE=3 SV=1
MKTLVVCSGGLDSVSLADKIAAQQQLIGLISFDYGQRHKKELDFAARAAKRLGVPHQVIDMTNIGASLTGSALTDDLDVPDGHYAEETMKITVVPNRNAIMLAIAFGVAAAKKADAVALAVHGGDHFIYPDCRPGFIDAFQAMQMQALDGYADVKLLAPFVTISKADIVTEGVKYGTPFAETWSCYKGGEKHCGRCGTCVERREAFHLAGVEDPTEYEDPDFWKAATSGFKATEA

SEQ ID NO: 41709 - protein, 359 aa, Rhizobium tibeticum
  REGION 1..359: note = tr|A0A1H8TFY8|A0A1H8TFY8_9RHIZ Uncharacterized protein OS=Rhizobium tibeticum OX=501024; GN = RTCCBAU85039_5190 PE=4 SV=1
MECIAAALKFLTGDEWKLTFTGAKLSADSDFGQQSLFEWGDTGRTITPFSDGLDSRAVSAILGAQGRVDRLIRVRVGSKADDRPVRDRRKVPFLNIPFSVNMKPVGIKESSVRSRGFKFTLLSALAAYLVGTHDVAMPESGQGALGPTLVPTSHGYEDYRNHPRFLCKMEEVFDAIFGYSIHFRLPQLWKTKGQTLAEFAAIESDPEEWNKTRSCWQQSRNSSFDRTRRHCGICAACMLRRLSFHSAGISEPKENYIWEDLRSGSFEDGVVPGFTKVTRAMQRYGIAGALHLDHLAEMRSSPLHRVRLKRHAWQLGERLQMTTTEAEERLLGLLGQHDREWKAFMKDLGPKSFVAQWLA

SEQ ID NO: 41710 - protein, 236 aa, Rhizobium tibeticum
  REGION 1..236: note = tr|A0A1H8U190|A0A1H8U190_9RHIZ 7-cyano-7-deazaguanine synthase OS=Rhizobium tibeticum; OX = 501024 GN=queC PE=3 SV=1
MKTIVICSGGLDSISLAHRVAAEHQLIGLLSFDYGQRHRKELDFATACAKRLGVPHQIIDIRTIGRHLTGSALTDDVDVPDGHYAEETMKATVVPNRNAIMLAIAFGLAAAQKADAVAVAVHGGDHFIYPDCRPGFIDAFQEMQNQALDGYASVSLHAPYVNISKADIVTDGAKYGTPFAETWSCYKGGTRHCGRCGTCVERREAFHLAGVADPTEYEDPDFWVAATSGYSAREVK

SEQ ID NO: 41711 - protein, 424 aa, Rhizobium tropici; identical to SEQ ID NO: 41658
  REGION 1..424: note = tr|L0LT76|L0LT76_RHITR 7-cyano-7-deazaguanine synthase OS=Rhizobium tropici CIAT 899 OX=698761; GN = RTCIAT899_PB00130 PE=3 SV=1

SEQ ID NO: 41712 - protein, 236 aa, Rhizobium tropici
  REGION 1..236: note = tr|A0A5B0VT93|A0A5B0VT93_RHITR 7-cyano-7-deazaguanine synthase OS=Rhizobium tropici; OX = 398 GN=queC PE=3 SV=1
MKTIVVCSGGLDSVSLAHKVAAEHQLIGLVSFDYGQRHRKELDFAAACATRLGVPHQIIDITGIGRHLTGSALTDDVDVPDGHYAEETMKATVVPNRNAIMLAIAFGLAAAQKADAVAVAVHGGDHFIYPDCRPGFIDAFQQMQNHALDGYASVSLYAPYVTISKADIVTDGARHQTPFAETWSCYKGGERHCGRCGTCVERREAFHIAGIADPTDYEDPDFWVSATSGFVAAEVK

SEQ ID NO: 41713 - protein, 236 aa, Rhizobium tubonense
  REGION 1..236: note = tr|A0A2W4CU94|A0A2W4CU94_9RHIZ 7-cyano-7-deazaguanine synthase OS=Rhizobium tubonense; OX = 484088 GN=queC PE=3 SV=1
MKIIVICSGGLDSVSLAYKVAAEHELVGLLSFDYGQRHRKELDFAAACALRLKVPHQIIDIREIGRHLGGSALTDDIEVPDGHYAEESMKITIVPNRNAIMLSIAFGVAAAQKADAVATAVHGGDHFIYPDCRPAFIDAFQLMQNQALDGYADVTLYAPYVNISKADIVSDGAKYNTPFAETWSCYKGGEHQCGRCGTCVERREAFHLAGIDDPTNYEDPHFWAVATGNLCAQEIK

SEQ ID NO: 41714 - protein, 235 aa, unidentified
  source 1..235: note = Rhizobium tumorigenes
  REGION 1..235: note = tr|A0A2W4B6K7|A0A2W4B6K7_9RHIZ 7-cyano-7-deazaguanine synthase OS=Rhizobium tumorigenes; OX = 2041385 GN=queC PE=3 SV=1
MKTIVVCSGGLDSVSLAYRTAAEGSLLGLLSFDYGQRHRKELDFAAACAQRLGVWHEIIDISGIGRHLTGSALTDNIAVPDGHYAEETMKSTIVPNRNAIMLAIAFGVAAARKADAVAVAVHGGDHFIYPDCRPGFIYSFQRMQAEALDGYADVALLAPYVTVSKADIVTDGVKQGTPFVETWSCYKGGERHCGRCGTCVERREAFSIAGVVDPTDYEDADFWVAATGSFRATEV

SEQ ID NO: 41715 - protein, 236 aa, Rhizobium vallis
  REGION 1..236: note = tr|A0A3S0Y0I0|A0A3S0Y0I0_9RHIZ 7-cyano-7-deazaguanine synthase OS=Rhizobium vallis; OX = 634290 GN=queC PE=3 SV=1
MKTIVVCSGGLDSVSLAHRIAAEAQLIGLVSFDYGQRHRKELDFAAKCAARLAVPHHIIDIAAIGGHLSGSALTDDVEVPDGHYAEETMKATVVPNRNAIMLAIAFGLAAAQKADAVAVAVHGGDHFIYPDCRPGFIDAFQRMQNEALDGYASVRLLAPYVEVSKAAIVADGEKHATPFAETWSCYKGGRLHCGRCGTCVERREAFHLAGVTDPTEYEDRDFWKAAVSQYSATEAR

SEQ ID NO: 41716 - protein, 68 aa, Rhizobium yanglingense
  REGION 1..68: note = tr|A0A245ZAY0|A0A245ZAY0_9RHIZ Uncharacterized protein OS=Rhizobium yanglingense OX=61013 GN=AJ87_47170; PE = 4 SV=1
MLAIAFGLAAAQKADAVAVAVHGGDHFIYPDCRPGFIQSFQDMQNHALDGYASVSLFAPYAPSRRPTS

SEQ ID NO: 41717 - protein, 239 aa, Rhizomicrobium sp.
  REGION 1..239: note = tr|A0A177Q9D5|A0A177Q9D5_9PROT 7-cyano-7-deazaguanine synthase OS=Rhizomicrobium sp. SCGC AG-212-E05 OX=1799655 GN=queC PE=3 SV=1
MSALSSALVLFSGGQDSTVCLAWALSRFGRVETVGFDYGQRHAAELAARPRILQKFRERFSGLAAGLGEDHLLPLDVLKAIGGSALTDARKIEMGADGLPTSFVPGRNVMFLTAAAALGYRRGIADLVGGMCETDYSGYPDCRADTIEATARALSLGLARDVRVHTPLMHLDKAATWKLAEDLGGEEMVALIVEDSVTCYEGDRAHRHDWGYGCGACPACELRAAGFKKYIGATNRKPA

SEQ ID NO: 41718 - protein, 230 aa, unidentified
  source 1..230: note = Rhizorhabdus dicambivorans
  REGION 1..230: note = tr|A0A2A4FR99|A0A2A4FR99_9SPHN 7-cyano-7-deazaguanine synthase OS=Rhizorhabdus dicambivorans OX=1850238 GN=queC PE=3 SV=1
MSDNLDKQGRRAIVLLSGGLDSMVSGGIAREQGFALAALTIDYNQRHRVELEAAKRVAAALEVDRHVTMPLNLRAFGGSSLTDDIEVPKNGVMPGIPSTYVPARNTIFLSLALGFAEATGARDIFLGVNALDYSGYPDCRPEFIAAFQHLADLATRMGVEGQGFTIHAPLQHMTKADIAREAARLGLDAGMSWSCYDPTPEGRHCGLCDSCRLRAKGFAEAGLPDPTVYA

SEQ ID NO: 41719 - protein, 230 aa, unidentified
  source 1..230: note = Rhizorhabdus sp.
  REGION 1..230: note = tr|A0A521T1K3|A0A521T1K3_9SPHN 7-cyano-7-deazaguanine synthase OS=Rhizorhabdus sp.; OX = 1968843 GN=queC PE=3 SV=1
MSDNANNQGRRAIVLLSGGLDSMVSGGLAREQGFALAALTIDYNQRHRVELEAAKRIAGMLDVDRHVTLPLNLRAFGGSSLTDDIDVPKDGVMPGIPSTYVPARNTIFLSLALGFAEATGARDIFLGVNALDYSGYPDCRPEFIAAFQHLADLATRMGVEGQGFTIHAPLQHMTKADIAREAARLGLDAGMSWSCYDPTPDGKHCGLCDSCRLRSKGFADAGLADPTMYA

SEQ ID NO: 41720 - protein, 228 aa, unidentified
  source 1..228: note = Rhodanobacter denitrificans
  REGION 1..228: note = tr|M4NJB2|M4NJB2_9GAMM 7-cyano-7-deazaguanine synthase OS=Rhodanobacter denitrificans OX=666685 GN=queC; PE = 3 SV=1
MSETPPRKAVVLVSGGMDSAVTIAIAREQGYQVHALSVAYGQRHSSELAASDRVAKMLGAIEHKTVGIDLRSIGGSALTADIDVPLDTADSDAIPVTYVPARNTIMLSIALGWAEVLGSSDIWCGVNAVDYSGYPDCRPAFIAAFEQLANVATKAGVEGAGIRIHAPLMRMSKADIAREGQRLGVDFSATVSCYQADSDGRACGHCDACRLRAQGFREAGLADPTRYA

SEQ ID NO: 41721 - protein, 221 aa, unidentified
  source 1..221: note = Rhodanobacter denitrificans
  REGION 1..221: note = tr|A0A2W5KR26|A0A2W5KR26_9GAMM 7-cyano-7-deazaguanine synthase OS=Rhodanobacter denitrificans OX=666685 GN=queC PE=3 SV=1
MKHAVVLVSGGMDSAVTLAMARAEGLACHALSVAYGQRHSSELFAAERLAVSLGAVEHKTVHVDLRAIGGSALTADIAVPEQGGAGIPVTYVPARNTIMLSIALGWAEVLGASDIYCGVNAVDYSGYPDCRPAFIDAFQTLANLATKAGVEGRPLRLHAPLIALGKADIVREGLRLGIDFSQTVSCYQADAEGRACGHCDACRLRAEGFAAAGVPDPTRYR

SEQ ID NO: 41722 - protein, 228 aa, Rhodanobacter fulvus
  REGION 1..228: note = tr|I4VY03|I4VY03_9GAMM 7-cyano-7-deazaguanine synthase OS=Rhodanobacter fulvus Jip2 OX=1163408 GN=queC; PE = 3 SV=1
MTDKLSRKAVVLVSGGMDSAVTIAIAREQGYQVHALSVAYGQRHNSELAASERVSQMLGAFEHKTVAVDLRRIGGSALTADIDVPLDAADGDDIPVTYVPARNTIMLSIALGWAEVLGARDIWCGVNAVDYSGYPDCRPAFIEAFESLANVATKAGVEGAGLRIHAPLMKMSKADIAREGKRLGVDFSATVSCYQANGEGRACGHCDACRLREQGFREAGLPDPTRYV

SEQ ID NO: 41723 - protein, 228 aa, unidentified
  source 1..228: note = Rhodanobacter glycinis
  REGION 1..228: note = tr|A0A5B9DWR3|A0A5B9DWR3_9GAMM 7-cyano-7-deazaguanine synthase OS=Rhodanobacter glycinis; OX = 582702 GN=queC PE=3 SV=1
MSETTPRKAVVLVSGGMDSAVVIAIAREQGYQVHALSVAYGQRHSSELEASERVAHLLGAVEHKVVQVDLRSIGGSALTADIDVPLDAAGQSEIPVTYVPARNTIMLSIALGWAEVLGSTEIWCGVNAVDYSGYPDCRPAFIEAFEKLANLATKAGVEGAGIRIRAPLMAMSKADIAREGARLGVDFAQTVSCYQADAQGRACGHCDACRLRAQGFSEAGLVDPTRYV

SEQ ID NO: 41724 - protein, 228 aa, unidentified
  source 1..228: note = Rhodanobacter glycinis
  REGION 1..228: note = tr|A0A502CJK0|A0A502CJK0_9GAMM 7-cyano-7-deazaguanine synthase OS=Rhodanobacter glycinis; OX = 582702 GN=queC PE=3 SV=1
MSQSTLRKAVVLVSGGMDSAVTIALAREQGYQVHALSVAYGQRHNSELAASDRVSRMLGAVEHKTVGIDLRSIGGSALTADIDVPLDTLDSGDIPVTYVPARNTIMLSIALGWAEVLGSSDIWCGVNAVDYSGYPDCRPAFIETFETLANVATKAGVEGAGIRIHAPLMRMSKADIAREGQRLGVDFSATVSCYQADGDGQACGHCDACRLRAQGFREAGLADPTRYA

SEQ ID NO: 41725 - protein, 228 aa, Rhodanobacter lindaniclasticus
  REGION 1..228: note = tr|A0A4S3K8T9|A0A4S3K8T9_9GAMM 7-cyano-7-deazaguanine synthase OS=Rhodanobacter lindaniclasticus OX=75310 GN=queC PE=3 SV=1
MSDQHSRKAVVLVSGGMDSAVTIAIAREQGYQVHALSVAYGQRHQSELAASDRVATMLGAVEHKTVAVDLRSIGGSALTAEIDVPLDAGDSADIPVTYVPARNTIMLSIALGWAEVLGSSDIWCGVNAVDYSGYPDCRPAFVAAFEALANVATKAGVEGAGIRVHAPLMHMSKADIAREGQRLGVDFAATVSCYRADDEGRACGHCDACRLRAQGFREAGMADPTRYA

SEQ ID NO: 41726 - protein, 231 aa, Rhodanobacter sp.
  REGION 1..231: note = tr|A0A1V3PXV7|A0A1V3PXV7_9GAMM 7-cyano-7-deazaguanine synthase OS=Rhodanobacter sp. C03; OX = 1945858 GN=queC PE=3 SV=1
MSQNSLRKAVVLVSGGMDSAVTIALAREQGYQVHALSVAYGQRHNSELAASDRVSKMLGAVEHKTVSIDLRSIGGSALTADIDVPLDDSAHDGDGHIPVTYVPARNTIMLSIALGWAEVLGSSDIWCGVNAVDYSGYPDCRPAFIESFEALANVATKAGVEGAGIRVHAPLMRMSKADIAREGQRLGVDFSATVSCYKADDAGRACGHCDACRLRAQGFREAGLADPTHYV

SEQ ID NO: 41727 - protein, 224 aa, Rhodanobacter sp.
  REGION 1..224: note = tr|A0A522NBJ2|A0A522NBJ2_9GAMM 7-cyano-7-deazaguanine synthase OS=Rhodanobacter sp.; OX = 1883446 GN=queC PE=3 SV=1
MRKAVVLVSGGMDSAVTIALAREQGYQVHALSVAYGQRHSSELAASDRVSRMLGAVEHKTVGIDLRSIGGSALTADIDVPVDTRDGGSDIPVTYVPARNTIMLSIALGWAEVLGSSDIWCGVNAVDYSGYPDCRPAFIEAFEILANVATKAGVEGAGIRIHTPLMRMSKADIAREGRRLGVDFSVTVSCYQADAEGRACGHCDACRLRAQGFREAGLPDPTRYA

SEQ ID NO: 41728 - protein, 228 aa, Rhodanobacter spathiphylli
  REGION 1..228: note = tr|I4VYN7|I4VYN7_9GAMM 7-cyano-7-deazaguanine synthase OS=Rhodanobacter spathiphylli B39 OX=1163407; GN = queC PE=3 SV=1
MSEHSPRKAVVLVSGGMDSAVVIAMAREQGYQVHALSVSYGQRHHSELAASDRVSSMLGAVEHKTVGIDLRSIGGSALTADIDVPLDAADASAIPVTYVPARNTIMLSIALGWAEVLGSSDIWCGVNAVDYSGYPDCRPAFIDAFEQLANLATKAGVEGAGIRVHAPLMRMSKADIAREGQRLGVDFSATVSCYQADDDGRACGHCDACRLRAQGFREAGLADPTRYA

SEQ ID NO: 41729 - protein, 228 aa, Rhodanobacter thiooxydans
  REGION 1..228: note = tr|A0A154QJ95|A0A154QJ95_9GAMM 7-cyano-7-deazaguanine synthase OS=Rhodanobacter thiooxydans OX=416169 GN=queC PE=3 SV=1
MSEPLPRKAVVLVSGGMDSAVTIAIAREQGYQVYALSVAYGQRHSSELAASDRVATMLGAVEHKTVGIDLRSIGGSALTADIDVPLDAADSSAIPVTYVPARNTIMLSIALGWAEVLGCSDIWCGVNAVDYSGYPDCRPAFVAAFEKLANVATRAGVEGAGIRIHAPLMRMSKADIAREGQRLGVDFSATVSCYQADQEGRACGHCDACRLRAQGFREAGLSDPTRYV

SEQ ID NO: 41730 - protein, 235 aa, unidentified
  source 1..235: note = Rhodanobacteraceae bacterium
  REGION 1..235: note = tr|A0A522QSF6|A0A522QSF6_9GAMM 7-cyano-7-deazaguanine synthase OS=Rhodanobacteraceae bacterium OX=2052182 GN=queC PE=3 SV=1
MTTGRSDTARAVVLVSGGMDSAVTLALARERGFTCHALSVDYGQRHASELAASACVAAMLGAVEHKTVSVDLRSIGGSALTADIAVPEHVDSHGEGDIPVTYVPARNTIMLAIALGWAETLGANDLFCGVNAVDYSGYPDCRPAFVEAFERLANLATRAGLEGHALRVHAPLIELSKVEIVREGARLGVDFAATVSCYRADAKGRACGHCDACVLRARGFAEAGVADPTHYVPGA

SEQ ID NO: 41731 - protein, 235 aa, unidentified
  source 1..235: note = Rhodanobacteraceae bacterium
  REGION 1..235: note = tr|A0A522RMB8|A0A522RMB8_9GAMM 7-cyano-7-deazaguanine synthase OS=Rhodanobacteraceae bacterium OX=2052182 GN=queC PE=3 SV=1
MTTGASGTPRAVVLVSGGMDSAVTLALARERGFACHALSVAYGQRHASELAASDRVTVMLGAVGHKTVAVDLRSIGGSALTADIAVPEHVDAHAENDIPVTYVPARNTIMLAIALGWAEALGANDIFCGVNAVDYSGYPDCRPAFIAAFERLANLATKAGVEGHDLRVHAPLIEMSKADIVREGMRLGVDFAQTVSCYRADAAGRACGHCDACVLRARGFADAGVADPTHYVPGA

SEQ ID NO: 41732 - protein, 207 aa, Rhodobacter sphaeroides
  REGION 1..207: note = tr|Q3IW30|Q3IW30_RHOS4 7-cyano-7-deazaguanine synthase OS=Rhodobacter sphaeroides (strain ATCC 17023 / 2.4.1 / NCIB 8253 / DSM 158) OX=272943 GN=exsB PE=3 SV=1
MSFALLMASGGLDSTTVAYWLTERGVQFIPVFFDYGQHCVETEWETLKEVLPASAAHPERNDISDLFRGSKSRLITEADLWNEEVKDEDLYVPYRTLLFYSAAAARAQTLGAFEVYTGFINSNRAKEIDCTAEFMNKLDALTDSVGPVRFLSPFRFWSKSEVAKESIRLGVPIGRTFSCQAASLMPCGACPNCVERLAALRETGLLA

SEQ ID NO: 41733 - protein, 230 aa, unidentified
  source 1..230: note = Rhodobacteraceae bacterium
  REGION 1..230: note = tr|A0A3N9QD31|A0A3N9QD31_9RHOB 7-cyano-7-deazaguanine synthase OS=Rhodobacteraceae bacterium CH30 OX=2490538 GN=queC PE=3 SV=1
MSHTPLEPDRALVVLSGGQDSTTCLYWALSRFAHVETVTFDYGQRHRVELECARTIAAMAGVRHTILPIDTFAAMGGNALTDVAIAPEDGVRSDGALPNTFVPGRNLIFLTFAAAHAWQRGIANVVTGVAQTDYSGYPDCRENTLKALELAINLGMDSRITLHAPLMFMSKAQTVHLAEEVGALDALAYSHTCYQGVVPPCGECASCLLRAKGFAEAGVADPLVVRVGGC

SEQ ID NO: 41734 - protein, 232 aa, unidentified
  source 1..232: note = Rhodobacteraceae bacterium
  REGION 1..232: note = tr|B9NVQ7|B9NVQ7_9RHOB 7-cyano-7-deazaguanine synthase OS=Rhodobacteraceae bacterium KLH11 OX=467661; GN = queC PE=3 SV=1
MKTTLVCSGGLDSVSLAHVLANQGDLSRLVSFDYGQRHTKELDFAAACATRLGVPHHVIDLRSVGATLTGSALTDDLDVPDGHYEEETMKVTVVPNRNAIMLTIAYGIAAANKDDAVATAVHGGDHFIYPDCRPDFTDAFDAMQRAALDGYAEVALHVPFVHRAKADIVTEGARVNTPFDQTWSCYKGGDLHCGRCGTCVERREAFDLAGVPDPTLYADPEFWRQAVERKQA

SEQ ID NO: 41735 - protein, 233 aa, unidentified
  source 1..233: note = Rhodobacterales bacterium
  REGION 1..233: note = tr|B6B6Q2|B6B6Q2_9RHOB 7-cyano-7-deazaguanine synthase OS=Rhodobacterales bacterium Y4I OX=439496; GN = queC PE=3 SV=1
MKTIVICSGGLDSVSLAHMVAEEHQLTRLVSFDYGQRHRKELDYAAAAAKRLGVPHDIIDMRGIGAALSGSALTDDIDVPDGHYAEETMKVTVVPNRNAIMLTIAYGIAAANGDDAVATAVHGGDHFIYPDCRPAFTEAFDAMQRAALDGYADVRLYTPFVHRTKGDIVTAGAKHNTPFAETWSCYKGGEKHCGRCGTCVERREAFHLAGVEDPTDYADPDFWKAAIAAKDCA

SEQ ID NO: 41736 - protein, 236 aa, unidentified
  source 1..236: note = Rhodobacterales bacterium
  REGION 1..236: note = tr|A0A2M7GNV1|A0A2M7GNV1_9RHOB 7-cyano-7-deazaguanine synthase OS=Rhodobacterales bacterium CG15_BIG_FIL_POST_REV_8_21_14_020_59_13; OX = 1974086 GN=queC PE=3 SV=1
MKSDRTSSTLVLLSGGQDSATALAWALENHARVETIGFAYGQRHEVELEARLRVRKALADLEPAWAEKLGPDQLVDLSGYGALAQSALTAEMEIEWQAGGLPSTFVPGRNLVFLAIASALAYRRGLDCLVGGMCETDYSGYPDCRRETIDAAEQMISLGLDRAMKIETPLMYLTKGEIWALAHELGGGRLVDIIVEDTHTCYLGDRSHRHDWGYGCGICPACELRARGWQDWQDRS

SEQ ID NO: 41737 - protein, 224 aa, unidentified
  source 1..224: note = Rhodobiaceae bacterium
  REGION 1..224: note = tr|A0A2D7FQP0|A0A2D7FQP0_9RHIZ 7-cyano-7-deazaguanine synthase OS=Rhodobiaceae bacterium; OX = 2026785 GN=queC PE=3 SV=1
MLFSGGQDSTACLAYALDKFDHVETLGFDYGQTHKIELACRAALRAEISKLNGWGAKLGDDHTLSLPALAEIGGTALIGDGEIKMMENNLPSTFVPGRNLLFLTYGAALAYRRGLGVLVGGMCETDYSGYPDCRRDTLDALETALNKGMESNISIDTPLMHIDKAATWELAQQLGGDALVALTIEHSHTCYRGDRDTRHAWGYGCNDCPACQLRAAGFEKWNSQ

SEQ ID NO: 41738 - protein, 239 aa, unidentified
  source 1..239: note = Rhodobiaceae bacterium
  REGION 1..239: note = tr|A0A2E1MUJ6|A0A2E1MUJ6_9RHIZ 7-cyano-7-deazaguanine synthase OS=Rhodobiaceae bacterium; OX = 2026785 GN=queC PE=3 SV=1
  VARIANT 46: note = Xaa can be any naturally occurring amino acid
  VARIANT 93: note = Xaa can be any naturally occurring amino acid
  VARIANT 124: note = Xaa can be any naturally occurring amino acid
  VARIANT 128: note = Xaa can be any naturally occurring amino acid
  VARIANT 142: note = Xaa can be any naturally occurring amino acid
  VARIANT 171: note = Xaa can be any naturally occurring amino acid
MLDKNKSIVLFSGGQDSSACLLWALSKFEEVQTIGFDYGQRHNIEXECRINLLKRIQLHSSNFLGKLSNDIVINLEEIKNISESSLLNSENIXMLENGLPNTFVPGRNLIFLNYASIIAYKNKXKNIXGGMCETDFSGYPDXRNETINSMEKSLNLGMDVEFKIQTPLMFXSKAEIWELIYKKGNKELIDIIIEESHTCYKGDRSKRYDWGYGCNSCPACELRSKGWNEFIINYPELKN

SEQ ID NO: 41739 - protein, 230 aa, Rhodoblastus acidophilus
  REGION 1..230: note = tr|A0A212S1X1|A0A212S1X1_RHOAC 7-cyano-7-deazaguanine synthase OS=Rhodoblastus acidophilus OX=1074 GN=queC PE=3 SV=1
MALVLFSGGQDSTTCLAWALERFDRVETLAFDYGQRHRIELAQRHEVRRAIREIKPHWAERLGQDHILDLRALGAISDTALTSDKEIELTEKNLPNTFVPGRNLIFLTFAAALAYRRGLSRIVGGMCETDFSGYPDCRDDSVKAMQVALNVGMESRFVLETPLMWIDKAQTWALAQALGGEALVDAIIDHSHTCYLGERGEKHPWGYGCGQCPACVLRAQGYEKWKSSAF

SEQ ID NO: 41740 - protein, 241 aa, Rhodoblastus acidophilus
  REGION 1..241: note = tr|A0A212SAW0|A0A212SAW0_RHOAC 7-cyano-7-deazaguanine synthase OS=Rhodoblastus acidophilus OX=1074 GN=queC PE=3 SV=1
MKQTGDSKGALVLFSGGQDSATCLAWALDRFEHVETIGFSYGQRHSVELQVRPRVLDLLGDAFPTWRDRIGEDHLVDLSVLGQISETALTRGVEIEMHSNGLPNTFVPGRNLLFLSFSAAVAFRRGIKYLVTGVCETDYSGYPDCRDDTVKAMQIALNLGMEKRYVIHTPLMRIDKAGTWALAKRLGGDALVKIVRDETHTCYNGDREHRHAWGFGCGTCPACELRAQGWNSFSASSPFQA

SEQ ID NO: 41741 - protein, 230 aa, Rhodoblastus sphagnicola
  REGION 1..230: note = tr|A0A2S6N919|A0A2S6N919_9RHIZ 7-cyano-7-deazaguanine synthase OS=Rhodoblastus sphagnicola OX=333368 GN=queC PE=3 SV=1
MALVLFSGGQDSTTCLAWALERFERVETIAFDYGQRHRIELEQRHVVRDALIAIKPLWAERLGPDHILDLRALGAISDTALTSDKEIELTEKNLPNTFVPGRNLIFLAFAAALAYRRGLTHIVAGMCETDFSGYPDCRDDAVKAMQVALNIGMESRFVLDTPLMWIDKARTWALAQTLGGDALVRTLIDDSHTCYLGERGEKHPWGHGCGHCPACVLRAQGYEKWKSGAF

SEQ ID NO: 41742 - protein, 223 aa, Rhodococcus qingshengii
  REGION 1..223: note = tr|A0A4R5ZVV1|A0A4R5ZVV1_9NOCA 7-cyano-7-deazaguanine synthase OS=Rhodococcus qingshengii; OX = 334542 GN=queC PE=3 SV=1
MLKDEKAIVVFSGGQDSTTCLFWALQQFKEVEAVTFDYNQRHSLEIECAKNIANELGVRHHLLDMSLLNQLAPNALTRSDIEVKDGEDGELPSTFVPGRNLLFLTFAGVLARQVGAKHLVTGVCETDFSGYPDCRDIFIKSLNVTLNLSMDDNFVIHTPLMWLNKAETWELADELNAFEYVRENTLTCYNGVISDGCGECPACVLRKRGLDDFLIGRTKNVRI

SEQ ID NO: 41743 - protein, 234 aa, Rhodococcus sp.
  REGION 1..234: note = tr|A0A2S7TVX9|A0A2S7TVX9_9NOCA 7-cyano-7-deazaguanine synthase OS=Rhodococcus sp. SAORIC-690 OX=1923970 GN=queC PE=3 SV=1
MNKKALVLFSGGQDSTVCLAWALSKFDHVETIGFDYGQRHRIELECRLTVLDRIREQFPEWAHKLGEDRVIDLSWLGQISDCALTEEREIELNETGLPNTFVPGRNLVFFLISSAVAYRRGLSTLVGGMCQTDFSGYPDCREDTLKALQVATNLGMASSFRFETPLMWIDKTETFQLGEQLGGKKLLEIIVRDTHTCYTGDRSHEHEWGFGCGECPACDLRKRGWKNYISQQNQ

SEQ ID NO: 41744 - protein, 229 aa, Rhodococcus wratislaviensis
  REGION 1..229: note = tr|X0PXX8|X0PXX8_9NOCA 7-cyano-7-deazaguanine synthase OS=Rhodococcus wratislaviensis NBRC 100605; OX = 1219028 GN=queC PE=3 SV=1
MGTPAVVLLSGGLDSTTVLAMAREQGFTPYALSFRYGQRHSVELEAASRVAETIGVARHVIADIDLRTFGGSALTADIDVPKHADVAEVTEDIPSTYVPARNTIFLSFALAFAETVAAQDIFIGVNALDYSGYPDCRPEFIQAFEDMANLATRAGVEGARLRIHTPLISMSKAEIVTTGLRLGVDYGITSSCYDPDGQGRPCGHCDSCLLRLKGFSEAGHSDPLTYQAV

SEQ ID NO: 41745 - protein, 365 aa, unidentified
  source 1..365: note = Rhodocyclaceae bacterium
  REGION 1..365: note = tr|A0A3S0GH72|A0A3S0GH72_9RHOO N-acetyl sugar amidotransferase OS=Rhodocyclaceae bacterium OX=1898103; GN = EKK46_05265 PE=4 SV=1
MNQTCTTCVMDTSAPDITFDASGRCHFCRDFATKLVAVPATGQNAESFIAAVKAAGRSKPYDCIVGLSGGIDSAYVLYTAVRQGLRPLAVHLDNGWNSELATHNIANLVRRLGVDLHTHVIDWEENRDMQLAFFKANVVDIELLMDNAMLALNYQQAARYGLRHILAGTNRATEGMRMPEGWNHLKFDATNIRAIQRRFGTMPIKTHPLISVKGFVFNEFVRRIKWTPFLDYFDYRKDEALKLLAAEVDYKPYPYKHYESVFTRFYQGYILPRKFGIDKRRLHLSTLVISGQMTRAAALVQLEQSPYPDPAQLRDDMAFVLKKLGFSEASFYAYLDAPRVEHATYGSEKWLWDGLLRVYRAVRGA

SEQ ID NO: 41746 - protein, 225 aa, unidentified
  source 1..225: note = Rhodocyclaceae bacterium
  REGION 1..225: note = tr|A0A524B8P7|A0A524B8P7_9RHOO 7-cyano-7-deazaguanine synthase OS=Rhodocyclaceae bacterium OX=1898103 GN=queC PE=3 SV=1
MMKPAVVLLSGGLDSATCLAIARSQGFDCYCLSFDYGQRHNAELKAAERVVKALGAKEHRVLNLGLAQFGGSALTDTSIAVPVDGVHPGIPVTYVPARNTIMLSLALAWAEVLGSDDIFVGVNAVDYSGYPDCRPEYIAAFEKMANLATKSGVEGHKLHIHAPLIALSKAEIIRTGAALGVDYGLTVSCYQANELGRACGVCDSCRLRAEGFAAAGVADPTSYRH

SEQ ID NO: 41747 - protein, 229 aa, unidentified
  source 1..229: note = Rhodocyclales bacterium
  REGION 1..229: note = tr|A0A363SL44|A0A363SL44_9RHOO 7-cyano-7-deazaguanine synthase OS=Rhodocyclales bacterium; OX = 2072421 GN=queC PE=3 SV=1
MTAKEKRAVVLLSGGLDSATTLAIARSAGYACHALSVAYGQRHAAELAAAANIAAALGAREHRIVDVDLGQFGGSALTDRNIDVPMHGVQPGIPATYVPARNTVMLSLALAWAEVLGAHDIFVGVNAVDYSGYPDCRPEYIAAFEAMANLATKAAVEGARLSIHAPLIALSKAEIIRRGSLLGVDYGLTVSCYQADASGAACGLCDSCRLRRAGFEAAGLPDPTRYLTA

SEQ ID NO: 41748 - protein, 230 aa, unidentified
  source 1..230: note = Rhodocyclales bacterium
  REGION 1..230: note = tr|A0A1G3H3W7|A0A1G3H3W7_9RHOO 7-cyano-7-deazaguanine synthase OS=Rhodocyclales bacterium GWA2_65_20 OX=1802017 GN=queC PE=3 SV=1
MKPAVVLLSGGLDSATALAIAAADGYACHCLSVDYGQRHVAELAAAARVAAAQGALSHRVVKIDMGQFGGSALTDTAIAVPTGGVQPGIPVTYVPARNTIMLSLALAWAEVLGAQDIFVGVNAVDYSGYPDCRPEYIRAFEAMANLATKAAVEGHPLRLHAPLIELTKADIVRRGTALGVDYGLTVSCYQADPDGRACGACDSCRLRRAGFDAAGIADPTRYASATSGQA

SEQ ID NO: 41749 - protein, 243 aa, unidentified
  source 1..243: note = Rhodoferax ferrireducens
  REGION 1..243: note = sp|Q220R7|QUEC_RHOFT 7-cyano-7-deazaguanine synthase; OS = Rhodoferax ferrireducens (strain ATCC BAA-621 / DSM 15236 / T118) OX=338969 GN=queC PE=3 SV=1
MHTTALVLFSGGQDSTTCLALALSKYQRVETIAFDYRQRHLVELDARLIVLNEIRARFPQWASKLGEDHLLDLAVLGEVSDTSLTRDTAFKMEQSGLPNTFVPGRNLLFLTLAAAVAYRRDLQVMVTGVCETDFSGYPDCRDDTIKAMQLALSLGMDKRFLIETPLMWIDKAATWALAYELGEKSGTPGGGQALVDLIIEHTHTCYLGDRQHRHAWGYGCGSCPACELRARGYERYCAARTAG

SEQ ID NO: 41750 - protein, 244 aa, unidentified
  source 1..244: note = Rhodoferax koreense
  REGION 1..244: note = tr|A0A1P8JYE0|A0A1P8JYE0_9BURK 7-cyano-7-deazaguanine synthase OS=Rhodoferax koreense; OX = 1842727 GN=queC PE=3 SV=1
MHTRALVLFSGGQDSTTCLALALSKYQFVETVAFDYGQRHVIELEARLRVLEQIRLQFPQWAGRLGEDHLLDLAVLGQVSETSLTRDMVFKMEESGLPNTFVPGRNLLFLTLAAALAYRRDLHVIVTGVCETDFSGYPDCRDDTMKAMQLALSLGMDKRFLIETPLMWIDKAQTWQLAHALGGAALVELIVEHTHTCYQGDRTHRHAWGYGCGECPACELRARGHANFVANDAVNSDLPTVDVK

SEQ ID NO: 41751 - protein, 245 aa, unidentified
  source 1..245: note = Rhodoferax saidenbachensis
  REGION 1..245: note = tr|A0A1P8K721|A0A1P8K721_9BURK 7-cyano-7-deazaguanine synthase OS=Rhodoferax saidenbachensis OX=1484693 GN=queC PE=3 SV=1
MHTTALVLFSGGQDSTTCLAHALSRYERVETIAFDYRQRHSVELDARLKVLAEIKRQFPQWGAKLGEDHLLDLAVLGEVSETSLTRDTAFELEASGLPNTFVPGRNLLFMTLAAAVAYRRGLQVIVTGVCETDYSGYPDCRDDTMKAMQLALSLGLDKRFLIETPLMWIDKAATWKLAQDLGDASGVAGGGQALVDLIVEHTHTCYLGDRSHRQAWGYGCGTCPACELRARGHAAYVAGCSSVSV

SEQ ID NO: 41752 - protein, 243 aa, Rhodoferax sp.
  REGION 1..243: note = tr|A0A5C7SVK3|A0A5C7SVK3_9BURK 7-cyano-7-deazaguanine synthase OS=Rhodoferax sp. OX=50421; GN = queC PE=3 SV=1
MHTTALVLFSGGQDSATCLAHALSRYERVETLGFDYGQRHHVELEIRLQALREFRSQFPGWGQKLGEDHVLDLAVLGKVSDTSLTRDIAYKMESSGLPNTFVPGRNLLFLTLAAALAYRRGLQVLVTGVCETDFSGYPDCRDDTMKALQIALNLGMEQRFLIETPLMWIDKAQTWQLAHDLGEAAQPGGGQALVELIQEHTHTCYQGDRVHRHPWGYGCGSCPACELRARGYAGFVDTVNKAP

SEQ ID NO: 41753 - protein, 239 aa, Rhodoferax sp.
  REGION 1..239: note = tr|A0A515ESU8|A0A515ESU8_9BURK 7-cyano-7-deazaguanine synthase OS=Rhodoferax sp. Gr-4; OX = 2527691 GN=queC PE=3 SV=1
MHTTALVLFSGGQDSTTCLAHALARYDRVETIAFDYRQRHSVELEARLQVLQEIRKQFPLWAPKLGEDHILDLAVLGAVSETSLTRDTAFKMEASGLPNTFVPGRNLLFLTLSAAVAYRRDLQVIVTGVCEADYSGYPDCRDDTMKAMQLALSLGMDKRYLIETPLMWIDKADTWRLAHQLGAASGVPDGGQKLVDLIVEHTHTCYLGDREHRHAWGYGCGTCPACELRARGYERFSTN

SEQ ID NO: 41754 - protein, 242 aa, unidentified
  source 1..242: note = Rhodomicrobium udaipurense
  REGION 1..242: note = tr|A0A037UVP2|A0A037UVP2_9RHIZ 7-cyano-7-deazaguanine synthase OS=Rhodomicrobium udaipurense JA643 OX=858455 GN=queC PE=3 SV=1
MTGTPESATKSLVLLSGGQDSAVCLAWALTNYAQVETLGFSYGQRHSVELECRPKLREAMAALSPEWAARLGPDHVLDLSILGAVSDTALTSDAEIAFGANGLPNTFVPGRNLLFFTLAAALGYRRGIRDLVGGMCQTDYSGYPDCRDETLQTLASAINLGTDEQFRIVTPLMWRTKAETWAMTHALGGNPLVDIVAEHSHTCYKGDRDHRHEWGYGCGTCPACDLRAKGYYAWRDMVASQQ

SEQ ID NO: 41755 - protein, 242 aa, Rhodomicrobium vannielii
  REGION 1..242: note = tr|E3I3N4|E3I3N4_RHOVT 7-cyano-7-deazaguanine synthase OS=Rhodomicrobium vannielii (strain ATCC 17100 / ATH 3.1.1 / DSM 162 / LMG 4299) OX=648757 GN=queC PE=3 SV=1
MTGTPESATKSLVLLSGGQDSAVCLAWALTNYAQVETLGFSYGQRHSVELECRPKLREALAALSPEWAARLGPDHVLDLSILGAVSDTALTSDAEIAFGANGLPNTFVPGRNLLFFTLAAALGYRRGIRDLVGGMCQTDYSGYPDCRDETLQTLASAINLGTDEQFRIVTPLMWRTKAETWAMTHALGGNPLVDIVAEHSHTCYKGVRDHRHEWGYGCGACPACDLRAKGYKAWRDMVASQQ

SEQ ID NO: 41756 - protein, 245 aa, Rhodopila globiformis
  REGION 1..245: note = tr|A0A2S6NLC0|A0A2S6NLC0_RHOGL 7-cyano-7-deazaguanine synthase OS=Rhodopila globiformis; OX = 1071 GN=queC PE=3 SV=1
MTSQHTETEDAALVLFSGGQDSATCLAWALARYPRVETVGFRYGQRHAVELDCRAPIREALACDRLGEDHVVDLAATIGGLGQTAMTADIAIAIGQGGLPNTFVPGRNLLFLTCAAAIAYRRGLRRIVAGMCETDYSGYPDCRDDTIKAMQLALNLGMERRFVLETPLMWRDKAATWALALGLGGQGLVDVILERTHTCYLGNRCDRHAWGYGCGTCPACQLRARGWERWVAASRPPADPLRDIS

SEQ ID NO: 41757 - protein, 245 aa, unidentified
  source 1..245: note = Rhodopirellula bahusiensis
  REGION 1..245: note = tr|A0A2G1W8V8|A0A2G1W8V8_9PLAN 7-cyano-7-deazaguanine synthase OS=Rhodopirellula bahusiensis OX=2014065 GN=queC PE=3 SV=1
MNSSSQRQAEFAQENAGRAVVLLSGGLDSATCVAIARDKGFEVHAISFRYGQRHDGELDRAAKQASLMSVASHRVIDIDLAQLGGSALVDSSIAVPKSDHVDKIAGDIPVTYVPARNTIFLSYALAVAETLGSRDIFIGVNALDYSGYPDCRPEFIDAFQTMARLATKAGVEDEHSLTIHTPLLHWTKAEIIQRGIELGVDYSQTLSCYDPQGSGDEMQPCGQCDACLLRAKGFAENEIADPAIG

SEQ ID NO: 41758 - protein, 250 aa, Rhodopirellula baltica
  REGION 1..250: note = sp|Q7UFU6|QUEC_RHOBA 7-cyano-7-deazaguanine synthase; OS = Rhodopirellula baltica (strain DSM 10527 / NCIMB 13988 / SH1) OX=243090 GN=queC PE=3 SV=1
MERRLVNSTSQSKTESAQQDAGKAVVLLSGGLDSATCVAIARDQGFEVHAISFRYGQRHDGELDRAAKQASLMGVVSHRVIDIDLAQLGGSALVDSSIAVPKSDHVDKIAGDIPVTYVPARNTIFLSYALAVAETLGSRDIFIGVNALDYSGYPDCRPEFIDAFQTMARLATKAGVEDEHSLTIHTPLLHWTKAEIIQRGIELGVDYSQTLSCYDPQGSSDEMRPCGQCDACLLRAKGFAENEIADPAIG

SEQ ID NO: 41759 - protein, 245 aa, Rhodopirellula baltica
  REGION 1..245: note = tr|K5CYB3|K5CYB3_RHOBT 7-cyano-7-deazaguanine synthase OS=Rhodopirellula baltica SH28 OX=993517 GN=queC; PE = 3 SV=1
MNSTSQSKTESAQQDAGKAVVLLSGGLDSATCVAIARDQGFEVHAISFRYGQRHDGELDRAAKQASLMGVVTHRVIDIDLAQLGGSALVDSSIAVPKSDHVDKIAGDIPVTYVPARNTIFLSYALAVAETLGSRDIFIGVNALDYSGYPDCRPEFIDSFQTMARLATKAGVEDEHSLTIHTPLLHWTKAEIIQRGIELGVDYSQTLSCYDPQGSNAEMRPCGQCDACLLRAKGFAENEIADPAIG

SEQ ID NO: 41760 - protein, 245 aa, unidentified
  source 1..245: note = Rhodopirellula europaea
  REGION 1..245: note = tr|M2B049|M2B049_9PLAN 7-cyano-7-deazaguanine synthase OS=Rhodopirellula europaea 6C OX=1263867 GN=queC; PE = 3 SV=1
MNSTSQPQSNSTSQDAGKAVVLLSGGLDSATCVAIARDKGFEVHAISFRYGQRHDGELDRAAKQASLMGVVSHRVIDIDLAQLGGSALVDSSIAVPKSDHVDKIAGDIPVTYVPARNTIFLSYALAVAETLGSRDIFIGVNALDYSGYPDCRPEFIDAFQTMARLATKAGVEDAHSLTIHTPLLHWTKAEIIQRGIELGVDYSQTLSCYDPQGSSDEMRPCGQCDACLLRAKGFAENEIADPAIG

SEQ ID NO: 41761 - protein, 245 aa, unidentified
  source 1..245: note = Rhodopirellula europaea
  REGION 1..245: note = tr|M5S814|M5S814_9PLAN 7-cyano-7-deazaguanine synthase OS=Rhodopirellula europaea SH398 OX=1263868; GN = queC PE=3 SV=1
MNSTSQPQSNSTSQDAGKAVVLLSGGLDSATCVAIARDKGFEVHAISFRYGQRHDGELNRAAKQASLMNVASHRVIDIDLAQLGGSALVDSSIAVPKSDHVDKIAGNIPVTYVPARNTIFLSYALAVAETLGSRDIFIGVNALDYSGYPDCRPEFIDAFQTMARLATKAGVEDEHSLTIHTPLLHWTKAEIILRGIELGVDYSQTLSCYDPQGSSNEMRPCGQCDACLLRAKGFAENEIADPAIG

SEQ ID NO: 41762 - protein, 245 aa, unidentified
  source 1..245: note = Rhodopirellula islandica
  REGION 1..245: note = tr|A0A0J1B524|A0A0J1B524_RHOIS 7-cyano-7-deazaguanine synthase OS=Rhodopirellula islandica OX=595434 GN=queC PE=3 SV=1
MNSISQPKDESAQANAGRAVVLLSGGLDSATCVAIARDQGFEVHAISFRYGQRHDGELDRAAKQASLMSVASHRVIDIDLAQLGGSALVDSSIAVPKSDHVDKIAGDIPVTYVPARNTIFLSYALAVAETLGSRDIFIGVNALDYSGYPDCRPEFIDAFQTMARLATKAGVEDEHSLTIHTPLLHWTKAEIIQRGIELGVDYSQTLSCYDPQGSGDEARPCGQCDACLLRAKGFSENEIADPAIG

SEQ ID NO: 41763 - protein, 231 aa, unidentified
  source 1..231: note = Rhodopirellula maiorica
  REGION 1..231: note = tr|M5S2D4|M5S2D4_9PLAN 7-cyano-7-deazaguanine synthase OS=Rhodopirellula maiorica SM1 OX=1265738 GN=queC; PE = 3 SV=1
MTIHPKRSAVVLLSGGLDSATCLAIANAEGFAAHAISFRYGQRHEYELERAEQLARSLGAASHRIVDINLAQFGGSALTDASIGVPKHEAVEEVGESIPVTYVPARNTVFLSLALAFAETIQSTDIYIGVNALDYSGYPDCRPAFITAFENMANLATKAGVEGSSPMRIHTPLLDLTKAQIIAKGISLGVDYSQTLSCYDPGEGGIPCGHCDACLLRNKGFAENEMSDPSL

SEQ ID NO: 41764 - protein, 236 aa, unidentified
  source 1..236: note = Rhodopirellula sallentina
  REGION 1..236: note = tr|M5U9S2|M5U9S2_9PLAN 7-cyano-7-deazaguanine synthase OS=Rhodopirellula sallentina SM41 OX=1263870; GN = queC PE=3 SV=1
MEGLNAVVLLSGGLDSATCLAIAKDHGFAVHAVSFRYGQRHNGELERAKWLAESMSAASHRVIDIDLAQLGGSALVDPNIAVPKADRVEDIGDEIPVTYVPARNTIFLSYALAVAETNNAADIFIGVNALDYSGYPDCRPEFIAAFEAMARLATKAGVGEGPELKIHTPLIDLTKGQIIAEGLRLGVDYSHTLSCYDPVGADDSQSDVHPCGHCDACLLRAKGFAENGIADPAIVG

SEQ ID NO: 41765 - protein, 229 aa, Rhodopirellula sp.
  REGION 1..229: note = tr|M5SVY8|M5SVY8_9PLAN 7-cyano-7-deazaguanine synthase OS=Rhodopirellula sp. SWK7 OX=595460 GN=queC PE=3; SV = 1
MLLSGGLDSATCLAIARERGFAVHAISFRYGQRHDGELERAKWLADSMGALSHRIIDIDLAQLGGSALIDPNIAVPKADRVEDIGDEIPVTYVPARNTIFLSYALAVAETSGATDIFIGVNSLDYSGYPDCRPEFIAAFQTMARLATKAGVGSGPELEIHTPLIDLTKGQIIAEGLRLGVDYSKTLSCYDPVESGDGEANVQPCGHCDACLLRAKGFAENGMADPAIHG

SEQ ID NO: 41766 - protein, 230 aa, Rhodopirellula sp.
  REGION 1..230: note = tr|A0A255R673|A0A255R673_9PLAN 7-cyano-7-deazaguanine synthase OS=Rhodopirellula sp. MGV; OX = 2023130 GN=queC PE=3 SV=1
MSEQRPAVVLLSGGLDSATCLAIAKQDGFDVHAISFRYGQRHEYELQRAQKLAEQFSIASHHIVDINLSQFGGSALTDASIVVPKSDSVDQIGSEIPVTYVPARNTVFLSLALAMAETIHALDIFIGVNALDYSGYPDCRPEYIDAFSKMANLATKAGVEGQALTIHTPLIDLTKAQIIAKGLALGVDYSMTLSCYDPGEGGKPCGNCDACLLRLKGFSENGLTDPSLIG

SEQ ID NO: 41767 - protein, 425 aa, Rhodoplanes elegans
  REGION 1..425: note = tr|A0A327KTZ2|A0A327KTZ2_9RHIZ Uncharacterized protein OS=Rhodoplanes elegans OX=29408 GN=CH338_01935; PE = 4 SV=1
MRLVCGPDMGAFSQADDALRVVLYGQAGSAERGSAGDAVKSEIQRRHLVPAARAWDLLSIALSVVTADFAGLRDHSPDGWTREFEIDIAVADPAFWTSQATALSEALGFLTTDRWMLRFQESGLLPAPPRNPVYPAEDCVALLSGGLDSLIGAIDLVAAGRKPFVVSQTVRGDADKQVDFASRIGGGLNHLQLNHNAHSPGIQESSQRARSLVFIAFGVAAATSLQRHHQGHSVPLYVCENGFIAINPPLTGGRLGSLSTRTAHPEYLTRLQHILDAADLRIRIENPYAAKTKGEMLRGCADQDLLKAEAVRSTSCGRFQRFNYHQCGRCVPCQVRRAAFMVWGGVPDTTGYVYEALGKNDDDHAGFDDVRSVAMALAAAAADGLDAWLGNSLGSPMISDRAALRAMVERGLAELACLHQACAVT

SEQ ID NO: 41768 - protein, 237 aa, Rhodoplanes elegans
  REGION 1..237: note = tr|A0A327KRW1|A0A327KRW1_9RHIZ 7-cyano-7-deazaguanine synthase OS=Rhodoplanes elegans; OX = 29408 GN=queC PE=3 SV=1
MSLQDETALVLFSGGQDSTVCLAWALSRFSRVETVGFAYGQRHAVELQVRPRIRMQMGALDPGWGARLGSDHLIPLDALGAVSETALTRDVAIEVAEDGLPTTFVPGRNLVFLTFAGALAYRRGARHLVAGMCETDYSGYPDCRDDTVKAMQLALNLGMQRRFVVHTPLMWIDKAQTFALAEELGGAPFVDLLLEETHTCYVGDRSVRHRWGYGCGTCPACRLRAEGFSQWMSARQC

SEQ ID NO: 41769 - protein, 237 aa, unidentified
  source 1..237: note = Rhodoplanes piscinae
  REGION 1..237: note = tr|A0A327K7M2|A0A327K7M2_9RHIZ 7-cyano-7-deazaguanine synthase OS=Rhodoplanes piscinae; OX = 444923 GN=queC PE=3 SV=1
MTETTDGAALVLFSGGQDSTVCLAWALARFPRVETVGFSYGQRHAVELDVRPVVRAKMAALDPAWAARLGDDHMVPLDGLGAIADTALTRETAIEIAADGLPTTFVPGRNLVFLAFAGALAYRRGARHLVAGMCETDYSGYPDCRDDTIKAMQVALNLGMARRFVLHTPLMWIDKAATFALAAEIGGDPLVELLLEDTHTCYLGDRSQRHPWGYGCGTCPACRLRADGYSRWMSASR

SEQ ID NO: 41770 - protein, 237 aa, unidentified
  source 1..237: note = Rhodoplanes piscinae
  REGION 1..237: note = tr|A0A3S4FGK1|A0A3S4FGK1_9RHIZ 7-cyano-7-deazaguanine synthase OS=Rhodoplanes piscinae; OX = 444923 GN=queC PE=3 SV=1
MTETTDGAALVLFSGGQDSTVCLAWALARFPRVETVGFSYGQRHAVELDVRPVVRAKMAALDPAWATRLGDDHMVPLDGLGAIADTALTRETAIEIAADGLPTTFVPGRNLVFLAFAGALASRRGARHLVAGMCETDYSGYPDCRDDTIKAMQVALNLGMARRFVLHTPLMWIDKAATFALAAEIGGDPLVELLLEDTHTCYLGDRSQRHPWGYGCGTCPACRLRADGYSRWMSASR

SEQ ID NO: 41771 - protein, 235 aa, Rhodoplanes roseus
  REGION 1..235: note = tr|A0A327KHR8|A0A327KHR8_9RHIZ 7-cyano-7-deazaguanine synthase OS=Rhodoplanes roseus; OX = 29409 GN=queC PE=3 SV=1
MTVADETALVLFSGGQDSTVCLAWALSRYSRVETIGFAYGQRHAVELSVRPAIRAKMAALDASWAERLGDDHVIPLEALGAVSETALTRDVAIEVAEDGLPTTFVPGRNLVFLTFAGALAYRRGARHLVAGMCETDYSGYPDCRDDTIKAMQLALNLGMQRRFVLHTPLMWIDKAQTFGLADELGGAPFVDLLLEETHTCYVGNRSDRHPWGYGCGTCPACRLRAEGFSKWMSNR

SEQ ID NO: 41772 - protein, 236 aa, Rhodoplanes sp.
  REGION 1..236: note = tr|A0A127EZ35|A0A127EZ35_9RHIZ 7-cyano-7-deazaguanine synthase OS=Rhodoplanes sp. Z2-YC6860 OX=674703 GN=queC PE=3 SV=1
MDMSPTTALVLFSGGQDSTVCLAWALERFARVETVGFDYGQRHAVELAVRPRIRERLAALNSDWAARLGDDHVVKLDALAAISDTALTRDMQIEMADSGLPNTFVPGRNIIFLTFAAALGYRRGANDLVAGMCETDYSGYPDCRNETMKAMQTVLRLGTERPFVVHTPLMWVDKAATFAMAKTIGGRPLLDLVLEETHSCYLGDRNHRHDWGFGCGTCPACRLRADGYARFIAETT

SEQ ID NO: 41773 - protein, 250 aa, Rhodopseudomonas faecalis
  REGION 1..250: note = tr|A0A318TW29|A0A318TW29_9BRAD 7-cyano-7-deazaguanine synthase OS=Rhodopseudomonas faecalis OX=99655 GN=queC PE=3 SV=1
MNNREHNETAGSGAEKALVLFSGGQDSATCLAWALQRFTHVETLGFDYGQRHLVELESRQHLIDGIKALQPGWAAKLGEARTLSVPTLASISDTALTRDVAITMGADGLPNTFVPGRNLIFLTFAAALAYRRGIGAIVGGMCETDYSGYPDCRDATIKALQTAINLGMDKNFALHTPLMWRDKAETWALAQELGGDGLVDLIREHSHTCYLGERGARHDWGYGCGECPACRLRARGWQEFAAKQQSSGGH

SEQ ID NO: 41774 - protein, 210 aa, Rhodopseudomonas palustris
  REGION 1..210: note = sp|Q2IUE0|QUEC2_RHOP2 7-cyano-7-deazaguanine synthase 2 OS=Rhodopseudomonas palustris (strain HaA2); OX = 316058 GN=queC2 PE=3 SV=2
MARKKVLVLHSGGMDSTTCLLQAKAEGHDVASLGIDYGQRLLVEMMFAEGQCEKYSIPRHVINVNWQKAERQIPLNRSVEEMAHSVSPAFLPGRNIVFLGLGHAHAAGIGADELQIGLNCVDFSGYPDCTTQFYDSYCTMLNIGNPGGPKLVAPLLKMSKPEIARLASTLGLQRNDTWSCYRPQIREGSIVACGECDACKLHEFAWQELK

SEQ ID NO: 41775 - protein, 238 aa, Rhodopseudomonas palustris
  REGION 1..238: note = sp|Q2IWJ9|QUEC1_RHOP2 7-cyano-7-deazaguanine synthase 1 OS=Rhodopseudomonas palustris (strain HaA2); OX = 316058 GN=queC1 PE=3 SV=1
MTEPVSDQTALVLFSGGQDSATCLAWALSRFARVEMIGFDYGQRHAVELDCRAKLLDGFRAISSEWASKLGDSHTLAIPTLSAISDTALTRDVEIAMGADGLPNTFVPGRNLIFLTFAAALAYRRGIADIVGGMCETDYSGYPDCRDDTIKALQGAISLGMARDFELHTPLMWRDKAATWQLAHDLGGAALVDLIREHSHTCYLGERGERHDWGYGCGECPACALRARGWREYRTRTG

SEQ ID NO: 41776 - protein, 237 aa, unidentified
  source 1..237: note = Rhodopseudomonas pentothenatexigens
  REGION 1..237: note = tr|A0A336JM06|A0A336JM06_9BRAD 7-cyano-7-deazaguanine synthase OS=Rhodopseudomonas pentothenatexigens OX=999699 GN=queC PE=3 SV=1
MTEHASDKTALVLFSGGQDSATCLAWALSRFSRVETIGFDYGQRHLIELECRARLLDGIGAINADWAAKLGDGHTLTIPTLAEISDTALTRDVAIAMGADGLPNTFVPGRNLIFLTFAAALAYRRGIADIVGGMCETDYSGYPDCRNDTIQALQTALTLGMARDITLHTPLMWRDKAATWKLAKDLGGDALVDLIREDSHTCYLGERGARHDWGYGCGECPACRLRARGWSEYAAGV

SEQ ID NO: 41777 - protein, 238 aa, unidentified
  source 1..238: note = Rhodopseudomonas pseudopalustris
  REGION 1..238: note = tr|A0A1H8T4L9|A0A1H8T4L9_9BRAD 7-cyano-7-deazaguanine synthase OS=Rhodopseudomonas pseudopalustris OX=1513892 GN=queC PE=3 SV=1
MTEASSDHTALVLFSGGQDSATCLAWALSRFARVEMIGFDYGQRHAVELDCRAKLLDGFRAISPEWAAKLGDSHTLAIPTLSAISDTALTRDVEIAMGADGLPNTFVPGRNLIFLTFAAALAYRRGIADIVGGMCETDYSGYPDCRDDTIRALQSAISLGMARDVKLHTPLMWRDKAATWQLAQDLGGSALVDLIVEHSHTCYLGERGARHDWGYGCGECPACALRAKGWREYSAKAR

SEQ ID NO: 41778 - protein, 238 aa, Rhodopseudomonas sp.
  REGION 1..238: note = tr|A0A0N1C3Q2|A0A0N1C3Q2_9BRAD 7-cyano-7-deazaguanine synthase OS=Rhodopseudomonas sp. AAP120 OX=1523430 GN=queC PE=3 SV=1
MTEHRSDQTALVLFSGGQDSATCLAWALTRFARVETIGFAYGQRHAVELDCRDRLLDGFRAINSEWAARIGDSHTLDIPTLSAISDTALTRDVEIAMGADGLPNTFVPGRNLIFLTFAAALAYRRGIADVVGGMCETDYSGYPDCRDDTIKALQNAVSLGMARDVTLHTPLMWLDKAATWQLAHDLGGTALVDLIREQSHTCYLGERGARHDWGYGCGECPACALRAKGWREYQARAG

SEQ ID NO: 41779 - protein, 240 aa, unidentified; identical to SEQ ID NO: 39438
  source 1..240: note = Rhodospirillaceae bacterium
  REGION 1..240: note = tr|A0A1Z8LLL9|A0A1Z8LLL9_9PROT 7-cyano-7-deazaguanine synthase OS=Rhodospirillaceae bacterium TMED8 OX=1986645 GN=queC PE=3 SV=1

SEQ ID NO: 41780 - protein, 242 aa, unidentified; identical to SEQ ID NO: 39437
  source 1..242: note = Rhodospirillaceae bacterium
  REGION 1..242: note = tr|A0A357V1D0|A0A357V1D0_9PROT 7-cyano-7-deazaguanine synthase OS=Rhodospirillaceae bacterium OX=1898112 GN=queC PE=3 SV=1

SEQ ID NO: 41781 - protein, 230 aa, unidentified
  source 1..230: note = Rhodospirillales bacterium
  REGION 1..230: note = tr|A0A1G3I8G0|A0A1G3I8G0_9PROT 7-cyano-7-deazaguanine synthase OS=Rhodospirillales bacterium RIFCSPLOWO2_12_FULL_58_28 OX=1802022 GN=queC; PE = 3 SV=1
MREKTKAVVLLSGGLDSATVLAIAMNMGFEAHALTFRYGQRHSLEIEAARAVAAAAGAAEHKIVDIGPEAFHGSALTDGVEAPKGRSDEEMKSGVPVTYVPARNVIFLSYALGWAEVMAADDIFIGVNALDYSGYPDCRPEFIAAFQAMADLATKAAVEGGRKTTIHAPLINLTKGQIIIRGLELGVDYGLTLSCYDPGPRAVPCGECDACRLRRKGFAEAGLADPADTP

SEQ ID NO: 41782 - protein, 425 aa, unidentified
  source 1..425: note = Rhodospirillales bacterium
  REGION 1..425: note = tr|A0A1Q3URK8|A0A1Q3URK8_9PROT Uncharacterized protein OS=Rhodospirillales bacterium 69-11 OX=1895825; GN = BGO51_16865 PE=4 SV=1
MKLVCGPGTSASIETGDALHVVLYGQAGSPDRGSAGDAVKSEIQRRHLVPAARAWDLLSIALSVVTADFAGLRDHSPDGWTREFEIDVAVADPTFWTGQARALSEALGFLTTDLWTFRFQEGGLLPAPPRNPVYPAEDCVALLSGGLDSLIGAIDLVAAGRKPFVVSQTVRGDADKQVDFASRIGGGLNHLQLNHNAHSPGIQESSQRARSLVFIAFGVAAATSLQRHHQGHSVPLYVCENGFIAINPPLTGGRLGSLSTRTAHPEYLTRLQHILDAADLRIRIENPYIAKTKGEMLRGCADQDLLKAEAVRSTSCGRFQRFNYHQCGRCVPCQVRRAAFMVWGGVPDTTGYVYEALGKNDDDHAGFDDVRSVAMALAAVAADGFEVWLGNSLGSPMISDRAALRAMVERGLAELTRLHQAYGVT

SEQ ID NO: 41783 - protein, 241 aa, Rhodospirillum rubrum
  REGION 1..241: note = sp|Q2RSY8|QUEC_RHORT 7-cyano-7-deazaguanine synthase; OS = Rhodospirillum rubrum (strain ATCC 11170 / ATH 1.1.1 / DSM 467 / LMG 4362 / NCIB 8255 / S1) OX=269796 GN=queCPE=3; SV = 1
MPHSPTQRRAIVLVSGGLDSTTTLAIAQAEGFTVNALSFSYGQRHAVELEAARRVTQAFAVERHVIATIDLRQFGGSALTDSIGVPKQRSLETMGAGIPVTYVPARNTVFLSFALAWAEVLEANDVFIGVNALDYSGYPDCRPEYISAFQTMANLATKRGVEGTGVLTIHTPLIALTKGQIIRRGLDLGVDYALTHSCYDPSAEGEACGTCDSCLLRLKGFAENGLEDPVRYVGARSRAAG

SEQ ID NO: 41784 - protein, 600 aa, Rhodothalassium salexigens
  REGION 1..600: note = tr|A0A4R2P847|A0A4R2P847_RHOSA 7-cyano-7-deazaguanine synthase OS=Rhodothalassium salexigens DSM 2132 OX=1188247 GN=EV659_11457 PE=3 SV=1
MDVQGVAKNVNLRIDYISRTMLGNVPELLIDLLEVAAYVYCADQRLVRGSEKLRNFGESWRRSLRFSIPVRHLEVWQDPGVQEVLADTLGFLSDDSYEFDFRIAEAPVQPRELYFPDLLDASAEHDEVALFSGGVDSFAGAVNDIVTLGKSVTLVGHYSSTKVRAVQENLIQGLRQRGLDRRVSYIPVWVSNENERAREFTQRTRSFLFACLGLVVARMSGKDRFSFYENGVVSINPPLAGDVVGGRATRTTHPKVLRGLEALFSLLLGRQIEIQTPLQWLTKKEVTQKIKEAGVADMLGETVSCTRPRKWTEKQKHCGVCSQCIDRRFAVLAAGMGGHEPAENYMRDLLLADRSADDDLRMALSYVSFFQRVAATPKERFLVDFPEVVSALDRFSGLSTQDAGDHVYDLFQRHAKSVEEVITTAVSEHIGPLYRRELPSGSLLATCFSRGHIEAPPPSHYDVQAKAFMDRLVAPVLEFAFDQDDKRVLFQGSHYLEGANFRVVEALIENFREAKRQREDVPFLPATDLADRLGLSDQSMRQQLGRLRKAIEPLTVTLGIPLDQDSFVQTKERAGYRLNPEWREVSVGDIRVDTAVTSQA

SEQ ID NO: 41785 - protein, 278 aa, Rhodothalassium salexigens
  REGION 1..278: note = tr|A0A4V2SQA4|A0A4V2SQA4_RHOSA 7-cyano-7-deazaguanine synthase OS=Rhodothalassium salexigens DSM 2132 OX=1188247 GN=queC PE=3 SV=1
MASNRPRTDILRGGIVASSESDAAAGAETAGAEDPDARMPDETPRRPGDRAVVLLSGGLDSATVAAAAKAAGYRVIALSFRYGQRHAVELEAAARVAAHVGVDEHQVLDMDLRAFGGSALTADIDVPKDRDADAIAADDQVPITYVPARNTIFLSYAMGLAEVRGADDLFIGVNAVDYSGYPDCRPGFIGAFEAMANLATRAGVAGDRPLRLHTPLIGLSKAAIVAWGTELGVDYGQTISCYDPDAQGRACGACDSCHLRRQGFVDAGLADPTVYQTD

SEQ ID NO: 41786 - protein, 242 aa, unidentified
  source 1..242: note = Rhodothermaceae bacterium
  REGION 1..242: note = tr|A0A2E3R218|A0A2E3R218_9BACT 7-cyano-7-deazaguanine synthase OS=Rhodothermaceae bacterium OX=2026787 GN=queC PE=3 SV=1
MPDSPNALVLFSGGQDSTTSLFWALAPDGGAFDHVEAVAFRYGQRHAVEIEQARAIAEAAGVPLTVLDLTGLLSGSALLADEAADTNDAHALAPDLPASFVPGRNALFLTAAASLGFTRGIADLVGGMCQTDYSGYPDCRLDFVESQAQTLSLALDTDLRIHTPLMHLTKAETWKLAADLGTVRGLDVLETVREMSHTDYHGDRTQRHAWGYGRLDNPASVLRAKGHAEAVAKGWVPDVDLP

SEQ ID NO: 41787 - protein, 221 aa, unidentified
  source 1..221: note = Rhodothermaeota bacterium
  REGION 1..221: note = tr|A0A2A5WZA9|A0A2A5WZA9_9BACT 7-cyano-7-deazaguanine synthase OS=Rhodothermaeota bacterium MED-G19 OX=1986240 GN=queC PE=3 SV=1
MSRALILLSGGQDSTTCLYWAKQKFDSIEAVGFNYGQRHLIELDFAKKTCDKENVFLDIISLKKILSNSALTNNKEDFNKNHPSNPNLPNSFVPGRNLLFLSIATSIAYNKGIGNIVIGVCETDFSGYPDCREDFIKSMEKSIYLATEKSIEIHTPLMKLDKAQTWKLAKELGCLDTIIKSTMTDYNGSKNENEWGLGNLDNPASILRHKGYLKAKKNKWI

SEQ ID NO: 41788 - protein, 221 aa, unidentified
  source 1..221: note = Rhodothermaeota bacterium
  REGION 1..221: note = tr|A0A2A5XPW1|A0A2A5XPW1_9BACT 7-cyano-7-deazaguanine synthase OS=Rhodothermaeota bacterium MED-G16 OX=1986238 GN=queC PE=3 SV=1
MNKALILLSGGQDSTTCFYWAKKKFNSIQAIGFNYGQRHVIELDFAKKICDKENISYDIISLKEILSNSALINPQEDLNKSHPSNQNLPNSFVPGRNLLFLSIASSIAYNREIENIVIGVCETDFSGYPDCRNEFIKSMKKTIHLATEKSIEIHTPLMNLDKAQTWKLAKDLGCINTIIKSTMTDYNGSQNKNDWGLGNLDNPASILRHKGYIKAKKNKWI

SEQ ID NO: 41789 - protein, 238 aa, Rhodothermus marinus
  REGION 1..238: note = tr|G2SH21|G2SH21_RHOMG 7-cyano-7-deazaguanine synthase OS=Rhodothermus marinus (strain SG0.5JP17-172); OX = 762570 GN=queC PE=3 SV=1
MSAPNLLPTLKPAEHGETALVLLSGGQDSTTCLYWALHYFPKVEAIGFHYGQKHAVELEQARKIAEQAGVPFTVLDLRGLLRGSALTEHDQDVSAAHPLAPHLPASFVPGRNALFLTLAASYGFTRGIHDLVGGMCQTDYSGYPDCRRAFIDAMERALSLALDTTIRIHTPLMYLTKAETWRLARELGILDVIVELTHTDYNGDRSERHAWGYGRLDNPASILRARGYEEAKARGWLD

SEQ ID NO: 41790 - protein, 238 aa, Rhodothermus marinus
  REGION 1..238: note = tr|D0MDN1|D0MDN1_RHOM4 7-cyano-7-deazaguanine synthase OS=Rhodothermus marinus (strain ATCC 43812 / DSM 4252 / R-10) OX=518766 GN=queC PE=3 SV=1
MSALNLLPTLKPAEHGETALVLLSGGQDSTTCLYWALHYFPKVEALGFHYGQKHAVELEQARKIADRAGVPFTVLDLRGLLRGSALTEHEQDVSAAHPLAPHLPAAFVPGRNALFLTLAASYGFTRGIHDLVGGMCQTDYSGYPDCRREFIDAMERALSLALDTPIRIHTPLMHLTKAETWRLARELGILDVIVELTHTDYNGDRSERHPWGYGRLDNPASILRARGYEEAKARGWLD

SEQ ID NO: 41791 - protein, 238 aa, Rhodothermus profundi
  REGION 1..238: note = tr|A0A1M6VW99|A0A1M6VW99_9BACT 7-cyano-7-deazaguanine synthase OS=Rhodothermus profundi; OX = 633813 GN=queC PE=3 SV=1
MSVPNLLPTLKPTEQGDTALVLLSGGQDSTTCLYWALHYFSRVEAIGFHYGQRHAIELQQAQKIAEQAGVPFTVLDLRGLLRGSALTEHDQDVSAAHPLAPHLPASFVPGRNALFLTLAASYGFTRGIHDLVGGMCQTDYSGYPDCRRAFIDAMEKALSLALDTTLRIHTPLMHLTKAETWRLARELGILDVIIELTHTDYHGNRSERHEWGYGRLDNPASILRARGYEEAKARGWLD

SEQ ID NO: 41792 - protein, 229 aa, Rhodovarius sp.
  REGION 1..229: note = tr|A0A437MM41|A0A437MM41_9PROT 7-cyano-7-deazaguanine synthase OS=Rhodovarius sp. CCP-6; OX = 1979269 GN=queC PE=3 SV=1
MRDDGALVLLSGGQDSATCLAWALDRFSHVETLGFDYGQRHKVELECRDALRAGMAGPRLGPDHTLSIPTFAEIGGTALTEQVEIAMREDGLPNTFVPGRNIVFLTFAAALATRRGLKHVVAGMCETDYSGYPDCRDDTIKSLQATLNLGMATRLVLHTPLMWRDKKETWDLAEALGGAPLVELIRRESHSCYKGERATLHPWGFGCGTCPACHLRARGWEAYAEAHAN

SEQ ID NO: 41793 - protein, 235 aa, Rhodovulum sp.
  REGION 1..235: note = tr|J6IXY2|J6IXY2_9RHOB 7-cyano-7-deazaguanine synthase OS=Rhodovulum sp. PH10 OX=1187851 GN=queC PE=3; SV = 1
MISSDTALVLFSGGQDSTVCLAWALSRFSRVETVGFDYGQRHAVELSVRPAIREKMAALDPAWAARLGDDHMVPLEGLSAISDTALTRDVAIEVAEGGLPTTFVPGRNLIFLAFAGALAYRRGARHLVAGMCETDYSGYPDCRDDTLKAMQVALNLGMERRFVLHTPLMWIDKAETFALAEGLGGTPLVGLLLEETHTCYLGDRSVRHPWGYGCGTCPACRLRADGYERWMSGKR

SEQ ID NO: 41794 - protein, 455 aa, Rhodovulum sp.
  REGION 1..455: note = tr|A0A366BZA3|A0A366BZA3_9RHOB Uncharacterized protein OS=Rhodovulum sp. BSW8 OX=2259645 GN=DSD19_11275; PE = 4 SV=1
MRRFSLIGRLGPDDKGKINLVQSDSDVFEIDFLDGDLRMGFGIGHALDQLAFLGLQPSEKGIDLVVLAALVNAGDTRVSRKLNAQDGWTREIDLYVPVSAVAAWTESTGSIESMLRFLSGDRWRVFFHDRTKRTRTLAVAPKRLAIDGLTKVSLLSGGLDSLIGAVDLLSGSERPLFVSHYWDSETAKAQAYILDRLENRFGKEAFKSLRVRLGFDKHHLTTGETENTQRGRSFLFYSLATLAASAIDGRTTVDIPENGLIALNVPLDPLRFGALSTRTAHPHFIASMQRLIDALTLDVELNNPYRHMTKGEMVANCADKSFLEKIVANSMSCSSPAKARYKKLSPRHCGYCVPCLIRRASLEVGLDGDDETLYMVEDLKGHILASDQPEGEHVRSFQLMAKRIRAKPDLAKILVHKPGPLHDKPDEIPDYADVFRRGVLEVAELLKGVRARPGG

SEQ ID NO: 41795 - protein, 426 aa, Rhodovulum visakhapatnamense
  REGION 1..426: note = tr|A0A4R8F7E7|A0A4R8F7E7_9RHOB Queuosine biosynthesis protein QueC OS=Rhodovulum visakhapatnamense; OX = 364297 GN=EV657_1456 PE=4 SV=1
MTSVACLPQDLPDIPDTDIRFDIYTNSRTPGRGRVGDLVPGRLRRLGLFPSGAAWDFMSFAMAVVAADEAVSRVRSPDGWTRKIDLTVAVSDPAFWNSESERLTQALRFLSGDMWSVQFIAGGGMPFPRGPRRPRPEDMICLLSGGMDSLIGAIDAVSEGRQPLLVSQMAKGDTQDQRTFASSVAPRSLHLQLNHHARPPCASERSQRARSIAFLGFGVMAATCLQSHADGEIVELRMPENGFISQNVPLTPLRTGSLSTRTTHPYFLRLIQETLEAADLRVHIRNPYEFQTKGEMLKGCQDPALLAALVDTSTSCGRYSRTGFQHCGRCVPCQVRRAAYVAWGVPDRTVKGYKYEHLGQKDARHAGFDDVRSVAIAIETVSLQGISALIGGSMNVQLLGDPTPYRRVVKNGIAELAALHSKLGVT

SEQ ID NO: 41796 - protein, 162 aa, unidentified
  source 1..162: note = Richelia intracellularis
  REGION 1..162: note = tr|M1WNY2|M1WNY2_9NOST 7-cyano-7-deazaguanine synthase OS=Richelia intracellularis HM01 OX=1165095; GN = RINTHM_8560 PE=3 SV=1
MRLWGGSALTDNSIDVPKERPLDTIAQNIPVTYVPARNTIFLSFALGYAESIHAERIYIGVNALDYSGYPDCRPDYIQAMQKVFRLGTKQGLEGNPIRICTPLINLRKTEIIQLGNKLSVPWELTWSCYSGGNLACGVCDSCRLRRYAFTELGLVDPITYAQ

SEQ ID NO: 41797 - protein, 227 aa, unidentified
  source 1..227: note = Richelia intracellularis
  REGION 1..227: note = tr|M1WZ52|M1WZ52_9NOST 7-cyano-7-deazaguanine synthase OS=Richelia intracellularis HH01 OX=1165094; GN = queC PE=3 SV=1
MLMKAVILLSGGVDSTTLIYQALADGCQPYAISFDYGQRHRRELQSALAVANAAGVFEHQIVRFDLRLWGGSALTDNSIDVPKERPFDTIAQNIPVTYVPARNTIFLSFALGYAESIYAERIYIGVNALDYSGYPDCRPDYIQAMQKVFRLGTKQGVEGNPIHIYTPLINLRKTEIIQLGNKLSVPWELTWSCYNGGNLACGVCDSCRLRRSAFTELGLVDPITYAQ

SEQ ID NO: 41798 - protein, 35 aa, unidentified
  source 1..35: note = Richelia sp.
  REGION 1..35: note = tr|A0A3B9F5D1|A0A3B9F5D1_9NOST 7-cyano-7-deazaguanine synthase (Fragment) OS=Richelia sp.; OX = 2053605 GN=DCG18_01255 PE=4 SV=1
CYNGGNLACGVCDSCRLRRSAFTELGLVDPITYAQ

SEQ ID NO: 41799 - protein, 228 aa, Rickettsia africae
  REGION 1..228: note = sp|C3PLH1|QUEC_RICAE 7-cyano-7-deazaguanine synthase; OS = Rickettsia africae (strain ESF-5) OX=347255 GN=queC; PE = 3 SV=1
MKKKAVILLSGGPDSTTVLEIVSKTDYEIYALSFNYHRRNSLEVQKIQGLIKDYNVKQHRVINIDLQSFIGSALTDDNIDVPKFKNTDQLPSDIPVTYVPARNTIFLSYALGVAEVIGARDIFIGVHTNDYTNYPDCRPEYIKSFEAMANLATRVGVNGEKITIHAPLINMTKEQIIKKGLELGVDYSKTISCYDPTEDGLSCGQCLSCIARLDAFKRNNVQDPIKYV

SEQ ID NO: 41800 - protein, 227 aa, Rickettsia akari
  REGION 1..227: note = sp|A8GPK3|QUEC_RICAH 7-cyano-7-deazaguanine synthase; OS = Rickettsia akari (strain Hartford) OX=293614 GN=queC; PE = 3 SV=1
MKKAVMLVSGGADSATVLAMAREIGYEIHSMSFNYGQRNNAELRKVKELIKEYNVKQHKIVDIDLRAFGGSALTDDNIDVPHYHDVNAVPEDVPVTYVPSRNTIFLSYALGYAEVIGAKDIFIGVHTSDSANYPDCRPEYIKSFEKMANLATSIGIQGQKITIHTPLIDMTKEQIIRTGLKLGVDYKNTISCYEPTEDDSSCGNCLACMIRLDAFKKNNIQDPIKYV

SEQ ID NO: 41801 - protein, 228 aa, unidentified
  source 1..228: note = Rickettsia amblyommatis
  REGION 1..228: note = tr|A0A0F3N501|A0A0F3N501_RICAM 7-cyano-7-deazaguanine synthase OS=Rickettsia amblyommatis str. Ac/Pa OX=1359164 GN=queC PE=3 SV=1
MKKKTVILLSGGPDSTTVLEIVSKMDYEIYALSFNYHRRNSPEVQKIQGLIKDYNVKQHRVINIDLQSFIGSALTDDNIDVPKFKNTDQLPSDIPVTYVPARNTIFLSYALGVAEVIGARDIFIGVHTNDYTNYPDCRPEYIKSFEAMANLATRVGVNGEKITIHAPLINMTKEQIIKKGLELGVDYSKTISCYDPTEDGLSCGQCLSCIARLDAFKKNNVQDPIKYV

SEQ ID NO: 41802 - protein, 228 aa, unidentified; identical to SEQ ID NO: 41801
  source 1..228: note = Rickettsia amblyommatis
  REGION 1..228: note = tr|A0A0F3QGZ1|A0A0F3QGZ1_RICAM 7-cyano-7-deazaguanine synthase OS=Rickettsia amblyommatis str. Darkwater OX=1359166 GN=queC PE=3 SV=1

SEQ ID NO: 41803 - protein, 228 aa, unidentified
  source 1..228: note = Rickettsia argasii
  REGION 1..228: note = tr|A0A0F3RG06|A0A0F3RG06_9RICK 7-cyano-7-deazaguanine synthase OS=Rickettsia argasii T170-B OX=1268837 GN=queC PE=3 SV=1
MKKKSVILLSGGPDSTTVLEIVSKMDYEIYALSFNYHRRNSPEVQKIQGLIKDYNVKQHRVINIDLQSFIGSALTDDNIDVPKFKNTDQLPSDIPVTYVPARNTIFLSYALGVAEVVGARDIFIGVHTNDYTNYPDCRPEYIKSFEAMANLATRVGVNGEKITIHAPLINMTKEQIIQKGLELGVDYSKTISCYDPTEEGLSCGQCLSCIARLDAFKKNNVQDPIKYV

SEQ ID NO: 41804 - protein, 227 aa, unidentified
  source 1..227: note = Rickettsia asembonensis
  REGION 1..227: note = tr|A0A0C2QWL2|A0A0C2QWL2_9RICK 7-cyano-7-deazaguanine synthase OS=Rickettsia asembonensis; OX = 1068590 GN=queC PE=3 SV=1
MKKAVILVSGGADSTTVLAIAREMGYEIHAMSFNYGQRNNAELRKVKELIKEYNVKQHKIVGIDLRAFGGSALTDNNIDVPHYHDVNELPEDVPVTYVPARNTIFLSYALGYAEVIGAKDIFIGVHTSDSANYPDCRPEYIKSFKKMANLATNMGIQGKKITIHTPLIDMTKEQIIRTGLELGVDYKNTISCYEPTEDDSSCGNCLACMIRLDAFKKNNIQDPIKYV

SEQ ID NO: 41805 - protein, 229 aa, Rickettsia asiatica
  REGION 1..229: note = tr|A0A510G8B8|A0A510G8B8_9RICK 7-cyano-7-deazaguanine synthase OS=Rickettsia asiatica; OX = 238800 GN=queC PE=3 SV=1
MKKSVNLVSGGADSATVLAIAREMGYEIHAMSFNYGQRNNAELRKVKELIKEYNVKEHKIVDIDLRVFGGSALTDDNIDVPHYHGVNELPEDVPVTYVPARNTMFLSYALGFAEVIGAKDIFIGVHTSDSANYPDCRPEYIKSFEEMANLATSMGIQGKKITIHTPLIDMTKEQIIRTGLKLGVDYKNTISCYEPTEDDLSCGNCLACMIRLDAFKKNNIQDPIKYVNT

SEQ ID NO: 41806 - protein, 227 aa, Rickettsia australis
  REGION 1..227: note = tr|H8K6H3|H8K6H3_RICAC 7-cyano-7-deazaguanine synthase OS=Rickettsia australis (strain Cutlack); OX = 1105110 GN=queC PE=3 SV=1
MKKAVILVSGGADSATVLAIAREMGYEIHAISFNYGQRNNAELRKVKELIKEYNVKQHKIVDIDLRAFSGSALTDNNIDVPHYHDVKELPEDVPVTYVPARNTIFLSYALGYAEVIGEKDIFIGVHTSDSANYPDCCPEYIKSFEKMANLATSMGIQGKKITIHTPLIDMTKEQIIRTGLKLGVDYKNTISCYEPTEDASSCGNCLACRIRLDAFKKNNIQDPIKYV

SEQ ID NO: 41807 - protein, 225 aa, Rickettsia bellii
  REGION 1..225: note = tr|A0A0F3Q9V6|A0A0F3Q9V6_RICBE 7-cyano-7-deazaguanine synthase OS=Rickettsia bellii str. RML An4 OX=1359193 GN=queC PE=3 SV=1
MKKAVILVSGGADSATVLAIMREQGYEIHAISFNYGQRNNAELRKVTELVKEYNVKQHKIVNIDLRAFGGSALTDDDIKVPHYHDTKELPEDVPVTYVPARNTIFLSYALGFAEIIGAKDIFIGVHTSDSANYPDCRPEYIKSFEAMANLATNIGGVTIHTPLINMTKDQIIKTGLRLGVDYKNTISCYDPSEDDLSCGTCLACTIRLDAFKKNNVQDPINYILF

SEQ ID NO: 41808 - protein, 225 aa, Rickettsia bellii; identical to SEQ ID NO: 41807
  REGION 1..225: note = sp|A8GVR7|QUEC_RICB8 7-cyano-7-deazaguanine synthase; OS = Rickettsia bellii (strain OSU 85-389) OX=391896 GN=queC; PE = 3 SV=1

SEQ ID NO: 41809 - protein, 227 aa, Rickettsia canadensis
  REGION 1..227: note = sp|A8EZR4|QUEC_RICCK 7-cyano-7-deazaguanine synthase; OS = Rickettsia canadensis (strain McKiel) OX=293613 GN=queC; PE = 3 SV=1
MKKLVNLVSGGADSATVLAIAQKMGYEIYAMSFNYGQRNNAELRKVRELVKEYNVKQHKIVNIDLRAFSGSALTDNNISVPHYHDVNELPDDVPVTYVPARNTIFLSYALGFAEVIGAKDIFIGVHTSDSANYPDCRPEYIKSFEEMANLATNMGVQGKKITIHTPLIDMTKEQIIRTGLELGVDYKNTISCYEPTEDDLSCGTCLACMIRLDAFKKNDIQDPIKYV

SEQ ID NO: 41810 - protein, 228 aa, Rickettsia conorii
  REGION 1..228: note = sp|Q92GQ2|QUEC_RICCN 7-cyano-7-deazaguanine synthase; OS = Rickettsia conorii (strain ATCC VR-613 / Malish 7); OX = 272944 GN=queC PE=3 SV=1
MKKKAVILLSGGPDSTTVLEIVSKTDYEIYALSFNYHRRNSLEVQKIQGLIKDYNVKQHRVINIDLQSFIGSALTDDNIDVPKFQNTDQLPSDIPVTYVPARNTIFLSYALGVAEVIGARDIFIGVHTNDYTNYPDCRPEYIKSFEAMANLATRVGVNGEKITIHAPLINMTKEQIIKKGLELGVDYSKTISCYDPTEDGLSCGQCLSCIARLDAFKKNNVQDPIKYV

SEQ ID NO: 41811 - protein, 232 aa, unidentified
  source 1..232: note = Rickettsia endosymbiont
  REGION 1..232: note = tr|A0A0F3RAA8|A0A0F3RAA8_9RICK 7-cyano-7-deazaguanine synthase OS=Rickettsia endosymbiont of Ixodes pacificus OX=1133329 GN=queC PE=3 SV=1
MKEAKKSVNLVSGGADSATVLAIAREMGYEIHAMSFNYGQRNNAELRKVKEFIKEYNVKQHKIVDIDLRASGGSALTDDNIDVPHYHGVNELPGDVPVTYVPARNTIFLSYALGFAEVIGAKDIFIGVHTSDSANYPDCRPEYIKSFEEMANLATSMGIQGKKITIHMPLIDMTKEQIIRTGIELGVDYKNTISCYEPTEDDSSCGNCLACMIRLDAFKKNNIQDPIKYVNT

SEQ ID NO: 41812 - protein, 230 aa, unidentified
  source 1..230: note = Rickettsia endosymbiont
  REGION 1..230: note = tr|A0A162VJN6|A0A162VJN6_9RICK 7-cyano-7-deazaguanine synthase OS=Rickettsia endosymbiont of Proechinophthirus fluctus OX=1462733 GN=queC PE=3 SV=1
MKKKAVILLSGGPDSTTVLEIVSKTDYEIYALSFNYHRRNSLEVQKIQGLIKDYNVKQHRVINIDLQSFIGSALTDDNIDVPKFKNTDQLPSDIPVTYVPARNTIFLSYALGVAEIIGARDIFIGVHTNDYTNYPDCRPEYIKSFEAMANLATRVGVNGEKITIHAPLINMTKEQIIKKGLELGVDYSKTISCYDPTEDGLSCGQCLSCIVRLDAFKKNNVQDPIQYVSL

SEQ ID NO: 41813 - protein, 224 aa, Rickettsia felis
  REGION 1..224: note = tr|A0A0F3MR88|A0A0F3MR88_RICFI 7-cyano-7-deazaguanine synthase OS=Rickettsia felis str. Pedreira OX=1359196 GN=queC PE=3 SV=1
MKKAVILVSGGADSATVLAIAREMGYEIHAMSFNYGQRNNAELRKVKELIKEYNVKQHKIVYIDLRAFGGSALTDNNIDVPHYHDVNELPEDVPVTYVPARNTIFLSYALGYAEVIGAKDIFIGVHTSDSANYPDCRPEYIKSFEEMANLATNIGNRITIHTPLIDMAKEQIIKTGLELGVDYKNTISCYDPTEDDLSCGNCLACMIRLDAFKKNNVQDPINYV

SEQ ID NO: 41814 - protein, 224 aa, Rickettsia felis; identical to SEQ ID NO: 41813
  REGION 1..224: note = sp|Q4UMZ0|QUEC_RICFE 7-cyano-7-deazaguanine synthase; OS = Rickettsia felis (strain ATCC VR-1525 / URRWXCal2); OX = 315456 GN=queC PE=3 SV=1

SEQ ID NO: 41815 - protein, 228 aa, Rickettsia heilongjiangensis
  REGION 1..228: note = tr|G0GZA4|G0GZA4_RICH0 7-cyano-7-deazaguanine synthase OS=Rickettsia heilongjiangensis (strain ATCC VR-1524 / 054) OX=1032845 GN=queC PE=3 SV=1
MKKKSVILLSGGPDSTTVLEIVSKMDYEIYALSFNYHRRNSPEVQKIQGLIKDYNVKQHRVINIDLQSFIGSALTDDNIDVPKFKNTDQLPSDIPVTYVPARNTIFLSYALGVAEVIGARDIFIGVHTNDYTNYPDCRPEYIKSFEAMANLATRVGVNGEKITIHAPLINMTKEQIIQKGLELGVDYSKTISCYDPTEDGLSCGQCLSCIARLDAFKKNNVQDPIKYV

SEQ ID NO: 41816 - protein, 228 aa, Rickettsia japonica; identical to SEQ ID NO: 41815
  REGION 1..228: note = tr|A0A3B7DBG9|A0A3B7DBG9_RICJA 7-cyano-7-deazaguanine synthase OS=Rickettsia japonica; OX = 35790 GN=queC PE=3 SV=1

SEQ ID NO: 41817 - protein, 228 aa, Rickettsia japonica; identical to SEQ ID NO: 41815
  REGION 1..228: note = tr|G4KLA3|G4KLA3_RICJY 7-cyano-7-deazaguanine synthase OS=Rickettsia japonica (strain ATCC VR-1363 / YH); OX = 652620 GN=exsB PE=3 SV=1

SEQ ID NO: 41818 - protein, 228 aa, Rickettsia massiliae
  REGION 1..228: note = sp|A8F2I5|QUEC_RICM5 7-cyano-7-deazaguanine synthase; OS = Rickettsia massiliae (strain Mtu5) OX=416276 GN=queC; PE = 3 SV=2
MKKKAVILLSGGPDSTTVLEIVSKMDYEIYALSFNYHRRNSPEVQKIQGLIKDYNVKQHRVINIDLQSFIGSALTDDNIDVPKFKHTDQLPSDIPVTYVPARNTIFLSYALGVAEVIGARDIFIGVHTNDYTNYPDCRPEYIKSFEAMANLATRVGVNGEKITIHAPLINMTKEQIIKKGLELGVDYSKTISCYDPTEAGLSCGQCLSCIARLDAFKKNNVQDPIKYV

SEQ ID NO: 41819 - protein, 228 aa, Rickettsia massiliae
  REGION 1..228: note = tr|H6QI78|H6QI78_RICMA 7-cyano-7-deazaguanine synthase OS=Rickettsia massiliae str. AZT80 OX=1105112; GN = queC PE=3 SV=1
MKKKAVILLSGGPDSTTVLEIVSKMDYEIYALSFNYHRRNSPEVQKIQGLIKDYNVKQHRVINIDLQSFIGSALTDDNIDVPKFKHTDQLPSDIPVTYVPARNTIFLSYALGVAEVIGARDIFIGVHTNDYTNYPDCRPEYIKSFEAMANLATRVGVNGEKITIHAPLINMTKEQIIKTGLELGVDYSKTISCYDPTEAGLSCGQCLSCIARLDAFKKNNVQDPIKYV

SEQ ID NO: 41820 - protein, 232 aa, unidentified
  source 1..232: note = Rickettsia monacensis
  REGION 1..232: note = tr|A0A0B7IX01|A0A0B7IX01_9RICK 7-cyano-7-deazaguanine synthase OS=Rickettsia monacensis; OX = 109232 GN=queC PE=3 SV=1
MKEAKKSVNLVSGGADSATVLAIAREMGYEIHAISFNYGQRNNVELRKVKEFIKEYNVKQHKIVDIDLRASGGSALTDDNIDVPHYHGVNELPGDVPVTYVPARNTIFLSYALGFAEVIGAKDIFIGVHTSDSANYPDCRPEYIKSFEEMANLATSMGIQGKKITIHTPLIDMTKEQIIRTGIELGVDYKNTISCYEPTEDDSSCGNCLACMIRLDAFKKNNIQDPIKYVNT

SEQ ID NO: 41821 - protein, 228 aa, Rickettsia montanensis
  REGION 1..228: note = tr|H8KCG8|H8KCG8_RICMS 7-cyano-7-deazaguanine synthase OS=Rickettsia montanensis (strain OSU 85-930); OX = 1105114 GN=queC PE=3 SV=1
MKKKAVILLSGGPDSTTVLEIVSKMDYEIYALSFNYHRRNGPEVQKIQGLIKDYNVKQHRVINIDLQSFIGSALTDDNIDVPKFKNTDQLPSDIPVTYVPARNTIFLSYALGVAEVIGARDIFIGVHTNDYTNYPDCRPEYIKFFEAMANLATRVGVNGEKITVHAPLINMTKEQIIKKGLELGVDYSKTISCYDPTEDGLSCGQCLSCIARLDAFKKNNVQDPIKYV

SEQ ID NO: 41822 - protein, 228 aa, Rickettsia parkeri
  REGION 1..228: note = tr|A0A0F3QPK3|A0A0F3QPK3_RICPA 7-cyano-7-deazaguanine synthase OS=Rickettsia parkeri str. Grand Bay OX=1359203 GN=queC PE=3 SV=1
MKKKAVILLSGGPDSTTVLEIVSKTDYEIYALSFNYHRRNSLEVQKIQGLIKDYNVKQHRVINIDLQSFIGSALTDDNIDVPKFKNTDQLPSGIPVTYVPARNTIFLSYALGVAEVIGARDIFIGVHTNDYTNYPDCRPEYIKSFEAMANLATRVGVNGEKITIHAPLINMTKEQIIKKGLELGVDYSKTISCYDPTEDGLSCGQCLSCIARLDAFKKNNVQDPIKYV

SEQ ID NO: 41823 - protein, 228 aa, Rickettsia peacockii
  REGION 1..228: note = sp|C4K2L7|QUEC_RICPU 7-cyano-7-deazaguanine synthase; OS = Rickettsia peacockii (strain Rustic) OX=562019 GN=queC; PE = 3 SV=1
MKKKAVILLSGGPDSTTVLEIVSKTDYEIYALSFNYHRRNSLEVQKIQGLIKDYNVKQHRVINIDLQSFIGSALTDDNIDVPKFKNTDQLPSDIPVTYVPARNTIFLSYALGVVEVIGARDIFIGVHTNDYTNYPDCRPEYIKSFEAMANLATRVGVNGEKITIHAPLINMTKEQIIKKGLELGVDYSKTISCYDPTEDGLSCGQCLSCIARLDAFKKNNVQDPIKYV

SEQ ID NO: 41824 - protein, 228 aa, unidentified
  source 1..228: note = Rickettsia philipii
  REGION 1..228: note = tr|H6PUZ0|H6PUZ0_RICP3 7-cyano-7-deazaguanine synthase OS=Rickettsia philipii (strain 364D) OX=481009; GN = queC PE=3 SV=1
MKKKAVILLSGGPDSTTVLEIVSKTDYEIYALSFNYHRRNSLEVQKIQGLIKDYNVKQHRVINIDLQSFIGSALTDDNIDVPKFKNTDQLPSDIPVTYVPARNTIFLSYALGVAEVIGARDIFIGVHTNDYTNYPDCRPEYIKSFEAMANLATRVGVNGEKITIHAPLINMTKEQIIKKGLELGVDYSKTISCYDPTEDGLSCGQCLSCIVRLDAFKKNNVQDPIQYV

SEQ ID NO: 41825 - protein, 227 aa, Rickettsia prowazekii
  REGION 1..227: note = sp|Q9ZCM9|QUEC_RICPR 7-cyano-7-deazaguanine synthase; OS = Rickettsia prowazekii (strain Madrid E) OX=272947; GN = queC PE=3 SV=1
MKKSVNLLSGGTDSATVLAIASEMCYEIYAMSFNYGQRNNAELRKVKELIKKYNVKQHKIVDIDLRAFGGSALTDDNIDVPYYHGINALPEIVPVTYVPARNTIFLSYAVGFAEVIGSQDIFIGVHTSDSANYPDCCPEYIQSFEKMVNLATNMGVQGKKITIHAPLIDMTKEQIIRTGLKLGVDYKNTISCYSPTEDDLSCGNCLACIIRLDAFKKNNIQDPIKYV

SEQ ID NO: 41826 - protein, 236 aa, Rickettsia prowazekii
  REGION 1..236: note = tr|D5AXV3|D5AXV3_RICPP 7-cyano-7-deazaguanine synthase OS=Rickettsia prowazekii (strain Rp22) OX=449216; GN = exsB PE=3 SV=1
MCIKLEWSTMKKSVNLLSGGTDSATVLAIASEMCYEIYAMSFNYGQRNNAELRKVKELIKKYNVKQHKIVDIDLRAFGGSALTDDNIDVPYYHGINALPEIVPVTYVPARNTIFLSYAVGFAEVIGSQDIFIGVHTSDSANYPDCCPEYIQSFEKMVNLATNMGVQGKKITIHAPLIDMTKEQIIRTGLKLGVDYKNTISCYSPTEDDLSCGNCLACIIRLDAFKKNNIQDPIKYV

SEQ ID NO: 41827 - protein, 228 aa, Rickettsia raoultii
  REGION 1..228: note = tr|A0A126E9D3|A0A126E9D3_9RICK 7-cyano-7-deazaguanine synthase OS=Rickettsia raoultii; OX = 369822 GN=queC PE=3 SV=1
MKKKAVILLSGGPDSTTVLEIVSKMDYEIYALSFNYHRRNSPEVQKIQGLIKDYNVKQHRVINIDLQSFIGSALTDDNIDVPKFKNTDQLPSDIPVTYVPARNTIFLSYALGVAEVIGARDIFIGVHTNDYTNYPDCRPEYIKSFEAMANLATRVGVNGEKITIHAPLINMTKEQIIKKGLELGVDYSKTISCYDPTEDGLSCGQCLSCIARLDAFKKNNVQDPIKYV

SEQ ID NO: 41828 - protein, 228 aa, Rickettsia rhipicephali
  REGION 1..228: note = tr|A0A0S2C931|A0A0S2C931_RICRH 7-cyano-7-deazaguanine synthase OS=Rickettsia rhipicephali; OX = 33992 GN=queC PE=3 SV=1
MKKKAVILLSGGPDSTTVLEIVSKMDYEIYALSFNYHRRNSPEVQKIQGLIKDYNVKQHRVINIDLQSFIGSALTDDNIDVPKFKNTDQLPSDIPVTYVPARNTIFLSYALGVAEVIGARDIFIGVHTNDYTNYPDCRPEYIKSFEAMANLATRVGVNGEKITIHAPLINMTKEQIIKKGLELGVDYSKTISCYDPTEAGLSCGQCLSCIARLDAFKKNNVQDPIKYV

SEQ ID NO: 41829 - protein, 228 aa, Rickettsia rhipicephali; identical to SEQ ID NO: 41819
  REGION 1..228: note = tr|A0A0F3PG51|A0A0F3PG51_RICRH 7-cyano-7-deazaguanine synthase OS=Rickettsia rhipicephali str. Ect OX=1359199 GN=queC PE=3 SV=1

SEQ ID NO: 41830 - protein, 228 aa, Rickettsia rickettsii; identical to SEQ ID NO: 41824
  REGION 1..228: note = sp|A8GTC6|QUEC_RICRS 7-cyano-7-deazaguanine synthase; OS = Rickettsia rickettsii (strain Sheila Smith) OX=392021; GN = queC PE=3 SV=1

SEQ ID NO: 41831 - protein, 228 aa, Rickettsia rickettsii; identical to SEQ ID NO: 41824
  REGION 1..228: note = sp|B0BUW5|QUEC_RICRO 7-cyano-7-deazaguanine synthase; OS = Rickettsia rickettsii (strain Iowa) OX=452659 GN=queC; PE = 3 SV=1

SEQ ID NO: 41832 - protein, 228 aa, Rickettsia sibirica
  REGION 1..228: note = tr|Q7P9I9|Q7P9I9_RICS2 7-cyano-7-deazaguanine synthase OS=Rickettsia sibirica (strain ATCC VR-151 / 246); OX = 272951 GN=queC PE=3 SV=1
MKKKAVILLSGGPDSTTVLEIVSKTDYEIYALSFNYHRRNSLEVQKIQGLIKDYNVKQHRVINIDLRSFIGSALTDDNIDVPKFKNTDQLPSDIPVTYVPARNTIFLSYALGVAEVIGARDIFIGVHTNDYTNYPDCRPEYIKSFEAMANLATRVGVNGEKITIHAPLINMTKEQIIKKGLELGVDYSKTISCYDPTEDGLSCGQCLSCIARLDAFKKNNVQDPIKYV

SEQ ID NO: 41833 - protein, 228 aa, Rickettsia slovaca
  REGION 1..228: note = tr|H8LPQ1|H8LPQ1_RICSL 7-cyano-7-deazaguanine synthase OS=Rickettsia slovaca str. D-CWPP OX=1105109; GN = queC PE=3 SV=1
MKKKAVILLSGGPDSTTVLEIVSKTDYEIYALSFNYHRRNSLEVQKIQGLIKDYNVKQHRVINIDLQSFIGSALTDDNIDVPKFKNTDQLPSDIPVTYVPARNTIFLSYALGVAEVIGARDIFIGVHTNDYTNYPDCRPEYIKSFEAMANLATRVGVNGEKITIHAPLINMTKEQIIKKGLELGVDYSKTISCYDPTEDGLSCGQCLSCIARLDAFKQNNVQDPIKYV

SEQ ID NO: 41834 - protein, 223 aa, Rickettsia sp.
  REGION 1..223: note = tr|A0A1C3ET20|A0A1C3ET20_9RICK 7-cyano-7-deazaguanine synthase OS=Rickettsia sp. wb; OX = 1851512 GN=queC PE=3 SV=1
MKKAVILVSGGADSATVLAIMREQGYEIHAISFNYGQRNNAELRKVTELVKEYNVKQHKIVNIDLRAFGGSALTDDNIKVPHYQDGKELPEDIPVTYVPARNTIFLSYALGFAEIIGAKDIFIGVHTSDSANYPDCRPEYIKFFEAMANLATNIGGVTIHTPLINMTKDQIIKTGLRLGVDYKNTISCYDPSEDDLSCGTCLACTIRLDAFKKNNVQDPINYR

SEQ ID NO: 41835 - protein, 223 aa, Rickettsia sp.; identical to SEQ ID NO: 41834
  REGION 1..223: note = tr|A0A249E0T2|A0A249E0T2_9RICK 7-cyano-7-deazaguanine synthase OS=Rickettsia sp. MEAM1 (Bemisia tabaci) OX=1182263 GN=queC PE=3 SV=1

SEQ ID NO: 41836 - protein, 227 aa, Rickettsia typhi
  REGION 1..227: note = sp|Q68W43|QUEC_RICTY 7-cyano-7-deazaguanine synthase; OS = Rickettsia typhi (strain ATCC VR-144 / Wilmington); OX = 257363 GN=queC PE=3 SV=1
MKKSVNLLSGGIDSATVLAIASEMCYEIHAMSFNYGQRNHAELQKVKELIKKYNVKQHKIVDIDLRAFGGSALTDDNIDIPHYHSINELPEIVPVTYVPARNTIFLSYALGFAEVIGAQDIFIGVHTSDSANYPDCRPEYIKSFEKMVNVATNMGIQGKKITIHAPLIDMTKEQIIRTGLKLGVDYKNTISCYTPTEDDLSCGNCLACIIRLDAFKKNNIQDPIKYV

SEQ ID NO: 41837 - protein, 128 aa, unidentified
  source 1..128: note = Rickettsiales bacterium
  REGION 1..128: note = tr|A0A2E3SLS5|A0A2E3SLS5_9RICK 7-cyano-7-deazaguanine synthase OS=Rickettsiales bacterium; OX = 2026788 GN=CMN01_07025 PE=3 SV=1
MAFDYGQRHKLELKFARWQANYFRCKSFKIFKIDLYGGSALTDNIKVPNHRDVNEIPNSIPNTYVPSRNIIFLSFASGYAEFLNINHIFIGVNSVDYSGYPDCRIEFIQKFENLINFSTKKGLEKKKI

SEQ ID NO: 41838 - protein, 225 aa, unidentified
  source 1..225: note = Rickettsiales bacterium
  REGION 1..225: note = tr|A0A1Z9MWL6|A0A1Z9MWL6_9RICK 7-cyano-7-deazaguanine synthase OS=Rickettsiales bacterium TMED211 OX=1986869 GN=queC PE=3 SV=1
MKKKKSVVLLSGGLDSSVVLSIAVKKFDVHCISFNYGQRHRRELTFAKKQVKLQKAKEHKIFKIDFFGGSSLTDDIDVPENRNVENIPDKIPITYVPARNTIFLSYALGYAEFLECDDIFLGVNAIDYSGYPDCRPNFIKAFENLANIATKKSILGEKFKIHTPLIKMTKEKIILEGIKNNVDFKNTSSCYNPLNKMSCGKCDSCLLRKKGFERALVKDTIKYKY

SEQ ID NO: 41839 - protein, 224 aa, unidentified
  source 1..224: note = Rickettsiales endosymbiont
  REGION 1..224: note = tr|A0A3Q8T8C9|A0A3Q8T8C9_9RICK 7-cyano-7-deazaguanine synthase OS=Rickettsiales endosymbiont of Stachyamoeba lipophora OX=2486578 GN=queC; PE = 3 SV=1
MTKRGVILISGGLDSSTVLAIVKAQGYETYGISFDYGQRHKAELQAVAAVAKNFALKEHKLIRLNLNEIGGSALTDSDIEVPKNALGEEIPVTYVPARNTIFLSIALGYAERVGASDIFIGVNAIDYSNYPDCRAEYLEAFEKLANLATKQGANEGNFKIHAPLMKMTKAEIITTGIGLGVDYSITHSCYSPNSAGVSCGECDACLLRLRGFKEAGIVDPIEYQ

SEQ ID NO: 41840 - protein, 227 aa, unidentified
  source 1..227: note = Rickettsiales endosymbiont
  REGION 1..227: note = tr|A0A4Q7DGI7|A0A4Q7DGI7_9RICK 7-cyano-7-deazaguanine synthase OS=Rickettsiales endosymbiont of Peranema trichophorum OX=2486577 GN=queC; PE = 3 SV=1
MKKAVVLFSSGLDSSTVLAIANSEGYQLHCLTFDYGQRHSVEIEIAKKAISKLKFSVHHKIARIDLRVFGGSALTDDIAVPKNCIDDEFQTIPVTYVPARNMIFLSYAIGYAETVGASDVFIGVNQIDYSQYPDCRAEFVEAFQTCANLGTKAGSDGAKFIIHAPLQFMHKRDIIKLGLSLGVDYSNTITCYDPVDDISCGICQACHLRLEAFKAAGIPDPIRYVQA

SEQ ID NO: 41841 - protein, 213 aa, unidentified
  source 1..213: note = Rikenellaceae bacterium
  REGION 1..213: note = tr|A0A3B8X5I6|A0A3B8X5I6_9BACT 7-cyano-7-deazaguanine synthase OS=Rikenellaceae bacterium; OX = 2049048 GN=queC PE=3 SV=1
MKALLIYSGGLDSTTLLYEYKDSIALAVTFDYGSKHNAREIAFAVENCKRLGIKHLVIPLGFIGQYFKSDLLLSGGDIPEGHYADENMKSTVVPFRNGIMLAVAAGLAESYELDAIMLANHSGDHAIYPDCRPEFIDAFSAAVKAGTYNGVQVISPYCNITKRDIALRGKAIGVDYSLTYSCYKGGEKHCGKCGTCVERKEALEGFDPTEYLD

SEQ ID NO: 41842 - protein, 225 aa, unidentified
  source 1..225: note = Rippkaea orientalis
  REGION 1..225: note = tr|B7JYW2|B7JYW2_RIPO1 7-cyano-7-deazaguanine synthase OS=Rippkaea orientalis (strain PCC 8801) OX=41431; GN = queC PE=3 SV=1
MIHQSKAVVLLSGGLDSATSAAIALSQGYHLIALSLRYGQRHEKELAAAKNIAKALDITEHYIVEVNLAQWGGSALTDTALTLPQGGINPNIIPSTYVPGRNTVFIAIALSLAEAKGATAIFLGINAVDYSGYPDCRPDYLQAYQRLANLSSKAGIEGHAPQLIAPLINDSKVDIVRRAVSLGVPIEDTWSCYQGGEKPCGLCDSCRIRDRALIEAGYPELATFG

SEQ ID NO: 41843 - protein, 234 aa, Rivibacter subsaxonicus
  REGION 1..234: note = tr|A0A4Q7VVD0|A0A4Q7VVD0_9BURK 7-cyano-7-deazaguanine synthase OS=Rivibacter subsaxonicus; OX = 457575 GN=queC PE=3 SV=1
MIDPRGALVLFSGGQDSTACLAWALDRFERVETIGFDYGQRHRVELDCRPRVIEALRSAFPQWSARLGADHLLDLALLGQISDTALTEARAIEMQANGLPNTFVPGRNLLFLSFAATLAYRRGLSVLVGGMCETDYSGYPDCRDNTLKALQVALSLGMATPMTIETPLMWIDKAQTWALAERLGGQALVELTAEQTHTCYLGDRQHRHEWGYGCGSCPACELRAAGWRGWHAGR

SEQ ID NO: 41844 - protein, 238 aa, unidentified
  source 1..238: note = Rivicola pingtungensis
  REGION 1..238: note = tr|A0A318KD73|A0A318KD73_9NEIS 7-cyano-7-deazaguanine synthase OS=Rivicola pingtungensis; OX = 1054498 GN=queC PE=3 SV=1
MMSPATDHSGGRALVVLSGGQDSTTCLYWALRRFDHVEAVTFDYGQRHRVELAAATRIAADAGVRQHLLPINTFSALGGNALTDVAMAPETGLRADGDSELPNTFVPGRNLIFLTFAAALAWQRQLDHLVVGVAQTDYSGYPDCRAPTLAALQQALTLGLDRAIAVHAPLMQLSKADTVRLAADVGALPALAHSHTCYHGAVPPCGECAACQLRARGFAEAGVEDPLVARCREEAACR

SEQ ID NO: 41845 - protein, 226 aa, Rivularia sp.
  REGION 1..226: note = tr|K9RGW3|K9RGW3_9CYAN 7-cyano-7-deazaguanine synthase OS=Rivularia sp. PCC 7116 OX=373994 GN=queC PE=3; SV = 1
MKAVILLSGGLDSSTVLYKALADGYECYAISFDYQQRHKKELHSAVSVAEKAGVAQHQVIEFDLRQWGGSALTDNSIDLPQERSLKEMSQNIPVTYVPARNTIFLSFASAYAETIAAQRVYIGVNALDYSGYPDCRPDYVQAMQEVFRLGTKQGREGNAINIVTPLIDLKKTEIIKLGNQLGVPWELTWSCYSGGDVACGVCDSCRLRLAAFDELGLTDPVEYAVR

SEQ ID NO: 41846 - protein, 308 aa, unidentified
  source 1..308: note = Robbsia andropogonis
  REGION 1..308: note = tr|A0A0F5K5F6|A0A0F5K5F6_9BURK 7-cyano-7-deazaguanine synthase OS=Robbsia andropogonis; OX = 28092 GN=queC PE=3 SV=1
MALRPVRGTDGLANEGALVLFSGGQDSATCLAWALQRFARVETIGFDYGQRHKIELTCRSAFRAQLLAAGVRETTAGDVEGAAKADAATTTAGGGLDTASASGLNSMTGSNAAASVAPVAMRAFDGWTGRLGVDHMIDLSMLGQISDTAMTRDIAIEARDDGLPNTFVPGRNLLFLTVAATIAYRRGLRVLVGGMCETDYSGYPDCRDDTLKALQIALNLGMDRRMVLQTPLMWLDKAATWALAEQMGGTPLVELVRDHTHTCYVGDRTHFHPWGYGCGNCPACQLRANGYAAYQAERAVSRQDGQGH

SEQ ID NO: 41847 - protein, 244 aa, unidentified
  source 1..244: note = Robbsia sp.
  REGION 1..244: note = tr|A0A494Y7A9|A0A494Y7A9_9BURK 7-cyano-7-deazaguanine synthase OS=Robbsia sp. DHC34; OX = 2419776 GN=queC PE=3 SV=1
MRESARQGALVLFSGGQDSATCLAWALDRFDHVETLGFDYGQRHRIELECRTQFRERIVEVMPATRARLGDDHVIDLSVLGAISDTAMTRDIEIVTTASGLPNTFVPGRNLMFMTIAAAIAYRRGLRVIVGGMCETDFSGYPDCRDDTLKALQVALNLGMDSRFVLETPLMWLDKADTWRLARSLGGDPLVDLIRMDTHTCYLGERGLLNDWGYGCGECPACKLRKRGYEAYLANEPVGADPTR

SEQ ID NO: 41848 - protein, 1376 aa, Robiginitalea myxolifaciens
  REGION 1..1376: note = tr|A0A1I6FXT8|A0A1I6FXT8_9FLAO Amino acid adenylation domain-containing protein OS=Robiginitalea myxolifaciens OX=400055 GN=SAMN04490243_0883 PE=4 SV=1
MTNPTPTYYPLTPSQKQIWTGQLLFPDSPLYHVPYLFKFNGAINPEVLQNAFQELVNCTDILRIVIGEGNEGLEQQVLPTYTFALERIEMGSADFEKSVEKWALDRSNLPLATNKPLFDAAILENRESGFVLYLNLHHVITDAITASLLFERLSGIYDNLIQGKPALTELELPQYRDCITPLVAQGESHAQDATIRYWQDKQTRLPVFPQLGSPGKPGLDTKTTRVAIPLGSERFKKITELLGQKGFATFTRQMSLTNFFTSVLTAYLYRVSGQRAFTIGTPVHNRYTHQEKKTPGLFIGVYPLINKIDPERSFRELAASNYQELAETLGHCGSGIASTAISRNINCIVNYLPATFTNFGGMPVETKWIHPGYSDPMHYIRLHLTEFAADEPLELSADLSSDVFTAEQINSFPQNFLDILDALVAQPDETLGKISRVNPEMEALFLENFDKTALAPEPKTFLELFQEQVQNQPENTAFTLNDSAVSYAEYQQKANTWAAALKASGCQRGDTVALQLGRTEDYMFALLAIMQLGGIFIPMPSDLPAERRDYILVDSGCSFILSRSTFTTPEGIQVLTPEDLNRAEPNETPEFNSLGTADRAYIIYTSGSTGNPKGVAIQHGALGNYLQWARDRYAIDAQTVMPLFTSLGFDLTLTSTLLPLVAGGRVSLVPEPAIGPDLAALRIWSMEDITAIKLTPSHLRLAGDRNPELPNLKTLIVGGENFQTALAEQATANFGHGVAIYNEYGPTEATIGCIVHRYAPTQSASVPIGSTIAGMGAFILDEHMQLTPPGVPGEIYLSGAGLSTGYINRAELNQERFVFHPESGQRLYRTGDVGIWNTDGVMEYHGRNDEQVKVNGHRVELQEIEAVLAQFPSLEGAAVSLDTINKPLQESEANCRECGLPSEYPSADFDENNVCHLCRSFADYQNEVASYFKTEDDLYQQIRSGTNSDNKYDCLSLLSGGKDSTYVLAKLIDMGFKVLAFTLDNGYISEQAKANIDKIVTALGVDHVYGSTEHMNEIFVDSLERHANVCNGCFKTIYTLSTQIALEHEIPFIVTGLSRGQFFETRLAEETFMDFRDSGKSIDDIILEARKLYHQEDDAIKQLLETEIFNDANNFEKVQFIDFYRYTDVSLSELLRFLKEKIGWERPTDTGRSTNCLINQLGIYVHKKKKGYSNYAFPYSWDVRLGHKTREESLDEINEALDEEEIRKMMGEIGYFEDLEPTDQLVAYVAGDNLPNSQELRAYLAGKLPAYMIPTTFKKVEALPLTPNGKVDKKALQELNPLQLGAATKYVAPRNDLEELLAEHWGEVLQLEKVGIHDNFIDLGGHSLAAIRITGRINRELTLELPLSKIFEHPTVAEYGVYLENKLEELMALDDD

SEQ ID NO: 41849 - protein, 237 aa, Robiginitomaculum sp.
  REGION 1..237: note = tr|A0A2G2MTR7|A0A2G2MTR7_9RHOB 7-cyano-7-deazaguanine synthase OS=Robiginitomaculum sp.; OX = 2030823 GN=queC PE=3 SV=1
MKGQTKALVLFSGGQDSATVLAWALDRYDYVETIGFDYEQRHMVEMQCRQNVLEKIRAAFPDWSKRLGQDHVLDLSVLGKISNTSLTRDIDIVEDGDGPPNTFVPGRNIIFLNFAAALGYRHSIHVLVAGMCEADFSGYPDCRKETLDATMQALSLGMDTEFSLDTPLMFLSKAGAWHLAEKLGGRILVDIINQYSHTCYLGERGERHDWGYGCSTCPACVLRAKGWQVYKSGAFNR

SEQ ID NO: 41850 - protein, 236 aa, Robiginitomaculum sp.
  REGION 1..236: note = tr|A0A2G2QYY2|A0A2G2QYY2_9RHOB 7-cyano-7-deazaguanine synthase OS=Robiginitomaculum sp.; OX = 2030823 GN=queC PE=3 SV=1
  VARIANT 143: note = Xaa can be any naturally occurring amino acid
  VARIANT 149: note = Xaa can be any naturally occurring amino acid
MTSHTKALVLFSGGQDSATVLAWALDKYDLVETVGFDYEQRHMVEMQCRLDVLAQIRTQFPHWADKLGADRVLDLSVLGEISNTSLTRDIEIVETDDGPPNTFVPGRNIIFLNFAAALGYRYGARDLVAGMCEADFSGYPDCXKDTLDXTMRALSLGMDTEFTLHTPLMFLSKAGAWQLAERLGGRKLVDLINQYSHTCYMGERGTRHDWGYGCGTCPACVLRAKGWAQYTDELST

SEQ ID NO: 41851 - protein, 223 aa, Robinsoniella sp.
  REGION 1..223: note = tr|A0A371AXK2|A0A371AXK2_9FIRM 7-cyano-7-deazaguanine synthase OS=Robinsoniella sp. MCWD5; OX = 1812858 GN=queC PE=3 SV=1
MSVEQESAIVIFSGGQDSTTCLFWAKKKFKDVIAISFDYGQRHKLELECASDICKKYGIEHHILDMGLLNQLAPNSLTRDTIKVDEKAPKEGTPNTFVDGRNLLFLTFGAIFAKQRKIRHLVTGVSQSDYSGYPDCRDIFIKSLNVTLELSMEYPFVIHTPLMWIDKEQTWELAYDLGVFDIIKEETLTCYNGIKGAGCGSCPACTLRKNGLEAFEQNKQREC

SEQ ID NO: 41852 - protein, 227 aa, unidentified
  source 1..227: note = Rodentibacter genomosp.
  REGION 1..227: note = tr|A0A1V3JM18|A0A1V3JM18_9PAST 7-cyano-7-deazaguanine synthase OS=Rodentibacter genomosp. 2 OX=1908266 GN=queC PE=3 SV=1
MNISNPNRNRKAIVIFSGGQDSTTCLFQAITDYGKENVEVITFQYGQRHAIELEKAQWIAQDLGIKQTLIDTSVIKAITHNALMDEQAKIEQKNNEIPNTFVDGRNALFLLYAAIYAKGQGIQDIITGVCETDFSGYPDCRDVFIKSMNVTLNLAMDYPFTIKTPLMYLTKAQTWQLADELGVLDYVRHHTHTCYEGVEGGCGQCPSCQLRNQGLWEYLAQKGERNV

SEQ ID NO: 41853 - protein, 228 aa, unidentified
  source 1..228: note = Rodentibacter genomosp.
  REGION 1..228: note = tr|A0A1V3JRD0|A0A1V3JRD0_9PAST 7-cyano-7-deazaguanine synthase OS=Rodentibacter genomosp. 2 OX=1908266 GN=queC PE=3 SV=1
MNISNPNHNRKALVIFSGGQDSTTCLFQAIADYGKENVETITFQYGQRHAIELEKAQWIAQDLGIKQTLVDTSVIKAITHNALIDQQTKIEQKNNELPNTFVDGRNALFLLYAAIYAKGQGIQDIITGVCETDFSGYPDCRDVFVKSMNVTLNLAMDYQFNIKTPLMYLTKAQTWQLADELGVLDYVQQHSHTCYEGVEGGCGSCPSCELRNKGLQQYLRQKSGEKNV

SEQ ID NO: 41854 - protein, 227 aa, unidentified
  source 1..227: note = Rodentibacter heidelbergensis
  REGION 1..227: note = tr|A0A1V3IBW4|A0A1V3IBW4_9PAST 7-cyano-7-deazaguanine synthase OS=Rodentibacter heidelbergensis OX=1908258 GN=queC PE=3 SV=1
MNISNPNRNRKAVVIFSGGQDSTTCLFQAIADYGKENVEAITFQYGQRHAIELEKARWIAQDLGIKQTLMDTSVINTITHNALMDKQTKIEQKNNELPNTFVDGRNALFLLYAAIYAKGQGIQDIITGVCETDFSGYPDCRDVFIKSMNVTLNLAMDYAFTIKTPLMYLTKAQTWQLADELGVFDYVRTHTHTCYEGIEGGCGQCPSCRLRNQGLSEYLAQKGNGNV

SEQ ID NO: 41855 - protein, 228 aa, unidentified
  source 1..228: note = Rodentibacter heylii
  REGION 1..228: note = tr|A0A1V3KSB1|A0A1V3KSB1_9PAST 7-cyano-7-deazaguanine synthase OS=Rodentibacter heylii; OX = 1906744 GN=queC PE=3 SV=1
MNISNPNHNRKAVVIFSGGQDSTTCLFQAIADYGKENVETITFQYGQRHAIELEKAQWIAQDLGIKQTLVDTSVIKAITHNALIDQQTKIEQKNHELPNTFVDGRNALFLLYAAIYAKGQGIQDIITGVCETDFSGYPDCRDVFVKSMNVTLNLAMDYQFNIKTPLMYLTKAQTWQLADELGVLDYVQQHSHTCYEGVEGGCGNCPSCELRNKGLQQYLRQKGGEKNV

SEQ ID NO: 41856 - protein, 228 aa, unidentified; identical to SEQ ID NO: 40667
  source 1..228: note = Rodentibacter heylii
  REGION 1..228: note = tr|A0A1V3KIW6|A0A1V3KIW6_9PAST 7-cyano-7-deazaguanine synthase OS=Rodentibacter heylii; OX = 1906744 GN=queC PE=3 SV=1

SEQ ID NO: 41857 - protein, 227 aa, unidentified
  source 1..227: note = Rodentibacter mrazii
  REGION 1..227: note = tr|A0A1V3IDT4|A0A1V3IDT4_9PAST 7-cyano-7-deazaguanine synthase OS=Rodentibacter mrazii; OX = 1908257 GN=queC PE=3 SV=1
MNISNPNRNRKAVVIFSGGQDSTTCLFQAIADYGKENVETITFQYGQRHAIELEKAQWITQDLGIKQTLVDTSVIKAITHNALIDQQTKIEQKNNELPNTFVDGRNALFLLYAAIYAKGQGIQDIITGVCETDFSGYPDCRDVFVKSMNVTLNLAMDYQFNIKTPLMYLTKAQTWQLADELGALDYVRDHTHTCYEGVEGGCGKCPSCELRENGLAEYLAQKGGANV

SEQ ID NO: 41858 - protein, 227 aa, unidentified
  source 1..227: note = Rodentibacter myodis
  REGION 1..227: note = tr|A0A1V3JQ93|A0A1V3JQ93_9PAST 7-cyano-7-deazaguanine synthase OS=Rodentibacter myodis; OX = 1907939 GN=queC PE=3 SV=1
MNISNPNHDRKALVIFSGGQDSTTCLFQAIADYGKENVEVITFQYGQRHAIELEKARWIAQDLGIKQTFIDTSVIKAITHNALMDENAKIEQKNNELPNTFVDGRNALFLLYAAIYAKGQGIQDIITGVCETDFSGYPDCRDVFIKSMNVTLNLAMDYQFNLKTPLMYLTKAQTWQLADELGVLDYIRHHTHTCYEGGEGGCGKCPSCVLRDKGLAEYLVQKGGENV

SEQ ID NO: 41859 - protein, 227 aa, unidentified
  source 1..227: note = Rodentibacter pneumotropicus
  REGION 1..227: note = tr|A0A4S2Q1Z2|A0A4S2Q1Z2_9PAST 7-cyano-7-deazaguanine synthase OS=Rodentibacter pneumotropicus OX=758 GN=queC PE=3 SV=1
MNISNPNHNRKAVVIFSGGQDSTTCLFQAIADYGKENVEAITFQYGQRHAIELEKAQWIAQDLGIKQTLIDTSVIKAITHNALMDKQAKIEQKNNEIPNTFVDGRNALFLLYAAIYAKGQGIQDIITGVCETDFSGYPDCRDVFIKSMNVTLNLAMDYQFNIKTPLMYLTKAQTWQLADELGVLDYIRTHTHTCYEGIEGGCRQCPSCRLRNQGLWEYLAQKGERNV

SEQ ID NO: 41860 - protein, 80 aa, unidentified
  source 1..80: note = Rodentibacter pneumotropicus
  REGION 1..80: note = tr|A0A448MQM7|A0A448MQM7_9PAST 7-cyano-7-deazaguanine synthase OS=Rodentibacter pneumotropicus OX=758 GN=queC_2 PE=3 SV=1
MNVTLNLAMDYPFTIKTPLMYLTKAQTWQLADELGVLDYIRTHTHTCYEGIEGGCRQCPSCRLRNQGLWEYLAQKGERNV

SEQ ID NO: 41861 - protein, 227 aa, unidentified
  source 1..227: note = Rodentibacter rarus
  REGION 1..227: note = tr|A0A1V3IJD6|A0A1V3IJD6_9PAST 7-cyano-7-deazaguanine synthase OS=Rodentibacter rarus; OX = 1908260 GN=queC PE=3 SV=1
MNISNPNRNRKAVVIFSGGQDSTTCLFQAIADYGKENVEAITFQYGQRHAIELEKARWIAQDLGIKQTLMDTSVINAITHNALMDKQAKIEQKNNKLPNTFVDGRNALFLLYAAIYAKGQGIQDIITGVCETDFSGYPDCRDVFIKSMNVTLNLAMDYAFTIKTPLMYLTKAQTWQLADELGVLDYVRTHTHTCYEGIEGGCGQCPSCRLRNQGLSEYLAQKGSNNV

SEQ ID NO: 41862 - protein, 227 aa, unidentified
  source 1..227: note = Rodentibacter ratti
  REGION 1..227: note = tr|A0A1V3L8Y8|A0A1V3L8Y8_9PAST 7-cyano-7-deazaguanine synthase OS=Rodentibacter ratti; OX = 1906745 GN=queC PE=3 SV=1
MNISNPNRNRKAIVIFSGGQDSTSCLFQAIADYGKENVEVITFQYGQRHAIELEKAQWIAQDLGIKQTLIDTSVIKAITHNALMDKQAKIEQKNNEIPNTFVDGRNALFLLYAAIYAKGQGIQDIITGVCETDFSGYPDCRDVFIKSMNVTLNLAMDYPFTIKTPLMYLTKAQTWQLADELGVLDYVRHHTHTCYEGVEGGCGQCPSCRLRNQGLSEYLAQKGGNHV

SEQ ID NO: 41863 - protein, 227 aa, unidentified
  source 1..227: note = Rodentibacter ratti
  REGION 1..227: note = tr|A0A1V3LB78|A0A1V3LB78_9PAST 7-cyano-7-deazaguanine synthase OS=Rodentibacter ratti; OX = 1906745 GN=queC PE=3 SV=1
MNISNPNRNRKVVVIFSGGQDSTTCLFQAIADYGKENVEVITFQYGQRHAIELEKAQWIAQDLGIKQTLIDTSVIKAITHNALMDEQAKIEQKNNEIPNTFVDGRNALFLLYAAIYAKGQGIQDIITGVCETDFSGYPDCRDVFIKSMNVTLNLAMDYSFTIKTPLMYLTKAQTWQLADELGVLDYVRHHTHTCYEGVEGGCGQCPSCRLRNQGLSEYFAQKGSNHV

SEQ ID NO: 41864 - protein, 228 aa, unidentified
  source 1..228: note = Rodentibacter sp.
  REGION 1..228: note = tr|A0A1V3JYA5|A0A1V3JYA5_9PAST 7-cyano-7-deazaguanine synthase OS=Rodentibacter sp. Ppn85; OX = 1908525 GN=queC PE=3 SV=1
MNISNPNRNRKAVVIFSGGQDSTTCLFQAIADYGKENVETITFQYGQRHAIELAKAQWIAQDLDIKQTLVDTSVIKAITHNALIDQQTKIEQKNNELPNTFVDGRNALFLLYAAIYAKGQGIQDIITGVCETDFSGYPDCRDIFIKSMNVTLNLAMDYQFNIKTPLMYLTKAQTWQLADELGVLDYVQQHSHTCYEGVEGGCGCCPSCELRNKGLQQYLRQKYGEKNV

SEQ ID NO: 41865 - protein, 227 aa, unidentified; identical to SEQ ID NO: 41861
  source 1..227: note = Rodentibacter trehalosifermentans
  REGION 1..227: note = tr|A0A1V3INI6|A0A1V3INI6_9PAST 7-cyano-7-deazaguanine synthase OS=Rodentibacter trehalosifermentans OX=1908263 GN=queC PE=3 SV=1

SEQ ID NO: 41866 - protein, 256 aa, Roseateles aquatilis
  REGION 1..256: note = tr|A0A2D0ALY1|A0A2D0ALY1_9BURK 7-cyano-7-deazaguanine synthase OS=Roseateles aquatilis; OX = 431061 GN=queC PE=3 SV=1
MSNAAASPIPAVHASRRKALVLFSGGQDSTACLAWALDRFAEVETLGFDYGQRHRVELDCRQVVRDQIVTRFPHWAPKLGADHLLDLSLLGQISDTALTQERAIELQANGLPNTFVPGRNLLFLTFAATLAYRRGASVLVGGMCETDFSGYPDCRDNTLKALQVALSLGLDAPMTLETPLMFLTKAQTWALTETLGGEAMNALIVEHTHTCYLGERQTRHDWGWGCGHCPACELRAKGWREFQQARASGAAAPVGA

SEQ ID NO: 41867 - protein, 235 aa, Roseateles depolymerans
  REGION 1..235: note = tr|A0A2W5FS57|A0A2W5FS57_9BURK 7-cyano-7-deazaguanine synthase OS=Roseateles depolymerans; OX = 76731 GN=queC PE=3 SV=1
MNDSRKALVLFSGGQDSTTTLAWALDRYAQVETLGFDYGQRHRIELDCRTVVRERITALRPDWAAKLGEDHLLDLSLLGQISDTALTSERAIELQANGLPNTFVPGRNLLFMTFAATLAYRRGASVLVGGMCETDFSGYPDCRDNTMKALQVALSLGLDAPMTLDTPLMFIDKAATWALAEQLGGEALVQLIVEDTHTCYLGERGQLHSWGHGCGHCPACELRARGYANYRAGAA

SEQ ID NO: 41868 - protein, 256 aa, Roseateles depolymerans
  REGION 1..256: note = tr|A0A0U3MX77|A0A0U3MX77_9BURK 7-cyano-7-deazaguanine synthase OS=Roseateles depolymerans; OX = 76731 GN=queC PE=3 SV=1
MSDHSPASSLPSPLPPAVNASSRKALVLFSGGQDSTACLAWALDRFAEVETLGFDYGQRHRIELDCRQVVRQRIREQFPAWAGKLGEDHLLDLSLLGQISDTALTQERAIELQANGLPNTFVPGRNLLFLTFAATLAYRRGASVLVGGMCETDFSGYPDCRDNTLKALQVALSLGLDTPMTLETPLMFLTKAQTWALTEGLGGAPLNELIIEHTHTCYLGQRETRHAWGWGCGQCPACELRARGYQEFVQARAGGR

SEQ ID NO: 41869 - protein, 251 aa, Roseateles sp.
  REGION 1..251: note = tr|A0A1H7P8V0|A0A1H7P8V0_9BURK 7-cyano-7-deazaguanine synthase OS=Roseateles sp. YR242; OX = 1855305 GN=queC PE=3 SV=1
MSDASLPLTPPNAVIASSRKAVVLFSGGQDSTACLAWALDRFAEVETLGFDYGQRHRIELDCRQTVRQQITAQFPQWAGKLGEDHLLDLSLLGQISDTALTQERAIELQANGLPNTFVPGRNLLFLTFAATLAYRRGASVLVGGMCETDFSGYPDCRDNTLKALQVALSLGLDAPMTVETPLMFITKAQTWALTEALGGTPLNELIIEHTHTCYLGQRETRHAWGWGCGQCPACELRAKGYEAFMQAKARG

SEQ ID NO: 41870 - protein, 214 aa, Roseburia hominis
  REGION 1..214: note = tr|A0A395V5F7|A0A395V5F7_9FIRM 7-cyano-7-deazaguanine synthase OS=Roseburia hominis; OX = 301301 GN=DWX93_10745 PE=3 SV=1
MENNFDCLLLASGGMDSTVLAYKLAKENKNVVILFIDYGQHCKDKEYQTLLQVLPEEYVDNVRVIKIGDVYKESNSRMIIEANLWEDNVVAEDMYLPYRNILFISLASAYAQSMGIKDVYTAFINSNHAKEIDCSMEFFTKLESLLYEYGSIRINMPFREMTKTEVAKLGLELNAPIEITYSCQVNSDMPCGACPNCVDRINAINNILEEKING

SEQ ID NO: 41871 - protein, 227 aa, Roseburia sp.
  REGION 1..227: note = tr|A0A1Q6U164|A0A1Q6U164_9FIRM 7-cyano-7-deazaguanine synthase OS=Roseburia sp. CAG:197_41_10 OX=1897018 GN=queC PE=3 SV=1
MKAMVLFSGGIDSTTCLGMAIEKYGAQNVIALSISYGQKHTKEIEASDKIVKYYNVKHIYLDLEKIFQYSDCSLLSHSDKEIPKEAYSEQIKNTNGSPVSTYVPFRNGLFLSSAASIALSLGCSEIYYGAHADDAAGSAYPDCSSAFNNAINEAIYLGSGKQIKIVAPFIASTKDQVVKEGLKLNVPYKYTWSCYEGGEKPCGKCGTCIDRARAFELNGIKDPAMEV

SEQ ID NO: 41872 - protein, 228 aa, Roseburia sp.
  REGION 1..228: note = tr|R5TGZ1|R5TGZ1_9FIRM 7-cyano-7-deazaguanine synthase OS=Roseburia sp. CAG:50 OX=1262949 GN=queC PE=3; SV = 1
MAEKALVLFSGGVDSTTCLGLAIERYGKENVIALSVSYGQKHEKEIEASKKIAQHYGVEHLYLDLGAIFQYSNCSLLSHSTEEIPEEAYAEQLTKTDGKPVSTYVPFRNGLFLSSAASIALSKDCNVIFYGAHSDDAAGSAYPDCSDAFNQAMKDAIYLGSGNQVTIEAPFVNWTKADVVKKGLELNVPYELTWSCYEGGEKPCGKCGTCIDRAAAFEKNGVKDPALD

SEQ ID NO: 41873 - protein, 73 aa, unidentified
  source 1..73: note = Roseibaca calidilacus
  REGION 1..73: note = tr|A0A0P7WW52|A0A0P7WW52_9RHOB 7-cyano-7-deazaguanine synthase OS=Roseibaca calidilacus; OX = 1666912 GN=queC PE=3 SV=1
MKTVVICSGGLDSVSLAHILAQDGKLTRLLSFDYGQRHRKELGYAALCAQRLNVPHDIIDLRSIGAALTGSSL

SEQ ID NO: 41874 - protein, 234 aa, Roseibacillus sp.
  REGION 1..234: note = tr|A0A2E7AIA8|A0A2E7AIA8_9BACT 7-cyano-7-deazaguanine synthase OS=Roseibacillus sp.; OX = 2024856 GN=queC PE=3 SV=1
MKSGQKVAVLVSGGMDSVVALYEANREHEVVVALSFDYGSKHNHREIPFAREHAESLGVPHEVIDLGFMNEHFRSDLLQSGGEIPEGHYEEETMKATVVPFRNGIMLAIAAGLAESRGAEGLVIAAHSGDHAIYPDCRGEFMEAMGEAIQLGTYETMSLLRPFIALRKEDIAARGAELGVDFSRTWSCYKGGEIHCGKCGTCVERREAFAVAGISDPTEYLEAGALPVKGAGEE

SEQ ID NO: 41875 - protein, 236 aa, Roseibacillus sp.
  REGION 1..236: note = tr|A0A2E5D9W0|A0A2E5D9W0_9BACT 7-cyano-7-deazaguanine synthase OS=Roseibacillus sp.; OX = 2024856 GN=queC PE=3 SV=1
MKSGQKVAVLVSGGMDSVVALYEAHREHEVVVALSFDYGSKHNHREIPFAREHAESLGVPHEVIDLGFMNEHFRSDLLQSGGEIPEGHYEEETMKATVVPFRNGIMLAIAAGLAESRGAEGLVIAAHSGDHAIYPDCRGEFMEAMGEAIQQGTYETVNLLRPFIALRKEDIAARGAELGVDFSRTWSCYKGGEIHCGKCGTCVERREAFEIAGLSDVTEYHGTGLLQVKEEGETSC

SEQ ID NO: 41876 - protein, 229 aa, Roseibium hamelinense
  REGION 1..229: note = tr|A0A562SLL4|A0A562SLL4_9RHOB 7-cyano-7-deazaguanine synthase OS=Roseibium hamelinense; OX = 150831 GN=queC PE=3 SV=1
MKTLVICSGGMDSVTLAHKVAREHELIGLVSFDYGQRHKKELDFARACADDLETEHVLIDIAHIGAQLTGSALTDDVEVPDGHYAEESMRITVVPNRNAIMLTIAYGIASARGAEAVATAVHGGDHFIYPDCRPAFTESFETMQRHALDGLGEVKLYTPYVHKPKDAIAAEGLKLGVDYRKTWSCYKGGAIHCGRCGTCVERREAFHLAGGIDPTDYADSDFWKAACDV

SEQ ID NO: 41877 - protein, 229 aa, Roseibium sp.
  REGION 1..229: note = tr|E2CGX9|E2CGX9_9RHOB 7-cyano-7-deazaguanine synthase OS=Roseibium sp. TrichSKD4 OX=744980 GN=queC PE=3; SV = 1
MKTLVVCSGGMDSVTLAHKVQRENQLIALLSFDYGQRHRKELDCAKQCADDLGVEHILIDISGIGAKLSGSALTDDIDVPDGHYAEDTMKITVVPNRNAIMLTIAFGIAAARGANAVAAAVHGGDHFIYPDCRPGFVEAFETMQRHALEGMNDIRLYTPFVHLSKGDIAAESARLGVDHRTSWSCYKGENLHCGRCGTCVERREAFHLAQVPDPTPYEDPDFWKETCNV

SEQ ID NO: 41878 - protein, 247 aa, unidentified
  source 1..247: note = Roseimaritima ulvae
  REGION 1..247: note = tr|A0A5B9QYA4|A0A5B9QYA4_9PLAN 7-cyano-7-deazaguanine synthase OS=Roseimaritima ulvae; OX = 980254 GN=queC PE=3 SV=1
MSAKAERRPAVVLLSGGLDSATCLAIANHEGFAVHAISFRYGQRHQYELDCARTLSQQLGAVSHRVVDINLAQFGGSALTDDAIDVPKSDSVDALAGGIPVTYVPARNTVFLSLALALAETLDCRDLFVGVNALDYSGYPDCRPEFIEAFERMANLATRIGVEQPGAIRIHAPLLHWTKAQIIAKGVELGVDYAATNSCYDPGEQGTPCGRCDACLLRSKGFEENGLVDPGAGDKETRRQGDKETRR

SEQ ID NO: 41879 - protein, 228 aa, unidentified
  source 1..228: note = Roseimicrobium gellanilyticum
  REGION 1..228: note = tr|A0A366HIX5|A0A366HIX5_9BACT 7-cyano-7-deazaguanine synthase OS=Roseimicrobium gellanilyticum OX=748857 GN=queC PE=3 SV=1
MSTLVLLSGGMDSVTALYWAAKEKGVLAAVSFDYGSKHNAKEIPMAEWHAAQLGVKHDVIHLDFINRHFTSDLLQSGGEIPDGHYEEASMKRTVVPFRNGIMLSIACGLAESHGAEALVIAAHSGDHAIYPDCREPFMQAMADAMRSGTYVGIHLLRPFIDCDKAEIVRRGVKLGIDYAKTWSCYKGGNIHCGTCGTCVERREAFINAGVPDPTEYLSTEALPHRPGG

SEQ ID NO: 41880 - protein, 233 aa, Roseinatronobacter monicus
  REGION 1..233: note = tr|A0A543KBD3|A0A543KBD3_9RHOB 7-cyano-7-deazaguanine synthase OS=Roseinatronobacter monicus OX=393481 GN=queC PE=3 SV=1
MRTNLICSGGLDSVSLAHILADQGVLKRLTSFDYGQRHRKELDYAQACAERLGVAHHVIDMRSIGAALTGSALTDDIAVPDGHYAEDTMKVTVVPNRNAIMLSIAYGISAAQDDDTVATAVHGGDHFIYPDCRPLFTQAFDAMQRAALDGYADIALHTPFVNRSKADIVREGARVDTPFAQTWSCYKGGAQHCGRCGTCVERREAFHLAGIPDLTAYEDPEFWRQAIGRREAV

SEQ ID NO: 41881 - protein, 233 aa, Roseinatronobacter thiooxidans
  REGION 1..233: note = tr|A0A2W7Q128|A0A2W7Q128_9RHOB 7-cyano-7-deazaguanine synthase OS=Roseinatronobacter thiooxidans OX=121821 GN=queC PE=3 SV=1
MKTNVICSGGLDSVSLAHILARQGALARLTSFDYGQRHRKELDYAQACATRLCVPHHVIDMRAVGAALTGSALTDDIAVPDGHYAEDTMKITVVPNRNAIMLSIAYGISAAQGDDAVATAVHGGDHFIYPDCRPQFTQAFDAMQRAALDGYAQIALHTPFVHRSKADIVRDGARVDTPFAQTWSCYKGGAQHCGRCGTCVERREAFDLAGIPDPTPYEDPTFWKQAIASREAI

SEQ ID NO: 41882 - protein, 600 aa, Roseisalinus antarcticus
  REGION 1..600: note = tr|A0A1Y5TYV0|A0A1Y5TYV0_9RHOB 7-cyano-7-deazaguanine synthase OS=Roseisalinus antarcticus OX=254357 GN=queC PE=3 SV=1
MNVHGPSKNVNLRIDYISRTMLSNLPDLLIDLLEVAAYVYCADQRLVRGSEQLSKFGENWRRSLRFSIPVRELEVWQDPEVQDALIDTLGFLSDDSYTFDFRQAETPVQPKELYFQDLIDPADEHDEVALFSGGVDSFAGAVTDLVANGRSLTLVGHYSSTKVRSVQEGLIAELKRKGFDRRLSYVPVWVSNEGVRAREFTQRTRSFLFACLGFVVARMSGKDSFSFYENGVVSINLPLAGDVVGGRATRTTHPKVLRGLEHLFSLLLDRQIQIHTPLQWLTKTEVTEKIAAAGMVDLLSQTVSCTRPRKWTEGQKHCGVCSQCIDRRFGILAAGLGEHEPPARYMHDLLLDDRSGGDDLRMALAYVSLFKRISTTTKARFLVDFPEIVSAVGHFPGVPTAEAGDRLFDLFQRHANSVEDVISSALREYSTALFRNELPAASLLVACNNRGHVEVAPPSTYDADMKAFMDRLSVAPLEFAFDDDQERVYFKGAMALEGANFKLVAALIEAFRTAKKRRSEVPYRSAPDLAQCLGISDQSMRQQLKRLREAIEPLNVSLGIPMDQDSFIQTKERAGYRINPQCCEISVADITGSISSASTD

SEQ ID NO: 41883 - protein, 231 aa, unidentified
  source 1..231: note = Rosenbergiella nectarea
  REGION 1..231: note = tr|A0A1H9IHQ1|A0A1H9IHQ1_9ENTR 7-cyano-7-deazaguanine synthase OS=Rosenbergiella nectarea; OX = 988801 GN=queC PE=3 SV=1
MKKAVVVFSGGQDSTTCLVQAIQHYDEVHCITFDYGQRHQQEIDIAKQLTERLGVAAHKVMDVTLLNELAISSLTQDNIPVPGYQPDATGLPSTFVPGRNILFLTLASIYAYQVEAEAVITGVCETDFSGYPDCRDEFVKALNQAVVLGMAKDVRYETPLMWLNKAETWALADYWGQLPLIKDHTLTCYNGIAGSGCGECAACHLRARGLEEYLNAPEETLQHLKQKNQLS

SEQ ID NO: 41884 - protein, 230 aa, Roseobacter sp.
  REGION 1..230: note = tr|A6FW25|A6FW25_9RHOB 7-cyano-7-deazaguanine synthase OS=Roseobacter sp. AzwK-3b OX=351016 GN=queC PE=3; SV = 1
MKTIVICSGGLDSVSLAHKVAAEHELAGLLSFDYGQRHAKELDFAARCAERLGVAHRVVDLRAVGAALTGSALTDDLDVPDGHYAEETMKITVVPNRNAIMLAVGFGMAAAQKADAVATAVHGGDHFIYPDCRPDFIAAFQAMEDHALDGVAKVQLYTPFVTGSKADIVTEGARHGTPFEDTWSCYKGGEVHCGRCGTCVERREAFHLAGIADPTVYADADFWRATVGVK

SEQ ID NO: 41885 - protein, 235 aa, Roseobacter sp.
  REGION 1..235: note = tr|A0A2E9YTM6|A0A2E9YTM6_9RHOB 7-cyano-7-deazaguanine synthase OS=Roseobacter sp.; OX = 1907202 GN=queC PE=3 SV=1
MKTIVVCSGGLDSVSLAHMVANENQLTRLVSFDYGQRHRKELDFAAACAERLGVPHDIIDLRAIGSALAGSALTDDIDVPDGHYAEESMRVTVVPNRNAIMLTIAFGVAAVHGDQAVATAVHGGDHFIYPDCRPGFVQAFEKMQKAAFEGYAEATLYTPFVTRTKADIVIAGQRHNTPFAETWSCYKGGELHCGRCGTCVERREAFHLAGIDDPTVYEDADFWSEAIAAKDAPHV

SEQ ID NO: 41886 - protein, 235 aa, Roseococcus sp.
  REGION 1..235: note = tr|A0A4R0YG24|A0A4R0YG24_9PROT 7-cyano-7-deazaguanine synthase OS=Roseococcus sp. SYP-B2431 OX=2496640 GN=queC PE=3 SV=1
MGRGKVAGMTNGALVLLSGGQDSATCLAWALDRFDHVETLGFDYRQRHAVELDCRAALREGMASPRLGPDHTIDLGVLGQISETALTRDTEIALREDGLPNTFIPGRNLIFLTFAAALAYRRGLKHIVGGMCETDYSGYPDCRDDTIKALQAAINLGMNTRLVLHTPLMWLDKAGTWRLAESLGGPRLVELIRTESHSCYKGERSKLRPWGFGCGSCPACELRAAGWAAYAARAA

SEQ ID NO: 41887 - protein, 648 aa, Roseococcus sp.
  REGION 1..648: note = tr|A0A4R0Y934|A0A4R0Y934_9PROT Uncharacterized protein OS=Roseococcus sp. SYP-B2431 OX=2496640; GN = EJV46_07840 PE=4 SV=1
MRELRLLCGGARSSGRKGPEMALDIGIRGAGRGAFAMTLHQVSRQMLANLPDRLWDLLSIASYIHLADRMVPRDGPSMPNLGENWRRTLSFVIAVRDPDFWNLPDVRESLRKTIGFLSGDRYQFEFVELAGAPAWQPFLDIAGSGAAPAFQPAEVILFSGGLDSLAGAVDALLVKRRKAALVSYQSAPMVQAIQSRLVEALRSRAGPDRLVHIGLGLTNAGEMVEPTQRTRSFLFAVLGLLVARLHGLREVCFYENGVVSTNLPLASHVLGTRATRTTHPKVLELYGRLFSRVAEADIRIRNPFFWDTKADVVRRIAEGGCGELIQPSFSCGSTRGAAMTKGRHCGVCTQCLDRRFGILAADCGHLEPASNYAVDLMRGPRKPGIEAVTAEAYVLAAHTWRQSTQEHFLGAHGEAFRLLPHLGLRTDEAAARLHRLHVRHGQNVMRIVTETARTDDVLGERLDLPDHSLLAMIQGPLAQDVQIRDPAENEATPERQAADRKIKELPRPITLWLDMHRREARIGNVAVLQRKHFELVRKLLPKFQDGIRAQRGSPGFSFMGTKQLADAMGVTEATTRQLVRALRLKIAEQFHQQLGIAPAPDDVIESVSWAGYRLNPALALVGSHESDQCRSSDLTTPSRASRLSHPAP

SEQ ID NO: 41888 - protein, 229 aa, Roseomonas aestuarii
  REGION 1..229: note = tr|A0A2U1V950|A0A2U1V950_9PROT 7-cyano-7-deazaguanine synthase OS=Roseomonas aestuarii; OX = 568898 GN=queC PE=3 SV=1
MDEGALVLFSGGQDSATCLAWALDRFPRVETLGFDYGQRHRVELECRAAFREALPAAWQARLGPDHTLALDALGAVSDTALTRETEIAMQADGLPNTFVPGRNLVFLTFAAALAYRRGLRHIVGGMCETDFSGYPDCRDDTIKAMQVALNLGMQRRFVLHTPLMWLSKAETWELAEKLGGQPLVEDIVERTHTCYRGERGARHPWGHGCAACPACELRARGWAEYQSRR

SEQ ID NO: 41889 - protein, 248 aa, Roseomonas cervicalis
  REGION 1..248: note = tr|D5RRW2|D5RRW2_9PROT 7-cyano-7-deazaguanine synthase OS=Roseomonas cervicalis ATCC 49957 OX=525371; GN = exsB PE=3 SV=1
MQDSITPQITPDGLLGRHTAEDGALVLFSGGQDSATCLAWALTRFARVETLGFDYGQRHRIELECRAGFRDGLPEDWQARLGPDHTLRLDALGELSDTALTRETEIAMQADGLPNTFVPGRNLLFLTFAAALAYRRGLRHIVGGMCETDFSGYPDCRDDTLKALQVALNLGMERRFVLHTPLMWLDKGETWELAERLGGQKLVCDIVEKTHTCYRGERGERHPWGHGCAACPACELRARGWAEYRSRR

SEQ ID NO: 41890 - protein, 244 aa, unidentified
  source 1..244: note = Roseomonas deserti
  REGION 1..244: note = tr|A0A1V2GWJ8|A0A1V2GWJ8_9PROT 7-cyano-7-deazaguanine synthase OS=Roseomonas deserti; OX = 1817963 GN=queC PE=3 SV=1
MTEKALVLFSGGQDSATCLAWALSRFDHVETLGFDYGQRHRIELECRDDFRRTLPADWQAKLGPDHTLALDALKEISDTALTRETEIAMREDGLPNTFVPGRNIVFLTFAAALAYRRGLRHVVGGMCETDYSGYPDCRDDTIKALQVALNLGMAQRFVLHTPLMWLDKAQTWELAEQLGGRKLVCDIVEKTHTCYKGERGELHPWGHGCGACPACELRARGWAEYETRAHARMHPPRNGKLADD

SEQ ID NO: 41891 - protein, 239 aa, Roseomonas gilardii
  REGION 1..239: note = tr|A0A1L7ADQ3|A0A1L7ADQ3_9PROT 7-cyano-7-deazaguanine synthase OS=Roseomonas gilardii; OX = 257708 GN=queC PE=3 SV=1
MTDNLSGDGALVLFSGGQDSATCLAWALDRFAHVETLGFDYGQRHRVELECRDTFRRLLAERFPHWAAKLGPDHTLPLEALSQVSDTAMTAEIAIRMREDGLPNTFVPGRNLLFVTFAAALAYRRGLRHLVGGMCETDYSGYPDCRDDTLKALQVAINLGMERRFVLHTPLMWRDKPATWRLARDLGGQELVEMILEDSHTCYLGDRTHRHPWGYGCGTCPACELRARGWAGFVAQPVD

SEQ ID NO: 41892 - protein, 239 aa, Roseomonas gilardii
  REGION 1..239: note = tr|A0A379NBI7|A0A379NBI7_9PROT 7-cyano-7-deazaguanine synthase OS=Roseomonas gilardii subsp. rosea OX=243956 GN=queC PE=3 SV=1
MTDNLSGDGALVLFSGGQDSATCLAWALDRFAHVETLGFDYGQRHRVELECRDTFRRRLAERFPHWAAKLGPDHTLPLEALSQVSDTAMTAEIAIRMREDGLPNTFVPGRNLLFVTFAAALAYRRGLRHLVGGMCETDYSGYPDCRDDTLKALQVAINLGMERRFVLHTPLMWRDKPATWRLARDLGEQALVEMILEDSHTCYLGDRTHRHPWGYGCGTCPACELRARGWEGFVARPAG

SEQ ID NO: 41893 - protein, 239 aa, Roseomonas mucosa
  REGION 1..239: note = tr|A0A4Y1MXK7|A0A4Y1MXK7_9PROT 7-cyano-7-deazaguanine synthase OS=Roseomonas mucosa; OX = 207340 GN=queC PE=3 SV=1
MTDNLSGDGALVLFSGGQDSATCLAWALDRFAHVETLGFDYGQRHRVELECRDTFRRRLAERFPHWAAKLGPDHTLPLEALSQVSDTAMTAEIAIRMREDGLPNTFVPGRNLLFVTFAAALAYRRGLRHLVGGMCETDYSGYPDCRDDTVKALQVAINLGMERRFVLHTPLMWRDKPATWRLAHDLGGQALVEMIVEDSHTCYLGDRTHRHRWGYGCGTCPACELRARGWEGFVAQPLG

SEQ ID NO: 41894 - protein, 239 aa, Roseomonas mucosa
  REGION 1..239: note = tr|A0A1S8D684|A0A1S8D684_9PROT 7-cyano-7-deazaguanine synthase OS=Roseomonas mucosa; OX = 207340 GN=queC PE=3 SV=1
MTDNLSGDGALVLFSGGQDSATCLAWALDRFAHVETLGFDYGQRHRVELECRDTFRRRLAERFPHWAAKLGPDHTLPLEALSQVSDTAMTAEIAIRMREDGLPNTFVPGRNLLFVTFAAALAYRRGLRHLVGGMCETDYSGYPDCRDDTLKALQVAINLGMERRFVLHTPLMWRDKPATWRLAHDLGGQALVEMIVEDSHTCYLGDRTHRHRWGYGCGTCPACELRARGWEGFVAQPLG

SEQ ID NO: 41895 - protein, 244 aa, unidentified
  source 1..244: note = Roseomonas nepalensis
  REGION 1..244: note = tr|A0A502G4I9|A0A502G4I9_9PROT 7-cyano-7-deazaguanine synthase OS=Roseomonas nepalensis; OX = 1854500 GN=queC PE=3 SV=1
MTDTANDGALVLLSGGQDSTTCLAWALDRFPRVETLGFDYGQRHRVELDRRPALRRGLAALNPAWAARLGEDHSLALDALGALSDTALTRDTEIAMREDGLPNTFVPGRNLLFLTFAAALAYRRGLRHLVGGMCETDFSGYPDCRDDTIKALQVALNLGMDRRFVLHTPLMWIDKAETWRLARRLGGDPLVRLVVEETHTCYRGERGAMHPWGHGCGTCPACELRAAGWRGFVAEGVEEAPRGG

SEQ ID NO: 41896 - protein, 189 aa, unidentified
  source 1..189: note = Roseomonas nepalensis
  REGION 1..189: note = tr|A0A502FIN9|A0A502FIN9_9PROT 7-cyano-7-deazaguanine synthase OS=Roseomonas nepalensis; OX = 1854500 GN=EAH89_21460 PE=3 SV=1
MSAPPTSAGTAIVLLSGGLDSAACAHLLQQAGHSVTGLFLSYGQQAAGPERYAAQKIARHLGISLCKLTLSSGSRFGAGELTGRNAMFVLAALFFGRIAGGSIVLGIHAGTPYYDCSPAFAGAMDRLVAEHTDGRVRVLTPLLDWSKADVLAYCRDASIPISKTYSCEAGAVPPCGTCASCRDRAILGC

SEQ ID NO: 41897 - protein, 233 aa, unidentified
  source 1..233: note = Roseomonas oryzae
  REGION 1..233: note = tr|A0A5B2TF46|A0A5B2TF46_9PROT 7-cyano-7-deazaguanine synthase OS=Roseomonas oryzae; OX = 1608942 GN=queC PE=3 SV=1
MDDGALVLFSGGQDSATCLAWALNRFGRVETLGFDYGQRHRVELDCRAEFRAGLKPEWQARLGPDHTLALDALGAVSDTALTRETEISMGESGLPNTFVPGRNIVFLTFAAALAYRRGLRHIVGGMCETDYSGYPDCRDDTIKALQVALNLGIDPGEKKRFVLHTPLMWLDKAQTWKLAEDLGGPALVADIAEKTHTCYLGERGTRHEWGHGCGTCPACALRARGWMAYRSGC

SEQ ID NO: 41898 - protein, 229 aa, unidentified
  source 1..229: note = Roseomonas rhizosphaerae
  REGION 1..229: note = tr|A0A2C7ACZ4|A0A2C7ACZ4_9PROT 7-cyano-7-deazaguanine synthase OS=Roseomonas rhizosphaerae OX=1335062 GN=queC PE=3 SV=1
MDEGALVLFSGGQDSATCLAWALDRFPHVETLGFDYGQRHRVELECRAAFRATLPAAWQARLGPDHTLALDALGAVSDTALTRETEIAMREDGLPNTFVPGRNIVFLTFAAALAYRRGLRHIVGGMCETDFSGYPDCRDDTIKALQVALNLGMERRFVLHTPLMWLDKAQTWELAERLGGRKLVAEIVEQTHTCYRGERGARHPWGHGCAACPACELRAKGWAEYQSRR

SEQ ID NO: 41899 - protein, 238 aa, unidentified
  source 1..238: note = Roseomonas rosea
  REGION 1..238: note = tr|A0A1M6NVF7|A0A1M6NVF7_9PROT 7-cyano-7-deazaguanine synthase OS=Roseomonas rosea; OX = 198092 GN=queC PE=3 SV=1
MQDEGALVLFSGGQDSTTCLAWALERFGRVETVGFDYGQRHRIELECRRTVAEGLGALKPEWAARLGEDHMVDLASLGAISETSLTRDVAIEMETGGLPNTFVPGRNLLFLTFAAALAYRRGLRHIIAGVCETDYSGYPDCRDDTIKALQVALNLGMERRFVLHTPLMWIDKAETWRLSQRLGGEALVRLIVEDTHTCYRGERGPMHPWGHGCGTCPACELRAEGWRGFAEGGASRPV

SEQ ID NO: 41900 - protein, 239 aa, Roseomonas sp.; identical to SEQ ID NO: 41894
  REGION 1..239: note = tr|A0A1Q2YZE2|A0A1Q2YZE2_9PROT 7-cyano-7-deazaguanine synthase OS=Roseomonas sp. TAS13; OX = 1926319 GN=queC PE=3 SV=1

SEQ ID NO: 41901 - protein, 232 aa, Roseomonas sp.
  REGION 1..232: note = tr|A0A3A9JCV1|A0A3A9JCV1_9PROT 7-cyano-7-deazaguanine synthase OS=Roseomonas sp. Z24; OX = 2382222 GN=queC PE=3 SV=1
MSDGALVLFSGGQDSATCLAWALERFSHVETMGFDYGQRHKVELECRAAFRTDIATHFPHWAPKLGEDHSLKLDALAAVSDTALTRQTEIAMQENGLPNTFVPGRNLIFLTFAAALAYRRGLRHIVTGVCETDFSGYPDCRDDTIKALQVALNLGMEQRFVLHTPLMWIDKAETWRLAEGLGGTVLVDSIVEDTHTCYLGDRAHRHPWGYGCGTCPACELRAKGYREYRACT

SEQ ID NO: 41902 - protein, 270 aa, Roseomonas stagni
  REGION 1..270: note = tr|A0A1I4CA94|A0A1I4CA94_9PROT 7-cyano-7-deazaguanine synthase OS=Roseomonas stagni DSM 19981 OX=1123062 GN=queC PE=3 SV=1
MIPSVAGAASRPPAAGEAANAARRQSGEPSARSARPAIEGERSDKALVLFSGGQDSATCLAWALDRYAAVETLGFDYGQRHVVELETRAAFRAHVAAHPVWGGRLGADHIIKIDALGAISETSLTRDVAIEMETGGLPNTFVPGRNLIFLTFAAALAFRRGLKHIVTGVCETDYSGYPDCRDDTIKALQVALNLGMEKRFVLHTPLMWRDKAATWQLAQELGGDGLVEAIRTITHSCYLGDRTPHEWGAGCGHCPACDLRERGWRKWKAA

SEQ ID NO: 41903 - protein, 230 aa, Roseovarius aestuarii
  REGION 1..230: note = tr|A0A1X7BMY5|A0A1X7BMY5_9RHOB 7-cyano-7-deazaguanine synthase OS=Roseovarius aestuarii; OX = 475083 GN=queC PE=3 SV=1
MKTLVICSGGLDSVSLAHLVAAEHTLVGLISFDYGQRHRKEVEFAARAANRLGVPHDLIDMRHIGRHLSGSALTDDLDVPDGHYAEDNMKVTVVPNRNAIMLAIAFGMAAAKGADAVAAAVHGGDHFIYPDCRPDFIDAFQAMQDKALDGYASVQLFTPFVHVPKSAIVTAGAKHGTPFADTWSCYKGGDLHCGRCGTCVERREAFDIAGVKDPTAYADPDFWKSAVEAH

SEQ ID NO: 41904 - protein, 231 aa, unidentified
  source 1..231: note = Roseovarius albus
  REGION 1..231: note = tr|A0A1X6ZH92|A0A1X6ZH92_9RHOB 7-cyano-7-deazaguanine synthase OS=Roseovarius albus; OX = 1247867 GN=queC PE=3 SV=1
MKTIVICSGGLDSVSLAHRVAAEHELCGLLSFDYGQRHAKEVEFAADCAKRLGVPHKVVDIRSIGAALSGSALTDDIDVPDGHYAEETMKITVVPNRNAIMLAIGFGMAAAQQADAVAVAVHGGDHFIYPDCRPGFINAFQAMQTEALDGYADVQLYAPYVNISKAQIVEDGVKHNTPFGATWSCYKGGDRHCGRCGTCVERREAFHLAGVADPTEYADPDFWQTAVEGAQ

SEQ ID NO: 41905 - protein, 230 aa, unidentified
  source 1..230: note = Roseovarius atlanticus
  REGION 1..230: note = tr|A0A0T5NTJ2|A0A0T5NTJ2_9RHOB 7-cyano-7-deazaguanine synthase OS=Roseovarius atlanticus; OX = 1641875 GN=queC PE=3 SV=1
MDTIVICSGGLDSVSLAHKVAGEGTLRGLLSFDYGQRHVKEVEFAAACAKRLGVPHKIVDISGVGAALSGSALTDDVEVPDGHYAEETMKITIVPNRNAIMLTIAFGMAAAEKADAVAAAVHGGDHFIYPDCRPGFVEAFQAMQDKALEGVAEVRLYTPFLTGSKADIVTEGAKWGTPFAETWSCYKGGDVHCGRCGTCVERREAFHLAGVDDPTDYVDAQFWKAATGVA

SEQ ID NO: 41906 - protein, 613 aa, unidentified
  source 1..613: note = Roseovarius atlanticus
  REGION 1..613: note = tr|A0A0T5NXP9|A0A0T5NXP9_9RHOB Uncharacterized protein OS=Roseovarius atlanticus OX=1641875 GN=XM53_06690; PE = 4 SV=1
MTPPEHHIRCLAPLTKSGGDEEVRLEIDDKPVGVRLRIGRLNEQLVAGLPDRAFDLLEIAAVVYGADAAVSRGGPVDQQMGRKWHRRFIVDMPVRDRDFWARDDVTRLLEETLMFLSGDRFEFGFSQKRYPEAERSKFFKFDAESSWKADRVLMFSGGLDSFAGALEEIAEQRQRVALVSHFSASKIAPVQRNLHKALIGKFGGDFCRHVPVQVQMKGRSLKEGTHRSRSFLFAVLGAITAQAFEQNRVSFHENGVVSLNLPPVNNVVGTRATRTTHPQTLTRFTGFFAKVFEKGMRIDNPLFWRTKTDVVKAISRLGMNDHIAHTRSCADVHNQTKQHVHCGRCSQCIDRRFAMLAAGLTQFDPEEAYKVALMDDARNGAIDREVALSYVRNAQVFEHMTPEVLERTFPAVLDAVGHLDYPPATALTMIADLLNRHGASVSGVMHNTFDSRDADSFPEGSLPRLYGDVQRQALLAAIPDQAAPPDPPMPHPFILEVDTRRRRITIDDRVTFERNATASLLIELATLWLTGVGQGLPPLDYPFLQAAQLAQHLELASDEALRRRVMRARSYLRQRFASSGLDEALGGELIENNPWQGYRLAPDRVIVRKIEQD

SEQ ID NO: 41907 - protein, 232 aa, unidentified
  source 1..232: note = Roseovarius azorensis
  REGION 1..232: note = tr|A0A1H7WJB0|A0A1H7WJB0_9RHOB 7-cyano-7-deazaguanine synthase OS=Roseovarius azorensis; OX = 1287727 GN=queC PE=3 SV=1
MKTIVICSGGLDSVSLAHRVAAEHVLMGLLSFDYGQRHAKELEFAAACAQRLGVAHRVVDIRQIGAALSGSALTDDVAVPDGHYAEETMRITVVPNRNAIMLAIAFGMAAAEKADAVATAVHGGDHFIYPDCRPGFIEAFQAMQDRALEGYAEVKLYTPYVEGSKADIVRDGARHGTPFAETWSCYKGGARHCGRCGTCVERREAFHLAGVVDPTVYEDRDFWLTAVAGRGA

SEQ ID NO: 41908 - protein, 232 aa, unidentified
  source 1..232: note = Roseovarius gaetbuli
  REGION 1..232: note = tr|A0A1X6YEY7|A0A1X6YEY7_9RHOB 7-cyano-7-deazaguanine synthase OS=Roseovarius gaetbuli; OX = 1356575 GN=queC PE=3 SV=1
MDTIVICSGGLDSVSLAHKVAAEHTLKGLLSFDYGQRHSKELGFAAACATRLGVPHSVVDIRAIGAALGGSALTDDIAVPDGHYAEETMKATIVPNRNAIMLSIGFGMAAAQKVDAVATAVHGGDHFIYPDCRPGFIDAFQAMQDRALEGYADIRLYTPYVTGSKADIVTDGAAHGTPFGETWSCYKGGANHCGRCGTCVERREAFHLAGVIDPTLYDDPDFWLTALAERGA

SEQ ID NO: 41909 - protein, 230 aa, Roseovarius halotolerans
  REGION 1..230: note = tr|A0A1X6YDT8|A0A1X6YDT8_9RHOB 7-cyano-7-deazaguanine synthase OS=Roseovarius halotolerans OX=505353 GN=queC PE=3 SV=1
MKTIVICSGGLDSVSLAHKVAAEQDLAGLLSFDYGQRHAKELDFARLCAERLGVMHRVVDLRGVGAALSGSALTDDVDVPDGHYAEETMKVTVVPNRNAIMLAVGFGMAAAEGADAVAVAVHGGDHFIYPDCRPGFIDAFQAMEARALEGVADVTLYAPFVNGSKADIVTEGARHGTPFAQTWSCYKGGEVHCGRCGTCVERREAFHLAGVADPTEYGDPDFWRETVGVA

SEQ ID NO: 41910 - protein, 230 aa, Roseovarius indicus
  REGION 1..230: note = tr|A0A0T5P313|A0A0T5P313_9RHOB 7-cyano-7-deazaguanine synthase OS=Roseovarius indicus; OX = 540747 GN=queC PE=3 SV=1
MDTIVICSGGLDSVSLAYKVAAEHRLRGLLSFDYGQRHVKEVEYAAACARKLGVPHKVVDISTVGAALSGSALTDDVDVPDGHYAEETMKITIVPNRNAIMLAIAFGMAAAEKADAVAAAVHGGDHFIYPDCRPGFIDAFQAMQNHALEGVAEVQLYTPFVTISKADIVSEGAKHGTPFAETWSCYKGGAVHCGRCGTCVERREAFDIAGVEDPTVYADPDYWREAVERA

SEQ ID NO: 41911 - protein, 206 aa, Roseovarius indicus
  REGION 1..206: note = tr|A0A0T5P4H7|A0A0T5P4H7_9RHOB 7-cyano-7-deazaguanine synthase OS=Roseovarius indicus; OX = 540747 GN=SAMN04488031_106104 PE=3 SV=1
MKKAVVMVSGGLDSTTVCYLLINEGTEVHPIFFDYGQHCAETEWAKVQEVLPQEAMPPERLNISDVFKGSPSRMIVEADLWKEAISDDDLYLPYRTMLFFAVAAARAQTLRILDVYSGFINSNHAKEIDCSTEFMNGLEELSRGVGAVRFHAPFREKAKVDVVRRALDLGVPIGRTFSCQASSSFPCGACPNCVERLNALVGAGLA

SEQ ID NO: 41912 - protein, 230 aa, unidentified
  source 1..230: note = Roseovarius litoreus
  REGION 1..230: note = tr|A0A1M7F4B5|A0A1M7F4B5_9RHOB 7-cyano-7-deazaguanine synthase OS=Roseovarius litoreus; OX = 1155722 GN=queC PE=3 SV=1
MKTIVICSGGLDSVSLAHKVAAEHELAGLLSFDYGQRHAKELDFAARCAERLGVAHRVVDLRAVGAALTGSALTDDLDVPDGHYAEETMKITVVPNRNAIMLAVGFGMAAAQKADAVATAVHGGDHFIYPDCRPDFIAAFQAMEDHALDGVAKVQLYTPFVTGSKADIVTEGARHGTPFEDTWSCYKGGEVHCGRCGTCVERREAFHLAGITDPTVYADADFWRATVGVE

SEQ ID NO: 41913 - protein, 232 aa, unidentified
  source 1..232: note = Roseovarius lutimaris
  REGION 1..232: note = tr|A0A1I5FE67|A0A1I5FE67_9RHOB 7-cyano-7-deazaguanine synthase OS=Roseovarius lutimaris; OX = 1005928 GN=queC PE=3 SV=1
MDTIVICSGGLDSVSLAHKVAAEHTLKGLLSFDYGQRHAKELGFAAACATRLGVPHEVIDIRAIGAALGGSALTDDIAVPDGHYAEESMKVTIVPNRNAIMLTIAFGMAAAQKVDAVATAVHGGDHFIYPDCRPGFIDAFQTMQDRALEGYADIRLYTPYVSGSKADIVTDGAAHGTPFAQTWSCYKGGTNHCGRCGTCVERREAFHSADVIDPTLYDDPDFWLTALAARGA

SEQ ID NO: 41914 - protein, 232 aa, unidentified
  source 1..232: note = Roseovarius marisflavi
  REGION 1..232: note = tr|A0A1M6VP17|A0A1M6VP17_9RHOB 7-cyano-7-deazaguanine synthase OS=Roseovarius marisflavi; OX = 1054996 GN=queC PE=3 SV=1
MDTIVICSGGLDSVSLAHKVAAEHTLKGLLSFDYGQRHSKELGFAAACATRLGVAHSIVDIRAIGAALGGSALTDDIAVPDGHYAEETMKATIVPNRNAIMLSIGFGMAAAQKVDAVATAVHGGDHFIYPDCRPGFIDAFQAMQDRALEGYADIRLYTPYVTGSKADIVTDGAAHGTPFGETWSCYKGGANHCGRCGTCVERREAFHLAGVIDPTLYDDPDFWLTALAERGA

SEQ ID NO: 41915 - protein, 232 aa, Roseovarius mucosus
  REGION 1..232: note = tr|A0A1V0RTR6|A0A1V0RTR6_9RHOB 7-cyano-7-deazaguanine synthase OS=Roseovarius mucosus; OX = 215743 GN=queC PE=3 SV=1
MRTIVICSGGLDSVSLAHKVAAEHELAGLLSFDYGQRHVKEVEYAAACARRLGVPHKVVDIRQIGAALSGSALTDDVAVPDGHYAEETMKITIVPNRNAIMLAIAFGMAAAEKADAVATAVHGGDHFIYPDCRPGFINAFQAMQDAALEGYAEVKLYTPYLQGSKGDIVTDGAKHGTPFAETWSCYKGGAKHCGRCGTCVERREAFHLAGVVDPTEYEDRDFWLAAVAGRGA

SEQ ID NO: 41916 - protein, 212 aa, Roseovarius mucosus
  REGION 1..212: note = tr|A0A0A0HR04|A0A0A0HR04_9RHOB 7-cyano-7-deazaguanine synthase OS=Roseovarius mucosus DSM 17069 OX=1288298 GN=queC PE=3 SV=1
MRTIVICSGGLDSVSLAHKVAAEHELAGLLSFDYGQRHVKEVEYAAACARRLGVPHKVVDIRQIGAALSGSALTDDVAVPDGHYAEETMKITIVPNRNAIMLAIAFGMAAAEKADAVATAVHGGDHFIYPDCRPGFIHAFQAMQDAALEGYAEVTLYTPYLNGSKGDIVADGAKHGTPFAETWSCYKGGARHCGRCGTCVERREAFHLAGGD

SEQ ID NO: 41917 - protein, 231 aa, Roseovarius nanhaiticus
  REGION 1..231: note = tr|A0A1N7FP76|A0A1N7FP76_9RHOB 7-cyano-7-deazaguanine synthase OS=Roseovarius nanhaiticus; OX = 573024 GN=queC PE=3 SV=1
MKVIVICSGGMDSVALAHRYAATGDLHALLSFNYGQRHAKELEFAALCAARLGVPHHVIDISAIGAALSGSALTDDIDVPDGHYAEETMKITVVPNRNAIMLTIAFGMAAAQKVDAVATAVHGGDHFIYPDCRPDFIAAFQAMEDRAMEGYADIRLLTPYVQGTKADIAIDGAKHGTPFAETWSCYKGGDLQCGRCGTCVERREAFHLASVEDPTTYADPDFWRNATGQEG

SEQ ID NO: 41918 - protein, 80 aa, Roseovarius nubinhibens
  REGION 1..80: note = tr|A0A348WIX7|A0A348WIX7_9RHOB 7-cyano-7-deazaguanine synthase (Fragment) OS=Roseovarius nubinhibens OX=314263 GN=DCS45_21830 PE=3 SV=1
VFLYTPFIDAPKSAIVTEGARHHTPFADTWSCYKGGDMHCGRCGTCVERREAFHLAGVADPTAYADPDFWEIAISRKAAC

SEQ ID NO: 41919 - protein, 108 aa, Roseovarius nubinhibens
  REGION 1..108: note = tr|A0A348WIX6|A0A348WIX6_9RHOB 7-cyano-7-deazaguanine synthase (Fragment) OS=Roseovarius nubinhibens OX=314263 GN=DCS45_21825 PE=3 SV=1
MKTLVICSGGLDSVSLAHKIAAEQTLTRLVSFDYGQRHRKELDFAARAADRLGVPFHLIDMRGIGAVLTGSALTDDVPVPDGHYTEASMAATVVPNRNAIMLSVAFGL

SEQ ID NO: 41920 - protein, 456 aa, Roseovarius pacificus
  REGION 1..456: note = tr|A0A1M7IPU8|A0A1M7IPU8_9RHOB Queuosine biosynthesis protein QueC OS=Roseovarius pacificus; OX = 337701 GN=SAMN05444398_11632 PE=4 SV=1
MIIDAPNPAISRKLSVEVVESDAKRASADHTLVLGRDIRFSTRDLESYANANWEPVVFDAMVVAAAVEYCDRSLRRSVREWARDFRLRLPVHEPDRWSTPEVLDALHDALGFLTGDRWHFTFVKRVHAEPSPRQQSLDLPPDAKATLAFSDGMDSRAVAGLVGADARQALVRVRLGTKRCDRPRRGQPFTGIPYKLGKSAPNPEPSARNRGFRFALVSGLASYICRAEQIIIPESGQGALGPVLVPVAHAYPDYRNHPAFLRRMERFLGALFGHSVEYTFPRIWHTKGQTLAAYLGLGIDHGEWKRTRSCWKGPQWSSVDGQYRQCGACAACMLRRLSVHAAGQTEAADTYIAADLSAPELEASVPATFRKANRSFREYAIAGVLHLDHLADLTREDGRPVLRRQALVLAEALGMSAVQTEQNLKAMIAEHAGEWRAFVASLGDGSFLHNWVRGSR

SEQ ID NO: 41921 - protein, 230 aa, Roseovarius pacificus
  REGION 1..230: note = tr|A0A1M7DG85|A0A1M7DG85_9RHOB 7-cyano-7-deazaguanine synthase OS=Roseovarius pacificus; OX = 337701 GN=queC PE=3 SV=1
MKTIVICSGGLDSVSLAHKVAAERELTGLLSFDYGQRHSKELEFAAACARRLDVPHHVIDLRSVGAALSGSALTDDVDVPDGHYAEDTMKVTVVPNRNAIMLAVGFGMAAAQGADAVAAAVHGGDHFIYPDCRPDFIDAFQTMEDKALDGVAEVDLYTPFVNIPKAGIVTEGARHGTPFGETWSCYKGGDVHCGRCGTCVERREAFHLAGVDDPTDYADPDFWRSATGVA

SEQ ID NO: 41922 - protein, 232 aa, Roseovarius sp.
  REGION 1..232: note = tr|A0A365TZF2|A0A365TZF2_9RHOB 7-cyano-7-deazaguanine synthase OS=Roseovarius sp. TE539; OX = 2249812 GN=queC PE=3 SV=1
MDTIVICSGGLDSVSLAHKVAAEQRLQAMLSFDYGQRHRKELDFAADCARRLGVTHEIVDISGVGKALSGSALTDDREVPDGHYEEESMKVTVVPNRNAIMLAIAFGIAAAREAEAVGAAVHGGDHFIYPDCRPAFIDAFQTMQDRALEGLTQPRLYTPYVDVSKADIVTDGARNGVPFARTWSCYKGGAIHCGRCGTCVERREAFDLAGLPDPTEYADPDFWRGVTGKADA

SEQ ID NO: 41923 - protein, 232 aa, Roseovarius sp.
  REGION 1..232: note = tr|A3W8B0|A3W8B0_9RHOB 7-cyano-7-deazaguanine synthase OS=Roseovarius sp. 217 OX=314264 GN=queC PE=3 SV=1
MRTIVICSGGLDSVSLAHKVAAEHELAGLLSFDYGQRHVKEVEYAAACARRLGVPHKVVDIRQIGAALSGSALTDDVAVPDGHYAEETMKITIVPNRNAIMLAIAFGMAAAEKADAVATAVHGGDHFIYPDCRPGFINAFQAMQDAALEGYAEVKLYTPYLQGSKGDIVTDGAKHGTPFAETWSCYKGGARHCGRCGTCVERREAFHLAGVVDPTDYEDRDFWLAAVAGRGA

SEQ ID NO: 41924 - protein, 232 aa, Roseovarius tolerans
  REGION 1..232: note = tr|A0A1H7XT67|A0A1H7XT67_9RHOB 7-cyano-7-deazaguanine synthase OS=Roseovarius tolerans; OX = 74031 GN=queC PE=3 SV=1
MKTIVICSGGLDSVSLAHKTAAEHDLAGLVSFDYGQRHVKEVEYAAACARRLGVPHKVVDIRQIGAALSGSALTDDVDVPDGHYAEDTMKITIVPNRNAIMLAIAFGMAAAEKAEAVAMAVHGGDHFIYPDCRPGFVNAFQAMQDAALEGYANITLYTPYLHGSKADIVTDGARHGTPFAETWSCYKGGARHCGRCGTCVERREAFHLAGVADPTDYADPDYWLTAVAKGGA

SEQ ID NO: 41925 - protein, 232 aa, Roseovarius tolerans
  REGION 1..232: note = tr|A0A0L6CUM5|A0A0L6CUM5_9RHOB 7-cyano-7-deazaguanine synthase OS=Roseovarius tolerans; OX = 74031 GN=queC PE=3 SV=1
MKTIVICSGGLDSVSLAHKVAAEHELAGLLSFDYGQRHVKEVECAASCARRLGVPHKVVDIRQIGAALSGSALTDDVDVPDGHYAEDTMKITIVPNRNAIMLTIAFGMAAAEKAEAVAMAVHGGDHFIYPDCRPGFVNAFQTMQDAALEGYADITLYTPYLHGSKADIVTDGARHGMPFAETWSCYKGGARHCGRCGTCVERREAFHLAGVADPTEYADPDYWLTAVAKGGA

SEQ ID NO: 41926 - protein, 232 aa, unidentified
  source 1..232: note = Rouxiella badensis
  REGION 1..232: note = tr|A0A1X0WJC4|A0A1X0WJC4_9GAMM 7-cyano-7-deazaguanine synthase OS=Rouxiella badensis; OX = 1646377 GN=queC PE=3 SV=1
MKRAVVVFSGGQDSTTCLVQALTQYDEVHCITFDYGQRHRAEIDIAQKLSVELGAKAHKVLDVGLLNELAVSSLTRDNIPVPQFGENAENGLPSTFVPGRNILFLTLAAIYAYQVQAEAVITGVCETDFSGYPDCRDEFVKALNHAVTLGIARDIRFETPLMWLNKAETWALADYYGKLPLVRNQTLTCYNGIAGDGCGECAACHLRAKGLEEYQQAPEAINASLKEKTGLV

SEQ ID NO: 41927 - protein, 232 aa, unidentified
  source 1..232: note = Rouxiella silvae
  REGION 1..232: note = tr|A0A1X0W6D3|A0A1X0W6D3_9GAMM 7-cyano-7-deazaguanine synthase OS=Rouxiella silvae; OX = 1646373 GN=queC PE=3 SV=1
MKRAVVVFSGGQDSTTCLVQALTQYDEVHCITFDYGQRHRAEIEIAQKLSVELGAKAHKVLDVGLLNELAVSSLTRDNIPVPQFGEGAENELPSTFVPGRNILFLTLAAIYAYQIQAEAVITGVCETDFSGYPDCRDEFVKALNHAVSLGIAREIRFETPLMWLNKAETWALADHYGKLPMVRNQTLTCYNGIAGDGCGECAACHLRAKGLAEFQQFPEATKASLREKTGLM

SEQ ID NO: 41928 - protein, 252 aa, unidentified
  source 1..252: note = Rubellimicrobium roseum
  REGION 1..252: note = tr|A0A5C4NJQ5|A0A5C4NJQ5_9RHOB 7-cyano-7-deazaguanine synthase OS=Rubellimicrobium roseum; OX = 687525 GN=queC PE=3 SV=1
MSDIHVGQSSEGALVLFSGGQDSTTCLAWALERFGRVETIGFDYGQRHLVELACRKQVAAEMRQIRPDWARRLGEDHTIGLQSLGEISDTALTRLVSLELDSSGLPNTFVPGRNIIFLTFAAALAYRRGLRHIVGGMCETDFSGYPDCRDDTIKALQVALNLGMDRQFVLHTPLMWIDKAATWELAFSLGGEALVDIILNETHTCYLGERGTRHVWGYGCGQCPACQLRAAGHEKYLSTKNHMSAPQQEHHV

SEQ ID NO: 41929 - protein, 232 aa, unidentified
  source 1..232: note = Rubellimicrobium roseum
  REGION 1..232: note = tr|A0A5C4N6R8|A0A5C4N6R8_9RHOB 7-cyano-7-deazaguanine synthase OS=Rubellimicrobium roseum; OX = 687525 GN=queC PE=3 SV=1
MRTIVVCSGGLDSVSLAHRVAAEHDLLGLLSFDYGQRHRKELEFAALCAERLRIPHQIIDLRDVGRNLTGSALTDELTVPDGHYAEETMRITVVPNRNAIMLAIAFGVASARGADAVATAVHGGDHFIYPDCRPGFIDAFQTMQNHALEGYASITLLTPYVNQPKSAIVVDGARYGTPFAQTWSCYKGGERHCGRCGTCVERREAFDLAGITDPTEYEDPDFWRAAVQRKGA

SEQ ID NO: 41930 - protein, 465 aa, Rubellimicrobium thermophilum
  REGION 1..465: note = tr|S9R6S4|S9R6S4_9RHOB Uncharacterized protein; OS = Rubellimicrobium thermophilum DSM 16684 OX=1123069; GN = ruthe_00246 PE=4 SV=1
MNVSDPGKNVNLRIDSISRSMVGNIPDLLIDLLEIAAYVYCVDQRIKRGTEMLMDYGKDWRRSLTFSIPVRHPEVWNGEEVQELLVETLGFLSDDSYAFRFRKAEAPVQPRDPYFHELLDAFQENDEVALFSGGVDSFAGAVNDIVTLGKSVTLVGHWSVPKVQNVQATLVDALKQRGYGRRLSYVPVWVSNTDIKPAEYTQRTRSFLFACIGLVVARMSGKDGFSFYENGVVSINPPLAGDVVGGRATRTTHPKVLRGLEDLFSTLLDRQIEIRTPLQWLTKKEVTETIAAAGMADMIGSTVSCTRTHSRTRRHTHCGVCSQCIDRRFAVLAAGMADHDPADQYKKDLLLSDRSVDDSLRMAMHYVSFFRKIGSMTKDRFLVDLPEIVSALDHFPDLSADEASAHLFDLFQRHARSVEDVIARAASEHAGPLFRGEVPAGSPWRPVLRVATVSRSPQAQTMISM

SEQ ID NO: 41931 - protein, 239 aa, unidentified
  source 1..239: note = Rubidibacter lacunae
  REGION 1..239: note = tr|U5DQU3|U5DQU3_9CHRO 7-cyano-7-deazaguanine synthase OS=Rubidibacter lacunae KORDI 51-2 OX=582515; GN = queC PE=3 SV=1
MHVRLQVKTAQTAMKAVVLLSGGLDSSTVLYRARADGWDCYTLAFDYHQRHRCELRAAAQIAEAAGVCEHRVVTFDLRSWGGSALTDDAIAVPEARSLDQMSASIPVTYVPARNTIFLSFALGYAEAVGAQCVFLGVNALDYSGYPDCRPDYINAMRAVYRLGTRQGREGEAIAIAAPLIDFKKTEIVRLGNELGVPWELTWSCYKGGDVACGVCDSCRLRLAAFAELGLRDPVLYATE

SEQ ID NO: 41932 - protein, 448 aa, unidentified
  source 1..448: note = Rubinisphaera brasiliensis
  REGION 1..448: note = tr|F0SJ43|F0SJ43_RUBBR Uncharacterized protein; OS = Rubinisphaera brasiliensis (strain ATCC 49424 / DSM 5305 / JCM 21570 / NBRC 103401 / IFAM 1448) OX=756272; GN = Plabr_ 0964 PE=4 SV=1
MEASIQISADQATSHEGASTTLFVEGHRRAELYCDYSSLLKAVRSPTERSLDFLNIASTVYSLDKLMPRIAASDGWSREFEVTIPVQDSSVWAIISETLNECVSFLSGDWWRFSFVEREASIIRRKRRKRRRRIPQRFARGNVACLFSGGLDSLAGAVDFLAFEPEKRLSLVGHYDPTPGTVKKDQTQLKSRLSEAYPNRLDAALVCVGSDQESPESSMRSRSLLFVALGICVAEHLGAGVPLLVPENGTIALNVPLTPARRGSCSTRTTHPHYIDLLQQVLTEVGLDHAIKNPLLGKTKGEVVSQCLDPNLIAVVAHESKSCAKPGHKSHWTRKSASQCGQCMPCIYRRAALHTVELDNEVFGNDICTDEVRVDEPSEAANDLRACLSFLRSNHSNESIAKLLIASGPLSIADALHHAQTVGRAMEEIRQLLRDKGNQRVKQLAGLR

SEQ ID NO: 41933 - protein, 230 aa, unidentified
  source 1..230: note = Rubinisphaera brasiliensis
  REGION 1..230: note = tr|F0SME1|F0SME1_RUBBR 7-cyano-7-deazaguanine synthase OS=Rubinisphaera brasiliensis (strain ATCC 49424 / DSM 5305 / JCM 21570 / NBRC 103401 / IFAM 1448); OX = 756272 G N=queC PE=3 SV=1
MNAPRKAVVLLSGGLDSSTTLAIAREQGFELWAISFDYGQKHRFELDAARRLAQAFDVKKHVIVKIDLGAFGGSALTSDIEVPKDRSTDQMEAAIPITYVPARNTVFLSTALGWAETLDCSDLFIGVNAVDYSGYPDCRPEFVEAFTRLANLATKTGVEGTADWKVHAPLIDLTKADIIRKGTALGVDYAMTHTCYDPNEAGLACGHCDACQLRLQGFEQAGLSDPAAYQ

SEQ ID NO: 41934 - protein, 230 aa, unidentified
  source 1..230: note = Rubinisphaera sp.
  REGION 1..230: note = tr|A0A2E9VKV7|A0A2E9VKV7_9PLAN 7-cyano-7-deazaguanine synthase OS=Rubinisphaera sp.; OX = 2024857 GN=queC PE=3 SV=1
MSQKAVVLLSGGLDSTTTLAIAADQGFELYALSFDYGQRHQFELEAAKILAEKWNVTQHVIIPLNLAAFGGSALTSEIEVPKHRSQTEMNEGIPVTYVPARNTVFLSVAMGWAESLDASDIFIGVNAVDYSGYPDCRPEFIKSFEQLANLATKSGVEGTRTWKIHAPLIQLTKAEIIRKGTELGVDYGSTHTCYDPDSLGRACGQCDACILRLQGFAEAGLTDTATYQPQ

SEQ ID NO: 41935 - protein, 234 aa, Rubricoccus marinus
  REGION 1..234: note = tr|A0A259TZE3|A0A259TZE3_9BACT 7-cyano-7-deazaguanine synthase OS=Rubricoccus marinus; OX = 716817 GN=queC PE=3 SV=1
MTDRAPLGSRALVLFSGGQDSTTCLFWALSRWEHVDALAFDYGQRHAVELEQARAIAEASGVPFHVADMRGLLAGSALTDGGDTNAEHALAPDLPASFVPGRNALFLTLAASRAYLTQTRDLVTGVCQTDYSGYPDCRLDFVASQEATLALALDAPVRIHTPLMHLTKAETWKLARDLGTVRGLDVLETVREMSHTDYNGDRSERHDWGYGKLDNPASVLRARGWEEAREKGWV

SEQ ID NO: 41936 - protein, 437 aa, Rubricoccus marinus
  REGION 1..437: note = tr|A0A259TTY4|A0A259TTY4_9BACT Uncharacterized protein OS=Rubricoccus marinus OX=716817 GN=BSZ36_18615; PE = 4 SV=1
MSVTHTDHVATVVFDEVGGDGLLLKPGANLKHGLPNFEEQFGAPTSLEEDLLVLASAIFACDLAFKRGEREAITRRIRLTVPVVNTAAFERVRRELQFALWTLSHDAWDVRFTAREGTPEANGAFQAGSPGKALLFSGGLDSFAAAVKFGDAGETVKLVSHVTANRAVSSSQENLLAHLDDRYPGQFERAAFRVSGFDRSSVGLPFPSDSDREETQRTRSFLFLSLAALVARRNRIQDVVMIAENGQMAIHLPLTAARISAFSTHTAHPEFVATMGPIMSKLLGYPIEITNPFLYLTKAEVVSDVVRDHADQLAHAVSCWKASRVRKDYNHCGYCVPCLIRRVSIEAHGTALPEYARDLLTEDVGDLRPDDDGKRNLVELCEFVATIDGRSQAALEDEYPDLINEHIDPVEAIGMYKRFATEAKAVFSSYPNVAKLF

SEQ ID NO: 41937 - protein, 227 aa, unidentified
  source 1..227: note = Rubripirellula obstinata
  REGION 1..227: note = tr|A0A5B1CJB3|A0A5B1CJB3_9PLAN 7-cyano-7-deazaguanine synthase OS=Rubripirellula obstinata OX=406547 GN=queC PE=3 SV=1
MTDTRPAIVLLSGGLDSATCFAIAKDQGFDVHAISFRYGQRHQHEIQCAAGLAEKLGAASHRIVGIDLAAFGGSALTDGDIAVPKCDRVEDIGGEIPVTYVPARNTIFLSLSLAMAEVLGARDIFIGVNALDYSGYPDCRAEFIAAFQTMANLATKQGVEDTDQLKIHTPLIDLTKAQIIAKGLSLGIDYSQTISCYDPIEGKAACGHCDACLLRAKGFAELGLDPT

SEQ ID NO: 41938 - protein, 236 aa, unidentified
  source 1..236: note = Rubrivirga marina
  REGION 1..236: note = tr|A0A271IVT2|A0A271IVT2_9BACT 7-cyano-7-deazaguanine synthase OS=Rubrivirga marina; OX = 1196024 GN=queC PE=3 SV=1
MPALVLFSGGQDSTTSLFWALSSSHGAFDRVEALAFRYGQRHAVELEQAHAIAEAAGVPFTVLDLGGLLSGSALLADEAADTNAAHALAPDLPASFVPGRNALFLTAAASHAFTRGIHDLVGGMCQTDYSGYPDCRLGFIESQAETLSLALDAPVQIHTPLMHLTKAETWKLAADLGTVRGLDVLETVREMSHTDYHGDRSERHPWGYGRLDNPASVLRAKGYEEAVANGWIPDAR

SEQ ID NO: 41939 - protein, 242 aa, unidentified
  source 1..242: note = Rubrivirga sp.
  REGION 1..242: note = tr|A0A271JCI6|A0A271JCI6_9BACT 7-cyano-7-deazaguanine synthase OS=Rubrivirga sp. SAORIC476 OX=1961794 GN=queC PE=3 SV=1
MPDSSNALVLFSGGQDSTTCLFWALAPDGGAFDHVEAVAFRYGQRHAVEIEQARAIAEAAGVPLTVLDLTGLLSGSALLADEAADTNDAHALAPDLPASFVPGRNALFLTAAASLGFTRGIADLVGGMCQTDYSGYPDCRLDFVESQAQTLSLALDTDLRIHTPLMHLTKAETWKLAADLGTVRGLDVLETVREMSHTDYHGDRTQRHAWGYGRLDNPASVLRAKGHAEAVAKGWVPDVDLP

SEQ ID NO: 41940 - protein, 257 aa, Rubrivivax gelatinosus
  REGION 1..257: note = tr|A0A4R2M869|A0A4R2M869_RUBGE 7-cyano-7-deazaguanine synthase OS=Rubrivivax gelatinosus; OX = 28068 GN=queC PE=3 SV=1
MGESQGGKQQSDENPMSQTTQPTSATRHALVLFSGGQDSTACLAWALQRYARVETVGFDYGQRHAIELTQRLVVLDEIRRSFPQWCDRLGEDHLLDLSILGQISSTALTDDRQIELQANGLPNTFVPGRNLLFLTLAASLAYRRDIDVLVGGMCETDFSGYPDCRDDTIKSQQVTLALGLGQRMTIETPLMWLDKAATWALAEALGGPALVALTVQHTHTCYLGERGELHPWGHGCGHCPACDLRRRGFEGYRAKMP

SEQ ID NO: 41941 - protein, 242 aa, Rubrivivax gelatinosus
  REGION 1..242: note = tr|I0HK20|I0HK20_RUBGI 7-cyano-7-deazaguanine synthase OS=Rubrivivax gelatinosus (strain NBRC 100245 / IL144) OX=983917 GN=queC PE=3 SV=1
MSQTTPPTSATRRALVLFSGGQDSTACLAWALQRYARVETVGFDYGQRHAIELTQRLVVLAELRRRFPQWCERLGEDHVLDLGILGQISSTALTDDRQFELQANGLPNTFVPGRNLLFLTLAASLAYRRDIDVLVGGMCETDFSGYPDCRDDTIKSQQVTLALGLGQRMTIETPLMWLDKAATWDLAERLGGPALVELTVQHTHTCYLGERGELHPWGHGCGHCPACDLRRRGFEGYSTKQR

SEQ ID NO: 41942 - protein, 234 aa, Rubrivivax sp.
  REGION 1..234: note = tr|A0A1E4II55|A0A1E4II55_9BURK 7-cyano-7-deazaguanine synthase OS=Rubrivivax sp. SCN 71-131 OX=1660138 GN=queC PE=3 SV=1
MERKALVLFSGGQDSATCLAWALDRYVQVETVGFHYGQRHAVELDCRKVVLDRLKAEFPAWAPRLGADHMLDLALLGQVSDTALTQDREIQFAASGLPTTFVPGRNLLFFTFAAAVAYRRGLSVLVGGMCETDYSGYPDCRDNTLKALQVAISLGLDAPMVVETPLMWLDKAHTWRMAKDLGGAALVELIRTETHTCYLGDHTTLNAWGYGCGQCPACELRRKGYEIFNAAEAA

SEQ ID NO: 41943 - protein, 234 aa, Rubrivivax sp.
  REGION 1..234: note = tr|A0A520BKQ5|A0A520BKQ5_9BURK 7-cyano-7-deazaguanine synthase OS=Rubrivivax sp. OX=50259; GN = queC PE=3 SV=1
MTDPRKALVLFSGGQDSTTCLAWALDRFAEVETLAFDYGQRHRIELECRNTVRSEMARQFPHWAGRLGADHLLDLSLLGQISDTALTSERAIELQANGLPNTFVPGRNLLFLTFAATLAYRRGATVLVGGMCETDFSGYPDCRDNTLKALQVALSLGLDGPMTLDTPLMFIDKAATWRLAEQLGGAALVKLIVEDTHTCYLGERGELHDWGHGCGHCPACALRARGFAQYREQA

SEQ ID NO: 41944 - protein, 556 aa, Ruegeria atlantica
  REGION 1..556: note = tr|A0A0N7LNK0|A0A0N7LNK0_9RHOB Uncharacterized protein OS=Ruegeria atlantica OX=81569 GN=RUM4293_01524; PE = 4 SV=1
MGAVAPLPEVEVRWLPPLTKSGGDEVLRLDIAGREVAMTLRIGQLNRQLVEGLQDRALDLLEIAALVYCADAAVSRGGLADQKMGEKWHRRFVATMPVRDLDFWQRESVIQALEETLMFLSGDRFEFSFSIKDEPDAERSRFFKFGRNSSWKPHRVLMFSGGLDSFAGAVEEIVEQKHRVALVSHASSTKIAPVQKRLISALSKRYGPEKCRHIPMTAQLKGRSTAERTHRTRSFLFAVLGSITAKAFGLDRLSFHENGVVSLNLPPVGSVIGTRATRTTHPKALNLLTGFLQLVFENDMRVDNPYFARTKAEVVERISELGMADQIVETRSCADVHNQTNQYFHCGRCSQCIDRRFAMLSIGLERFDPEDAYRVDLMSDARPNGIDREMALSYVRNAVLFENAMPDALIRNFPVVLDAVNHIDNPPDTAMVMIADLLNRHGKAVTSVMRRTLESKSPGEFPEQSLPRLYGAMQSALTLPFVPAASVDKNEKQQLPLSIEIDKASRLVVIGEHVELKKNATADLLVVLAQEWLRSAGEGLEPMDHHCVKSGELVEK

SEQ ID NO: 41945 - protein, 232 aa, Ruegeria atlantica
  REGION 1..232: note = tr|A0A0P1EBU2|A0A0P1EBU2_9RHOB 7-cyano-7-deazaguanine synthase OS=Ruegeria atlantica; OX = 81569 GN=queC PE=3 SV=1
MKTTLVCSGGLDSVSLAHVLAAEGNLSRLVSFDYGQRHTKELTFAALCSERLSVPHHVIDLRSVGASLTGSALTDDVDVPDGHYAEETMKVTVVPNRNAIMLTIAYGVAAAQGDNAVATAVHGGDHFIYPDCRPAFTDAFDTMQRAALDGYADVALHVPFVHRSKADIVREGARVDTPFDQTWSCYKGGDVHCGRCGTCVERREAFDLAGVPDPTQYEDAEFWKSTIARAQA

SEQ ID NO: 41946 - protein, 233 aa, unidentified
  source 1..233: note = Ruegeria denitrificans
  REGION 1..233: note = tr|A0A0P1IJV9|A0A0P1IJV9_9RHOB 7-cyano-7-deazaguanine synthase OS=Ruegeria denitrificans; OX = 1715692 GN=queC PE=3 SV=1
MKTIVICSGGLDSVSLAHMVARDHQLTGLISFDYGQRHRKELDYAALCAKRLGVPHDIIDLRPVGAVLTGSALTDDVDVPDGHYAEDSMRVTVVPNRNAIMLTVAFGAAAASGANAVATAVHGGDHFIYPDCRPEFTQAFETMQKHALDGYADVSLFTPFVHRSKADIVTEGARCETPFSQTWSCYKGGEYHCGRCGTCVERREAFHFANVKDPTIYEDPEFWVVATAHKEPA

SEQ ID NO: 41947 - protein, 230 aa, unidentified
  source 1..230: note = Ruegeria intermedia
  REGION 1..230: note = tr|A0A1M5AW92|A0A1M5AW92_9RHOB 7-cyano-7-deazaguanine synthase OS=Ruegeria intermedia; OX = 996115 GN=queC PE=3 SV=1
MKTIVICSGGLDSVSLAHKVAAENDLIGLISFDYGQRHRKEVEFAARCAERLGVPHDLIDMSHIGKHLSGSALTDDVDVPDGHYAEENMKVTVVPNRNAIMLAIAFGVAAAKQADAVATAVHGGDHFIYPDCRPEFTEAFEAMQAKALDGYANVRLYTPFVHIPKSAIVTEGAKHGTPFADTWSCYKGGETHCGRCGTCVERREAFHIAGVEDPTVYADPEFWKAAVEAH

SEQ ID NO: 41948 - protein, 233 aa, unidentified
  source 1..233: note = Ruegeria litorea
  REGION 1..233: note = tr|A0A1Y5TRV6|A0A1Y5TRV6_9RHOB 7-cyano-7-deazaguanine synthase OS=Ruegeria litorea R37; OX = 1200284 GN=queC PE=3 SV=1
MKTIVICSGGLDSVSLAHSIAADGNLFRLVSFDYGQRHRKELDYAAACATRLGVPHHIIDMRTIGAALTGSALTDDIDVPDGHYAEDTMKVTVVPNRNAIMLTIAYGIAAANGDEAVATAVHGGDHFIYPDCRPAFTQAFDTMQRAALDGYADVALSTPFVHRSKADIVTEGARVGTPFADTWSCYKGGEHHCGRCGTCVERREAFDLAGVTDPTIYEDPDFWRAAVADKEGA

SEQ ID NO: 41949 - protein, 230 aa, Ruegeria marina
  REGION 1..230: note = tr|A0A1G7C0F1|A0A1G7C0F1_9RHOB 7-cyano-7-deazaguanine synthase OS=Ruegeria marina; OX = 639004 GN=queC PE=3 SV=1
MKTLVICSGGLDSVSLAHKVAAEQELIGLISFDYGQRHHKELEFAARCAARLGVPHDLIDMRQIGAHLSGSALTDDVDVPDGHYAEDTMRITVVPNRNAIMLAIAFGIAAAKQADAVATAVHGGDHFIYPDCRPAFTQAFEAMQAQALDGYANVRLYTPFVHVPKSAIVTEGARHNTPFADTWSCYKGGEVHCGRCGTCVERREAFHLAGVTDPTAYADPEFWRAAVEGR

SEQ ID NO: 41950 - protein, 230 aa, unidentified
  source 1..230: note = Ruegeria marisrubri
  REGION 1..230: note = tr|A0A0X3TQV9|A0A0X3TQV9_9RHOB 7-cyano-7-deazaguanine synthase OS=Ruegeria marisrubri; OX = 1685379 GN=queC PE=3 SV=1
MKTIVICSGGLDSVSLAHKVAAENKLIGLISFDYGQRHRKEVEFAARCAERLGVPHDLIDMSHIGKHLSGSALTDDVDVPDGHYAEENMKVTVVPNRNAIMLAIAFGVAAAKQADAVATAVHGGDHFIYPDCRPEFTEAFEAMQAKALDGYANVRLYTPFVHIPKSAIVTEGAKHGTPFADTWSCYKGGESHCGRCGTCVERREAFHIAGVEDPTVYADPDFWKAAVEGH

SEQ ID NO: 41951 - protein, 233 aa, unidentified
  source 1..233: note = Ruegeria mediterranea
  REGION 1..233: note = tr|A0A2R8C6R6|A0A2R8C6R6_9RHOB 7-cyano-7-deazaguanine synthase OS=Ruegeria mediterranea M17 OX=1200281 GN=queC PE=3 SV=1
MKTIVICSGGLDSVSLAHSIAAEGNLSRLVSFDYGQRHRKELDYAAACATRLGVPHHIIDMRTIGAALTGSALTDDIDVPDGHYAEDTMKVTVVPNRNAIMLTIAYGIAAANGDEAVATAVHGGDHFIYPDCRPAFTEAFDAMQRAALDGYADVALSTPFVHRSKADIVTEGARVGTPFADTWSCYKGGEHHCGRCGTCVERREAFDLAGVSDPTVYEDPGFWRTAIADKEGV

SEQ ID NO: 41952 - protein, 230 aa, Ruegeria pomeroyi
  REGION 1..230: note = sp|Q5LM13|QUEC_RUEPO 7-cyano-7-deazaguanine synthase; OS = Ruegeria pomeroyi (strain ATCC 700808 / DSM 15171 / DSS-3) OX=246200 GN=queC PE=3 SV=1
MKTLVICSGGLDSVSLAHKVAAEHDLIGLISFDYGQRHRKELDFAARAATRLGVPHDLIDMRQIGAHLSGSALTDDVDVPDGHYAEDTMKITVVPNRNAIMLAIAFGIAAAKQADAVATAVHGGDHFIYPDCRPGFTQAFEAMQAQALDGYASVRLYTPFVHEPKSAIVTEGERHNTPFADTWSCYKGGEVHCGRCGTCVERREAFHLAGVADPTPYADPEFWRAAVEGR

SEQ ID NO: 41953 - protein, 500 aa, unidentified
  source 1..500: note = Ruegeria profundi
  REGION 1..500: note = tr|A0A0X3U5I0|A0A0X3U5I0_9RHOB Uncharacterized protein OS=Ruegeria profundi OX=1685378 GN=AVO44_03510; PE = 4 SV=1
MFLSGDRFEFSFSTKDEPDAERSRFFKFGRNSSWKPHRVLMFSGGLDSFAGAVEEIVEQKHRVALVSHASSTKIAPVQKRLISALSKRYGPETCRHIPMTAQLKSRSTAERTHRTRSFLFAVLGSITATAFGLDRVSFHENGVVSLNLPPVGNVVGTRATRTTHPKTLKLFTGLLRLVFENDMRVDNPYFARTKAEVVERISQLGMADQIVETRSCADVHNQTHQYFHCGRCSQCIDRRFAMLSKGLERFDPEDAYRVDLMSDARPNGIDREMALSYVRNAVLFENATPDALIRNFPVVLDAVNHFDSPPDTAMSMIADLLNRHGKAVTSVMRRTLESKSPGEFPEQSLPRLYGEMQSALSLPFVPAPSVDKNENEKPPLTIEIDKTSRLVLIGEHIELKKNATADLLIVLAEEWLRAAGKGLEPLEYPCLKSGDLVEKLGVETDEVVRRRILTARRTIAKRFKSAGLSIDKPQELIENLSWHGYRLAPERVVIRVRHRS

SEQ ID NO: 41954 - protein, 233 aa, Ruegeria sp.
  REGION 1..233: note = sp|Q1GEY7|QUEC_RUEST 7-cyano-7-deazaguanine synthase; OS = Ruegeria sp. (strain TM1040) OX=292414 GN=queC PE=3 SV=1
MKTLVICSGGLDSVSLAHITSQKYQLTRLVSFDYGQRHRKELDFARAAATRLGVPFHLIDMRSIGGALSGSALTDDIDVPDGHYAEDTMRITVVPNRNAIMLAIGFGVAAAQGDEAVATAVHGGDHFIYPDCRPGFTRAFETMQRAALDGYADVRLHTPFVEQSKADIVRAGAAHNTPFAETWSCYKGGDIHCGRCGTCVERREAFHLAEVADPTVYADPDYWSAAIAGREAE

SEQ ID NO: 41955 - protein, 232 aa, Ruegeria sp.
  REGION 1..232: note = tr|A0A366XCC7|A0A366XCC7_9RHOB 7-cyano-7-deazaguanine synthase OS=Ruegeria sp. A3M17; OX = 2267229 GN=queC PE=3 SV=1
MKTTLVCSGGLDSVSLAHVLAAEGNLSRLVSFDYGQRHTKELTFAALCAMRLSVPHHLIDLRSVGASLTGSALTDDVDVPDGHYAEETMKVTVVPNRNAIMLTIAYGVAAAQGDDAVAAAVHGGDHFIYPDCRPAFTDAFDTMQRAALGGYADVALHVPFVHRSKADIVREGARVDTPFDQTWSCYKGCDLHCGRCGTCVERREAFDLAGVPDPTQYEDAEFWKSAIAGAQV

SEQ ID NO: 41956 - protein, 263 aa, Rugamonas rubra
  REGION 1..263: note = tr|A0A1I4QDV1|A0A1I4QDV1_9GAMM 7-cyano-7-deazaguanine synthase OS=Rugamonas rubra; OX = 758825 GN=queC PE=3 SV=1
MPRRPPLSFDGQRLPAPPKRKIAMLASDTALVLFSGGQDSTTCLAWALHHYAHVETIGFDYGQRHAVELTVRPTVIDKLRAASPEWDRKLGPDHMIDLSLISAISETAMTHDIAIETQANGLPNTFVPGRNLLFMTVAATVAYRRGLTVLVGGMCETDFSGYPDCRDDTMKALQVALNLGMATRLKLETPLMWRDKKQTWELARELGGQALVDLIRADTHTCYLGERGALHDWGYGCGTCPACALRARGYRQFAGTEPLEPAV

SEQ ID NO: 41957 - protein, 227 aa, unidentified
  source 1..227: note = Rugosibacter aromaticivorans
  REGION 1..227: note = tr|A0A0C5J7Y1|A0A0C5J7Y1_9RHOO 7-cyano-7-deazaguanine synthase OS=Rugosibacter aromaticivorans OX=1565605 GN=queC PE=3 SV=1
MKTAVILLSGGLDSATVLALASQQGFACYCLSLDYGQRSSSELLAAGRVAKALGAVAHRVLKLDLGQLGGSALTDASIAVPIDGVRPGVPVTYVPARNTIMLSLALSWAEVLGSRDIFVGVNAIDYSGYPDCRPEFIRAFETLANLATKAAVEGAVLTVHAPLISMSKAQIIKKGMQLGVDYGLTVSCYQADEAGRACGVCDSCRLRKEGFYSAQLVDPTSYYEKKP

SEQ ID NO: 41958 - protein, 227 aa, unidentified; identical to SEQ ID NO: 41957
  source 1..227: note = Rugosibacter sp.
  REGION 1..227: note = tr|A0A522YD49|A0A522YD49_9RHOO 7-cyano-7-deazaguanine synthase OS=Rugosibacter sp.; OX = 1914450 GN=queC PE=3 SV=1

SEQ ID NO: 41959 - protein, 227 aa, unidentified
  source 1..227: note = Rugosibacter sp.
  REGION 1..227: note = tr|A0A522XTZ2|A0A522XTZ2_9RHOO 7-cyano-7-deazaguanine synthase OS=Rugosibacter sp.; OX = 1914450 GN=queC PE=3 SV=1
MKNAVILLSGGLDSATVLALARQQGFACHCLSLDYGQRSRSELLAAGRVAKAFGAVAHRVLKLDLGQLGGSALTDTSIAVPIAGVQPGVPITYVPARNTIMLSLALAWAEILVSRDLFVGVNAIDYSGYPDCRPEFIRAFEALANLATKAAVEGAVLTVHAPLISMSKAQIITTGMQLGVDYGLTVSCYQADENGGACGVCDACRLRKEGFSSAHLVDPTRYSENKP

SEQ ID NO: 41960 - protein, 1104 aa, unidentified
  source 1..1104: note = Ruminiclostridium cellobioparum
  REGION 1..1104: note = tr|S0FM96|S0FM96_RUMCE Non-ribosomal peptide synthetase OS=Ruminiclostridium cellobioparum subsp. termitidis CT1112 OX=1195236 GN=CTER_2676 PE=4 SV=1
MAGEVLKPNDLENWYSIFGDRIQLVNFYGASETTMIKMFYPIKSSDVKRKSIPIGKPIKGAKAVILDKNLNICNQGDIGEIYIRTPYRTLGYYKNPDLNKEKFIINPFNKDPNDLIYRTGDLGRLLESGDIEFLGRIDRQIKIRGIRVELGEIEKELSKFTGIKKCVVDFRNDSKNVEEKAKAEYCKKCGITTRFPEAVLDTVGYCKICNDYETYKSKAQSYFGTMGDLNSIFQNSKKDNKSEYDCILLFSGGKDSTFVLYKLIEMGLKVLAFTFDNGFISKTALNNIQNTVKELNIDHIIGTYDDMNKIFLEGLREESSVCNGCFKVLRILSTRLAYEKGIKYIVTGLSRGQIFELRLYDAFKQGILVSDEIEKRIFDQRVLYHGKDDYVSRVIGSDLLINKSMVQEIGLIDFYRYSDVTKEEIIEFLKSKSSYWNNPSDTGFCSSNCMINDVGIHIQRNERGYDNYTFPNSWDVRLGHTSIAEAKNESEGEVNLQKVQDILEKLGYNDTYRNKTYLKEYLVAYYTSDKQLNTHEIRAFMERSLPSYMIPTYFIEISKIPLNTNGKIAYNELPDPRKNIIKKYIAPRDETEVTLEKIWCEILGIDKVGINEDFLQIGGHSLNIMQLISKVTSEFNVEIPLSEIFKKATIEELGNFIKTTANKSNITINKNEICEYYPATVSQKRMYALSLIKGAGVVQNILFGVRIKGDINKERIQDIFRILIDRHEILRTHFEISNNEVVQVVHDHIDFNVNFVKAEKSEDEVIIDLIKPFNTDDLPLFRVNVIEVQKNEKILLLDMHHTISDGISIGIIAREFINLYKGKELPELRIQYKHYALWQEEGLKTGLFKKQEDYWLNLLGGEIPKISIPTDYPKKWIRSFKGDTITVHVGKELAFYIKNLATESGTTLYMLLLAVYNILLSKYTGQEDIIVGSISSGRHQMDLDNMVGMFLNNIVMRNKPAADKNFNDFLAEVKSNALATYENQDYPFELLVDKLGVKVGLGESPIFNTLFSLQNVPMPTETIDELTFEQVKNIRTNTSRQDISLLAYEQEDGIKLDFEYCSKLFNRVTIERMASDYLEILGQVLQDKNIRIDDIKLTEREVVL

SEQ ID NO: 41961 - protein, 329 aa, unidentified
  source 1..329: note = Ruminiclostridium cellulolyticum
  REGION 1..329: note = tr|B8I986|B8I986_RUMCH Uncharacterized protein; OS = Ruminiclostridium cellulolyticum (strain ATCC 35319 / DSM 5812 / JCM 6584 / H10) OX=394503 GN=Ccel_0984 PE=4 SV=1
MTTQEKKTNNVYREKILNSVLEKYYNPDSKYDYCVLFSGGKDSTYLANIMKQMKGGRVCTLTVDNGFEDEVFLDHVKKVADKIGVDSYIITPPKEDFELLFNYVIKEPKLRAVDSNAICYFCGQYIMKAGIRFAEENNIPVVIHGMSPTQYNLPDKLENEEVSEQAFIRNIELLEMYRNKNIQDVYKLAKTLYRYNNDPQIKEIMDKTFYQSKKVKMIIPFQYLDYNVENIKSIIEKELDWVNMFGYSNSLYISSGCRMFEIFLLMEKKIPGFRVHEHREFAQDFNKGHVTKKAYDYALDVAKTLQDQEEISPTMHSLIKRIGLEEELL

SEQ ID NO: 41962 - protein, 226 aa, unidentified
  source 1..226: note = Ruminiclostridium papyrosolvens
  REGION 1..226: note = tr|F1TE86|F1TE86_9FIRM 7-cyano-7-deazaguanine synthase OS=Ruminiclostridium papyrosolvens DSM 2782; OX = 588581 GN=queC PE=3 SV=1
MLKKAVVLLSGGMDSTTALYIAKSQGYEIYAISFNYGQRHFKELECAKIISEKAGVKEHIIVNTNMDAWGGSALTDSSISVPDSNIHNGKIPITYVPARNMIFLSFAASYAEVIGAQDIFIGVSEVDYSGYVDCRQEFIDAMENAINFGTVCAVEEGKKIKIHAPLVCMTKSDEIKLGIKLGVDYSLTWTCYRGEELACGTCDSCSLRLKAFKEAGEKDPLQYTVI

SEQ ID NO: 41963 - protein, 226 aa, unidentified
  source 1..226: note = Ruminiclostridium papyrosolvens
  REGION 1..226: note = tr|U4R2Q4|U4R2Q4_9FIRM 7-cyano-7-deazaguanine synthase OS=Ruminiclostridium papyrosolvens C7 OX=1330534; GN = queC PE=3 SV=1
MLKKAVVLLSGGMDSTTTLYIAKSEGYEVYAISFNYGQRHYKELECAKIISEKAGIKEHIFVNTNMDAWGGSALTDTNISVPDSNINKDKIPITYVPARNMIFLSFAASYAEVIGAQDIFIGVSEVDYSGYVDCRQEFIDAMENAINFGTVCAVEDGKKIKIHAPLVCMTKSDEIKLGIKLGVDYSLTWTCYRGEEFACGTCDSCSLRLKAFKEAGEKDPIKYIGL

SEQ ID NO: 41964 - protein, 219 aa, unidentified; identical to SEQ ID NO: 38746
  source 1..219: note = Ruminiclostridium sp.
  REGION 1..219: note = tr|A0A3B8KQG2|A0A3B8KQG2_9FIRM 7-cyano-7-deazaguanine synthase OS=Ruminiclostridium sp.; OX = 2053608 GN=queC PE=3 SV=1

SEQ ID NO: 41965 - protein, 225 aa, unidentified
  source 1..225: note = Ruminiclostridium sufflavum
  REGION 1..225: note = tr|A0A318XRW9|A0A318XRW9_9FIRM 7-cyano-7-deazaguanine synthase OS=Ruminiclostridium sufflavum DSM 19573 OX=1121337 GN=queC PE=3 SV=1
MGKAVVLLSGGLDSATALYLAKAEGYEVYALSFEYGQRHKKEISCAEKLAQKAGVKEHIVVNTNMDAWGGSALTDSSIAVPEADLDTGLIPATYVPARNMIFLSYAASYAEAKGAQNIFIGVSEVDYSGYVDCRKEFIDAMENAVNMGTVCSVEYGKRIKIHAPFISMKKAEEIKLGISLGVDYSSTWTCYNGEERACGVCDSCRLRLRAFEEAGAKDPVQYRQL

SEQ ID NO: 41966 - protein, 260 aa, unidentified
  source 1..260: note = Ruminococcaceae bacterium
  REGION 1..260: note = tr|A0A1W6WC64|A0A1W6WC64_9FIRM TIGR00268 family protein OS=Ruminococcaceae bacterium CPB6 OX=1572656; GN = B6259_02565 PE=4 SV=1
MIDEQTKTEQDGSRKLQQFFKEHPKCALAYSGGTDSSYLLYAAVQAGAEVHPYFIKTAFQPQFEVDDAERLAQQLNVPLTVLHLDLLSRSEVTDNPKNRCYYCKKSLFTVLKERAKADGCPLLIDGTNASDQVADRPGMKALQELSVCSPLRACGLTKPEIRELSREAGLFTWNKPAYACMATRFPAGRQITAELLRRVEGAENALFKLGFTDFRVRLYADAARLQFPQDQMTRAVQKRADIRRQLNPYFQTVLLDLAGR

SEQ ID NO: 41967 - protein, 227 aa, unidentified
  source 1..227: note = Ruminococcaceae bacterium
  REGION 1..227: note = tr|A0A1G4W4B0|A0A1G4W4B0_9FIRM 7-cyano-7-deazaguanine synthase OS=Ruminococcaceae bacterium P7 OX=1200751 GN=queC PE=3 SV=1
MKALVLFSGGVDSTTCLAMAIEKYGRDEVLALSVGYGQKHSKELEAAQSIARFYGVSHRTLDLSVLFEGSDCSLLKGSGKEIPKESYAEQLAETGGSPVSTYVPFRNGLFLASAASIALSCGCSEIYYGAHRDDAAGNAYPDCSQDFNEAINRAIYLGSGNQLSVIAPFIGMSKAEVVAVGLRLNVPYELTWSCYEGMDKPCGLCGTCRDRIAAFEANGVKDPAMEV

SEQ ID NO: 41968 - protein, 228 aa, Ruminococcus albus
  REGION 1..228: note = tr|A0A011VWI4|A0A011VWI4_RUMAL 7-cyano-7-deazaguanine synthase OS=Ruminococcus albus SY3; OX = 1341156 GN=queC PE=3 SV=1
MKALVLFSGGLDSATCLALAIKKYGKENVTALSVFYGQKHDKEIQAAKNVAEYYGVPLKTLDLALIFADSDCSLLTQSDKEIPHKSYAEQLTQTNGKPVSTYVPFRNGLFLASAASIAISLDCGVIYYGAHADDAAGNAYPDCSQDFNNAMNSAITIGSGEQVHIEAPFVGLTKADVVKMGTELGVPYELTWSCYEGGEKPCGKCGTCIDRTAAFEANGLIDPLLKGE

SEQ ID NO: 41969 - protein, 228 aa, Ruminococcus albus
  REGION 1..228: note = tr|E9S9P3|E9S9P3_RUMAL 7-cyano-7-deazaguanine synthase OS=Ruminococcus albus 8 OX=246199 GN=queC PE=3; SV = 1
MKALVLFSGGLDSSTCLGLAVDKYGADNVLALSVYYGQKHDKEIRASEKVAAHYGVKQQTLDLAKIFEGSDCTLLKGSDGDIPKESYAKQIEESAGKPVSTYVPFRNGLFLASAASIALSNGCDVIYYGAHSDDAAGNAYPDCSENFNRAMNEAIYLGSGEQLRIEAPFVSLTKADVVRKGVELGVPFELTWSCYEGGDKPCGICGTCRDRIAAFEANGLIDPLMKGE

SEQ ID NO: 41970 - protein, 228 aa, Ruminococcus callidus
  REGION 1..228: note = tr|U2LH44|U2LH44_9FIRM 7-cyano-7-deazaguanine synthase OS=Ruminococcus callidus ATCC 27760 OX=411473; GN = queC PE=3 SV=1
MKAMVLFSGGVDSTTCLGMAVDKYGAEEVLALSVSYGQKHQKEVEAARKIAAYYGVAWKQLDLSVIFADSNCSLLSGSTQEIPKETYAEQLQETNGSPVSTYVPFRNGLFLASAASMALSNGCEVIYYGAHSDDAAGNAYPDCSDAFNEAMNRAIYLGSGEQLRIEAPFVKWTKADVVKKGLELGVPYALTWSCYEGGEKPCGVCGTCRDRAAAFAANGVPDPALGGE

SEQ ID NO: 41971 - protein, 228 aa, Ruminococcus flavefaciens
  REGION 1..228: note = tr|A0A1H6L4V5|A0A1H6L4V5_RUMFL 7-cyano-7-deazaguanine synthase OS=Ruminococcus flavefaciens OX=1265 GN=queC PE=3 SV=1
MKALVLFSGGVDSTTCLAIAVDKYGADNVLALSLYYGQKHSRELEAARKIASHYGVRHKELDLALIFADSDCTLLKGSSGDIPKESYAEQLEKTDGKPVSTYVPFRNGLFLASAASIALSNGCTEIYYGAHSDDAAGNAYPDCSSDFNDAINRAIYLGSGCELKVVAPFIGINKAQVVAEGLKLGVPYELTWSCYEGGDKPCGVCGTCRDRIAAFEANGIHDPAMKGE

SEQ ID NO: 41972 - protein, 225 aa, Ruminococcus flavefaciens
  REGION 1..225: note = tr|A0A1H7LRN9|A0A1H7LRN9_RUMFL 7-cyano-7-deazaguanine synthase OS=Ruminococcus flavefaciens OX=1265 GN=queC PE=3 SV=1
MKALVLFSGGVDSSTCLGIAVDKYGAENVLALSIYYGQKHDKEMKAAERTAAYYGVELRTLDLALIFADSDCTLLSGNGDIPQESYAEQLAKTDGKPVSTYVPFRNGLFLSSAASIALSNGCDVIYYGAHSDDAAGNAYPDCSDEFNKAMDRAVFLGSGQQLHIEAPFVNLTKADVVKKGLELNVPYELTWSCYEGGDKPCGVCGTCRDRIAAFEANGVTDPLML

SEQ ID NO: 41973 - protein, 227 aa, Ruminococcus lactaris
  REGION 1..227: note = tr|A0A414P695|A0A414P695_9FIRM 7-cyano-7-deazaguanine synthase OS=Ruminococcus lactaris; OX = 46228 GN=queC PE=3 SV=1
MKALVLSSGGVDSTTALALAVSRYGKDNVIALSVSYGQKHDKEIQAAKAVSAFYGVEQLFLDLSKIFQYSNCSLLQQSKEEIPEESYAKQIEKTEGEKPVSTYVPFRNGLFLSSAASIALSKDCSVILYGAHADDSAGFAYPDCSPVFNDAMNQAIFEGSGHQLKVEAPFVNMTKAEVVKMGLELNAPYELTWSCYEGKDEPCGKCGTCIDRAAAFAANGVSDPAIK

SEQ ID NO: 41974 - protein, 227 aa, Ruminococcus lactaris
  REGION 1..227: note = tr|V8BK58|V8BK58_9FIRM 7-cyano-7-deazaguanine synthase OS=Ruminococcus lactaris CC59_002D OX=1073376; GN = queC PE=3 SV=1
MKALVLSSGGVDSTTALALAVSRYGKDNVIALSVSYGQKHDKEIQAAKAVSAFYGVEQLFLDLSKIFQYSNCSLLQQSTEEIPEESYAKQIEKTEGEKPVSTYVPFRNGLFLSSAASIALSKDCSVILYGAHADDSAGFAYPDCSPVFNDAMNQAIFEGSGHQLKVEAPFVNMTKAEVVKMGLELNAPYELTWSCYEGKDEPCGKCGTCIDRAAAFAANGVSDPAIK

SEQ ID NO: 41975 - protein, 227 aa, Ruminococcus sp.
  REGION 1..227: note = tr|A0A374JLJ2|A0A374JLJ2_9FIRM 7-cyano-7-deazaguanine synthase OS=Ruminococcus sp. OM07-7; OX = 2293234 GN=queC PE=3 SV=1
MKALVLFSGGIDSTTALGLAIKKYGKDQVIALSVSYGQKHDKEIRAAIAVAEYYGVEHLFLDLSKIFQYSNCSLLQRSTEEIPEESYAEQISKTNGDKPVSTYVPFRNGLFLSSAASIALSKECGVIYYGAHADDSAGFAYPDCSPVFNQAMNEAIWEGSGHQLKIEAPFVNVSKAEVVRIGLELGVPYELTWSCYEGGEKPCGKCGTCIDRAAAFQANHVEDPALR

SEQ ID NO: 41976 - protein, 226 aa, Ruminococcus sp.
  REGION 1..226: note = tr|A0A3C0IFY5|A0A3C0IFY5_9FIRM 7-cyano-7-deazaguanine synthase OS=Ruminococcus sp.; OX = 41978 GN=queC PE=3 SV=1
MKAMVLFSGGVDSTTALALAVEKYGASEVLALSIYYGQKHKKELEAAQKVVNYYGVAWKQLDLTTIFADSNCSLLENSTEEIPQESYAEQLEKTNGAPVSTYVPFRNGLFLASAASMALSNGCEVIYYGPHADDAAGNAYPDCSTVFNDAMKTAIYEGSGHELRVEAPFVTWTKKDIVKKGLELHVPYELTWSCYEGGEKPCGVCGTCRDRQAAFLANGVEDPLLK

SEQ ID NO: 41977 - protein, 227 aa, unidentified
  source 1..227: note = [Ruminococcus] torques
  REGION 1..227: note = tr|D4LZK8|D4LZK8_9FIRM 7-cyano-7-deazaguanine synthase OS=[Ruminococcus] torques L2-14 OX=657313 GN=queC; PE = 3 SV=1
MKALVLFSGGIDSTTALGLAIKKYGKDQVIALSISYGQKHDKEIRAAIAVAEYYGVEHLFLDLSKIFQYSNCSLLQQSTEEIPEESYAEQISKTNGDKPVSTYVPFRNGLFLSSAASIALSKECGVIYYGAHADDSAGFAYPDCSPVFNQAMNEAIWEGSGHQLKIEAPFVNVSKAEVVRIGLELGVPYELTWSCYEGGEKPCGKCGTCIDRAAAFQANHVEDPALR

SEQ ID NO: 41978 - protein, 227 aa, unidentified
  source 1..227: note = [Ruminococcus] torques
  REGION 1..227: note = tr|A0A174Z6J7|A0A174Z6J7_9FIRM 7-cyano-7-deazaguanine synthase OS=[Ruminococcus] torques; OX = 33039 GN=queC PE=3 SV=1
MKALVLFSGGIDSTTALGLAIKKYGKDQVIALSVSYGQKHDKEIRAAIAVTEYYGVEHLFLDLSKIFQYSNCSLLQQSTEEIPEESYAEQISKTNGDKPVSTYVPFRNGLFLSSAASIALSKECGVIYYGAHADDSAGFAYPDCSPVFNQAMNEAIWEGSGHQLKIEAPFVNVSKAEVVRIGLELGVPYELTWSCYEGGEKPCGKCGTCIDRAAAFQANHVEDPALR

SEQ ID NO: 41979 - protein, 217 aa, Rummeliibacillus sp.
  REGION 1..217: note = tr|A0A3N5ZR99|A0A3N5ZR99_9BACL 7-cyano-7-deazaguanine synthase OS=Rummeliibacillus sp. TYF005 OX=2058214 GN=queC PE=3 SV=1
MLKDEKAIVVFSGGQDSTTCLFWALQTFKEVEAVTFNYNQRHVAEIDCAKEIAEELGVKHHILDMSLLNQLAPNALTRDDIEVKAGEDGALPSTFVPGRNLLFLSFAGVLANQVGAKHIITGVCETDFSGYPDCRDDFVKSLNVTLNLAMDEQLVIHTPLMWLDKAETWKMADDMGKLEYVRTKTLTCYNGIKGDGCGTCPACHLRLKGYDQYLKMK

SEQ ID NO: 41980 - protein, 230 aa, unidentified
  source 1..230: note = Ruthia magnifica
  REGION 1..230: note = sp|A1AWK9|QUEC_RUTMC 7-cyano-7-deazaguanine synthase; OS = Ruthia magnifica subsp. Calyptogena magnifica OX=413404; GN = queC PE=3 SV=1
MSNTRHKIKAVILLSGGLDSTTTLAIAKTKNFECYSLSFDYGQKQKSELKSAENFAKIFGSIKHRVMKISLSNIDFSALTDDKIDIPKFSKSDDIPITYVPARNTIFLSYALSWSEVLDCQHIFIGVNTLDYSGYPDCREIYIKAFEVMANLATKQSIEGKKLTIHTPLIHLNKAQIIKKGLSLGIDYSLTTTCYQADKSGKACGICDACEYRKLGFIEAKVADPTRYQI

SEQ ID NO: 41981 - protein, 221 aa, Saccharibacillus sp.
  REGION 1..221: note = tr|A0A254P3G4|A0A254P3G4_9BACL 7-cyano-7-deazaguanine synthase OS=Saccharibacillus sp. O23 OX=2009338 GN=queC PE=3 SV=1
MLKNEKAVVVFSGGQDSTTCLFWAKKTFAEVQAVTFDYGQRHKLEIDCARQIAEELGVKHTVLDMSLLNQLAPNALTRDDIEIAHEDGELPSTFVEGRNLLFLSFAAILAKTSGARHIVTGVCETDFSGYPDCRDTFIKSLDVTLNLAMDYPFVIHTPLMWLDKAETWALADELSAFDFVRERTLTCYNGVIGDGCGECPACKLRRAGLDKYLEDRKAAAL

SEQ ID NO: 41982 - protein, 220 aa, Saccharibacillus sp.
  REGION 1..220: note = tr|A0A4Y6V1Z9|A0A4Y6V1Z9_9BACL 7-cyano-7-deazaguanine synthase OS=Saccharibacillus sp. ATSA2 OX=2583377 GN=queC PE=3 SV=1
MLKNEKAVVVFSGGQDSTTCLFWALRTFAEVQAVTFDYGQRHKLEIDCAREIAAELGVKHTVLDMSLLNQLAPNALTRDDIDITHEEGELPSTFVEGRNLLFLSFAAILAKTSGARHIVTGVCETDFSGYPDCRDTFVKSLDVTLNLAMDYPFVIHTPLMWLDKAETWALADQLDAFDFVRERTLTCYNGVIGDGCGECPACQLRRAGLDKYVGERQATV

SEQ ID NO: 41983 - protein, 246 aa, Saccharibacter sp.; identical to SEQ ID NO: 40642
  REGION 1..246: note = tr|A0A060QA93|A0A060QA93_9PROT 7-cyano-7-deazaguanine synthase OS=Saccharibacter sp. AM169 OX=1343158 GN=queC PE=3 SV=1

SEQ ID NO: 41984 - protein, 224 aa, unidentified
  source 1..224: note = Saccharicrinis carchari
  REGION 1..224: note = tr|A0A521B8D0|A0A521B8D0_9BACT 7-cyano-7-deazaguanine synthase OS=Saccharicrinis carchari; OX = 1168039 GN=queC PE=3 SV=1
MNKAVVLLSGGLDSAVTLYLAKSKGYDEVHALSFDYGQRHQTELNHAMAIASRAGVTAHKIATLNLGDFGGSSLTDKNMEVEDGDVNRTDIPLTYVPARNMVFLSVAASYAESIQAQHIYIGVSEVDYSGYVDCRQEFIDAMELAINKGTVMGAEGGMPIKIHAPFANKTKAQEITLGMELGVDFSLTWSCYRGGEKPCGTCDSCLLRAKAFAEAGFEDAGVKI

SEQ ID NO: 41985 - protein, 222 aa, unidentified
  source 1..222: note = Saccharicrinis fermentans
  REGION 1..222: note = tr|W7YQB7|W7YQB7_9BACT 7-cyano-7-deazaguanine synthase OS=Saccharicrinis fermentans DSM 9555 = JCM 21142; OX = 869213 GN=queC PE=3 SV=1
MKAVVLLSGGLDSAVALYLAKSKAYDEVHALSFDYGQRHQTELNHAKAIARKAGVTAHKIVTLNLGDFGGSSLTDKSMEVEDGDVTRTDIPVTYVPARNMVFLSIAASYAESIEAQNIFIGVSQVDYSGYVDCRQTFIDAMEKAINQGTVMGAEGGKPIKIHAPFVNKTKAQEIKLGMELGVDFGLTWSCYRGGEKPCGTCDSCLLRAKAFEEAGFEDAALK

SEQ ID NO: 41986 - protein, 234 aa, Saccharomonospora marina; identical to SEQ ID NO: 35935
  REGION 1..234: note = tr|H5WY58|H5WY58_9PSEU 7-cyano-7-deazaguanine synthase OS=Saccharomonospora marina XMU15 OX=882083; GN = queC PE=3 SV=1

SEQ ID NO: 41987 - protein, 233 aa, Saccharomonospora sp.
  REGION 1..233: note = tr|A0A4P7CD08|A0A4P7CD08_9PSEU 7-cyano-7-deazaguanine synthase OS=Saccharomonospora sp. 31sw OX=2528243 GN=queC PE=3 SV=1
MVRPAIVLLSGGLDSTTVLAIAKDQGYTPYALSFRYGQRHVVELDAARKVAQALGVADHKTIDIDLRAFGGSALTSDISVPKHDTLDEIDATSIPVTYVPARNTIFLSFALAYAEVVGATDIFTGVTAVDYSGYPDCRPQYIAAYEKMANLATRAGVEGEAPLRLHSPLIEMSKADIIREGLRLRVDYSITSSCYDPDEQARACGRCDTCLLRLKGFSEAGVTDPAPYRNVSV

SEQ ID NO: 41988 - protein, 255 aa, Saccharomonospora sp.
  REGION 1..255: note = tr|A0A1Q9UVF4|A0A1Q9UVF4_9PSEU 7-cyano-7-deazaguanine synthase OS=Saccharomonospora sp. CUA-673 OX=1904969 GN=queC PE=3 SV=1
MSARIDTSPSHANRIGNVAAPGTPGIHRHPRHAVVIASGGLDSTVLAYWLQARGTQLTLLSFDYGQRHRVELRFAAATAQALRTRHEVVDLSALGRVLQGSALTDSSVGVPEGHYTDETMRATVVPNRNAIMLDIAVALAVTTQADAVAFGAHAGDHPIYPDCRERFTTSFARTAQVANEGFLTDDFQLVVPFLASSKTDIVRLGAALNVPFEQTWSCYRGGTEHCGTCGTCTERREAFHDAGVADRTTYAVGCT

SEQ ID NO: 41989 - protein, 225 aa, Saccharophagus degradans
  REGION 1..225: note = sp|Q21HP4|QUEC_SACD2 7-cyano-7-deazaguanine synthase; OS = Saccharophagus degradans (strain 2-40 / ATCC 43961 / DSM 17024) OX=203122 GN=queC PE=3 SV=1
MSNKKAVILVSGGLDSTTALAIAQSEGYECYTLSFDYGQRHRVELEAAQRVSDKMHVAQHKVVQLDLKSIGGSALTDDDIAVPEDGPEGIPVTYVPARNTVFLSIALGWAEVLNAEAIFIGVNAVDYSGYPDCRPEYIAAFQKLAMLATKVGVEGKPLQIKTPLIDMTKAEIVQLGMRLGVDYSATVSCYQANVDGEACGRCDSCRLRRKGFEDAQMEDPTRYAN

SEQ ID NO: 41990 - protein, 224 aa, Saccharospirillum sp.
  REGION 1..224: note = tr|A0A2T6E6X3|A0A2T6E6X3_9GAMM 7-cyano-7-deazaguanine synthase OS=Saccharospirillum sp. MSK14-1 OX=1897632 GN=queC PE=3 SV=1
MTKKAVVLLSGGLDSTTVLAQAKADGYELYALSFDYGQRHDAELDAAKRIAQAMDVVEHKVIPIDLASLGGSALTDHSLEVPTEETDGIPVTYVPARNTVFLSIALGWAEVLEAQNLFIGVSAVDYSGYPDCRPEYIEAYERLANLATRMGVEGRMITIHTPLINLSKAQTVALGSRLGVDYGLTISCYQANESGEACGQCDSCRLRQKGFAEAGLPDPTRYQA

SEQ ID NO: 41991 - protein, 233 aa, Saccharothrix espanaensis
  REGION 1..233: note = tr|K0JYS9|K0JYS9_SACES 7-cyano-7-deazaguanine synthase OS=Saccharothrix espanaensis (strain ATCC 51144 / DSM 44229 / JCM 9112 / NBRC 15066 / NRRL 15764) OX=1179773 G N=queC PE=3 SV=1
MARRAIVLLSGGLDSCTVLAIAKDQGFESYALSFDYGQRHRTELRSAGLVAAALGATEHRTATIDLRVFGGSALTSDVEVPKHRIVDDIDSNIIPVTYVPARNTIFLAFATAYAEVVGAFDIFTGVTAVDYSGYPDCRPEFMEAFEATANLGTRAGVEQGERLRLHSPLIEMSKADIIREGTRLGVDYSLTSSCYDPDDRGRACGHCDTCLLRLKGFAECGIKDPVAYRGAVA

SEQ ID NO: 41992 - protein, 235 aa, Saccharothrix sp.
  REGION 1..235: note = tr|A0A0F0HJT0|A0A0F0HJT0_9PSEU 7-cyano-7-deazaguanine synthase OS=Saccharothrix sp. ST-888 OX=1427391 GN=queC PE=3 SV=1
MTGQAPHRAVVIASGGLDSSTVAYWLADRGSQLMLLSFDYGQRHRKELHYAERIAGHLGADHEVVDLSDLGRLLAGSALTDPGVQVPDGHYSEASMRSTVVPNRNAIMLSIAVAAAVSSGADAVAFGAHSGDHAIYPDCRTSFFDLFAAVTREGNEGFLAEGFELLAPFIGLTKAGIVEIGRQVGVPFEDTWSCYKGGEVHCGVCGTCAERREAFQVAGVVDPTVYSTSVPGVAR

SEQ ID NO: 41993 - protein, 234 aa, Saccharothrix sp.
  REGION 1..234: note = tr|A0A1Q4XAE5|A0A1Q4XAE5_9PSEU 7-cyano-7-deazaguanine synthase OS=Saccharothrix sp. CB00851 OX=1835005 GN=queC PE=3 SV=1
MTIDHPEHRHPEHAVVIASGGLDSTVLAYWLAARHSRLTLVSFDYGQRHRVELDHAAEIARLLLSPHRIIDLTSLGALLTGSALTDTSVAVPDGHYTDESMAATVVPNRNAIMLDIAVAVAIAVRADAVAFGAHAGDHTIYPDCRPEFVERFARSVQAANEGLLVPGFQVLAPFLTLTKTDIVRVGEALAVPFARTWSCYRGREVHCGTCGTCTERQEAFRDNGIADPTVYRAA

SEQ ID NO: 41994 - protein, 233 aa, Saccharothrix variisporea
  REGION 1..233: note = tr|A0A495XFT9|A0A495XFT9_9PSEU 7-cyano-7-deazaguanine synthase OS=Saccharothrix variisporea OX=543527 GN=queC PE=3 SV=1
MAQPAIVLLSGGLDSTTVLAIAKDQGFEPYALSFSYGQRHSVELEAAKRVAKSLGVARHVITDIDLRVFGGSALTSDIAVPKHDSVDEVDADSVPVTYVPARNTIFLSFALAYAEVVGSTDIFTGVTAVDYSGYPDCRPEYMAAYENMANLATRAGVEGEARLRLHSPLIEMSKADIIREGLRLGVDYSITSSCYDPDDQGRACGRCDTCLLRLKGFAEAGVSDPVAYRNANA

SEQ ID NO: 41995 - protein, 223 aa, unidentified
  source 1..223: note = Salibacterium halotolerans
  REGION 1..223: note = tr|A0A1I5T5E9|A0A1I5T5E9_9BACI 7-cyano-7-deazaguanine synthase OS=Salibacterium halotolerans OX=1884432 GN=queC PE=3 SV=1
MSFAQEKAVVVFSGGQDSTTCLFWAHERFQEVTAVTFDYGQRHDNEIETARDIAADLGVEHHVLDMSLLNQLAPNALTRDDMEVKEGEDGELPSTFVEGRNLLFFSFASILASQKGAKHVVTGVCETDYSGYPDCRDVFVKSLNVTLNLAVGKEFVLHTPLMWLDKKETWELADKLGRLTYVKENTLTCYHGIRGSGCGECPACKLRRAGYEQYIQEKERELG

SEQ ID NO: 41996 - protein, 223 aa, unidentified
  source 1..223: note = Salibacterium qingdaonense
  REGION 1..223: note = tr|A0A1I4IFN4|A0A1I4IFN4_9BACI 7-cyano-7-deazaguanine synthase OS=Salibacterium qingdaonense OX=266892 GN=queC PE=3 SV=1
MSFAEEKAVVVFSGGQDSTTCLFWALERFQEVTAVTFDYGQRHDNEIQTARDIAADLDVEHHVLDMSLLNQLAPNALTRDDMEVKEGEEGELPSTFVEGRNLLFFSFASILASQKGAKHVVTGVCETDYSGYPDCRDVFVKSLNVTLNLAVGKEFVLHTPLMWLDKKETWELADNLGRLTYVKENTLTCYHGIRGSGCGECPACKLRQAGYEQYIQEKERELG

SEQ ID NO: 41997 - protein, 220 aa, unidentified
  source 1..220: note = Salilacibacter sp.
  REGION 1..220: note = tr|A0A514LM45|A0A514LM45_9ACTN 7-cyano-7-deazaguanine synthase OS=Salilacibacter sp. NKC3-5 OX=2502791 GN=queC PE=3 SV=1
MPQGSAVVVFSGGQDSTTCLFWALKRFEKVYAVTFAYGQRHDDEIEVAKEIAAEVGVEHEVLDMGLLNQLAPNALTRKDIDVSEGADGELPSTFVPGRNLLFLSFAAIFGEQRGAKHIVTGVCETDSSGYPDCRDGFVKSLNVTLNLAMDETFVLHAPLMWLDKAGAWKLADDLGQLPYIRDYTLTCYHGIRGNGCSECPACKLRRQGLEMYLNSKDRDA

SEQ ID NO: 41998 - protein, 222 aa, Salimicrobium flavidum
  REGION 1..222: note = tr|A0A1N7IR86|A0A1N7IR86_9BACI 7-cyano-7-deazaguanine synthase OS=Salimicrobium flavidum; OX = 570947 GN=queC PE=3 SV=1
MKQREKAVVVFSGGQDSTTCTFWALKHYEEVELVTFDYNQRHNEELDVAREIADDLGLKHHVLDMSLISQLAPNALTDESIEVKDGEDGELPSTFVPGRNLLFLSFASILAKQIGARHIVTGVCETDFSGYPDCRDVFIKSMNVTLNLSMDETFVVHTPLMWLDKKETWQLADELDAFEYVRDRTLTCYHGVRGYGCGECPSCRLRQNGLDAYLAERQEEHA

SEQ ID NO: 41999 - protein, 222 aa, Salimicrobium halophilum
  REGION 1..222: note = tr|A0A1G8T6M9|A0A1G8T6M9_9BACI 7-cyano-7-deazaguanine synthase OS=Salimicrobium halophilum OX=86666 GN=queC PE=3 SV=1
MKQSEKAVVVFSGGQDSTTCTFWALKHYDEVELVTFNYNQRHNEELDVAREIAEDLGLKHHVLDMSLISQLAPNALTDESIEVKDGEDGELPSTFVPGRNLLFLSFASILAKQIGARHIVTGVCETDFSGYPDCRDVFIKSLNVTLNLSMDDTFVVHTPLMWLDKKETWQLADELDAFEYVRDRTLTCYHGVHGYGCGECPSCKLRQNGLDAYLAERQEEHA

SEQ ID NO: 42000 - protein, 254 aa, unidentified
  source 1..254: note = Salimicrobium jeotgali
  REGION 1..254: note = tr|K2GA59|K2GA59_9BACI Uncharacterized protein; OS = Salimicrobium jeotgali OX=1230341 GN=MJ3_09613 PE=4 SV=1
MQKTHHILWTGGFDSTFRVLDLVLNKKRLVQPHYIIDEERPSTNKELETIHTIIAHVGIMDMKAAERIKPLIIVNKKDITSEQEDKDKFERLVSTSFLGTQYVWLPAYLKQNGIAEIESGAHKDDNIETFIADYVKKIEDNDDYYYMLKNEYADTDLSIFARFQFPLLDYSKLDMERIAKESGFHHLMEMTWFCYRPQKDGQPCGLCNPCKYAKEEGMERRVPRPRIDDFIMFYSLKYLRKAKRNLVNGSGSKK

SEQ ID NO: 42001 - protein, 254 aa, Salimicrobium salexigens
  REGION 1..254: note = tr|A0A1N7N8R7|A0A1N7N8R7_9BACI 7-cyano-7-deazaguanine synthase (Queuosine biosynthesis); OS = Salimicrobium salexigens OX=908941 GN=SAMN05421758_1123; PE = 4 SV=1
MQKTHHILWTGGFDSTFRVLDLVLNKKREVQPHYIIDEERPSTNKELETIHTIIAHIGIMDMKAAERIKPLIIVNKKDITSDQEDKDKFERLISTSFLGTQYVWLPAYLKQNGIAEIESGAHKDDNIETFIADYVKKIEDNDDYYYMLKNEYADTDLSIFARFQFPLLDYSKLDMERIAKESGFNHLMEMTWFCYRPQKDGKPCGLCNPCKYAKEEGMERRVPRPRVDDFIMFYSLKYLRKAKRNLVNGSGSKK

SEQ ID NO: 42002 - protein, 256 aa, Salimicrobium sp.
  REGION 1..256: note = tr|A0A2A3A5Q6|A0A2A3A5Q6_9BACI Uncharacterized protein OS=Salimicrobium sp. WN024 OX=2029857; GN = CKW00_11130 PE=4 SV=1
MNMQKTHHILWTGGFDSTFRVLDLVLNKKRQVQPHYIIDEERPSTNKELETIHTIIAHIGIMDMKAAERIKPLIIVNKKDITSDQEDKDKFERLISTSFLGTQYVWLPAYLKQNGITEIESGAHKDDNIETFIADYVEKIEDNDDYYYMLKDEYADTDLSIFSRFQFPLLDYSKLDMERIAKESGFNHLMEMTWFCYRPQKDGKPCGLCNPCKYAKEEGMERRVPRPRVDDFIMFYSLKYLRKAKRNLVNGSGSKK

SEQ ID NO: 42003 - protein, 237 aa, Salinibacter sp.
  REGION 1..237: note = tr|A0A2P6C5C7|A0A2P6C5C7_9BACT 7-cyano-7-deazaguanine synthase OS=Salinibacter sp. 10B; OX = 1923971 GN=queC PE=3 SV=1
MDTAPPSPNAPGSDALVLFSGGQDSTTCLFWAKDHFETVRAVGFDYGQKHKVELEQAEHIADRAGIPFTVLDLDGTLEGSALTEPDTEINTAHEKDERLPASFVPGRNALFLSLAASHAYNHDITDLVGGMCQTDYSGYPDCRRVFIDSMETSLSLALDVDVRIHTPLMYLTKAETWKLANDLGVLDIVRRESHTDYNGDRSQFNEWGYGKLDNPASKLRAAGYREAKEKGWLESDE

SEQ ID NO: 42004 - protein, 218 aa, Salinicoccus alkaliphilus
  REGION 1..218: note = tr|A0A1M7EZF4|A0A1M7EZF4_9STAP 7-cyano-7-deazaguanine synthase OS=Salinicoccus alkaliphilus DSM 16010 OX=1123231 GN=queC PE=3 SV=1
MNRKKALVVFSGGQDSTTCMFHALKKYDEVELVTFMYGQRHALEINVARKIADEHDLKHHVLDMNLLSQLAPNALTSHDMTIESDDNGLPNTFVPARNMIFLSFAAALAYQIKAGVIITGVSQTDFSGYPDCRNNFIQSMNLTANLAMDTDFEIETPLMWLDKKETWAMADMLGRLDYIKENTLTCYEGVIGDGCGECPACALRNEGLKDHLKERGGR

SEQ ID NO: 42005 - protein, 220 aa, Salinicoccus halodurans
  REGION 1..220: note = tr|A0A0F7D3V3|A0A0F7D3V3_9STAP 7-cyano-7-deazaguanine synthase OS=Salinicoccus halodurans; OX = 407035 GN=queC PE=3 SV=1
MNEKKALVVFSGGQDSTTCMFHALENYEEVELVTFEYGQRHSLEIEIAKSIAEEHGLKHHVLDMSLLGQLSPNALTRHDMTIGQDGAARVPNTFVPARNMLFLSFAAALAYQIGAKTIITGVCETDFSGYPDCRDIFVKSMNITANLAMDRDFVIETPLMWLDKKETWALADRYGRLDYIREKTLTCYEGVIGDGCGECPSCRLRNEGLRAYLEERGTDA

SEQ ID NO: 42006 - protein, 224 aa, unidentified
  source 1..224: note = Salinicoccus kekensis
  REGION 1..224: note = tr|A0A285URZ8|A0A285URZ8_9STAP 7-cyano-7-deazaguanine synthase OS=Salinicoccus kekensis; OX = 714307 GN=queC PE=3 SV=1
MNRKKALVVFSGGQDSTTCMFHALKKYDEVELVTFMYGQRHALEIDVARKIADEHGLKHHVLDMDLLSQLAPNALTHDMQIDEDGGMPNTFVPARNMIFLSFASALAYQIKAGVIITGVSQTDFSGYPDCRNNFIQSMNLTANLAMDADFEIETPLMWLDKKETWALADGLGKLEYIRENTLTCYEGVPGDGCGTCPACELRNAGLEAYLKERGNDGVLSNPGS

SEQ ID NO: 42007 - protein, 226 aa, Salinicoccus qingdaonensis
  REGION 1..226: note = tr|A0A1G9DK53|A0A1G9DK53_9STAP 7-cyano-7-deazaguanine synthase OS=Salinicoccus qingdaonensis OX=576118 GN=queC PE=3 SV=1
MDHKKALVVFSGGQDSTTCMFYAMENYEAVELVTFMYGQRHALEIDVAKKIAEEHKLKHHVLDMELLSQLSPNALTSHDMAIEDDDKGIPNTFVPARNMIFLSFATALAYQIKAGTIMTGVCQTDFSGYPDCRDIFVKSMNITANLAMDEDFIIETPLMWLDKKETWALADELGRLDYVRENTLTCYEGVIGDGCGECPACELRHKGLEEYLNERGDSHDVSDTCS

SEQ ID NO: 42008 - protein, 217 aa, Salinicoccus roseus
  REGION 1..217: note = tr|A0A265E6R6|A0A265E6R6_9STAP 7-cyano-7-deazaguanine synthase OS=Salinicoccus roseus; OX = 45670 GN=queC PE=3 SV=1
MDRNKALVVFSGGQDSTTCMFHALANYRTVELVTFDYGQRHSKEIEVAKSIAEEQGLKHHVLDMSLLGQLSPNALTEHGMDITQSEDEGVPNTFVPARNMLFLSFATALGYQTGAGTIITGVCETDFSGYPDCRDIFVKSMNVTANLAMDRNFVIETPLMWLDKKQTWALADEYGQLDYIRNRTLTCYEGVIGDGCGECPACRLRNDGLQAYLNEKE

SEQ ID NO: 42009 - protein, 217 aa, Salinicoccus roseus
  REGION 1..217: note = tr|A0A0C2HQE7|A0A0C2HQE7_9STAP 7-cyano-7-deazaguanine synthase OS=Salinicoccus roseus; OX = 45670 GN=queC PE=3 SV=1
MDRNKALVVFSGGQDSTTCMFHALANYSTVELVTFDYGQRHSKEIEVAKSIAEEQGLKHHVLDMSLLGQLSPNALTEHGMDITQSEEESVPNTFVPARNMLFLSFATALGYQTGAGTIITGVCETDFSGYPDCRDIFVKSMNVTANLAMDRNFVIETPLMWLDKKQTWALADEYGQLDYIRNRTLTCYEGVIGDGCGECPACRLRNDGLQAYLNEKE

SEQ ID NO: 42010 - protein, 219 aa, unidentified
  source 1..219: note = Salinicoccus sediminis
  REGION 1..219: note = tr|A0A0M2SPM0|A0A0M2SPM0_9STAP 7-cyano-7-deazaguanine synthase OS=Salinicoccus sediminis; OX = 1432562 GN=queC PE=3 SV=1
MREKKALVVFSGGQDSTTCMFHAMAHYDEVDLVTFEYGQRHSLEIDVAKQIASEHGLRHHVLDMSLLGQLSPNALTRHDMEISGEDTEMPNTFVPARNMLFLSFASALAYQTGAKTIITGVCETDFSGYPDCRDIFVKSMNVTANLAMDGNFVIETPLMWLDKKETWALADRYGKLDYIREKTLTCYEGIIGDGCRECPACRLRSDGLDAYIEEREGDS

SEQ ID NO: 42011 - protein, 219 aa, Salinicoccus sp.
  REGION 1..219: note = tr|A0A558AQY6|A0A558AQY6_9STAP 7-cyano-7-deazaguanine synthase OS=Salinicoccus sp. CT19; OX = 2493691 GN=queC PE=3 SV=1
MDRQKAIVVFSGGQDSTTCMFHAMAHYDEVELVTFNYGQRHSTEIEVAENIAKEQGLKHRVLDMSLLGQLSPNALTDHDMDIAADEEAGVPNTFVPARNMLFLSFASAIAYQVGAKTIITGVCETDFSGYPDCRDIFIKSMNVTANLAMDRNFVIETPLMWLDKKETWALADKYGKLDYIRNRTLTCYEGVIGDGCGECPACQLRNAGLEAYLDEKEGQ

SEQ ID NO: 42012 - protein, 229 aa, Salinicola socius
  REGION 1..229: note = tr|A0A1Q8SPD1|A0A1Q8SPD1_9GAMM 7-cyano-7-deazaguanine synthase OS=Salinicola socius; OX = 404433 GN=queC PE=3 SV=1
MTPPTPHTTPQPAVVIYSGGMDSYTVLHRAIRQGYDVHALSFHYGQRHARELDVARHVCDELGVSHKVVDIRAIHQLIGNSALTDSDRDMPKADYAADNLADTVVPNRNMILLSLAIGHAVNIDAPICFYGAHGGDHVLYPDCRPAFVDRMNDVAAIANFEAVRIEAPYLHSDKAQILADGLEMGLDYAQTWTCYLGQETACGECGSCRERLNAFASLGMTDPLPYAKP

SEQ ID NO: 42013 - protein, 232 aa, Salinicola sp.
  REGION 1..232: note = tr|A0A2D8P052|A0A2D8P052_9GAMM 7-cyano-7-deazaguanine synthase OS=Salinicola sp.; OX = 1978524 GN=queC PE=3 SV=1
MTPSTSHTPSQPAVVIYSGGMDSYTVLHRAIREGYEVHALSFHYGQRHARELDVARRVCEDLGVSHRIVDIRAIHQLIGNSALTDSDRSLPKADYAEDNLAATVVPNRNMILLSLAIGYAVNIEASVCFYGAHGGDHVLYPDCRPAFVDRMNDVAAIANFESVSIEAPYLYSDKAKILSDGIEMGLDYALTWTCYLGGETACGECGSCRERLDAFARVGVKDPIPYALPDRH

SEQ ID NO: 42014 - protein, 229 aa, Salinicola sp.
  REGION 1..229: note = tr|A0A1Q8T3K1|A0A1Q8T3K1_9GAMM 7-cyano-7-deazaguanine synthase OS=Salinicola sp. MH3R3-1; OX = 1928762 GN=queC PE=3 SV=1
MTSSTSSSDSTPVVVIYSGGMDSYTVLHRAIREGYDVHALSFHYGQRHARELDVASRVCADLGLSHRVVDIRAIHELIGNSALTDSGRAMPKADYAEDNLADTVVPNRNMILLSLAIGYAVNIKAPICFYGAHGGDHVLYPDCRPAFVERMNDVSAIANFEAVSIEAPYLHSDKAQILADGIEMGLDYADTWTCYLGQEVACGECGSCRERLNAFAELGMKDPIPYATR

SEQ ID NO: 42015 - protein, 219 aa, unidentified
  source 1..219: note = Salinimonas sediminis
  REGION 1..219: note = tr|A0A346NK28|A0A346NK28_9ALTE 7-cyano-7-deazaguanine synthase OS=Salinimonas sediminis; OX = 2303538 GN=queC PE=3 SV=1
MTENVVVIYSGGMDSYTVLHKALAQGKQPYALSFDYGQRHKKELDYAASVCKQLNVPHKIVDISAINSIVGGSALTSDIDVPEGHYEEPSMQTTVVPNRNMILLSLAVGYAVSLDATKVYYGAHSGDHAIYPDCRPEFVEKMNQVCHIANYTPVEIVTPYLHESKIAILTDGLKMGLDYRQTWTCYNGREKACGQCGACQERLEAFAENKVKDPLEYEG

SEQ ID NO: 42016 - protein, 221 aa, Salinimonas sp.
  REGION 1..221: note = tr|A0A5B7YFT2|A0A5B7YFT2_9ALTE 7-cyano-7-deazaguanine synthase OS=Salinimonas sp. KX18D6; OX = 2572577 GN=queC PE=3 SV=1
MSENVVVIYSGGMDSYTVLNKAIREGKTPHALSFNYGQRHKKELDYAARVCERLGIPHKVVDISSINSLVGGSALTSDIDVPEGHYEEPSMQTTVVPNRNMILLSLAIGYAVSLEATKVYYGAHSGDHAIYPDCRPEFVEKMNSVSKIANYTPVEIVTPYLLESKTAILADGLFMGLDYSETWTCYNGREKACGKCGACQERLEAFADNGATDPLHYETVN

SEQ ID NO: 42017 - protein, 219 aa, unidentified
  source 1..219: note = Saliniradius amylolyticus
  REGION 1..219: note = tr|A0A2S2E1P3|A0A2S2E1P3_9ALTE 7-cyano-7-deazaguanine synthase OS=Saliniradius amylolyticus OX=2183582 GN=queC PE=3 SV=1
MAQKAVVIYSGGMDSFTVLHKALQQGMELYALSFDYGQRHKKELDYAAAVCADLGISHKIVDISAINTLVGGSALTDDIEVPEGHYEEQSMKSTVVPNRNMILLSLAVGYAVSLQANQVYYGAHSGDHAIYPDCRPEFVHKMNDVCAIANYEAVEIVTPYLNVSKTDILTDGLKMGLDYSQTWTCYNGRTLACGKCGACQERQEAFAQNQAADPLEYEN

SEQ ID NO: 42018 - protein, 233 aa, unidentified
  source 1..233: note = Salinisphaera halophila
  REGION 1..233: note = tr|A0A423PM86|A0A423PM86_9GAMM 7-cyano-7-deazaguanine synthase OS=Salinisphaera halophila YIM 95161 OX=1051139 GN=queC PE=3 SV=1
MTVAQDRADTPRAVVLFSGGLDSTTCLAEAAADGCECHALSFDYGQRHTAEIEAARRIAAAMPHVADHKCVTIDFDGMGGSALTDPTIDVPETATNGIPPTYVPARNTVFLSIALGWAEILEAEAIYIGVNAVDYSGYPDCRPAFIQAFESLASLATRAAVETGRGVAVRTPLMDLSKAEIVQRGAALGVDYADTVTCYQADAEGRACGRCDACRLRRQGFREAGIADPTRYR

SEQ ID NO: 42019 - protein, 233 aa, Salinisphaera hydrothermalis
  REGION 1..233: note = tr|A0A084IKJ5|A0A084IKJ5_SALHC 7-cyano-7-deazaguanine synthase OS=Salinisphaera hydrothermalis (strain C41B8) OX=1304275 GN=queC PE=3 SV=1
MSASEQPSAVVLLSGGLDSTTCLAEAAAAGYRCYALSFDYGQRHTAELTAARRIASAAGVVEHKIVKIDFDGMGGSALTDASIDVPESPTEGIPSTYVPARNTLFLSVALGWAEVLGADAIYIGVNAVDYSGYPDCRPEFIEAFERMAALATKVGVEGHPISVKTPLMHRTKAEIIARGHELGVDYSQTVTCYQADDDARACGLCDACRLRRAGFEAAGVPDPTRYQPDAPQS

SEQ ID NO: 42020 - protein, 228 aa, unidentified
  source 1..228: note = Salinisphaera japonica
  REGION 1..228: note = tr|A0A423PLU9|A0A423PLU9_9GAMM 7-cyano-7-deazaguanine synthase OS=Salinisphaera japonica YTM-1 OX=1209778 GN=queC PE=3 SV=1
MSQPTDKAAVVLLSGGLDSTTCLAEAKAAGHALYAVSFDYGQRHTAELSAARSIAASAGVVEHKVVTIDFDGMGGSALTDASIAVPETPGQGIPSTYVPARNTLFLSVALGWAEILEAGSIYIGVNAVDYSGYPDCRPEFIEAFESLGRLATKTGVEGRPIEIRAPLMHRTKAEIIRRGHELGVDYSQTISCYQADEHGRACGVCDACRLRAAGFAEAGVPDPTRYIG

SEQ ID NO: 42021 - protein, 233 aa, unidentified
  source 1..233: note = Salinisphaera orenii
  REGION 1..233: note = tr|A0A423PJT2|A0A423PJT2_9GAMM 7-cyano-7-deazaguanine synthase OS=Salinisphaera orenii MK-B5 OX=856730 GN=queC PE=3 SV=1
MTVAQDTADTPRAVVLFSGGLDSTTCLAEAAADGCECHALSFDYGQRHTAEIEAARRIAAAMPHVADHKCVTIDFDGMGGSALTDPAIDVPETATNGIPPTYVPARNTVFLSIALGWAEILEAEAIYIGVNAVDYSGYPDCRPAFIQAFESLASLATRAAVETGRGVAVRTPLMELSKAEIVQRGAALGVDYADTVTCYQADAEGRACGRCDACRLRRQGFRDAGIADPTRYR

SEQ ID NO: 42022 - protein, 230 aa, Salinisphaera shabanensis
  REGION 1..230: note = tr|F7QBJ1|F7QBJ1_9GAMM 7-cyano-7-deazaguanine synthase OS=Salinisphaera shabanensis E1L3A OX=1033802; GN = queC PE=3 SV=1
MTEPTRTPAVVLFSGGLDSTTCLAQARADGYDCYALSFDYGQRHTAELAAAQSYVADHEWIAEHKCVRLDFDGIGGSALTDPDIAVPETPANDIPATYVPARNTVFLSVALGWAEVLGAQAIYIGVNAVDYSGYPDCRPEFIEAFERLARLATKAAVQDGNFVSVQTPLIDLSKADIIRKGLSLGVDYARTVSCYQADMLGRACGRCDACRLRRAGFEQAGVTDPTIYQS

SEQ ID NO: 42023 - protein, 232 aa, Salinisphaera sp.
  REGION 1..232: note = tr|A0A2E9AJA8|A0A2E9AJA8_9GAMM 7-cyano-7-deazaguanine synthase OS=Salinisphaera sp.; OX = 1914330 GN=queC PE=3 SV=1
MSQPIRNRAVVLFSGGLDSTTCLAQAHADGHECYALSFDYGQRHTAELAAARAYVSEHDWIAEHKCVRLDFDGMGGSALTDPAINVPDAGGEGIPSTYVPARNTVFLSIALGWAEVLGAQAIYIGVNAVDYSGYPDCRPEFIDAFERMAALATKAAVQDGDRVSIKTPLIDLSKAEIIRQGVALGVDYARTVSCYQADVQGRACGRCDACELRRAGFEQAGVADPTIYQSER

SEQ ID NO: 42024 - protein, 233 aa, Salinisphaera sp.
  REGION 1..233: note = tr|A0A2Z3J7G5|A0A2Z3J7G5_9GAMM 7-cyano-7-deazaguanine synthase OS=Salinisphaera sp. LB1; OX = 2183911 GN=queC PE=3 SV=1
MSSSDQPLAVVLLSGGLDSTTCLAEAAAAGYRCYALSFDYGQRHTAELTAAKRIAAAAGVAEHKIVTIDFDGMGGSALTDDRIDVPETPSEGIPSTYVPARNTLFLSVALGWAEVLHADAIYIGVNAVDYSGYPDCRPEFIAAFERMAALATKAGVEGYPVALRTPLMHQTKAEIIQRGQALGVDYSQTVTCYQPDADARACGRCDACRLRRAGFEAAGVSDPTRYQPDAPNA

SEQ ID NO: 42025 - protein, 233 aa, unidentified
  source 1..233: note = Salinisphaeraceae bacterium
  REGION 1..233: note = tr|A0A2D4SFX2|A0A2D4SFX2_9GAMM 7-cyano-7-deazaguanine synthase OS=Salinisphaeraceae bacterium OX=2026789 GN=queC PE=3 SV=1
MSQAAESSGRAVVLLSGGLDSATCLALARAHGFACHTLALSYGQRHDAELRAARRLSGVLGAVEHKQVNIDLDGMGGSALTDASIEVPDEPGEGIPVTYVPARNTLMLSVALGWAEILDADQIFIGVNAVDYSGYPDCRPEYIESFQAMANLATRAAVQQGRRITIQAPLVRLSKAQIIERGLALGVDYAETVSCYRADRQGRACGRCDACRFRRAGFEDAGRPDPTRYQTPA

SEQ ID NO: 42026 - protein, 257 aa, Salinispora arenicola
  REGION 1..257: note = tr|A0A542XM38|A0A542XM38_9ACTN 7-cyano-7-deazaguanine synthase OS=Salinispora arenicola; OX = 168697 GN=queC PE=3 SV=1
MTRTPDPTGGDAAGITADLPVSGPDLPHIPAHAVVVCSGGLDSSVLAHWLAHLGSRLTVLAVDYGQRHRVELGFAGITADRLGAPSHVIDLSDVGRLLASALTDAQVQVPDGHYADDSMQVTVVPNRNAILLDLAVGLAVSTGADTVAFGAHAGDHPIYPDCRPEFVDAYRSMARVATEGLTSEPITVCAPFVRMTKTQIVALGTQLQVPLADTWSCYRGQSTHCGTCGTCTERREAFHHAEVPDPTRYAAGRDRVT

SEQ ID NO: 42027 - protein, 231 aa, unidentified
  source 1..231: note = Salinivibrio kushneri
  REGION 1..231: note = tr|A0A1V3GM42|A0A1V3GM42_9GAMM 7-cyano-7-deazaguanine synthase OS=Salinivibrio kushneri; OX = 1908198 GN=queC PE=3 SV=1
MKKAVVVFSGGQDSTTCLIQAQAEYDEVHCLTFDYNQRHKQEIDVAREIAANRKVSAHKVLDVGLLNELAISSLTRDNIPVSNALNENGLPNSFVPGRNILFLTLAGIYAYQIGAEAVITGVCETDFSGYPDCRNDFIQSMQQALERGMDRQLALVTPLMWLNKAETWALADQYHALDFVRDHTLTCYNGIKGTGCGECPACHLRQRGLDDYLANQTDVQAALQRKQAENA

SEQ ID NO: 42028 - protein, 231 aa, Salinivibrio sharmensis
  REGION 1..231: note = tr|A0A1V3H4W0|A0A1V3H4W0_9GAMM 7-cyano-7-deazaguanine synthase OS=Salinivibrio sharmensis; OX = 390883 GN=queC PE=3 SV=1
MKKAVVVFSGGQDSTTCLIQAQAEYDEVHCLTFDYNQRHKQEIDVAREIAANRKVSAHKVLDVGLLNELAISSLTRDNIPVSNALNENGLPNSFVPGRNILFLTLAGIYAYQIGAEAVITGVCETDFSGYPDCRNDFIQSMQQALERGMDRKLALVTPLMWLNKAETWALADQYHALDFVRDHTLTCYNGIKGTGCGECPACHLRQRGLDDYLANQADVQAALRRKQAENA

SEQ ID NO: 42029 - protein, 231 aa, Salinivibrio sp.
  REGION 1..231: note = tr|A0A1V3H911|A0A1V3H911_9GAMM 7-cyano-7-deazaguanine synthase OS=Salinivibrio sp. MA351; OX = 1909453 GN=queC PE=3 SV=1
MKKAVVVFSGGQDSTTCLIQAQAEYDEVHCLTFDYNQRHKQEIDVAREIAANRKVSAHKVLDVGLLNELAISSLTRDNIPVSNALNENGLPNSFVPGRNILFLTLAGIYAYQIGAEAVITGVCETDFSGYPDCRNDFIQSMQQALEQGMDRQLALVTPLMWLNKAETWALADQYHALDFVRDHTLTCYNGIKGTGCGECPACHLRQRGLDDYLANQTDVQAALQRKQAENA

SEQ ID NO: 42030 - protein, 231 aa, Salinivibrio sp.
  REGION 1..231: note = tr|A0A1V3I0R6|A0A1V3I0R6_9GAMM 7-cyano-7-deazaguanine synthase OS=Salinivibrio sp. IB872; OX = 1766123 GN=queC PE=3 SV=1
MKKAVVVFSGGQDSTTCLIQAQAEYDEVHCLTFDYNQRHKQEIDVAREIAANRNVSAHKVLDVGLLNELAISSLTRDNIPVSNALNENGLPNSFVPGRNILFLTLAGIYAYQIGAEAVITGVCETDFSGYPDCRNDFIQSMQQALERGMDRKLALVTPLMWLNKAETWALADQYHALDFVRDHTLTCYNGIKGTGCGECPACHLRQRGLDDYLSNQADVQAALRRKQAENA

SEQ ID NO: 42031 - protein, 251 aa, unidentified
  source 1..251: note = Salinivirga cyanobacteriivorans
  REGION 1..251: note = tr|A0A0S2HW40|A0A0S2HW40_9BACT Uncharacterized protein OS=Salinivirga cyanobacteriivorans OX=1307839; GN = L21SP5_00611 PE=4 SV=1
MTKTAVNLLWTGGLDSTFRTLEALLIEKRVVKPYYMLDTARFSLRNEIKAMSKIKDLLFEKHPFTKELLLPIQYVDVDDIKTDQTIQKAFKELSSIRHLGIQYRWLAEFCVEHGIKDLELGIIRKGEASDHGEALSESLDPFIEPIDSDEKVYKINTEKTKADGSQKAMLYEKVFENYHLPIITYSKKDMVEMAKKNGWMDFVGLTWYCHRPRKFKYPCGKCNPCKTAKQEGVAKKTPLIRWKYFYKEKYS

SEQ ID NO: 42032 - protein, 218 aa, unidentified
  source 1..218: note = Salipaludibacillus aurantiacus
  REGION 1..218: note = tr|A0A1H9S7N4|A0A1H9S7N4_9BACI 7-cyano-7-deazaguanine synthase OS=Salipaludibacillus aurantiacus OX=1601833 GN=queC PE=3 SV=1
MKNEKAIVVFSGGQDSTTCLFWALDNFKEVETVTFNYNQRHRTEIEVAEGIAKELGVKHRVLDMGLLNQLAPNALTRDDISIEEKEGELPSTFVEGRNLLFLTFAAIAGKQSGADHIVTGVCETDFSGYPDCRDVFIKSLNVTLNLSMDHSFVIHTPLMWLDKADTWKLADDLGAFEFVRNKTLTCYNGILSDGCGECPACLLRKKGLEEYLQRKEAR

SEQ ID NO: 42033 - protein, 214 aa, unidentified
  source 1..214: note = Salipaludibacillus keqinensis
  REGION 1..214: note = tr|A0A323TKC9|A0A323TKC9_9BACI 7-cyano-7-deazaguanine synthase OS=Salipaludibacillus keqinensis OX=2045207 GN=queC PE=3 SV=1
MKNDKALVVFSGGQDSTTCLFWALNNFKEVETVTFDYNQRHKLEIDVAQTISDELNVKNTVLDMSLLNQLAPSALTRNDIDIKESDGEPPSTFVEGRNLLFLSFASILAKQIGAKHIVTGVCETDFSGYPDCRDVFVKSLNVSLNLSMDHQFVIHTPLMWLDKAETWALADELEAFEFVRNKTLTCYNGIISDGCGECPACILRRRGLETYLQR

SEQ ID NO: 42034 - protein, 217 aa, unidentified
  source 1..217: note = Salipaludibacillus neizhouensis
  REGION 1..217: note = tr|A0A3A9KDG4|A0A3A9KDG4_9BACI 7-cyano-7-deazaguanine synthase OS=Salipaludibacillus neizhouensis OX=885475 GN=queC PE=3 SV=1
MKNDKAIVVFSGGQDSTTCLFWALENFKEVETVTFNYNQRHKLEIEVAEGIAKELGVKHTLLDMGLLNQLAPNALTREDIDITQEADELPSTFVEGRNLLFLSFAAILAKQAGAKHLVTGVCETDFSGYPDCRDIFVKSLNVTLNLAMDNQFVIHTPLMWLDKAETWGLADDLHAFEFVREKTLTCYNGVIADGCGECPACELRQKGLDKYLSKDKR

SEQ ID NO: 42035 - protein, 233 aa, unidentified
  source 1..233: note = Salipiger thiooxidans
  REGION 1..233: note = tr|A0A1G7FJ60|A0A1G7FJ60_9RHOB 7-cyano-7-deazaguanine synthase OS=Salipiger thiooxidans; OX = 282683 GN=queC PE=3 SV=1
MKTLVICSGGLDSVSLAHIIADQQQLTRLVSFDYGQRHRKELDFAAAAARRLNVPHHLIDMRGIGASLSGSALTDDIDVPDGHYAEETMRITVVPNRNAIMLAIGFGVAAANGDEAVATAVHGGDHFIYPDCRPAFTQAFDAMQQAALDGYASVRLHTPFVERSKADIVRAGAAHGTPFAETWSCYKGGELHCGRCGTCVERREAFHLAGVGDPTAYADPDYWAQAVAARGTA

SEQ ID NO: 42036 - protein, 221 aa, unidentified
  source 1..221: note = Salisediminibacterium haloalkalitolerans
  REGION 1..221: note = tr|A0A1H9T8B9|A0A1H9T8B9_9BACI 7-cyano-7-deazaguanine synthase OS=Salisediminibacterium haloalkalitolerans OX=1464123 GN=queC PE=3 SV=1
MNEAKEKAVVVFSGGQDSTTCLFWALEHFDEVETVTFDYQQRHRKEIETAAAIAEAQGVRHHLLDMSLLHQLAPNALTRDDIAVEHKEGELPSTFVPGRNLLFLSFATILARQIGAKHVVTGVCQTDFSGYPDCRDMFIKSLNVTLNLSMDDEFVLHTPLMWLDKKETWALADDLGVLETVREQTLTCYNGIPGDGCGECPACELRRRGLEQHLAAKEESR

SEQ ID NO: 42037 - protein, 231 aa, unidentified
  source 1..231: note = Salmonella abony
  REGION 1..231: note = tr|A0A5J0DY30|A0A5J0DY30_SALAB 7-cyano-7-deazaguanine synthase QueC OS=Salmonella abony; OX = 29482 GN=queC PE=4 SV=1
MKRAVVVFSGGQDSTTCLAQARHQYDEVHCVTFDYGQRHRAEIDVARALALKLGARAHKVLDVTLLNELAVSSLTRDSIPVPDYEPNADGIPNTFVPGRNILFLTLAAIYAYQVKAEAVITGVCETDFSGYPDCRDEFVKALNHAVNLGMAKDIRFETPLMWIDKAETWALADYWGQLDLVREETLTCYNGIKGDGCGHCAACNLRANGLNHYLSNKAAVMAAMKQKTGLR

SEQ ID NO: 42038 - protein, 231 aa, unidentified; identical to SEQ ID NO: 42037
  source 1..231: note = Salmonella agona
  REGION 1..231: note = sp|B5EXJ5|QUEC_SALA4 7-cyano-7-deazaguanine synthase; OS = Salmonella agona (strain SL483) OX=454166 GN=queC PE=3; SV = 1

SEQ ID NO: 42039 - protein, 231 aa, unidentified; identical to SEQ ID NO: 42037
  source 1..231: note = Salmonella anatum
  REGION 1..231: note = tr|A0A3Y5S9X1|A0A3Y5S9X1_SALAN 7-cyano-7-deazaguanine synthase OS=Salmonella anatum; OX = 58712 GN=queC PE=3 SV=1

SEQ ID NO: 42040 - protein, 231 aa, unidentified
  source 1..231: note = Salmonella anatum
  REGION 1..231: note = tr|A0A2T8MNL6|A0A2T8MNL6_SALAN 7-cyano-7-deazaguanine synthase OS=Salmonella anatum; OX = 58712 GN=queC PE=3 SV=1
MKRAVVVFSGGQDSTTCLAQARHQYDEVHCVTFDYGQRHRAEIDVARALALKLGARAHKVLDVTLLNELAVSSLTRDSIPVPDYEPNADGIPNTFVPGRNILFLTLAAIYAYQVKAEAVITGVCETDFSGYPDCRDEFVKALNHAVNLGMAKDIRFETPLMWIDKAETWALADYWGQLDLVREETLTCYNGIKGDGCGHCAACNLRANGLNHYLSNKAAVMTAMKQKTGLR

SEQ ID NO: 42041 - protein, 231 aa, unidentified
  source 1..231: note = Salmonella arizonae
  REGION 1..231: note = sp|A9MM16|QUEC_SALAR 7-cyano-7-deazaguanine synthase; OS = Salmonella arizonae (strain ATCC BAA-731 / CDC346-86 / RSK2980) OX=41514 GN=queC PE=3 SV=1
MKRAVVVFSGGQDSTTCLAQALHQYDEVHCVTFDYGQRHRAEIDVARSLALKLGVRAHKMLDVTLLNELAVSSLTRDSIPVPDYEPNADGIPNTFVPGRNILFLTLAAIYAYQVKAEAVITGVCETDFSGYPDCRDEFVKALNRAVNLGMAKDIRFETPLMWLDKAETWALADYWGKLNLVREETLTCYNGIKGDGCGHCAACNLRANGLNHYLADKAAVVTAMKQKTGLQ

SEQ ID NO: 42042 - protein, 231 aa, unidentified; identical to SEQ ID NO: 42037
  source 1..231: note = Salmonella berta
  REGION 1..231: note = tr|A0A3V6R3V2|A0A3V6R3V2_SALBE 7-cyano-7-deazaguanine synthase OS=Salmonella berta; OX = 28142 GN=queC PE=3 SV=1

SEQ ID NO: 42043 - protein, 231 aa, unidentified
  source 1..231: note = Salmonella berta
  REGION 1..231: note = tr|A0A3U8PAH7|A0A3U8PAH7_SALBE 7-cyano-7-deazaguanine synthase OS=Salmonella berta; OX = 28142 GN=queC PE=3 SV=1
MKRAVVVFSGGQDSTTCLAQARHQYDEVHCVTFDYGQRHRAEIDVARALTLKLGARAHKVLDVTLLNELAVSSLTRDSIPVPDYEPNADGIPNTFVPGRNILFLTLAAIYAYQVKAEAVITGVCETDFSGYPDCRDEFVKALNHAVNLGMAKDIRFETPLMWIDKAETWALADYWGQLDLVREETLTCYNGIKGDGCGHCAACNLRANGLNHYLSNKAAVMAAMKQKTGLR

SEQ ID NO: 42044 - protein, 231 aa, unidentified; identical to SEQ ID NO: 42037
  source 1..231: note = Salmonella blockley
  REGION 1..231: note = tr|A0A5H8H7E3|A0A5H8H7E3_SALBL 7-cyano-7-deazaguanine synthase QueC OS=Salmonella blockley OX=57741 GN=queC PE=4 SV=1

SEQ ID NO: 42045 - protein, 231 aa, Salmonella bongori
  REGION 1..231: note = tr|A0A248KBQ1|A0A248KBQ1_SALBN 7-cyano-7-deazaguanine synthase OS=Salmonella bongori serovar 66:z41:- str. SA19983605 OX=1243617 GN=queC PE=3; SV = 1
MKRAVVVFSGGQDSTTCLAQTLHQYDEVHCVTFDYGQRHRAEIDVARSLALKLGARAHKVLDVTLLNELAVSSLTRDSIPVPDYEPNADGIPNTFVPGRNILFLTLAAIYAYQVKAEAVITGVCETDFSGYPDCRDEFVKALNHAVSLGMAKNIRFETPLMWIDKAETWALADYWGKLDLVREETLTCYNGIKGDGCGHCAACNLRANGLNHYLSDKAAIMAAMKQKTGLK

SEQ ID NO: 42046 - protein, 231 aa, Salmonella bongori; identical to SEQ ID NO: 42045
  REGION 1..231: note = tr|A0A5I6MY26|A0A5I6MY26_SALBN 7-cyano-7-deazaguanine synthase QueC OS=Salmonella bongori CFSAN000510 OX=1299282 GN=queC PE=4 SV=1

SEQ ID NO: 42047 - protein, 231 aa, unidentified
  source 1..231: note = Salmonella choleraesuis
  REGION 1..231: note = sp|Q57SA8|QUEC_SALCH 7-cyano-7-deazaguanine synthase; OS = Salmonella choleraesuis (strain SC-B67) OX=321314; GN = queC PE=3 SV=2
MKRAVVVFSGGQDSTTCLAQARHQYDEVHCVTFDYGQRHRAEIDVARELALKLGARAHKVLDVTLLNELAVSSLTRDSIPVPDYEPNADGIPNTFVPGRNILFLTLAAIYAYQVKAEAVITGVCETDFSGYPDCRDEFVKALNHAVNLGMAKDIRFETPLMWIDKAETWALADYWGQLDLVREETLTCYNGIKGDGCGHCAACNLRANGLNHYLSNKAAVMAAMKQKTGLR

SEQ ID NO: 42048 - protein, 231 aa, unidentified
  source 1..231: note = Salmonella derby
  REGION 1..231: note = tr|A0A3Y7QVX0|A0A3Y7QVX0_SALDE 7-cyano-7-deazaguanine synthase OS=Salmonella derby; OX = 28144 GN=queC PE=3 SV=1
MKRAVVVFSGGQDSTTCLAQARHQYDEVHCVTFDYGQRHRVEIDVARALALKLGARAHKVLDVTLLNELAVSSLTRDSIPVPDYEPNADGIPNTFVPGRNILFLTLAAIYAYQVKAEAVITGVCETDFSGYPDCRDEFVKALNHAVNLGMAKDIRFETPLMWIDKAETWALADYWGQLDLVREETLTCYNGIKGDGCGHCAACNLRANGLNHYLSNKAAVMAAMKQKTGLR

SEQ ID NO: 42049 - protein, 231 aa, unidentified; identical to SEQ ID NO: 42037
  source 1..231: note = Salmonella derby
  REGION 1..231: note = tr|A0A4P5EXW7|A0A4P5EXW7_SALDE 7-cyano-7-deazaguanine synthase OS=Salmonella derby; OX = 28144 GN=queC PE=3 SV=1

SEQ ID NO: 42050 - protein, 65 aa, unidentified
  source 1..65: note = Salmonella diarizonae
  REGION 1..65: note = tr|A0A379U2F6|A0A379U2F6_SALDZ 7-cyano-7-deazaguanine synthase OS=Salmonella diarizonae; OX = 59204 GN=ybaX_1 PE=3 SV=1
MKRAVVVFSGGQDSTTCLAQARHQYDEVHCVTFDYGQRHRAEIDVARSLALNLARARIKCWMSLC

SEQ ID NO: 42051 - protein, 231 aa, unidentified
  source 1..231: note = Salmonella diarizonae
  REGION 1..231: note = tr|A0A2I5HJV3|A0A2I5HJV3_SALDZ 7-cyano-7-deazaguanine synthase OS=Salmonella diarizonae; OX = 59204 GN=ybaX PE=3 SV=1
MKRAVVVFSGGQDSTTCLAQARHQYDEVHCVTFDYGQRHRAEIDVARSLALKLGARAHKVLDVTLLNELAVSSLTRDSIPVPDYEPNADGIPNTFVPGRNILFLTLAAIYAYQVKAEAVITGVCETDFSGYPDCRDEFVKALNHAVNLGMAKDIRFETPLMWIDKAETWALADYWGKLDLVREETLTCYNGIKGDGCGHCAACNLRANGLNHYLANKATVMAAMKQKTGLR

SEQ ID NO: 42052 - protein, 231 aa, unidentified; identical to SEQ ID NO: 42037
  source 1..231: note = Salmonella dublin
  REGION 1..231: note = tr|A0A3T3IJT8|A0A3T3IJT8_SALDU 7-cyano-7-deazaguanine synthase OS=Salmonella dublin; OX = 98360 GN=queC PE=3 SV=1

SEQ ID NO: 42053 - protein, 231 aa, unidentified; identical to SEQ ID NO: 42037
  source 1..231: note = Salmonella dublin
  REGION 1..231: note = sp|B5FKW0|QUEC_SALDC 7-cyano-7-deazaguanine synthase; OS = Salmonella dublin (strain CT_02021853) OX=439851; GN = queC PE=3 SV=1

SEQ ID NO: 42054 - protein, 446 aa, Salmonella enterica
  REGION 1..446: note = tr|G5QTL1|G5QTL1_SALRU 7-cyano-7-deazaguanine synthase OS=Salmonella enterica subsp. enterica serovar Rubislaw str. A4-653 OX=913081 GN=LTSERUB_6619 PE=3 SV=1
MNIYVEYDHTKLPLADEKTVSVQIYSRDAVVIKNGIKPRDDIATIGKPIFDAIKRLGVSISDEVMDFLTISLAVTAADTFIIRDNCFDGWTRNINLFVSLNNPAIWKKNKPLLEKALQFLSGDVWNFNFKGDGPKPPQPFKAVNGRKLINLEGLDCVSLFSGGLDSAIGVIDFLSSGRKPLLISHSYKGDKTKQDQIAHKIREKGTFSRLRSSANPIGRGMTRDITMRTRSLNFLAFALVGAYAVKQINNHKDLSIFVPENGFISLNAPLTHRRVGSLSTRTTHPYFIEMIQKLFNNLGFGVRLINPYQFMTKGQMVSNCKDAKMLSEIVDLTVSCSHWKRKNQQCGYCVPCMIRRAALMKGTLKESISYHHASYPTLRDFVKNKQDGRDDVIAVSVALDKSKKINLKSWVLKSGKLKFEDLDKYEQVFSDGLLEVEDFLKKEKVI

SEQ ID NO: 42055 - protein, 231 aa, Salmonella enterica; identical to SEQ ID NO: 42041
  REGION 1..231: note = tr|A0A379PPY2|A0A379PPY2_SALER 7-cyano-7-deazaguanine synthase OS=Salmonella enterica; OX = 28901 GN=ybaX PE=3 SV=1

SEQ ID NO: 42056 - protein, 159 aa, unidentified
  source 1..159: note = Salmonella enteritidis
  REGION 1..159: note = tr|A0A3E2LU67|A0A3E2LU67_SALEN 7-cyano-7-deazaguanine synthase (Fragment) OS=Salmonella enteritidis OX=149539 GN=queC PE=3 SV=1
MKKTVVVFSGGQDSTTCLIQALEQYDEVHCITFNYGQRHKEEIEVAQRVSQLLGATAHKVLDVSLLNELAISSLTRDNIPVPDFKQSEQSDIPSTFVPGRNILFLTLAAIYAYQIGAESVITGVCETDFSGYPDCRDEFVKALNHAVNLGIARDIQFIT

SEQ ID NO: 42057 - protein, 231 aa, unidentified; identical to SEQ ID NO: 42037
  source 1..231: note = Salmonella enteritidis
  REGION 1..231: note = sp|B5QU45|QUEC_SALEP 7-cyano-7-deazaguanine synthase; OS = Salmonella enteritidis PT4 (strain P125109) OX=550537; GN = queC PE=3 SV=1

SEQ ID NO: 42058 - protein, 231 aa, unidentified
  source 1..231: note = Salmonella gallinarum
  REGION 1..231: note = tr|A0A3V9NJC8|A0A3V9NJC8_SALGL 7-cyano-7-deazaguanine synthase OS=Salmonella gallinarum; OX = 594 GN=queC PE=3 SV=1
MKRAVVVFSGGQDSTTCLAQARHQYDEVHCVTFDYGQRHRAEIDVARALALKLGTRAHKVLDVTLLNELAVSSLTRDSIPVPDYEPNADGIPNTFVPGRNILFLTLAAIYAYQVKAEAVITGVCETDFSGYPDCRDEFVKALNHAVNLGMAKDIRFETPLMWIDKAETWALADYWGQLDLVREETLTCYNGIKGDGCGHCAACNLRANGLNHYLSNKAAVMAAMKQKTGLR

SEQ ID NO: 42059 - protein, 231 aa, unidentified; identical to SEQ ID NO: 42058
  source 1..231: note = Salmonella gallinarum
  REGION 1..231: note = sp|B5R6V6|QUEC_SALG2 7-cyano-7-deazaguanine synthase; OS = Salmonella gallinarum (strain 287/91 / NCTC 13346); OX = 550538 GN=queC PE=3 SV=1

SEQ ID NO: 42060 - protein, 231 aa, unidentified
  source 1..231: note = Salmonella hadar
  REGION 1..231: note = tr|A0A3V2W4L4|A0A3V2W4L4_SALHA 7-cyano-7-deazaguanine synthase OS=Salmonella hadar; OX = 149385 GN=queC PE=3 SV=1
MKRAVVVFSGGQDSTTCLAQARHQYDEVHCVTFDYGQRHRAEIDVARALALKLGARAHKVLDVTLLNELAVSSLTRDSIPVPDYEPNADGIPNTFVPGRNILFLTLAAVYAYQVKAEAVITGVCETDFSGYPDCRDEFVKALNHAVNLGMAKDIRFETPLMWIDKAETWALADYWGQLDLVREETLTCYNGIKGDGCGHCAACNLRANGLNHYLSNKAAVMAAMKQKTGLR

SEQ ID NO: 42061 - protein, 231 aa, unidentified; identical to SEQ ID NO: 42058
  source 1..231: note = Salmonella heidelberg
  REGION 1..231: note = sp|B4T9F0|QUEC_SALHS 7-cyano-7-deazaguanine synthase; OS = Salmonella heidelberg (strain SL476) OX=454169 GN=queC; PE = 3 SV=1

SEQ ID NO: 42062 - protein, 231 aa, unidentified
  source 1..231: note = Salmonella houtenae
  REGION 1..231: note = tr|A0A1J6Z5Q6|A0A1J6Z5Q6_SALHO 7-cyano-7-deazaguanine synthase OS=Salmonella houtenae; OX = 59205 GN=queC PE=3 SV=1
MKRAVVVFSGGQDSTTCLAQARHQYDEVHCVTFDYGQRHRAEIDVARDLALKLGARAHKVLDVTLLNELAVSSLTRDSIPVPDYEPNADGIPNTFVPGRNILFLTLAAIYAYQVKAEAVITGVCETDFSGYPDCRDEFVNALNHAVNLGMAKDIRFETPLMWLDKAETWALADYWGKLDLVREETLTCYNGIKGDGCGHCAACNLRANGLNHYLSNKAAVMAAMKQKTGLR

SEQ ID NO: 42063 - protein, 231 aa, unidentified; identical to SEQ ID NO: 42037
  source 1..231: note = Salmonella infantis
  REGION 1..231: note = tr|A0A3R0DF26|A0A3R0DF26_SALIN 7-cyano-7-deazaguanine synthase OS=Salmonella infantis; OX = 595 GN=queC PE=3 SV=1

SEQ ID NO: 42064 - protein, 231 aa, unidentified; identical to SEQ ID NO: 42047
  source 1..231: note = Salmonella infantis
  REGION 1..231: note = tr|A0A3W0HM37|A0A3W0HM37_SALIN 7-cyano-7-deazaguanine synthase OS=Salmonella infantis; OX = 595 GN=queC PE=3 SV=1

SEQ ID NO: 42065 - protein, 231 aa, unidentified
  source 1..231: note = Salmonella montevideo
  REGION 1..231: note = tr|A0A5H3HL08|A0A5H3HL08_SALMO 7-cyano-7-deazaguanine synthase QueC OS=Salmonella montevideo OX=115981 GN=DOA62_06985 PE=4 SV=1
MKRAVVVFSGGQDSTTCLAQARHQYDEVHCVTFDYGQRHRAEIDVARALALKLGARAHKVLDVTLLNELAVSSLTRDSIPVPDYEPNADGIPNTFVPGRNILFLTLAAIYAYQVKAEAVITGVCETDFSGYPDCRDEFVKALNHAVNLGMAKDIRFETPLMWIDKAETWALADYWGQLELVREETLTCYNGIKGDGCGHCAACNLRANGLNHYLSNKAAVMAAMKQKTGLR

SEQ ID NO: 42066 - protein, 231 aa, unidentified
  source 1..231: note = Salmonella montevideo
  REGION 1..231: note = tr|A0A3V2EPB2|A0A3V2EPB2_SALMO 7-cyano-7-deazaguanine synthase OS=Salmonella montevideo; OX = 115981 GN=queC PE=3 SV=1
MKRAVVVFSGGQDSTTCLAQARHQYDEVHCVTFDYGQRHRAEIDVARALALQLGARAHKVLDVTLLNELAVSSLTRDSIPVPDYEPNADGIPNTFVPGRNILFLTLAAIYAYQVKAEAVITGVCETDFSGYPDCRDEFVKALNHAVNLGMAKDIRFETPLMWIDKAETWALADYWGQLDLVREETLTCYNGIKGDGCGHCSACNLRANGLNHYLSNKAAVMAAMKQKTGLR

SEQ ID NO: 42067 - protein, 231 aa, unidentified; identical to SEQ ID NO: 42037
  source 1..231: note = Salmonella moscow
  REGION 1..231: note = tr|A0A5H7LI74|A0A5H7LI74_SALMC 7-cyano-7-deazaguanine synthase QueC OS=Salmonella moscow; OX = 28146 GN=queC PE=4 SV=1

SEQ ID NO: 42068 - protein, 231 aa, unidentified; identical to SEQ ID NO: 42037
  source 1..231: note = Salmonella muenchen
  REGION 1..231: note = tr|A0A3T3ETC5|A0A3T3ETC5_SALMU 7-cyano-7-deazaguanine synthase OS=Salmonella muenchen; OX = 596 GN=queC PE=3 SV=1

SEQ ID NO: 42069 - protein, 231 aa, unidentified
  source 1..231: note = Salmonella muenster
  REGION 1..231: note = tr|A0A5J1AUK3|A0A5J1AUK3_SALMS 7-cyano-7-deazaguanine synthase QueC OS=Salmonella muenster OX=82689 GN=queC PE=4 SV=1
MKRAVVVFSGGQDSTTCLAQARHQYDEVHCVTFDYGQRHRAEIDVARALALKLGARAHKVLDVTLLNELAVSSLTRDSIPVPDYEPNADGIPNTFVPGRNILFLTLAAIYAYQVKAEAVITGVCETDFSGYPDCRDEFVKALNHAVNLGMAKDIRFETPLMWIDKAETWALADYWGQLDLVREETLTCYNGIKGNGCGHCAACNLRANGLNHYLSNKAAVMAAMKQKTGLR

SEQ ID NO: 42070 - protein, 231 aa, unidentified; identical to SEQ ID NO: 42037
  source 1..231: note = Salmonella muenster
  REGION 1..231: note = tr|A0A5H8VT06|A0A5H8VT06_SALMS 7-cyano-7-deazaguanine synthase QueC OS=Salmonella muenster OX=82689 GN=queC PE=3 SV=1

SEQ ID NO: 42071 - protein, 231 aa, unidentified; identical to SEQ ID NO: 42065
  source 1..231: note = Salmonella newport
  REGION 1..231: note = tr|A0A3T3D5C8|A0A3T3D5C8_SALNE 7-cyano-7-deazaguanine synthase OS=Salmonella newport; OX = 108619 GN=queC PE=3 SV=1

SEQ ID NO: 42072 - protein, 231 aa, unidentified
  source 1..231: note = Salmonella newport
  REGION 1..231: note = tr|A0A0R9MP25|A0A0R9MP25_SALNE 7-cyano-7-deazaguanine synthase OS=Salmonella newport; OX = 108619 GN=queC PE=3 SV=1
MKRAVVVFSGGQDSTTCLAQARHQYDEVHCVTFDYGQRHRAEIDVARDLALKLGARAHKVLDVTLLNELAVSSLTRDSIPVPDYEPNADGIPNTFVPGRNILFLTLAAIYAYQVKAEAVITGVCETDFSGYPDCRDEFVKALNHAVNLGMAKDIRFETPLMWIDKAETWALADYWGQLDLVREETLTCYNGIKGDGCGHCAACNLRANGLNHYLSNKAAVMAAMKQKTGLR

SEQ ID NO: 42073 - protein, 231 aa, unidentified; identical to SEQ ID NO: 42037
  source 1..231: note = Salmonella oranienberg
  REGION 1..231: note = tr|A0A3Z0YK71|A0A3Z0YK71_SALON 7-cyano-7-deazaguanine synthase OS=Salmonella oranienberg; OX = 28147 GN=queC PE=3 SV=1

SEQ ID NO: 42074 - protein, 231 aa, unidentified
  source 1..231: note = Salmonella oranienberg
  REGION 1..231: note = tr|A0A5I6FDK6|A0A5I6FDK6_SALON 7-cyano-7-deazaguanine synthase QueC OS=Salmonella oranienberg OX=28147 GN=queC PE=4 SV=1
MKRAVVVFSGGQDSTTCLAQARHQYDEVHCVTFDYGQRHRAEIDVARALALKLGARAHKVLDVTLLNELAVSSLTRDSIPVPDYEPNADGIPNTFVPGRNILFLTLAAIYAYQVKAEAVITGVCETDFSGYPDCRDEFVKALNHAVNLGMAKDIRFETPLMWIDKAETWALADYWGQLDLVREETLTCYNGIKGDGCGHCAACNLRAKGLNHYLSNKAAVMAAMKQKTGLR

SEQ ID NO: 42075 - protein, 231 aa, unidentified; identical to SEQ ID NO: 42060
  source 1..231: note = Salmonella paratyphi
  REGION 1..231: note = tr|A0A3Z1EEX2|A0A3Z1EEX2_SALPB 7-cyano-7-deazaguanine synthase OS=Salmonella paratyphi B (strain ATCC BAA-1250 / SPB7) OX=1016998 GN=queC PE=3 SV=1

SEQ ID NO: 42076 - protein, 231 aa, unidentified
  source 1..231: note = Salmonella paratyphi
  REGION 1..231: note = sp|B5BD76|QUEC_SALPK 7-cyano-7-deazaguanine synthase; OS = Salmonella paratyphi A (strain AKU_12601) OX=554290; GN = queC PE=3 SV=1
MKRAVVVFSGGQDSTTCLAQARHQYDEVHCVTFDYGQRHRAEIDVARALALKLGARAHKVLDVTLLNELAVSSLTRDSIPVPDYEPNADGIPNTFVPGRNILFLTLVAIYAYQVKAEAVITGVCETDFSGYPDCRDEFVKALNHAVNLGMAKDIRFETPLMWIDKAETWALADYWGQLDLVREETLTCYNGIKGDGCGHCAACNLRANGLNHYLSNKSAVMAAMKQKTGLR

SEQ ID NO: 42077 - protein, 231 aa, unidentified; identical to SEQ ID NO: 42037
  source 1..231: note = Salmonella potsdam
  REGION 1..231: note = tr|A0A5H7F0Y3|A0A5H7F0Y3_SALPO 7-cyano-7-deazaguanine synthase QueC OS=Salmonella potsdam; OX = 597 GN=queC PE=4 SV=1

SEQ ID NO: 42078 - protein, 231 aa, unidentified
  source 1..231: note = Salmonella potsdam
  REGION 1..231: note = tr|A0A5I2XCX9|A0A5I2XCX9_SALPO 7-cyano-7-deazaguanine synthase QueC OS=Salmonella potsdam; OX = 597 GN=queC PE=4 SV=1
MKRAVVVFSGGQDSTTCLAQARHQYDEVHCVTFDYGQRHRAEIDVARDLALKLGARAHKVLDVTLLNELAVSSLTRDSIPVPDYEPNANGIPNTFVPGRNILFLTLAAIYAYQVKAEAVITGVCETDFSGYPDCRDEFVKALNHAVNLGMAKDIRFETPLMWIDKAETWALADYWGQLDLVREETLTCYNGIKGDGCGHCAACNLRANGLNHYLSNKAAVMAAMKQKTGLR

SEQ ID NO: 42079 - protein, 231 aa, unidentified; identical to SEQ ID NO: 42074
  source 1..231: note = Salmonella rubislaw
  REGION 1..231: note = tr|A0A3V7IKK6|A0A3V7IKK6_SALRU 7-cyano-7-deazaguanine synthase OS=Salmonella rubislaw; OX = 598 GN=queC PE=3 SV=1

SEQ ID NO: 42080 - protein, 231 aa, unidentified; identical to SEQ ID NO: 42065
  source 1..231: note = Salmonella rubislaw
  REGION 1..231: note = tr|A0A5I8H2A5|A0A5I8H2A5_SALRU 7-cyano-7-deazaguanine synthase QueC OS=Salmonella rubislaw OX=598 GN=queC PE=4 SV=1

SEQ ID NO: 42081 - protein, 231 aa, unidentified; identical to SEQ ID NO: 42065
  source 1..231: note = Salmonella schwarzengrund
  REGION 1..231: note = sp|B4TMD3|QUEC_SALSV 7-cyano-7-deazaguanine synthase; OS = Salmonella schwarzengrund (strain CVM19633) OX=439843; GN = queC PE=3 SV=1

SEQ ID NO: 42082 - protein, 231 aa, unidentified; identical to SEQ ID NO: 42037
  source 1..231: note = Salmonella senftenberg
  REGION 1..231: note = tr|A0A3R0HJH2|A0A3R0HJH2_SALSE 7-cyano-7-deazaguanine synthase OS=Salmonella senftenberg; OX = 28150 GN=queC PE=3 SV=1

SEQ ID NO: 42083 - protein, 231 aa, unidentified; identical to SEQ ID NO: 42069
  source 1..231: note = Salmonella senftenberg
  REGION 1..231: note = tr|A0A3Y5ZCK2|A0A3Y5ZCK2_SALSE 7-cyano-7-deazaguanine synthase OS=Salmonella senftenberg; OX = 28150 GN=queC PE=3 SV=1

SEQ ID NO: 42084 - protein, 231 aa, Salmonella sp.; identical to SEQ ID NO: 42037
  REGION 1..231: note = tr|A0A509CIG1|A0A509CIG1_9ENTR 7-cyano-7-deazaguanine synthase OS=Salmonella sp. NCTC 6947 OX=2583581 GN=ybaX PE=3 SV=1

SEQ ID NO: 42085 - protein, 231 aa, Salmonella sp.; identical to SEQ ID NO: 42037
  REGION 1..231: note = tr|A0A509C0E4|A0A509C0E4_9ENTR 7-cyano-7-deazaguanine synthase OS=Salmonella sp. NCTC 3046 OX=2583580 GN=ybaX PE=3 SV=1

SEQ ID NO: 42086 - protein, 231 aa, unidentified; identical to SEQ ID NO: 42060
  source 1..231: note = Salmonella thompson
  REGION 1..231: note = tr|A0A3Y9ZK09|A0A3Y9ZK09_SALTH 7-cyano-7-deazaguanine synthase QueC OS=Salmonella thompson OX=600 GN=queC PE=3 SV=1

SEQ ID NO: 42087 - protein, 231 aa, unidentified; identical to SEQ ID NO: 42037
  source 1..231: note = Salmonella thompson
  REGION 1..231: note = tr|A0A3V3G1U8|A0A3V3G1U8_SALTH 7-cyano-7-deazaguanine synthase OS=Salmonella thompson; OX = 600 GN=queC PE=3 SV=1

SEQ ID NO: 42088 - protein, 231 aa, unidentified; identical to SEQ ID NO: 42037
  source 1..231: note = Salmonella typhi
  REGION 1..231: note = tr|A0A4U8FH64|A0A4U8FH64_SALTI 7-cyano-7-deazaguanine synthase OS=Salmonella typhi; OX = 90370 GN=queC PE=3 SV=1

SEQ ID NO: 42089 - protein, 231 aa, unidentified; identical to SEQ ID NO: 42037
  source 1..231: note = Salmonella typhi
  REGION 1..231: note = sp|Q8XEU3|QUEC_SALTI 7-cyano-7-deazaguanine synthase; OS = Salmonella typhi OX=90370 GN=queC PE=3 SV=1

SEQ ID NO: 42090 - protein, 231 aa, unidentified; identical to SEQ ID NO: 42037
  source 1..231: note = Salmonella typhimurium
  REGION 1..231: note = sp|Q7CR22|QUEC_SALTY 7-cyano-7-deazaguanine synthase; OS = Salmonella typhimurium (strain LT2 / SGSC1412 / ATCC 700720) OX=99287 GN=queC PE=3 SV=1

SEQ ID NO: 42091 - protein, 231 aa, unidentified; identical to SEQ ID NO: 42037
  source 1..231: note = Salmonella typhimurium
  REGION 1..231: note = tr|A0A3Z2EZR1|A0A3Z2EZR1_SALTU 7-cyano-7-deazaguanine synthase OS=Salmonella typhimurium (strain ATCC 68169 / UK-1) OX=990282 GN=queC PE=3 SV=1

SEQ ID NO: 42092 - protein, 231 aa, unidentified
  source 1..231: note = Salmonella virchow
  REGION 1..231: note = tr|A0A5I1KIW4|A0A5I1KIW4_SALVI 7-cyano-7-deazaguanine synthase QueC OS=Salmonella virchow; OX = 48409 GN=queC PE=4 SV=1
MKRAVVVFSGGQDSTTCLAQARHQYDEVHCVTFDYGQRHRAEIDFARALALKLGARAHKVLDVTLLNELAVSSLTRDSIPVPDYEPNADGIPNTFVPGRNILFLTLAAIYAYQVKAEAVITGVCETDFSGYPDCRDEFVKALNHAVNLGMAKDIRFETPLMWIDKAETWALADYWGQLDLVREETLTCYNGIKGDGCGHCAACNLRANGLNHYLSNKAAVMAAMKQKTGLR

SEQ ID NO: 42093 - protein, 231 aa, unidentified
  source 1..231: note = Salmonella virchow
  REGION 1..231: note = tr|A0A5J0U6H8|A0A5J0U6H8_SALVI 7-cyano-7-deazaguanine synthase QueC OS=Salmonella virchow; OX = 48409 GN=queC PE=4 SV=1
MKRAVVVFSGGQDSTTCLAQARHQYDEVHCVTFDYGQRHRAEIDVARALALKLGARAHKVLDVTLLNELAVSSLTRDSIPVPDYEPNAGGIPNTFVPGRNILFLTLAAIYAYQVKAEAVITGVCETDFSGYPDCRDEFVKALNHAVNLGMAKDIRFETPLMWIDKAETWALADYWGQLDLVREETLTCYNGIKGDGCGHCAACNLRANGLNHYLSNKAAVMTAMKQKTGLR

SEQ ID NO: 42094 - protein, 239 aa, Salsuginibacillus halophilus
  REGION 1..239: note = tr|A0A2P8HLC2|A0A2P8HLC2_9BACI 7-cyano-7-deazaguanine synthase OS=Salsuginibacillus halophilus OX=517424 GN=queC PE=3 SV=1
MACRKEAGRSPEKEERTRIMKNEKAVVVFSGGQDSTTCLFWAIENFQEVYAVTFSYGQRHDTEIEVAKEITKDLGVTHDVLDMSLLNQLAPNALTRSDIDVAEGEEGELPTTFVDGRNMLFFTFASIYGRQRGAKHIVTGVCETDYSGYPDCRDVFTKSLNVTLNLAMDDNFVVHTPLMWLDKAATWKLADELGRLDYVKNETLTCYHGIRGDGCGECPACELRRQGYEQYMEEKRADA

SEQ ID NO: 42095 - protein, 231 aa, Samsonia erythrinae
  REGION 1..231: note = tr|A0A4R3VTW0|A0A4R3VTW0_9GAMM 7-cyano-7-deazaguanine synthase OS=Samsonia erythrinae; OX = 160434 GN=queC PE=3 SV=1
MKDAVVVFSGGQDSTTCLIQALQHYDHVHCITFDYGQRHRAEIDIARELSQKLGATAHKVLDVGLLNELATSSLTRDNIPVPDYDADAQGIPNTFVPGRNILFLTLAAIYAYQVGAEAVITGVCETDFSGYPDCRDEFVKALNQAVVLGIARDIRFETPLMWLNKAETWALADYYQQLDTVRYHTLTCYNGIKGDGCGHCAACHLRANGLAQYQNDANTVMTSLKQKTGLS

SEQ ID NO: 42096 - protein, 244 aa, Sandaracinobacter sp.
  REGION 1..244: note = tr|A0A501XV41|A0A501XV41_9SPHN 7-cyano-7-deazaguanine synthase OS=Sandaracinobacter sp. PAMC 28131 OX=1715348 GN=queC PE=3 SV=1
MTIKQIPLSELAGKPVVLLLSGGLDSATCLAMASNAGAKVLALTIDYNQRHRRELEAADALAARYKVARHIRLPLDLRGFGGSALTDDIEVPKEGVLPGIPVTYVPARNTIFLSVALGWAEASGGSDLLIGVNALDYSGYPDCRPEFVAAFEDMANLATKAGVEGTARYKVHTPLQALTKAGIVQAAVEAGLDMGMTWSCYDPTVDGKHCGQCDSCRLRQKGFQEAGVPDPTLYAEKPPSGGGA

SEQ ID NO: 42097 - protein, 224 aa, unidentified
  source 1..224: note = Sandarakinorhabdus cyanobacteriorum
  REGION 1..224: note = tr|A0A255Y6K9|A0A255Y6K9_9SPHN 7-cyano-7-deazaguanine synthase OS=Sandarakinorhabdus cyanobacteriorum OX=1981098 GN=queC PE=3 SV=1
MNASNRLAVVLLSGGLDSTTVAAITRAQGWRILALTIDYNQRHRIELEHAARVAKALGAERHIVLPLDLTGFGGSALTADIDVPKGGVEPGIPVTYVPARNTIFLSVALGWAEAAGARDLFIGVNALDYSGYPDCRPEFIAAFETMANSATKAGVEGERFRVHTPLMTLDKAGIIAAGQTAGAPLELTWSCYDPTPDGRPCGLCDSCRLRAKGFAEAGMADPAL

SEQ ID NO: 42098 - protein, 285 aa, Sandarakinorhabdus sp.
  REGION 1..285: note = tr|A0A552U8Z4|A0A552U8Z4_9SPHN 7-cyano-7-deazaguanine synthase OS=Sandarakinorhabdus sp. LB1R16 OX=2593303 GN=queC PE=3 SV=1
MPEPPKQPPDLRGTVVAGLWPGAPVPRPSAPFSPVAALSLAALPTRNKAAGLPGPCRRPIAAAVSVSAPLAVVLLSGGLDSTTVAAIARERGFRILALTIDYNQRHRIELDAAARVAAVYAERHIVLPLDLSGFGGSALTDAIDVPKSGVAPGIPVTYVPARNTIFLSVALGWAEAAGARDLFIGVNALDYSGYPDCRPEFVQAFETMANLATKAGVEGDRFAVNTPLAAMTKADIVREGARLGVDFGLTWSCYDPVDGRPCGSCDSCRLRAKGFAEAGVPDPAL

SEQ ID NO: 42099 - protein, 224 aa, unidentified
  source 1..224: note = Sanguibacteroides justesenii
  REGION 1..224: note = tr|A0A318ND35|A0A318ND35_9PORP 7-cyano-7-deazaguanine synthase OS=Sanguibacteroides justesenii OX=1547597 GN=queC PE=3 SV=1
MMKKAIVLLSGGLDSTTAVYLAKHRGFDELYAITFLYGQKHDKELLSAKAVAKAVGVKEHKIVELMLNQWDGCSLTDEKIDIADGNIERDDIPATYVPARNMVFLSVAASYADALEITDIFIGVSEVDYSGYVDCREEFIKAMENAINLGTVLGAEKKRRITLHAPFMHMTKAEEVRLGTTLGVDFGLTWSCYRGGDKPCGTCDSCLLRAKAFAEAGIEDPAIE

SEQ ID NO: 42100 - protein, 223 aa, unidentified
  source 1..223: note = Sanguibacteroides justesenii
  REGION 1..223: note = tr|A0A0C3RFJ5|A0A0C3RFJ5_9PORP 7-cyano-7-deazaguanine synthase OS=Sanguibacteroides justesenii OX=1547597 GN=queC PE=3 SV=1
MKKAIVLLSGGLDSTTAVYLAKHRGFDELYAITFLYGQKHDKELLSAKAVAKAVGVKEHKIVELMLNQWDGCSLTDEKIDIADGNIERDDIPATYVPARNMVFLSVAASYADALEITDIFIGVSEVDYSGYVDCREEFIKAMENAINLGTVLGAEKKRRITLHAPFMHMTKAEEVRLGTTLGVDFGLTWSCYRGGDKPCGTCDSCLLRAKAFAEAGIEDPAIE

SEQ ID NO: 42101 - protein, 238 aa, unidentified
  source 1..238: note = Sapientia aquatica
  REGION 1..238: note = tr|A0A4R5VV76|A0A4R5VV76_9BURK 7-cyano-7-deazaguanine synthase OS=Sapientia aquatica; OX = 1549640 GN=queC PE=3 SV=1
MHKSALVLFSGGQDSTTCLAWALEHFERVETIGFDYGQRHDIELTVRPNLREKIIELQPHWETRLGPDHMIDLSLLSSISETAMTSDIEIVMQENGLPNTFVPGRNLLFLTVAATLAYRRGLDVLVGGMCETDFSGYPDCRDDTLKSLQVTLNLGMNSRLNIATPLMWLDKSQTWELAQTLGGDALIDLIRVGTHTCYLGERGKRHDWGYGCESCPACVLRANGYKQFAAKQEFAAKK

SEQ ID NO: 42102 - protein, 243 aa, unidentified
  source 1..243: note = Unknown
  REGION 1..243: note = tr|A0A2N0LIB6|A0A2N0LIB6_9CHLR 7-cyano-7-deazaguanine synthase OS=SAR202 cluster bacterium Io17-Chloro-G5 OX=1926614 GN=queC PE=3 SV=1
MPSYGVSLLSGGLDSTTVTALAKSKTDHLTALTFHYGQSHSKEVDCAAKVARSLGVTQELLDISFLGKVAWYSALTNPEQFPMPEDRETSRMGNSIPITYVPLRNTIFLSLAAASLESQVLYAIEIEHVLPKDIQAYIYMAPNAIDYSGYPDCRPEFFQKMGESLGYGSKLWTEYHVPLQIEIPIIEMSKPDIVRLAMVLDAPLELTWSCYQGGEIPCERCDSCILRASGFRAAGYPDPAIPD

SEQ ID NO: 42103 - protein, 247 aa, unidentified
  source 1..247: note = Unknown
  REGION 1..247: note = tr|A0A2N0KV93|A0A2N0KV93_9CHLR 7-cyano-7-deazaguanine synthase OS=SAR202 cluster bacterium Casp-Chloro-G4 OX=1926606 GN=queC PE=3 SV=1
MTSFGVTLLSGGLDSTTVTQYAKDKIDHMTALTFHYGQTHSKEVDCAQQIAEMMGIKHKLLDISFLSEVAWYSALTNPDQFPMPTDRSENEIGFGIPITYVPLRNTIFLSLSAAFLESEVLHAIEVGGLSPSDVEAYLYLAPNAIDYSGYPDCRPEYYEKITQALEYGSKLWTQYDIPIKVETPIIEMSKAEIAEMGLRIKAPLEYTWSCYQGGDVPCGGCDSCVLRAKGFEEAGVSDPLLVRLGRT

SEQ ID NO: 42104 - protein, 231 aa, unidentified
  source 1..231: note = Unknown
  REGION 1..231: note = tr|A0A2D6YIW9|A0A2D6YIW9_9DELT 7-cyano-7-deazaguanine synthase OS=SAR324 cluster bacterium OX=2024889 GN=queC PE=3 SV=1
  VARIANT 19: note = Xaa can be any naturally occurring amino acid
  VARIANT 30: note = Xaa can be any naturally occurring amino acid
  VARIANT 32: note = Xaa can be any naturally occurring amino acid
  VARIANT 61: note = Xaa can be any naturally occurring amino acid
  VARIANT 227: note = Xaa can be any naturally occurring amino acid
MNDSLQAKSALVVFSGGQXSTTCLYWAINXFXAVRTLTFDYGQRHRIELECAKQIAELARXPHEVLSIGTFAELGGNALTGNQEVEVQKEKSNRENLPNTFVPGRNLILLSFAAARAWQLEIENIVTGVCQTDYSGYPDCRKNTIEALQLALNLGMERQFVLHTPLMWLDKAQTVMMAKDLGALEALSFSHTCYNGIFPPCGSCQACHLRNKGFYEAGVIDPLIERXKKVT

SEQ ID NO: 42105 - protein, 222 aa, unidentified
  source 1..222: note = Unknown
  REGION 1..222: note = tr|A0A2A4T6U4|A0A2A4T6U4_9DELT 7-cyano-7-deazaguanine synthase OS=SAR324 cluster bacterium OX=2024889 GN=queC PE=3 SV=1
MSKALVIFSGGQDSTTCLGWAKNRYDSVQAITFAYGQTHTVEVEQAKKIAAMMDVPLQVVHLDFFGDLVNSALISGGDVNAPHVDNEALPASYVPNRNALFILVAHAFSQKIKADTLIGGMCQTDYSGYPDCREDFINTLKQALNMGSEQNIKVETPLMFLNKAETFELARKEGVLDLVLQHSHTCYNGDPNMNEWGRGCGDCPACGLREKGYYEFKEQFGV

SEQ ID NO: 42106 - protein, 208 aa, unidentified
  source 1..208: note = Unknown
  REGION 1..208: note = tr|A0A0R2PFF1|A0A0R2PFF1_9GAMM 7-cyano-7-deazaguanine synthase OS=SAR86 cluster bacterium BACL1 MAG-120507-bin14 OX=1655567 GN=queC PE=3 SV=1
MDSFTLLHQALNQNYEVDCLTFDYGQRHIKEIECARLACHENHLSNLQIKIANVESIFAASALTSNSIDMPHGSYQAESMQSTIVPNRNMLFISHAIAYAISKNIKQVWYGAHAGDHFIYPDCRPEFLSAMNAVAQICHTFPISVEAPFLNYSKAEIVKIGLDLGIDYSKTWTCYEGQDLACGKCGSCNERLEAFALNNTADPLTYQD

SEQ ID NO: 42107 - protein, 228 aa, unidentified
  source 1..228: note = Unknown
  REGION 1..228: note = tr|A0A2A4WV66|A0A2A4WV66_9GAMM 7-cyano-7-deazaguanine synthase OS=SAR86 cluster bacterium; OX = 2030880 GN=queC PE=3 SV=1
MTALKKNRAVVLVSGGLDSATCLAIARDRGFECYALSFDYGQRSSSEIDAARLVAASGSVSEHKIIELNMAAIGGSALTDTNISVPEQESEGIPVTYVPARNTVFLSYALAWAEVLNADAIFIGVNALDYSGYPDCRPEYIKAFQTLINLATKVGVEGSVISLETPLIDLTKAEIIKTGAGLSVDYGTTVSCYQADPEGRACGQCDSCRFRASGFEKAEVEDPTRYQE

SEQ ID NO: 42108 - protein, 226 aa, unidentified
  source 1..226: note = Unknown
  REGION 1..226: note = tr|A0A0R2W8R4|A0A0R2W8R4_9GAMM 7-cyano-7-deazaguanine synthase OS=SAR92 bacterium BACL16 MAG-120619-bin48 OX=1655625 GN=queC PE=3 SV=1
MSKKAVILVSGGLDSTTVTAMAMKQGYDCYTLSFDYGQRHRSELEAAQRVSELMTVHQHKVVKLDLGSIGGSALTDSAIAVPEEETAGIPVTYVPARNTVFLSIALGWAEVLGADDIFIGVNAVDFSGYPDCRPEYIEAFERMANLATRAGVEGNRLTIHAPLIAMTKAEIIHTGLALGVDYSATVSCYQADTSGAACGKCESCRLRRQGFNQAGVKDPTRYQNNA

SEQ ID NO: 42109 - protein, 226 aa, unidentified
  source 1..226: note = Unknown
  REGION 1..226: note = tr|A0A0R2TW76|A0A0R2TW76_9GAMM 7-cyano-7-deazaguanine synthase OS=SAR92 bacterium BACL26 MAG-121220-bin70 OX=1655626 GN=queC PE=3 SV=1
MYKKAVVLVSGGLDSTTVLAMAISQGYDCYTLSFDYGQRHRSELKAASHVSALMEVAQHKVVNLDLGTIGSSALTDLSIDIPEHETAGIPVTYVPARNTVFLSIALGWAEVLGANKIFLGVNAVDYSGYPDCRPEYISSFEAMANLATRAGVEGNRLSIEAPLIDLTKAQIIKEGLALGVDYSYTVSCYQANAEGRACGKCDSCRLRIQGFNEAGIKDPTEYENSA

SEQ ID NO: 42110 - protein, 226 aa, unidentified
  source 1..226: note = Unknown
  REGION 1..226: note = tr|A0A520MBT0|A0A520MBT0_9GAMM 7-cyano-7-deazaguanine synthase OS=SAR92 clade bacterium; OX = 2315479 GN=queC PE=3 SV=1
MSDKAVVLVSGGLDSSTVLALALQQGYRCYTLSFDYGQRHRSELEAAMRVSELMKVQEHKIVRLDLGTIGGSALTDTTIDVPEQETAGIPVTYVPARNTVFLSIALGWAEVLEADTIFLGVNAVDYSGYPDCRPEYISSFEAMANLATRAGVEGSKLSIQAPLIDMTKGEIISAGAALGVDYSQTVSCYQASLEGLACGKCDSCRLRIEGFNQAGIPDPTRYKNSA

SEQ ID NO: 42111 - protein, 705 aa, Schlegelella thermodepolymerans
  REGION 1..705: note = tr|A0A4R2MQ54|A0A4R2MQ54_9BURK 7-cyano-7-deazaguanine synthase in queuosine biosynthesis; OS = Schlegelella thermodepolymerans OX=215580; GN = EV676_101120 PE=4 SV=1
MQDKRYVLCGNVSAQGISEDPARDLRLRLSGRPGHGNITLRIEDVHSKLFSSVPSRFHDLLEIATYVYSADQVIRRGADDVDTFGDGWRRDLHFVVPVRDPDFWSSAQVQDTLCSTLGFLSDDQYRFDFVKLDQEHPFQQYLQFDDTQQVYGKPEQVVMFSGGLDSLAGAIDEVVNQKRRVLLVTHKSTSKLNKRHRTLEQMLAEKAGDNVPHRISVRVHKAKELNHEYTQRSRSFLYVSIGATIARMLNLKSVRFYENGVISLNLPVCAQVVGGRATRTTHPRVMKGFQDLLSLVAGEPFTVENPYIWKTKADVVKVITDAGCHDLIKHSMTCTHTWEMTNQHTHCGGCSQCIDRRFAVLAAKADQHDPVEHYKVDVFTQSRDKGEDKIMAAAYLERANQVKNLTDVTQFVSSYPDVGRVLKYLNYSSAGQAAQRVFDLYKRHADEVTGALDELGRRYFTQIRERSLPGDCLLRTVYESASVNSVPAVISMEKQPENFFRKRGAVWETRFQGRNTICLLNVDKGAEYINLLLAFPDREMSVYEIAVGNAVNTIEHPAGSGIAPEDIEDGYQVTQGIPLGDAGDVADRRALNECKQQARELFEEMEEARVRGDHARIEEIEKEMAALVKYIEGGKGLGGRQRRGGDKRKNVRDAFRNAVDRAIRQIEKYDKPLAEHLKASIKYGNEVVYRPGMAITWEVRPIVNG

SEQ ID NO: 42112 - protein, 236 aa, Schlegelella thermodepolymerans
  REGION 1..236: note = tr|A0A2S5T3N8|A0A2S5T3N8_9BURK 7-cyano-7-deazaguanine synthase OS=Schlegelella thermodepolymerans OX=215580 GN=queC PE=3 SV=1
MVASEDPRAALVLFSGGQDSTVCLAWALQRYARVETIGFDYGQRHRVELECRPRVLQAMRRLDPAWDRKLGDDHLLDVGLLGQISDTALTSERAIEMADSGLPNTFVPGRNLLFLTLAATVAYRRGAQVLVGGMCETDYSGYPDCRDNTLKALQVALSLGMDQPLVIETPLMWLDKAQTWTLAEQLGGQALVDLVAEHTHTCYLGERSQRHAWGYGCGRCPACELRRRGHEAYLSR

SEQ ID NO: 42113 - protein, 266 aa, Schwartzia succinivorans
  REGION 1..266: note = tr|A0A1M4T257|A0A1M4T257_9FIRM Uncharacterized protein OS=Schwartzia succinivorans DSM 10502 OX=1123243; GN = SAMN02745190_00335 PE=4 SV=1
MEEKLQKLLDYLSGCGSLVVALSGGVDSSTLLYAAHLALGEKVVAVTAKSEMMSVEELQIAKEMAEKAGVRHIIIDAHDLDDPDVCANTPERCYYCKRGRFQKLVNFAKKEGFAFVADGGNIDDTKDYRPGMRALEELAPTVVSPFMICGWGKSDIRRQAKEWGLSVWDRPSAACLASRIEYGIELTPKRLRQVDAAEEILRSYISGQLRVRHHGKLARVEAEPAAFQILLNQRENITKELRMLGFQYVTLDLLGYRMGSTNEVLD

SEQ ID NO: 42114 - protein, 226 aa, Schwartzia succinivorans
  REGION 1..226: note = tr|A0A1M4WEQ2|A0A1M4WEQ2_9FIRM 7-cyano-7-deazaguanine synthase OS=Schwartzia succinivorans DSM 10502 OX=1123243 GN=queC PE=3 SV=1
MEKAVVLLSGGLDSTVCMAVAHSKGMELYPISFNYHQRHNIELESAKKVAKHFGVKRHLIIETNMDAIGGSALTDENIDVPAGNPDREDVPITYVPARNLIFLSYAMGYAEVLGAQHVFIGVNAVDYSGYPDCRPEFIAKFQDLANYATRATAVEHKGITIETPLQDLSKKEIVLLGTKLHAPLEYTHSCYKGGEKACGVCDSCRLRLRGFEEAGVNDPVPYEIQK

SEQ ID NO: 42115 - protein, 225 aa, unidentified
  source 1..225: note = Scopulibacillus darangshiensis
  REGION 1..225: note = tr|A0A4R2P4V5|A0A4R2P4V5_9BACL 7-cyano-7-deazaguanine synthase OS=Scopulibacillus darangshiensis OX=442528 GN=queC PE=3 SV=1
MEEKAVIVLSGGLDSTTCMGIAKNEGYELYPITFQYGQRHDREVEQAKKIAEHYDIREHRIVDISFFQQIGGSALTDQSIDVPETMVEGDIPVTYVPARNMIFLSLASAYAEVIGAEAIYIGVSSVDYSGYPDCRPEFIKSMNKTVNLATKVGVSDKGMVINTPLMHLTKAETIIEGIKLNVPYHLTTSCYNGEDKACGTCDSCQLRLKGFLEAGEKDPIPYKDR

SEQ ID NO: 42116 - protein, 230 aa, Scytonema hofmannii
  REGION 1..230: note = tr|A0A139XE57|A0A139XE57_9CYAN 7-cyano-7-deazaguanine synthase OS=Scytonema hofmannii PCC 7110 OX=128403 GN=queC PE=3 SV=1
MKAVILLSGGLDSSTVLYQAMADGCECYALSFNYRQRHQRELLSASAITTRVGVVQHQVVTFDLSQWGGSALTDSSIDLPQKRSLLEMSQNIPITYVPARNTIFLSFALAYAETIAAERVYIGVNALDYSGYPDCRPDYLQAMQEVFCLGTKQGRLGHPINIVAPLIELKKTEIIQLGNQLGVPWELTWSCYAGGEVACGVCDSCRLRLAAFAELELVDPLNYSTRRICT

SEQ ID NO: 42117 - protein, 222 aa, unidentified
  source 1..222: note = Scytonema millei
  REGION 1..222: note = tr|A0A1D2PAM6|A0A1D2PAM6_9CYAN 7-cyano-7-deazaguanine synthase (Fragment) OS=Scytonema millei VB511283 OX=1245923 GN=QH73_025965 PE=3 SV=1
MKAVILLSGGLDSSTVLYQALGDGCECYTICFDYQQRHRRELQSALAIAQKAGVVDHQVVRFDLRQWGGSALTDDAIDLPQKRDLEEMSQSIPVTYVPARNTIFLSFALGYAETIAAERIYIGVNALDYSGYPDCRPDYIQAMQEVFRLGTKQGRSGQPISIVTPLIHLKKTEIIQLGNKLGVPWELTWSCYAGGDVACGVCDSCRLRLAAFAELGLTDPVA

SEQ ID NO: 42118 - protein, 229 aa, unidentified
  source 1..229: note = Scytonema millei
  REGION 1..229: note = tr|A0A4R4ITB1|A0A4R4ITB1_9CYAN 7-cyano-7-deazaguanine synthase OS=Scytonema millei VB511283 OX=1245923 GN=queC PE=3 SV=1
MTNNKAVILLSGGLDSSTVLYQARADGYDCYAISFDYQQRHRRELEAAKTIAQSAEVVDHQLISFDLRQWGGSALTDDSINLPQARSLDEMAQNIPVTYVPARNTIFLSFALAYAETLNASRVYIGVNALDYSGYPDCRPDYIQAMQEVFRLGTKQGREGNAIAIVAPLIQLKKTEIIQLGDRLGVPWEKTWSCYAGDELACGVCDSCRLRLAAFAALGMEDPLPYRRE

SEQ ID NO: 42119 - protein, 482 aa, Scytonema sp.
  REGION 1..482: note = tr|A0A1Z4IQK2|A0A1Z4IQK2_9CYAN Uncharacterized protein OS=Scytonema sp. HK-05 OX=1137095; GN = SAMD00079811_19040 PE=4 SV=1
MNYRPSLQQKLNESDYSDYTLHFQPVLNSNGSVLFIDHSQDKKLTIGINVDDTEFKYRVQAEFPAIVADLIDLAVAIYTSDRLAPQSLTEKQRRFHVRLPVRHPELLSAEPFLTKLDDLLKWTTDSEWVFDFQKRIAPQRLVEQHQSLQILPQGCEVTLWSGGLDALAGLYTRLMMYPEKQFILFGSGSNNSVYARQKKVYKEIESIFPGRCNLFRVPIRFDDSSEQQKNKLSRVRGVVFTLLGSACAYLMGQQILYLYENGMGAINLPYRESAVGLDHSRSVHPLTLLMVSDVVSELLGKEFQVKNPFLFWTKAEMCKALAKTGREDLPPLTMSCDSPHRQKPVQCGYCSSCLLRRQSLAATNIKDRTRYVVLHGKPPVKDPSLCFLNMQAQVRTLDSLFAVSDEPWKTLTKKFPILDDVVDRTATAENLLPADMRSRLIQLYQNYVSEWNAVESQIVNGLLNKGSYQKAFSKYVVSSQQG

SEQ ID NO: 42120 - protein, 225 aa, Scytonema sp.
  REGION 1..225: note = tr|A0A1Z4PZR4|A0A1Z4PZR4_9CYAN 7-cyano-7-deazaguanine synthase OS=Scytonema sp. NIES-4073; OX = 2005464 GN=queC PE=3 SV=1
MKAVILLSGGLDSSTVLYQAQADGCECYTICFDYQQRHRRELSSALAIAQKANVVDHQVVRFDLRQWGGSALTVNAIDLPQKRELEEMSQTIPVTYVPARNTIFLSFALAYAETIAAQRIYIGVNALDYSGYPDCRPDYIQAMQEVFRLGTKQGRSGQPISIVTPLIHLKKTEIIQLGNKLGVPWELTWSCYAGGDVACGVCDSCRLRLAAFAELGLQDPLAYAV

SEQ ID NO: 42121 - protein, 484 aa, Scytonema tolypothrichoides
  REGION 1..484: note = tr|A0A0C2LAP2|A0A0C2LAP2_9CYAN Uncharacterized protein OS=Scytonema tolypothrichoides VB-61278 OX=1233231; GN = SD80_30565 PE=4 SV=1
MNYRPLIQHKPNNSDYSDYTLHFEPIVNSNGSVRFIDHSRCNDLTVGINVDDTEFQYRVKAEFPAIVADLVDLAVAIHTSDRLAPQNLSGRQRRLHVILPVRHPELLSAEAFRTKLDDLLKWATDSEWVFDFQRRIATERLVEHPSLPIAPQGCEVALWSGGLDALAGLYTRLQMYPEKRFLLFGTGSNDSVYARQQRVAMEIESIFPGRSNLLRVPIRFDDSGLQHKNKLSRARGVVFTLLGAACAHLMGQEVLYVYENGIGAINLPYRESAVGLDHSRSVHPLTLLMVGDVVSELLGEEFRVQNPFLFWTKAAMCKALAKDRRNDLPSLTMSCDSPHRQRPVQCGYCSSCLLRRQALAAASIEDRTRYVVLHGELPVKKPSLCFRNMLAQVDILRCLLSISDEPGLQWKTLTGKFPVLDDIVDRSAVAENLVPANMRSRLIQLYQNYVSEWDAVKWQISDGLLNKHSNQQASSRYVVSDQQG

SEQ ID NO: 42122 - protein, 225 aa, Scytonema tolypothrichoides
  REGION 1..225: note = tr|A0A0C2QM02|A0A0C2QM02_9CYAN 7-cyano-7-deazaguanine synthase OS=Scytonema tolypothrichoides VB-61278 OX=1233231 GN=queC PE=3 SV=1
MKAVILLSGGLDSSTVLYQAIADGYNCHTISFDYQQRHRRELDSALAIAQKAGVVDQQVVKFDLRQWGGSALTDDAIELPQKRDLEEMSQSIPVTYVPARNTIFLSFALAYAETISAQCVYIGVNALDYSGYPDCRPDYIQAMQEVFRLGTKQGREGQSISIKTPLIQLKKTEIIQLGNKLGVPWELTWSCYQGDDVACGVCDSCRLRLAAFGELGLKDPLAYAK

SEQ ID NO: 42123 - protein, 231 aa, unidentified
  source 1..231: note = Unknown
  REGION 1..231: note = tr|J3YT80|J3YT80_9ENTR 7-cyano-7-deazaguanine synthase OS=secondary endosymbiont of Heteropsylla cubana; OX = 134287 GN=queC PE=3 SV=1
MKRAVVVFSGGQDSTTCLIQAITQYDEVHCVTFNYGQRHREEIVVASKLVAKLGITSHKIFDMNILNNMTVSSLIQDKIPLISYENDTSQIPHTFVPGRNILFLTLAAIYSYQIESTVVITGVCETDFSGYPDCRNDFIKALNMAINLGMEYELSFITPLMWLSKAEIWALADYYHQLNLIRYDTLTCYNGVKGDGCAQCQACHLRACGLSRYREDPKRVMNLLKSKINIC

SEQ ID NO: 42124 - protein, 231 aa, unidentified
  source 1..231: note = Unknown
  REGION 1..231: note = tr|J3TFN0|J3TFN0_9ENTR 7-cyano-7-deazaguanine synthase OS=secondary endosymbiont of Ctenarytaina eucalypti OX=1199245 GN=queC PE=3 SV=1
MKRAIVLFSGGQDSTTCLIQALSQYDEVHCITFDYSQRHRIEITVARELALKLCAKTHEVIDVTTLNALTVSSLTRNYIPVPNYKEQSSGLPSTFVPGRNILFLTLASVYAYQVNASTIITGVCETDFSGYPDCRDDFIKALNNAVNLGLAYELHFVTPLMWLDKTETWALADYYHQLERVRYDTMSCYNGIRGDGCGQCAACHLRARGLESYYAKPDSVMAALKAKTGLR

SEQ ID NO: 42125 - protein, 222 aa, Sedimentibacter sp.
  REGION 1..222: note = tr|A0A252CN01|A0A252CN01_9FIRM 7-cyano-7-deazaguanine synthase OS=Sedimentibacter sp. SX930 OX=1955060 GN=queC PE=3 SV=1
MENVNGTTQKQALVIFSGGQDSTTCLIQAIQKYGAANTVALSFSYGQRHGIELERAAWIAKNLGVEHHILDAQVMGKVTTNALMDESQTIKEADTEDYPNTFVDGRNALFLLLAGIFAKSKGIRTIILGVCETDFSGYPDCRDVFVKSMNVTLNLAMDYNFNVETPLMYLTKAQTWELADQLGCLAYIEEHTHTCYMGVPGGCGECPSCKLRNAGLAEYLNK

SEQ ID NO: 42126 - protein, 222 aa, Sedimenticola selenatireducens
  REGION 1..222: note = tr|A0A558DWY6|A0A558DWY6_9GAMM 7-cyano-7-deazaguanine synthase OS=Sedimenticola selenatireducens OX=191960 GN=queC PE=3 SV=1
MKKAVVLLSGGLDSATVLAIARSQGYACYALSLDYGQRHVVELRAASRIATESQVASHKVIPLSLNAFGGSALTDSAIAVPETLEAGIPVTYVPARNTIFLSLALGWAEVLGARDLFLGVNAVDYSGYPDCRPEFIEAFELLANLATKAGVEGERFKIHAPLINMTKAEIIQSGRELGIDYSLTISCYQADAQGRACGVCDSCRLRAQGFREAGVPDPTAYQ

SEQ ID NO: 42127 - protein, 225 aa, Sedimenticola selenatireducens
  REGION 1..225: note = tr|A0A2N6CUQ4|A0A2N6CUQ4_9GAMM 7-cyano-7-deazaguanine synthase OS=Sedimenticola selenatireducens OX=191960 GN=queC PE=3 SV=1
MKKAVILLSGGLDSATSLAMAREQGYACYALSFAYGQRHAVELEAAGRVADALGVVEHKVIPIALDAFGGSALTDNAIAVPEAEGGDGIPVTYVPARNTVFLSLALGWAEVLGARDLFLGVNAVDYSGYPDCRPEYIEAFERLANLATKAGVEGERFRIHAPLIDMTKAQIIQTGVRLGVNYALTVSCYQADASGVACGRCDSCRLRAQGFREAGVPDPTPYQQK

SEQ ID NO: 42128 - protein, 238 aa, Sedimenticola sp.
  REGION 1..238: note = tr|A0A2N6GJB2|A0A2N6GJB2_9GAMM 7-cyano-7-deazaguanine synthase OS=Sedimenticola sp.; OX = 1940285 GN=queC PE=3 SV=1
MCLENRGSVTMKKAVVLLSGGLDSATALAIAVDQGFECYALSMDYGQRHSSELDAARRVARAQRVKQHSIMPIALDMFGGSALTDTEIEVPVESAEGIPVTYVPARNTVFLSLALAWAEVLGARDIFLGVNAVDYSGYPDCRPAFIQAFEKLANLATKAGVEGDEFHIHAPLIDWTKARIIQEGGRLGVDYALTISCYQADAQGRACGVCDSCRLRAQGFRDAGVPDPTSYQQQPTLL

SEQ ID NO: 42129 - protein, 222 aa, unidentified
  source 1..222: note = Sedimenticola thiotaurini
  REGION 1..222: note = tr|A0A558CVC5|A0A558CVC5_9GAMM 7-cyano-7-deazaguanine synthase OS=Sedimenticola thiotaurini OX=1543721 GN=queC PE=3 SV=1
MKKAVILLSGGLDSATVLAIARDQGFECYALSLAYGQRHAVELEAACRIATQNRVAAHKVIPLSLDAFGGSALTDSTIAIPETLGEGIPVTYVPARNTVFLSLALGWAEVLGARDLFLGVNAVDYSGYPDCRPEFIKAFEVLANLATKAGVEGEHFKIHAPLIHLSKAEIIQQGKALGVDYSQTISCYQADPTGAACGICDSCRLRAEGFRAAGIPDPTRYR

SEQ ID NO: 42130 - protein, 222 aa, unidentified
  source 1..222: note = Sedimenticola thiotaurini
  REGION 1..222: note = tr|A0A0F7JZM6|A0A0F7JZM6_9GAMM 7-cyano-7-deazaguanine synthase OS=Sedimenticola thiotaurini OX=1543721 GN=queC PE=3 SV=1
MKKAVVLLSGGLDSATALAMARQQGYDCYALSLAYGQRHSVELEAAGRVARALGVVEHKVIPIALDAFGGSALTDSAIAVPDAGSEGIPVTYVPARNTVFLSLALGWAEVLGARDLFLGVNAVDYSGYPDCRPDFIEAFERLANLATKAGVEGDRFRIHAPLIDMTKAEIIQAGMGLGVDYGLTVSCYQADDKGAACGRCDSCQLRAEGFRTAGVSDPTLYK

SEQ ID NO: 42131 - protein, 231 aa, unidentified
  source 1..231: note = Sedimentisphaera cyanobacteriorum
  REGION 1..231: note = tr|A0A1Q2HQJ4|A0A1Q2HQJ4_9BACT 7-cyano-7-deazaguanine synthase OS=Sedimentisphaera cyanobacteriorum OX=1940790 GN=queC PE=3 SV=1
MHDKNKAVVLLSGGLDSGTTAQIASSGELEIYAMSFSYGQRHTVELEAASKIADFCKAREHRIIDIDLGRLGGSALTDSSIDVPKDRSEGEMASGVPSTYVPVRNLVFLSYALAWAEVLGAFDIFIGVNSLDYSGYPDCRPEFIESFEKTANLASAASAEGGGRFKINAPLMQKTKAEIILEGKRLGFDYSLTHSCYDPDENGLACGKCDSCKLRLKGFREAGLKDPIKYQ

SEQ ID NO: 42132 - protein, 233 aa, unidentified
  source 1..233: note = Sedimentisphaera salicampi
  REGION 1..233: note = tr|A0A1W6LNG7|A0A1W6LNG7_9BACT 7-cyano-7-deazaguanine synthase OS=Sedimentisphaera salicampi OX=1941349 GN=queC PE=3 SV=1
MQEKNKAVVLLSGGLDSGTTAQIASSEGLEIYAMSFSYGQRHTVELQAARKIAEFCEAEEHRIIDIDLGKLGGSALTDNAIDVPKDRSESEISSGVPATYVPVRNLVFLSYALAWAEVLGAYHIFIGVNSLDYSGYPDCRPEFIESFEKTANLASAASAEGKGRFKINAPLMHKTKAEIILEGTRLGFDYSLTHSCYDPDENGLACGKCDSCLLRLKGFKEAGLTDPIKYQRY

SEQ ID NO: 42133 - protein, 230 aa, unidentified
  source 1..230: note = Sedimentitalea sp.
  REGION 1..230: note = tr|A0A3T0N8M7|A0A3T0N8M7_9RHOB 7-cyano-7-deazaguanine synthase OS=Sedimentitalea sp. W43; OX = 2483033 GN=queC PE=3 SV=1
MKTIVICSGGLDSVSLAHKVAAEHELIGLISFDYGQRHSKETDFAARCAKRLGVPFDLIDMRHIGAHLSGSALTDDVDVPDGHYAEETMKVTVVPNRNAIMLAIAFGVAAAKQADAVATAVHGGDHFIYPDCRPDFTEAFEAMQAKALDGYADVKLYTPFVHVPKSAIVTEGAKHDTPFADTWSCYKGGEQHCGRCGTCVERREAFHLAGVTDPTVYADPDYWKSVLENA

SEQ ID NO: 42134 - protein, 221 aa, Sediminibacillus albus
  REGION 1..221: note = tr|A0A1G8X2P9|A0A1G8X2P9_9BACI 7-cyano-7-deazaguanine synthase OS=Sediminibacillus albus; OX = 407036 GN=queC PE=3 SV=1
MEKNKAVVVFSGGQDSTTCLFWALEKFDEVEAITFDYNQRHQQEIEVAKAIATELNVKHTVLDMSLLNQLAPNALTRNDIEVNEGEDGSLPSTFVPGRNLMFLSFASIMAKQIGAKHIVTGVCETDFSGYPDCRDVFVKSLNVTLNLSMDEAFVIHTPLMWLDKAETWELADNLGAFSFVREKTLTCYHGFHADGCGECPACKLRRNGLESYLAKREGADL

SEQ ID NO: 42135 - protein, 221 aa, Sediminibacillus halophilus
  REGION 1..221: note = tr|A0A1G9P3G3|A0A1G9P3G3_9BACI 7-cyano-7-deazaguanine synthase OS=Sediminibacillus halophilus OX=482461 GN=queC PE=3 SV=1
MEKNKAVVVFSGGQDSTTCLFWAMERFDEVEAVTFDYNQRHQEEIEVAREIAGDLDIKHTVLDMSLLNQLAPNALTRTNIEVTEGEDGGLPSTFVPGRNLLFLSFAAIMAKQIGAKHVVTGVCETDFSGYPDCRDVFVKSLNVTLNLSMDEQFVIHTPLMWLNKAETWELADQLNAFAFVREKTLTCYHGVRADGCGECPACKLRSAGLNAYIAKLEGERA

SEQ ID NO: 42136 - protein, 231 aa, Seinonella peptonophila
  REGION 1..231: note = tr|A0A1M4XIY9|A0A1M4XIY9_9BACL 7-cyano-7-deazaguanine synthase OS=Seinonella peptonophila; OX = 112248 GN=queC PE=3 SV=1
MKAVVILSGGLDSTTCMGIAQKDGYQLYPLTFDYGQRHRIELEAAAAVAAHYHVSDQHQIASLDWLGVLGGSALTDQTMDVPSAGEEKGIPSTYVPARNLIFISLATAYAEVVGATAIYLGVSAVDFSGYPDCRPAFIEAVNQTLALATEVGVNDQKESIQVVTPLIHLSKKETIRQGIELEVPYHLTTSCYRGEAKACGKCDSCHLRLKGFAENGVRDPIPYHDSVSVNV

SEQ ID NO: 42137 - protein, 223 aa, Selenihalanaerobacter shriftii
  REGION 1..223: note = tr|A0A1T4K6F2|A0A1T4K6F2_9FIRM 7-cyano-7-deazaguanine synthase OS=Selenihalanaerobacter shriftii OX=142842 GN=queC PE=3 SV=1
MNKKAIVLSSGGLDSTTCLSIALDEGYEVYPLSFLYGQKHSREIEQSKLIREELGIPKENHLFVRVDNIGESALTNDEVDIPEDETEGIPDTYVPARNMLFLSYAVSLAEGVGAEAVYIGISSIDYSGYPDCRPEFIEAYQKTIDVGTKAGVEGDSVQIKTPLIDKTKVETIEIGLELKAPYNLTTTCYRGEEKACGKCPSCKIRLKAFDKIGVKDPIEYETE

SEQ ID NO: 42138 - protein, 225 aa, unidentified
  source 1..225: note = Seleniivibrio woodruffii
  REGION 1..225: note = tr|A0A4R1KEV7|A0A4R1KEV7_9BACT 7-cyano-7-deazaguanine synthase OS=Seleniivibrio woodruffii OX=1078050 GN=queC PE=3 SV=1
METNNAALVVFSGGQDSTTCLGWALKKFEKVHTISFGYGQNHSIELVQAEKIAAKTGVSFKNVDISFFAGLVDSALTTKGADVTERHPRLKNLPASYVPNRNALFLTLAHAYAQLKNCDHLVTGVCETDFSGYPDCRKVFTDAMENALNLGSETELVIHTPLMYLNKAQTFKLAEDCGVLDIVLEDSHTCYNGDRSVRHAWGYGCGDCPACVLRAKGYEEYINAF

SEQ ID NO: 42139 - protein, 228 aa, Selenomonas artemidis
  REGION 1..228: note = tr|E7N2X8|E7N2X8_9FIRM 7-cyano-7-deazaguanine synthase OS=Selenomonas artemidis F0399 OX=749551 GN=queC; PE = 3 SV=1
MREKAVILLSGGLDSCTCMAVAQEAGCELYPVSFVYGQRYDREVDCAKRIAAHFHAAEHLIIETNMDAIGGSAVTDRSIDVPEGDPDRTDIPLTYVPARNLIFLSYGLGFAERVGAAHLYIGVNSVDYSGYPDCRPEFIRQFQAVADMATAAATERGKRIVVETPLQYLSKGEIIALGTRLGAPYEMTTSCYNGGTEACGVCDSCRLRLRGFAEAGRRDPIPYAAGVR

SEQ ID NO: 42140 - protein, 228 aa, Selenomonas flueggei
  REGION 1..228: note = tr|C4V0Q0|C4V0Q0_9FIRM 7-cyano-7-deazaguanine synthase OS=Selenomonas flueggei ATCC 43531 OX=638302; GN = queC PE=3 SV=1
MGERAVILLSGGLDSCTCMAIAHAAGQELYPISFNYHQRHSRELDAARSIAAHYHAAEHLIIETNMDAIGGSALTDSAIDVPQGNAERTDIPVTYVPARNLIFLSYALGYAERVGAAHVYIGVNSVDYSGYPDCRPEFIAAFQRAADAATAASAEDGRRIVIETPLQHLSKGEIILRGDELDAPYALTTSCYRGGTVACGVCDSCLLRLRGFAEAGLHDPIPYAEGKN

SEQ ID NO: 42141 - protein, 228 aa, Selenomonas infelix
  REGION 1..228: note = tr|G5GS76|G5GS76_9FIRM 7-cyano-7-deazaguanine synthase OS=Selenomonas infelix ATCC 43532 OX=679201; GN = queC PE=3 SV=1
MGEKAVILLSGGLDSCTCMAVAQAAGYELYPISFNYHQRYDREVDCAKRIAAHFHAAEHLIIETNMDAVGGSAVTDKSIDVPDGDADRTDIPVTYVPARNLIFLSYALGFAERVGAAHLYIGVNSVDYSGYPDCRPEFIAAFQTAADAATAAATERGRRIVVETPLQHLSKGEIIRLGTQLGAPYELTTSCYRGGAEACGVCDSCLLRLRGFAEAGRRDPIPYAAGAR

SEQ ID NO: 42142 - protein, 232 aa, Selenomonas noxia
  REGION 1..232: note = tr|D4S6P5|D4S6P5_9FIRM 7-cyano-7-deazaguanine synthase OS=Selenomonas noxia ATCC 43541 OX=585503 GN=exsB; PE = 3 SV=1
MRGNIMGEKAVVLLSGGLDSCTCMAVADAAGHELYPVSFDYHQRHIRELSCAKKIAVHYHAAEHLIIETNMNAVGGSALTDDTIDVPEGDAQRTDIPATYVPARNLIFLSYALGYAERVGATHLYIGVNSVDYSGYPDCRPAFIAAFQAAADAATAAAERGRRIIVETPLQSLSKGEIIRLGTKLGAPYELTTSCYRGEEEACGVCDSCVLRLRGFAAAGRRDPIPYAAGGQ

SEQ ID NO: 42143 - protein, 228 aa, Selenomonas noxia
  REGION 1..228: note = tr|G5H4W6|G5H4W6_9FIRM 7-cyano-7-deazaguanine synthase OS=Selenomonas noxia F0398 OX=702437 GN=queC PE=3; SV = 1
MGEKAVVLLSGGLDSCTCMAVADAAGHELYPVSFDYHQRHIRELSCAKKIAVHYHAAEHLIIETNMNAVGGSALTDDTIDVPEGDAQRTDIPATYVPARNLIFLSYALGYAERVGATHLYIGVNSVDYSGYPDCRPAFIAAFQAAADAATAAAAERGGRIIVETPLQSLSKGEIIRLGTKLGAPYELTTSCYRGEEEACGVCDSCVLRLRGFAAVGRRDPIPYAAGGQ

SEQ ID NO: 42144 - protein, 228 aa, Selenomonas ruminantium
  REGION 1..228: note = tr|I0GRS3|I0GRS3_SELRL 7-cyano-7-deazaguanine synthase OS=Selenomonas ruminantium subsp. lactilytica (strain NBRC 103574 / TAM6421) OX=927704 GN=queC PE=3 SV=1
MAKEKAVVLLSGGLDSCTCMAVAKEAGYEVYPISFNYHQRHSIELEGAKKIADFYKVPKHLIIETNMEAIGGSALTDSHIDVPEGDVDRKDVPVTYVPARNLIFLSYAMGYAEVVGATHVYIGVNSVDYSGYPDCRPEFIQKFQALADYATTATAVNGTKIKIETPLQDLSKKEIVQLGSKLGAPLQFTHSCYKGGEKACGVCDSCKLRLQGFAEAGVEDPVEYETRN

SEQ ID NO: 42145 - protein, 228 aa, Selenomonas ruminantium
  REGION 1..228: note = tr|A0A1K1LT46|A0A1K1LT46_SELRU 7-cyano-7-deazaguanine synthase OS=Selenomonas ruminantium; OX = 971 GN=queC PE=3 SV=1
MAKEKAVVLLSGGLDSCTCMAVAKEAGYEVYPISFNYHQRHSIELEGAKKIAEFYNVPKHLIIETNMEAIGGSALTDSHIDVPEGDVNREDVPITYVPARNLIFLSYAMGYAEVVGATHVYIGVNSVDYSGYPDCRPEFIQKFQELANYATTATAVNGTKITIETPLQDLSKKEIVQLGSKLGAPLQFTHSCYKGGEKACGVCDSCKLRLQGFAEAGVEDPVEYETRN

SEQ ID NO: 42146 - protein, 228 aa, Selenomonas sp.
  REGION 1..228: note = tr|E0NY53|E0NY53_9FIRM 7-cyano-7-deazaguanine synthase OS=Selenomonas sp. oral taxon 149 str. 67H29BP; OX = 864563 GN=exsB PE=3 SV=1
MGERAVILLSGGLDSCTCMAIAHAAGQELYPISFNYHQRHSRELDAAKSIAAHYHAAEHLIIETNMDAIGGSALTDSAIDVPQGDAERTDIPVTYVPARNLIFLSYAVGYAERVGAAHVYIGVNSVDYSGYPDCRPAFIAAFQRAADAATAASAENGRRIVIETPLQHLSKGEIIRRGDALDAPYALTTSCYQGGSVACGVCDSCLLRLRGFAEAGLHDPIPYAEGKN

SEQ ID NO: 42147 - protein, 228 aa, Selenomonas sp.
  REGION 1..228: note = tr|A0A0X8K961|A0A0X8K961_9FIRM 7-cyano-7-deazaguanine synthase OS=Selenomonas sp. oral taxon 136 OX=713030 GN=queC PE=3 SV=1
MGERAVILLSGGLDSCTCMAIAHAAGQELYPISFNYHQRHSRELDAAKSIAAHYHAAEHLIIETNMDAIGGSALTDSAIDVPQGDAERTDIPVTYVPARNLIFLSYAVGYAERVGATHVYIGVNSVDYSGYPDCRPAFIAAFQRAADAATAASAENGRRIVIETPLQHLSKGEIIRRGDALDAPYALTTSCYQGGSVACGVCDSCLLRLRGFAEAGLHDPIPYAEGKN

SEQ ID NO: 42148 - protein, 224 aa, Selenomonas sputigena
  REGION 1..224: note = tr|C9LUJ3|C9LUJ3_SELS3 7-cyano-7-deazaguanine synthase OS=Selenomonas sputigena (strain ATCC 35185 / DSM 20758 / VPI D19B-28) OX=546271 GN=queC PE=3 SV=1
MEKAVVLLSGGLDSTTCMAVAKEQGKELYPISFDYHQRHSIELEGAKKIAAFYKVNRHLIIETNMEAIGGSALTDDSIAVPEGDVSRTSVPVTYVPARNLIFLSYALGYAETIGARSVYIGVNSVDYSGYPDCRPEFIRHFQAVADYSTEAASEGKRIEIVTPLQNLSKADIVRLATRLAVPLELTHSCYSGGEKACGVCDSCKLRLQGFAAAGIKDPIEYEKR

SEQ ID NO: 42149 - protein, 279 aa, unidentified
  source 1..279: note = Senegalimassilia anaerobia
  REGION 1..279: note = tr|A0A369LBW9|A0A369LBW9_9ACTN 7-cyano-7-deazaguanine synthase OS=Senegalimassilia anaerobia OX=1473216 GN=queC PE=3 SV=1
MGIFEGQAFSSFAAAAANARENLRVRGTLGEDPAPRDENGKVCGENPQKALVLSSGGVDSSTLLALAVKRFGAENVFALSISYGQRHEKEIESAKAVAAHYGVEQRFLDLSAIFADSDCSLLEHSSQDVPEESYAEQIDEADGSPVSTYVPFRNGLFLSSAASMALSLGASVLFYGAHHDDWAGDAYPDCSIEFVNAMNLAITQGTAGQLHMEAPFVSWSKADIVKCGLELDVPYELTWSCYEGGERPCGKCGTCIDRNRAFEANGMRDPLLDKLDAQG

SEQ ID NO: 42150 - protein, 310 aa, unidentified
  source 1..310: note = Senegalimassilia sp.
  REGION 1..310: note = tr|A0A4Q2JZT3|A0A4Q2JZT3_9ACTN 7-cyano-7-deazaguanine synthase OS=Senegalimassilia sp. KGMB04484 OX=2509433 GN=queC PE=3 SV=1
MKESNKVFPSLAQAAAAVREGAFGTAAVGEESHNATAASGTAANESPRSFGSFAAAAAAHKAAGPQLGASQEGQKALVLCSGGVDSTTLLAMAVERYGAENVFALSISYGQRHEKEIESAKAVATYYGVEQRFLDLSAIFADSNCSLLAHSTDQVPEESYAEQLDESNGAPVSTYVPFRNGLFLSSAASMALSLGASVLYYGAHHDDWAGNAYPDCSLEFVYAMNLAIMEGTGGELRMEAPFVEWSKADIVKRGLELGVPYELTWSCYEGGNYPCGACGTCIDRNRAFELNGVRDPLLDALDAQRAQAGE

SEQ ID NO: 42151 - protein, 218 aa, unidentified
  source 1..218: note = Serpentinicella alkaliphila
  REGION 1..218: note = tr|A0A4R2TLP6|A0A4R2TLP6_9CLOT 7-cyano-7-deazaguanine synthase OS=Serpentinicella alkaliphila OX=1734049 GN=queC PE=3 SV=1
MNKDKAIVVFSGGQDSTTCLFWAKKRYKEVIAVSFDYNQKHKLELACAKDICKKHNIEHHILDLNLLNQLAPNSLTRQDISVDKNAPTEGLPNSFVDGRNLLFLTFVGIFAKQRDINAIVTGVSQSDFSGYPDCRDVFIKSLNVTLNLAMAYEFEILTPLMWINKEETWKLADDLGVLDIVKEETLTCYNGIKGNGCGECPACKLRKNGYVDFKNKYK

SEQ ID NO: 42152 - protein, 237 aa, unidentified
  source 1..237: note = Serpentinomonas mccroryi
  REGION 1..237: note = tr|A0A060NXW2|A0A060NXW2_9BURK 7-cyano-7-deazaguanine synthase OS=Serpentinomonas mccroryi OX=1458426 GN=queC PE=3 SV=1
MKAALPKAVVLLSGGLDSATVLALARERGFATCALSFDYGQRHAHELDLARAQARAQGAHQHVTLPVDLRAFGGSALTEAALEVPKHRSLAALAQGIPSTYVPARNTVFLSLALAWAETLGSTDIFIGVNALDYSGYPDCRPAFIQAFEAMANLATRAGVEGTQRLRIHAPLQHLGKADIVREALRLGVDVAQTCSCYDPGPQGQPCGACDACLLRAKGFAEAGCPDPLLQRFGAST

SEQ ID NO: 42153 - protein, 241 aa, unidentified
  source 1..241: note = Serpentinomonas raichei
  REGION 1..241: note = tr|A0A060NKT8|A0A060NKT8_9BURK 7-cyano-7-deazaguanine synthase OS=Serpentinomonas raichei; OX = 1458425 GN=queC PE=3 SV=1
MTLMSAAQPTAVVLLSGGLDSATVLALARERGFAACALSFDYGQRHAHELAAARAQAQAQGTRRHITLPVDLRAFGGSALTDQALVVPKQRTLDELAQQGIPLTYVPARNTVFLSLALAWAETLGSCDIFIGVNALDYSGYPDCRPAFIQAFEAMANLATRAGVEGAQRLRIHAPLQHLSKAEIVREALRLGVDLAHTCSCYDPGPLGQPCGACDACLLRAKGFAEVGCPDPLRQRFGLHQ

SEQ ID NO: 42154 - protein, 232 aa, Serratia ficaria
  REGION 1..232: note = tr|A0A240BGW3|A0A240BGW3_SERFI 7-cyano-7-deazaguanine synthase OS=Serratia ficaria; OX = 61651 GN=queC PE=3 SV=1
MKRAVVVFSGGQDSTTCLIQALQQYDEVHCVTFDYGQRHRAEIEVAQALSAALGAKAHKVLDVTLLNELAVSSLTRDNIPVPAYDPNQKNALPSTFVPGRNILFLTLAAIYAYQVEAEAVITGVCETDFSGYPDCRDEFVKALNQAVVLGIARDIRFETPLMWLNKAETWALADYYHQLERVRQDTLTCYNGIKGDGCGECAACNLRANGLQQYQGNRAEVMASLKRKAALA

SEQ ID NO: 42155 - protein, 232 aa, Serratia fonticola
  REGION 1..232: note = tr|A0A0F7HBI3|A0A0F7HBI3_SERFO 7-cyano-7-deazaguanine synthase OS=Serratia fonticola; OX = 47917 GN=queC PE=3 SV=1
MKRAVVVFSGGQDSTTCLIQALQQYDEVHCITFDYGQRHRAEIEVAQALCQTLGAKAHKVLDVGLLNELAISSLTRDNIPVPAYDSSQTDALPSTFVPGRNILFLTLAAIYAYQVEAEAVITGVCETDFSGYPDCRDEFVKALNQAIVLGIARDIRFETPLMWLNKAETWALADYYQQLERIRHETLTCYNGVQGDGCGECAACHLRANGLQQYQQDKVGVMASLKRKTGLV

SEQ ID NO: 42156 - protein, 245 aa, Serratia fonticola
  REGION 1..245: note = tr|A0A4U9U4N4|A0A4U9U4N4_SERFO 7-cyano-7-deazaguanine synthase OS=Serratia fonticola; OX = 47917 GN=queC PE=3 SV=1
MCIGNGPSQKVDFMKRAVVVFSGGQDSTTCLIQALQQYDEVHCITFDYGQRHRAEIEVAQALCQTLGAKAHKVLDVGLLNELAISSLTRDNIPVPAYDSSQTDALPSTFVPGRNILFLTLAAIYAYQVEAEAVITGVCETDFSGYPDCRDEFVKALNQAIVLGIARDIRFETPLMWLNKAETWALADYYQQLERIRHETLTCYNGVQGDGCGECAACHLRANGLQQYQQDKVGVMASLKRKTGLV

SEQ ID NO: 42157 - protein, 233 aa, Serratia liquefaciens
  REGION 1..233: note = tr|A0A515D5E1|A0A515D5E1_SERLI 7-cyano-7-deazaguanine synthase OS=Serratia liquefaciens; OX = 614 GN=queC PE=3 SV=1
MSGKTAVVVFSGGQDSTTCLVKALAEYDSVHCLTFDYGQRHSEEIKIAEQLAKKLNVSSHKILDVNVINELAISSLTRNEIEVPEHKNSDSDGIPSTFVPGRNIVFLTLAAIYAFQVNAEDVITGVCETDFSGYPDCRDVFVKALNHAVSLGIGRDIRFVTPLMSLNKAETWALADNMGCLELIRDETLTCYNGVKSFGCGKCDACFLRSRGFNEYVQNKEEIKKSLQKKQAI

SEQ ID NO: 42158 - protein, 233 aa, Serratia liquefaciens; identical to SEQ ID NO: 38947
  REGION 1..233: note = tr|A0A484YY59|A0A484YY59_SERLI 7-cyano-7-deazaguanine synthase OS=Serratia liquefaciens; OX = 614 GN=queC PE=3 SV=1

SEQ ID NO: 42159 - protein, 232 aa, Serratia marcescens
  REGION 1..232: note = tr|A0A5C7CG50|A0A5C7CG50_SERMA 7-cyano-7-deazaguanine synthase OS=Serratia marcescens subsp. sakuensis OX=211760 GN=queC PE=3 SV=1
MKRAVVVFSGGQDSTTCLIQALQQYDEVHCVTFDYGQRHRAEIEVAQELSVALGAKAHKVLDVTLLNELAVSSLTRDNIPVPAYDPNQKNALPSTFVPGRNILFLTLAAIYAYQVEAEAVITGVCETDFSGYPDCRDEFVKALNKAVTLGIARDIRFETPLMWLSKAETWALADYYHQLDRVRQDTLTCYNGIKGDGCGECAACNLRANGLTQYRANQAEVMAALKQKAGLA

SEQ ID NO: 42160 - protein, 232 aa, Serratia marcescens
  REGION 1..232: note = tr|A0A421HVB2|A0A421HVB2_SERMA 7-cyano-7-deazaguanine synthase OS=Serratia marcescens; OX = 615 GN=queC PE=3 SV=1
MKRAVVVFSGGQDSTTCLIQALQQYDEVHCVTFDYGQRHRAEIEVAQELSMALGAKAHKVLDVTLLNELAVSSLTRDNIPVPAYDPNQKNALPSTFVPGRNILFLTLAAIYAYQVEAEAVITGVCETDFSGYPDCRDEFVKALNKAVTLGIARDIRFETPLMWLNKAETWALADYYHQLDRVRQDTLTCYNGIKGDGCGECAACNLRANGLTQYRANQVEVMVALKQKAGLA

SEQ ID NO: 42161 - protein, 232 aa, Serratia nematodiphila
  REGION 1..232: note = tr|A0A5C7CXA9|A0A5C7CXA9_9GAMM 7-cyano-7-deazaguanine synthase OS=Serratia nematodiphila; OX = 458197 GN=queC PE=3 SV=1
MKRAVVVFSGGQDSTTCLIQALQQYDEVHCVTFDYGQRHRAEIEVAQELSVALGAKAHKVLDVTLLNELAVSSLTRDNIPVPAYDPNQKNALPSTFVPGRNILFLTLAAIYAYQVEAEAVITGVCETDFSGYPDCRDEFVKALNKAVTLGIARDIRFETPLMWLNKAETWALADYYHQLDRVRQDTLTCYNGIKGDGCGECAACNLRANGLTQYRANQAEVMAALKQKAGLA

SEQ ID NO: 42162 - protein, 232 aa, Serratia odorifera
  REGION 1..232: note = tr|D4DW94|D4DW94_SEROD 7-cyano-7-deazaguanine synthase OS=Serratia odorifera DSM 4582 OX=667129 GN=exsB; PE = 3 SV=1
MRRAVVVFSGGQDSTTCLIQALQQYDEVHCITFDYGQRHRAEIDVAQELSHSLGAKAHKILDVGLLNELAISSLTRDNIPVPAFGSETEGGLPSTFVPGRNILFLTLAAIYAYQVEAEAVITGVCETDFSGYPDCRDEFVKALNQAIVLGIARDIRFETPLMWLNKAETWALADYYHQLDRIRQDTLTCYNGIKGDGCGECAACHLRANGLTQYQSRQADIMASLKQKTGLI

SEQ ID NO: 42163 - protein, 232 aa, Serratia odorifera; identical to SEQ ID NO: 42162
  REGION 1..232: note = tr|A0A447KKR9|A0A447KKR9_SEROD 7-cyano-7-deazaguanine synthase OS=Serratia odorifera; OX = 618 GN=queC_2 PE=3 SV=1

SEQ ID NO: 42164 - protein, 232 aa, unidentified
  source 1..232: note = Serratia oryzae
  REGION 1..232: note = tr|A0A1S8CM44|A0A1S8CM44_9GAMM 7-cyano-7-deazaguanine synthase OS=Serratia oryzae; OX = 2034155 GN=queC PE=3 SV=1
MKRAVVVFSGGQDSTTCLIQALQQYDEVHCITFDYGQRHRAEIDIAQNLAQRLGAKAHKVLDSRLLNELAISSLTRDNIPVPAFDSTQDDALPSTFVPGRNILFLTLAAIYAYQVEAEALITGVCETDFSGYPDCRDEFVKALNNAVVLGIARDIRFETPLMWLNKAETWALADYYQQLELVRQETLSCYNGVQGDGCGACAACHLRAKGLHQYLQDKSSVMTSLKQKTGLI

SEQ ID NO: 42165 - protein, 232 aa, Serratia plymuthica
  REGION 1..232: note = tr|A0A318NW64|A0A318NW64_SERPL 7-cyano-7-deazaguanine synthase OS=Serratia plymuthica; OX = 82996 GN=queC PE=3 SV=1
MKRAVVVFSGGQDSTTCLVQALEQYDEVHCITFDYGQRHRAEIEVARELAVALGVKGHKVLDVTMLNELAISSLTRDNIPVPAFNGTQPGGLPSTFVPGRNILFLTLASIYAYQVEAQAVITGVCETDFSGYPDCRDEFVKALHHGVALGLARDIRFETPLMWLDKAEIWALADYYRQLERVRSDTLTCYNGVKGEGCGECTACHLRAEGLAAYQNDKVGVAARMKRKTQLA

SEQ ID NO: 42166 - protein, 232 aa, Serratia plymuthica
  REGION 1..232: note = tr|A0A318NVK3|A0A318NVK3_SERPL 7-cyano-7-deazaguanine synthase OS=Serratia plymuthica; OX = 82996 GN=queC PE=3 SV=1
MKRAVVVFSGGQDSTTCLIQALQQYDEVHCITFDYGQRHRAEIEVAQALSVALGAKAHKVLDVGLLNELAISSLTRDSIPVPAYNNEQEGGLPSTFVPGRNILFLTLAAIYAYQVEAEAVITGVCETDFSGYPDCRDEFVKALNHAVVLGIARDIRFETPLMWLNKAETWALADYYQQLDRVRQDTLTCYNGIQGDGCGECAACHLRANGLKQYQINKAEVMASLKQKTGLA

SEQ ID NO: 42167 - protein, 232 aa, Serratia proteamaculans
  REGION 1..232: note = tr|A0A379ZYN5|A0A379ZYN5_9GAMM 7-cyano-7-deazaguanine synthase OS=Serratia proteamaculans; OX = 28151 GN=queC PE=3 SV=1
MKRAVVVFSGGQDSTTCLIQALQQYDEVHCVTFDYGQRHRAEIEVAQALSVALGAKAHKLLDVGLLNELAISSLTRDNIPVPAYGSTEANGLPSTFVPGRNILFLTLAAIYAYQVEAEAVITGVCETDFSGYPDCRDEFVKALNQAIVLGIARDIRFETPLMWLNKAETWALADYYHQLDLVRQETLTCYSGIKGDGCGECAACHLRANGLTQYQINKAEVMASLKQKTGLV

SEQ ID NO: 42168 - protein, 232 aa, Serratia proteamaculans
  REGION 1..232: note = sp|A8GAR6|QUEC_SERP5 7-cyano-7-deazaguanine synthase; OS = Serratia proteamaculans (strain 568) OX=399741 GN=queC; PE = 3 SV=1
MKRAVVVFSGGQDSTTCLIQALKQYDEVHCVTFDYGQRHRAEIEVAQELSVALGAKAHKLLDVGLLNELAISSLTRDNIPVPAYDSTQSNGLPSTFVPGRNILFLTLAAIYAYQVEAEAVITGVCETDFSGYPDCRDEFVKALNQAIVLGIARDIRFETPLMWLNKAETWALADYYHQLELVQQDTLTCYNGIKGNGCGECAACHLRANGLQQYQINKAEVMASLKQKTGLV

SEQ ID NO: 42169 - protein, 232 aa, Serratia quinivorans
  REGION 1..232: note = tr|A0A4Q8D3B7|A0A4Q8D3B7_9GAMM 7-cyano-7-deazaguanine synthase OS=Serratia quinivorans; OX = 137545 GN=queC PE=3 SV=1
MKRAVVVFSGGQDSTTCLIQALQQYDEVHCVTFDYGQRHRAEIEVAQELSVALGAKAHKLLDVGLLNELAISSLTRDNIPVPAYNPDEKNALPSTFVPGRNILFLTLAAIYAYQVEAEAVITGVCETDFSGYPDCRDEFVKALNHAIVLGIARDIRFETPLMWLNKAETWALADYYHQLALVQQETLTCYNGIKGNGCGECAACHLRANGLQQYQINKAEVMASLKQKTGLV

SEQ ID NO: 42170 - protein, 157 aa, Serratia quinivorans
  REGION 1..157: note = tr|A0A379YWX8|A0A379YWX8_9GAMM 7-cyano-7-deazaguanine synthase OS=Serratia quinivorans; OX = 137545 GN=queC_1 PE=3 SV=1
MKRAVVVFSGGQDSTTCLIQALKQYDEVHCVTFDYGQRHRAEIEVAQELSVALGAKAHKLLDVGLLNELAISSLTRDNIPVPAYDSTQSNGLPSTFVPGRNILFLTLAAIYAYQVEAEAVITGVCGNRLLRLPRLSRRVCQSAEPGDSTGHRPRYPL

SEQ ID NO: 42171 - protein, 231 aa, Serratia rubidaea
  REGION 1..231: note = tr|A0A2X5BTJ4|A0A2X5BTJ4_SERRU 7-cyano-7-deazaguanine synthase OS=Serratia rubidaea; OX = 61652 GN=queC PE=3 SV=1
MKRAVVVFSGGQDSTTCLIQALQQYDEVHCVTFDYGQRHRAEIDIARELSQSLGAKAHKVLDVGLLNELAISSLTRDDIPVPTFSAEQDGLPSTFVPGRNILFLTLAAIYAYQVEAEAVITGVCETDFSGYPDCRDEFVKALNQAVVLGIARDIRFETPLMWLNKAETWALADYYQQLDLVRQHTLTCYNGIKGDGCGECAACHLRGNGLQQYQDNRTAVMAELKRKTGLV

SEQ ID NO: 42172 - protein, 231 aa, Serratia rubidaea
  REGION 1..231: note = tr|A0A140F0E1|A0A140F0E1_SERRU 7-cyano-7-deazaguanine synthase OS=Serratia rubidaea; OX = 61652 GN=queC PE=3 SV=1
MKRAVVVFSGGQDSTTCLIQALQQYDEVHCVTFDYGQRHRAEIDIARELSQSLGAKAHKVLDVGLLNELAISSLTRDDIPVPAFSAEQDGLPSTFVPGRNILFLTLAAIYAYQVEAEAVITGVCETDFSGYPDCRDEFVKALNQAVVLGIARDIRFETPLMWLNKAETWALADYYQQLDLVRQQTLTCYNGIKGDGCGECAACHLRANGLQQYQGNRPAVMAELKRKTGLA

SEQ ID NO: 42173 - protein, 232 aa, Serratia sp.
  REGION 1..232: note = tr|A0A1B3FK33|A0A1B3FK33_9GAMM 7-cyano-7-deazaguanine synthase OS=Serratia sp. YD25; OX = 1759437 GN=queC PE=3 SV=1
MKRAVVVFSGGQDSTTCLIQALQQYDEVHCVTFDYGQRHRAEIEVAQELSVALGAKAHKVLDVTLLNELAVSSLTRDNIPVPAYDPNQKNALPSTFVPGRNILFLTLAAIYAYQVEAEAVITGVCETDFSGYPDCRDEFVKALNQAVVLGIARDIRFETPLMWLNKAETWALADYYHQLDRVRQDTLTCYNGIKGDGCGECAACNLRANGLTQYRANQAEVMAALKQKAGLA

SEQ ID NO: 42174 - protein, 231 aa, Serratia sp.; identical to SEQ ID NO: 42171
  REGION 1..231: note = tr|A0A2R3GXX4|A0A2R3GXX4_9GAMM 7-cyano-7-deazaguanine synthase OS=Serratia sp. MYb239; OX = 2033438 GN=queC PE=3 SV=1

SEQ ID NO: 42175 - protein, 149 aa, Serratia symbiotica
  REGION 1..149: note = tr|A0A068Z524|A0A068Z524_9GAMM 7-cyano-7-deazaguanine synthase OS=Serratia symbiotica; OX = 138074 GN=SYMBAF_90109 PE=3 SV=1
MKRAVVIFSGGQDSTTCLIQALQQYDEVHCVTFDYGQRHHAEIAVAQELSLTLGAKAHKVLDVGLLNELAISSLTRDNIPVPAYVCHECTLWQIRVQCCARDEGRPLGGGVQMQPSNYPELLPLRAVVVSVREKAQSDASCMCCEDERE

SEQ ID NO: 42176 - protein, 230 aa, Serratia symbiotica
  REGION 1..230: note = tr|A0A068Z1X0|A0A068Z1X0_9GAMM 7-cyano-7-deazaguanine synthase OS=Serratia symbiotica; OX = 138074 GN=queC PE=3 SV=1
MEKKKAVVVYSGGQDSTTCLIHARHFYDDIHCITFDYGQRHRAEIDVARELALKLGATAHKVLDVGLLNELAISSLTRDNIPIPTQTEEGIPNTFVPGRNILFLTLAAIYAYQVQADVVITGVCETDFSGYPDCRDEFVKALNHAIVLGMAKDVRFETPLMWLNKAETWALADHWQQLSLIRDETLTCYNGIKGAGCGECAACHLRRKGLETYLSNRKNVMQALQRKINI

SEQ ID NO: 42177 - protein, 232 aa, Serratia ureilytica
  REGION 1..232: note = tr|A0A5C7BRP6|A0A5C7BRP6_9GAMM 7-cyano-7-deazaguanine synthase OS=Serratia ureilytica; OX = 300181 GN=queC PE=3 SV=1
MKRAVVVFSGGQDSTTCLIQALQQYDEVHCVTFDYGQRHRAEIEVAQELSEALGAKAHKVLDVTLLNELAISSLTRDNIPVPAYDPNQKNALPSTFVPGRNILFLTLAAIYAYQVEAEAVITGVCETDFSGYPDCRDEFVKALNQAVVLGIARDIRFETPLMWLNKAETWALADYYQQLDRVRQDTLTCYNGIKGDGCGECAACNLRANGLTQYRANQAEVMAALKQKAGLA

SEQ ID NO: 42178 - protein, 250 aa, Shewanella algae
  REGION 1..250: note = tr|A0A1S2TVT3|A0A1S2TVT3_9GAMM 7-cyano-7-deazaguanine synthase OS=Shewanella algae; OX = 38313 GN=queC PE=3 SV=1
MSSESNAPQTQTAEPPRSTKPTISKAIVVFSGGQDSTTCLIQALAQYDEVHAITFDYGQRHSQEIEVAKQLAQKLGAASHKVLDVTLLNELAISALTRDNIPVSNDLMDNGLPNTFVPGRNILFLTLAGIYAYQIGADAVITGVCETDFSGYPDCRNDFIKAMESALVQGMDRQLRLVTPLMWLNKAETWALADKYQQLPLVRDETLTCYNGILGKGCGTCPACLLRQKGLDEYLATPDSIQAILAAKTA

SEQ ID NO: 42179 - protein, 250 aa, Shewanella algae
  REGION 1..250: note = tr|A0A3G4UNK8|A0A3G4UNK8_9GAMM 7-cyano-7-deazaguanine synthase OS=Shewanella algae; OX = 38313 GN=queC PE=3 SV=1
MSSESNAPQTQTAEPPRSTKPAISKAIVVFSGGQDSTTCLIQALAQYDEVHAITFDYGQRHSQEIEVAKQLAQKLGAASHKVLDVTLLNELAISALTRDNIPVSNDLMDNGLPNTFVPGRNILFLTLAGIYAYQIGADAVITGVCETDFSGYPDCRNDFIKAMESALVQGMDRQLRLVTPLMWLNKAETWALADKYQQLPLVRDETLTCYNGILGKGCGTCPACLLRQKGLDEYLATPDSIQAILAAKTA

SEQ ID NO: 42180 - protein, 230 aa, Shewanella amazonensis
  REGION 1..230: note = sp|A1S6M5|QUEC_SHEAM 7-cyano-7-deazaguanine synthase; OS = Shewanella amazonensis (strain ATCC BAA-1098 / SB2B); OX = 326297 GN=queC PE=3 SV=1
MSKAVVVFSGGQDSTTCLVQALSQFDEVHAITFDYGQRHSEEIEVAKALTSELGCASHKIMDVSLLGELAISALTRDAIPVSHELMDNGLPNTFVPGRNILFLTLAGIYAYQLGADTVITGVCETDFSGYPDCRNDFIKAMEQALNLGMDKQLNIHTPLMWLNKAETWALADRYGKLELVRNHTLTCYNGIRGDGCGDCPACHLRKRGLEDYLSNRDAVNAELTKKTGAN

SEQ ID NO: 42181 - protein, 232 aa, Shewanella atlantica
  REGION 1..232: note = tr|A0A431WDR5|A0A431WDR5_9GAMM 7-cyano-7-deazaguanine synthase OS=Shewanella atlantica; OX = 271099 GN=queC PE=3 SV=1
MSKVSKAVVVFSGGQDSTTCLIQALNQYDEVHGITFDYGQRHSQEIEVARTLGKRLGLVSHKVLDVSMLNELAISALTRDSIEVSNELMENGLPNTFVPGRNILFLTLAGIYAYQLGANSVITGVCETDFSGYPDCRNDFIKAMESALNQGMDRQCKIVTPLMWLNKAETWALADQYKSLELVRDETLTCYNGIIGNGCGTCPACLLRQKGLEDYCNNKELVQSDLAAKCLK

SEQ ID NO: 42182 - protein, 240 aa, Shewanella baltica
  REGION 1..240: note = tr|A0A161UVD9|A0A161UVD9_9GAMM 7-cyano-7-deazaguanine synthase OS=Shewanella baltica; OX = 62322 GN=queC PE=3 SV=1
MSTSLVSKPLASKAVVVFSGGQDSTTCLIQALTQYDEVHGITFDYGQRHREEIEVAKSLAKRLKITSHKVMDVTLLNELAISALTRDAIPVSHELMENGLPNTFVPGRNILFLTLAGIYAYQLGAEAIITGVCETDFSGYPDCRNDFVKAMESALVQGMDKQLKIITPLMWLNKAQTWALADKYQQLDLVRHHTLTCYNGIIGDGCGDCPACHLRKRGLDDYMQDKTAVMASLDASEPNA

SEQ ID NO: 42183 - protein, 240 aa, Shewanella baltica
  REGION 1..240: note = sp|A6WN68|QUEC_SHEB8 7-cyano-7-deazaguanine synthase; OS = Shewanella baltica (strain OS185) OX=402882 GN=queC; PE = 3 SV=1
MSTSLVSKPSASKAVVVFSGGQDSTTCLIQALTQYDEVHGITFDYGQRHREEIEVAKSLAKRLKITSHKVMDVTLLNELAISALTRDAIPVSHELMENGLPNTFVPGRNILFLTLAGIYAYQLGAEAIITGVCETDFSGYPDCRNDFVKAMESALVQGMDKQLKIITPLMWLNKAQTWALADKYQQLDLVRHHTLTCYNGVIGDGCGDCPACHLRKRGLDDYLQDKTTVMASLDASEPNA

SEQ ID NO: 42184 - protein, 231 aa, Shewanella benthica
  REGION 1..231: note = tr|A9DGY8|A9DGY8_9GAMM 7-cyano-7-deazaguanine synthase OS=Shewanella benthica KT99 OX=314608 GN=queC; PE = 3 SV=1
MSKAVIVFSGGQDSTTCLIQALEQYDEVHGITFDYGQRHSQEIEVAKELGKRLDLASHKVLDVTMLNELAISALTRDDIAVSNTLMDNGLPNTFVPGRNILFLTLAGIFAYQLGAEAVITGVCETDYSGYPDCRDDFVKAMASALVQGMDRQLELVTPLMWLNKAETWALADKYNSLDLVRDETLTCYNDIIGSGCGTCPACLLRQTGLDDYLNNKAQVQLDLAAKIAPKP

SEQ ID NO: 42185 - protein, 229 aa, Shewanella benthica
  REGION 1..229: note = tr|A0A330M1Y8|A0A330M1Y8_9GAMM 7-cyano-7-deazaguanine synthase OS=Shewanella benthica; OX = 43661 GN=queC PE=3 SV=1
MSKAVIVFSGGQDSTTCLIQALEQYDEVHGITFDYGQRHSQEIEVAKELGKRLGLASHKVLDVTMLNELAISALTRDDIAVSNTLMDNGLPNTFVPGRNILFLTLAGIFAYQLGAEAVITGVCETDYSGYPDCRDDFVKAMASALVQGMDRQLELVTPLMWLNKAETWALADKYNSLDLVRDETLTCYNDIIGSGCGSCPACLLRQTGLDDYLNNKAQVQLDLAAKIAP

SEQ ID NO: 42186 - protein, 239 aa, unidentified
  source 1..239: note = Shewanella bicestrii
  REGION 1..239: note = tr|A0A220ULQ4|A0A220ULQ4_9GAMM 7-cyano-7-deazaguanine synthase OS=Shewanella bicestrii; OX = 2018305 GN=queC PE=3 SV=1
MSAASVSKVVVVFSGGQDSTTCLIQALTQFDEVHGITFDYGQRHREEIEVAKFLAKRLKITSHKVMDVSLLNELAISALTRDAIPVSHELMENGLPNTFVPGRNILFLTLAGIYAYQLGAEAIITGVCETDFSGYPDCRHDFVRAMESALVQGMDKKLEIITPLMWLNKAQTWALADKYQQLDLVRHHTLTCYNGIVGDGCGDCPACHLRKRGLEDYLQNKAEVMASLDKATETGKPQA

SEQ ID NO: 42187 - protein, 232 aa, Shewanella canadensis
  REGION 1..232: note = tr|A0A431WQ36|A0A431WQ36_9GAMM 7-cyano-7-deazaguanine synthase OS=Shewanella canadensis; OX = 271096 GN=queC PE=3 SV=1
MSKVSKAVVVFSGGQDSTTCLIQALNQYDEVHGITFDYGQRHSEEIEVARSLGKRLGLVSHKILDVSMLNELAISALTRDSIEVSNELMENGLPNTFVPGRNILFLTLAGIYAYQLGANSVITGVCETDFSGYPDCRNDFVKAMESALNQGMDRQCEIVTPLMWLNKAETWALADQYKSLELVRDETLTCYNGIIGNGCGTCPACLLRQRGLEDYCNNREQVQSDLASKCQK

SEQ ID NO: 42188 - protein, 248 aa, Shewanella chilikensis
  REGION 1..248: note = tr|A0A2V4W5E3|A0A2V4W5E3_9GAMM 7-cyano-7-deazaguanine synthase OS=Shewanella chilikensis; OX = 558541 GN=queC PE=3 SV=1
MSSESNPSQTTEPIQSTKPTISKAIVVFSGGQDSTTCLIQALAQYDEVHAITFDYGQRHSQEIEVAKQLAQKLGAASHKVLDVTLLNELAISALTRDNIPVSNDLMDNGLPNTFVPGRNILFLTLAGIYAYQIGADAVITGVCETDFSGYPDCRNDFIKAMESALVQGMDRQLRLVTPLMWLNKAETWALADKYQQLPLVRDETLTCYNGILGKGCGTCPACLLRQKGLDEYLASPDSIQAILAAKTA

SEQ ID NO: 42189 - protein, 227 aa, Shewanella colwelliana
  REGION 1..227: note = tr|A0A1E5IYX1|A0A1E5IYX1_SHECO 7-cyano-7-deazaguanine synthase OS=Shewanella colwelliana; OX = 23 GN=queC PE=3 SV=1
MSKAVVVFSGGQDSTTCLIQALHQYDEVHAITFDYGQRHREEIITAQTLGQQLGVASHKVLDVNVLNELAISALTRDDIAVSNELMENGLPNTFVPGRNILFLTLAGIYAYQLGAEAVITGVCETDFSGYPDCRDQFIKAMQTALEQGMDRPLNLVTPLMWLNKAQTWALADKYDSLTLVRDHTLTCYNGIIGSGCGTCPACLLRSKGLQDYLDNKSAVLAQLDATC

SEQ ID NO: 42190 - protein, 239 aa, Shewanella decolorationis
  REGION 1..239: note = tr|A0A5B8QWC4|A0A5B8QWC4_9GAMM 7-cyano-7-deazaguanine synthase OS=Shewanella decolorationis OX=256839 GN=queC PE=3 SV=1
MSTASVSKVVVVFSGGQDSTTCLIQALTQFDEVHGITFDYGQRHREEIEVAKSLAKRLKITSHKVMDVSLLNELAISALTRDAIPVSHELMENGLPNTFVPGRNILFLTLAGIYAYQLGAEAIITGVCETDFSGYPDCRHDFVRAMESALVQGMDKKLEIITPLMWLNKAQTWALADKYQQLDLVRHHTLTCYNGIVGDGCGDCPACHLRKRGLEDYLQNKAEVMASLDKATETGKPQA

SEQ ID NO: 42191 - protein, 239 aa, Shewanella decolorationis
  REGION 1..239: note = tr|V1DBV2|V1DBV2_9GAMM 7-cyano-7-deazaguanine synthase OS=Shewanella decolorationis S12 OX=1353536; GN = queC PE=3 SV=1
MSAASVSKVVVVFSGGQDSTTCLIQALTQFDEVHGITFDYGQRHREEIEVAKSLAKRLKITSHKVMDVSLLNELAISALTRDAIPVSHELMENGLPNTFVPGRNILFLTLAGIYAYQLGAEAIITGVCETDFSGYPDCRHDFVRAMESALVQGMDKKLEIITPLMWLNKAQTWALADKYQQLDLVRHHTLTCYNGIVGDGCGDCPACHLRKRGLEDYLQNKAEVMASLDKATETGKPQA

SEQ ID NO: 42192 - protein, 232 aa, Shewanella denitrificans
  REGION 1..232: note = sp|Q12MM8|QUEC_SHEDO 7-cyano-7-deazaguanine synthase; OS = Shewanella denitrificans (strain OS217 / ATCC BAA-1090 / DSM 15013) OX=318161 GN=queC PE=3 SV=1
MSKAVVVFSGGQDSTTCLIQALTQFDEVHAITFDYGQRHNEEIEVAKALASQLRIASHKVMDVSLLNELAISALTRDDIPVSHELMENGLPNTFVPGRNILFLTLAGIYAYQLGANSVITGVCETDFSGYPDCRDQFVRAMETALCLGMDKQINLLTPLMWLNKAETWALADKYHSLTLVKELTLTCYNGIIGQGCGDCPACHLRQKGLDDYLNHKPSVMASLEQKTHGKSA

SEQ ID NO: 42193 - protein, 705 aa, Shewanella fodinae
  REGION 1..705: note = tr|A0A4R2FE28|A0A4R2FE28_9GAMM 7-cyano-7-deazaguanine synthase in queuosine biosynthesis; OS = Shewanella fodinae OX=552357 GN=EDC91_11320 PE=4 SV=1
MQDKRYIICGNAPTSGIEENPERDLRLRLWGKDGPDKITLRIEDIHKKMSKDVPDSFQDLLEIATYVYCADQAIPRGADDVDSFGHGWRRNLHFIIPVRNPDFWNGEEIQQALCSTLGFLSDDSYHFEFTKLKDAQAFQGYLDFNDDGRLHGYPEQVVMFSGGLDSLAGAIDEVLNEKHRVVLVTHKPTPKLNKRHRRLEKMIADKAGENTPLHIGVRVNKNKKLNKEYTQRSRSFLYVSIGATIAKMLNLNSVRFYENGVISLNLPVCAQVVGGRATRTTHPRVFRGFQEIISLVAGEPFTIENPYIWKTKAEVVEVITKAGCQDMIAASTTCTHTWEMTNDHTHCGTCSQCIDRRFAVIAAKADQYDPVEAYKADIFTQSRSKDEDKIMAAAYLERANQVRDLDGITQFIAQFSEVSRVFRYLDGNPGSAAQKVYDLYKRHATEVCDAMKTMIARNITAILQRTLPGDCLLRTMYESGSVISVPAIELTIEQPANYFRRRGDVWEVRFNKGQPIKLVTANKGSQYLSYLLSHPNQPIPVAELVCGSFYDPSSGIFSAAEIDGDDIEDGYQITQGIPLTDAGVIIDAKAREQYRERISELLQDIDEARDTGNKEKEEELRDEMTVIACALNGSKARGGKPRTLGDKRKNVKDSFRIAVKRAIEKISEYDSPLGQHLDSSIKFGNEPVYRTEEEIVWEVRPIVNE

SEQ ID NO: 42194 - protein, 240 aa, Shewanella fodinae
  REGION 1..240: note = tr|A0A4R2F3L2|A0A4R2F3L2_9GAMM 7-cyano-7-deazaguanine synthase OS=Shewanella fodinae; OX = 552357 GN=queC PE=3 SV=1
MNTTQPQSPSLSKAVMVFSGGQDSTTCLIQALTQYDEVHAITFNYGQRHIHEIDIARMLASKLGATSHKVMDVSLLNELAISALTRDSIPVSTELMDNGLPNTFVPGRNILFLTLAGIYAYQLGAEAVITGVCETDYSGYPDCRNDFVKALESALVQGMDRPLRLVTPLMWLNKAETWALADKYGKLELVRDQTLTCYNGIEGRGCGECPACKLRQHGLDEYLANKEVVAQQLAAKSPTA

SEQ ID NO: 42195 - protein, 235 aa, Shewanella frigidimarina
  REGION 1..235: note = sp|Q082U2|QUEC_SHEFN 7-cyano-7-deazaguanine synthase; OS = Shewanella frigidimarina (strain NCIMB 400) OX=318167; GN = queC PE=3 SV=1
MSDAKQNTPTKALVVFSGGQDSTTCLIQALSQYDEVHGITFDYGQRHRQEIEVAKSLATELKLASHKVMDTTLLNELAISALTRDAIPVSHELMNNGLPNTFVPGRNILFLTLAGIYAYQLGCDAIITGVCETDFSGYPDCRNEFVQSMQNSLALGMDKPLKIITPLMWLNKAETWALADKYQQLALVQHQTLTCYNGIVGKGCGDCPACVLRQRGLDDYLQNSQSVMDSLNSKL

SEQ ID NO: 42196 - protein, 235 aa, Shewanella frigidimarina
  REGION 1..235: note = tr|A0A106BZ25|A0A106BZ25_SHEFR 7-cyano-7-deazaguanine synthase OS=Shewanella frigidimarina OX=56812 GN=queC PE=3 SV=1
MSDSKQNTPTKALVVFSGGQDSTTCLIQALSQYDEVHGITFDYGQRHRQEIEVAKSLATELKLASHKVMDTTLLNELAISALTRDAIPVSHELMNNGLPNTFVPGRNILFLTLAGIYAYQLGCDAIITGVCETDFSGYPDCRNEFVQSMQNSLALGMDKPLKIITPLMWLNKAETWALADKYQQLALVQHQTLTCYNGIVGKGCGDCPACVLRQRGLEDYLQNSQSVMDSLNSKL

SEQ ID NO: 42197 - protein, 229 aa, Shewanella halifaxensis
  REGION 1..229: note = sp|B0TSC0|QUEC_SHEHH 7-cyano-7-deazaguanine synthase; OS = Shewanella halifaxensis (strain HAW-EB4) OX=458817; GN = queC PE=3 SV=1
MSKAVVVFSGGQDSTTCLIQALQQFDEVHGITFDYGQRHREEIEIAKELATNLKLASHKVMDVTLLNELAISALTRDSIPVSNELMDNGLPNTFVPGRNILFLTLAGIYAYQLGADTVITGVCETDFSGYPDCRNDFVKAMQAALEQGMDKKLTIQTPLMWLDKAETWALADKFDSLELVRNETLTCYNGIKGDGCGTCPACLLRKRGLEEYLADKEAIQARLSAKCEN

SEQ ID NO: 42198 - protein, 233 aa, Shewanella hanedai
  REGION 1..233: note = tr|A0A553JID7|A0A553JID7_SHEHA 7-cyano-7-deazaguanine synthase OS=Shewanella hanedai; OX = 25 GN=queC PE=3 SV=1
MSKAVSKAVIVFSGGQDSTTCLIQALTQYDEVHGITFDYGQRHSQEIEVAEKLGKQLGLTSHKTLDVSMLNELAISALTRDSIEVSNELMDNGLPNTFVPGRNILFLTLSGIFAYQLGADTVITGVCETDFSGYPDCRNDFVKAMQSALEQGMDRPLNLSTPLMWLNKAETWALADKYHSLSLVRDETLTCYNGIIGTGCGTCPACLLRQKGLDDYCSNKPQVQLDLEAKCQS

SEQ ID NO: 42199 - protein, 235 aa, Shewanella livingstonensis
  REGION 1..235: note = tr|A0A3G8LX25|A0A3G8LX25_9GAMM 7-cyano-7-deazaguanine synthase OS=Shewanella livingstonensis OX=150120 GN=queC PE=3 SV=1
MSDTKPNTTTKALVVFSGGQDSTTCLIQALSQYDEVHGITFDYGQRHRQEIEVAKSLAIELKLASHKVMDTTLLNELAISALTRDAIPVSHELMNNGLPNTFVPGRNILFLTLAGIYAYQLGCNAIITGVCETDFSGYPDCRNDFVQSMQNSLALGMDKPIKIITPLMWLNKAETWALADKYQQLALVQHQTLTCYNGIVGKGCGDCPACVLRQRGLDDYLQNSQSVMASLNSKI

SEQ ID NO: 42200 - protein, 227 aa, Shewanella loihica
  REGION 1..227: note = sp|A3QEN0|QUEC_SHELP 7-cyano-7-deazaguanine synthase; OS = Shewanella loihica (strain ATCC BAA-1088 / PV-4); OX = 323850 GN=queC PE=3 SV=1
MSKAVVVFSGGQDSTTCLIQALNQYDEVHAVTFDYGQRHSEEIATAAKLAKDLKVDSHKILDVTVLNELAISALTRDAIPVSNELMDNGLPNTFVPGRNILFLTLAGIYAYQLGAESVITGVCETDFSGYPDCRDSFIKAMQSALEQGMDRELKLVTPLMWLNKAQTWALADKYHSLELVRDQTLTCYNGIVGSGCGTCPACLLRAKGLNDYLDDKAGVMAELDAKC

SEQ ID NO: 42201 - protein, 240 aa, unidentified
  source 1..240: note = Shewanella mangrovi
  REGION 1..240: note = tr|A0A094J9D8|A0A094J9D8_9GAMM 7-cyano-7-deazaguanine synthase OS=Shewanella mangrovi; OX = 1515746 GN=queC PE=3 SV=1
MTLNNNAPTAKRIAIVVFSGGQDSTTCLVQALQQYDEVHAITFDYGQRHKAEIDVAKALASKLGVASHKVLDVGLLNELAISALTRDNIPVSNELMDNGLPNTFVPGRNILFLTLAGIFAYQIGAEAVITGVCETDFSGYPDCRNDFVVALNKALELGMERHLRLVTPLMWLNKAETWALADHYGQLDLVRHHTLTCYNGIQGDGCGECPACKLRHQGLQEYVAHQSQVQQSLQQKLASA

SEQ ID NO: 42202 - protein, 227 aa, Shewanella marisflavi
  REGION 1..227: note = tr|A0A4Y6J198|A0A4Y6J198_9GAMM 7-cyano-7-deazaguanine synthase OS=Shewanella marisflavi; OX = 260364 GN=queC PE=3 SV=1
MSKAVVVFSGGQDSTTCLIQALSQYDEVHAVTFDYGQRHSQEIETAKQLGQQLNVASHKILDVTVLNELAISALTRDAIPVSNELMDNGLPNTFVPGRNILFLTLAGIYAYQLGAESVITGVCETDFSGYPDCRDQFIKAMQSALELGMDRELKLVTPLMWLNKAQTWALADKYHQLELVRDQTLTCYNGILGSGCGTCPACLLRAKGLQDYLDDKETVMAQLDASC

SEQ ID NO: 42203 - protein, 260 aa, Shewanella morhuae
  REGION 1..260: note = tr|A0A1N6Z6C0|A0A1N6Z6C0_9GAMM 7-cyano-7-deazaguanine synthase OS=Shewanella morhuae; OX = 365591 GN=queC PE=3 SV=1
MASVTLTVYLCVFYGQVKFFMSINSESKKLMSKAVVVFSGGQDSTTCLIQALTQYDEVYGITFDYGQRHREEIEVAKSLAEHLKITSHKVMDVTVLNELAISALTRDAIPVSHELMDNGLPNTFVPGRNILFLTLAGIYAYQLGAEAIITGVCETDFSGYPDCRNDFVKAMESALVQGMDKQLKIITPLMWLNKAQTWAMADKYQQLDLVRHQTLTCYNGIIGDGCGDCPACHLRKRGLEDYLQNKTAVMAELNAYESKA

SEQ ID NO: 42204 - protein, 238 aa, Shewanella oneidensis
  REGION 1..238: note = sp|Q8EE85|QUEC_SHEON 7-cyano-7-deazaguanine synthase; OS = Shewanella oneidensis (strain MR-1) OX=211586 GN=queC; PE = 3 SV=1
MSASVSKVVVVFSGGQDSTTCLIQALTQYDEVHGITFDYGQRHREEIDVAKSLAQRLNITSHKVMDVSLLNELAISALTRDAIPVSHELMENGLPNTFVPGRNILFLTLAGIYAYQLGAEAIITGVCETDFSGYPDCRHDFVRAMESALVQGMDKKLNIITPLMWLNKAQTWALADKYQQLDLVRHHTLTCYNGIVGDGCGDCPACHLRQRGLDDYLQNKSAVMASLTQAIETGKPQA

SEQ ID NO: 42205 - protein, 239 aa, Shewanella oneidensis
  REGION 1..239: note = tr|A0A2W5F3Y5|A0A2W5F3Y5_SHEOE 7-cyano-7-deazaguanine synthase OS=Shewanella oneidensis; OX = 70863 GN=queC PE=3 SV=1
MSAASVSKVVVVFSGGQDSTTCLIQALTQFDEVHGITFDYGQRHREEIDVAKSLAKRLNITSHKVMDVSLLNELAISALTRDAIPVSHELMENGLPNTFVPGRNILFLTLAGIYAYQLGAEAIITGVCETDFSGYPDCRHDFVRAMESALVQGMDKKLEIITPLMWLNKAQTWALADKYQQLDLVRHHTLTCYNGIVGDGCGDCPACHLRKRGLEDYLQNKAEVMASLDKATETGKPQA

SEQ ID NO: 42206 - protein, 227 aa, Shewanella pealeana
  REGION 1..227: note = sp|A8H532|QUEC_SHEPA 7-cyano-7-deazaguanine synthase; OS = Shewanella pealeana (strain ATCC 700345 / ANG-SQ1); OX = 398579 GN=queC PE=3 SV=1
MSKAVVVFSGGQDSTTCLIQALQHFDEVHGITFDYGQRHREEIEIAKTLASKLKLASHKVMDVTLLNELAISALTRDSIPVSNDLMDNGLPNTFVPGRNILFLTLAGIYAYQLGADVVITGVCETDFSGYPDCRNDFVKAMQAALEQGMDKKLTIQTPLMWLDKAETWALADKYQSLDLIRDETLTCYNGIKGDGCGTCPACLLRKRGLEEYLADKEAIQARLTAKC

SEQ ID NO: 42207 - protein, 228 aa, Shewanella piezotolerans
  REGION 1..228: note = sp|B8CM62|QUEC_SHEPW 7-cyano-7-deazaguanine synthase; OS = Shewanella piezotolerans (strain WP3 / JCM 13877); OX = 225849 GN=queC PE=3 SV=1
MSKAIVVFSGGQDSTTCLIQALTQYDEVHCVTFDYGQRHRQEIEIAKELSSKLGASSHQVLDVGILNDLTVSALTRDIPIEENKDGNAIPNTFVPGRNILFLTLAGIYAYQINADVIITGVCETDFSGYPDCRNEFIKSMQTALMQGMDKQLTISTPLMWLDKAETWALADKYNSLELVRHQTLTCYNGLKGDGCGTCPACILRQRGLDEYLANSTMYQAQLAAKCTE

SEQ ID NO: 42208 - protein, 229 aa, Shewanella psychrophila
  REGION 1..229: note = tr|A0A1S6HLC2|A0A1S6HLC2_9GAMM 7-cyano-7-deazaguanine synthase OS=Shewanella psychrophila; OX = 225848 GN=queC PE=3 SV=1
MSKAVIVFSGGQDSTTCLIQALEQYDEVHGITFDYGQRHSQEIEIAKGLGKRLGLTSHKVLDVSMLNELAISALTRDDIAVSNTLMDNGLPNTFVPGRNILFLTLAGIFAYQLGAEAVITGVCETDYSGYPDCRDDFVKAMASALVQGMDRQLDLVTPLMWLNKAETWALADKFNSLALVRDETLTCYNDIVGSGCGTCPACLLRQTGLDDYLNNKAQIQLNLAAKTAQ

SEQ ID NO: 42209 - protein, 240 aa, Shewanella putrefaciens
  REGION 1..240: note = sp|A4Y6J4|QUEC_SHEPC 7-cyano-7-deazaguanine synthase; OS = Shewanella putrefaciens (strain CN-32 / ATCC BAA-453); OX = 319224 GN=queC PE=3 SV=2
MQKTFESKTATSKAVVVFSGGQDSTTCLIQALTQYDEVHGITFDYGQRHREEIEVAKSLAKRLKITSHKVMDVTLLNELAISALTRDAIPVSHELMENGLPNTFVPGRNILFLTLAGIYAYQLGAEAIITGVCETDFSGYPDCRNDFVKAMESALVQGMDKQLKIITPLMWLNKAQTWALADKYQQLDLVRHHTLTCYNGVIGDGCGDCPACHLRKRGLDDYLQNKAAVMAELDASEPKA

SEQ ID NO: 42210 - protein, 240 aa, Shewanella putrefaciens
  REGION 1..240: note = tr|A0A380A0Z7|A0A380A0Z7_SHEPU 7-cyano-7-deazaguanine synthase OS=Shewanella putrefaciens; OX = 24 GN=queC PE=3 SV=1
MSINSVSNPLVSKVVVVFSGGQDSTTCIIQALTQYDEVHGITFDYGQRHREEIEVAKSLAKRLQITSHKVMDVTLLNELAISALTRDAIPVSHELMENGLPNTFVPGRNILFLTLAGIYAYQLGAEAIITGVCETDFSGYPDCRNDFVKAMESALVQGMDKQLKIITPLMWLNKAQTWAMADKYQQLDLVRHQTLTCYNGIIGDGCGDCPACHLRKRGLEDYLQNKTAVMAELNAYESKA

SEQ ID NO: 42211 - protein, 232 aa, Shewanella sediminis
  REGION 1..232: note = sp|A8FUY4|QUEC_SHESH 7-cyano-7-deazaguanine synthase; OS = Shewanella sediminis (strain HAW-EB3) OX=425104 GN=queC; PE = 3 SV=1
MSKVSKAVVVFSGGQDSTTCLIQALNQYDEVHGITFDYGQRHSQEIEVARSLGQRLGLVSHKILDVSMLNELAISALTRDSIEVSNELMENGLPNTFVPGRNILFLTLAGIYAYQLGADSVITGVCETDFSGYPDCRNDFVKTMESALNQGMDRQCKIVTPLMWLNKAETWALADQYKSLELVRDETLTCYNGIIGNGCGTCPACLLRQSGLEDYSNNREQVQSDLASKCHK

SEQ ID NO: 42212 - protein, 240 aa, Shewanella sp.; identical to SEQ ID NO: 42209
  REGION 1..240: note = sp|A1RJY8|QUEC_SHESW 7-cyano-7-deazaguanine synthase; OS = Shewanella sp. (strain W3-18-1) OX=351745 GN=queC PE=3; SV = 2

SEQ ID NO: 42213 - protein, 239 aa, Shewanella sp.
  REGION 1..239: note = sp|Q0HVF0|QUEC_SHESR 7-cyano-7-deazaguanine synthase; OS = Shewanella sp. (strain MR-7) OX=60481 GN=queC PE=3 SV=1
MSAASVSKVVVVFSGGQDSTTCLIQALTQFDEVHGITFDYGQRHREEIEVAKSLAKRLKITSHKVMDVSLLNELAISALTRDAIPVSHELMENGLPNTFVPGRNILFLTLAGIFAYQLGAEAIITGVCETDFSGYPDCRHDFVRAMESALVQGMDKKLEIITPLMWLNKAQTWALADKYQQLDLVRHHTLTCYNGIVGDGCGDCPACHLRKRGLEDYLQNKAEVMASLDKATATGKPQA

SEQ ID NO: 42214 - protein, 228 aa, Shewanella violacea
  REGION 1..228: note = tr|D4ZKV3|D4ZKV3_SHEVD 7-cyano-7-deazaguanine synthase OS=Shewanella violacea (strain JCM 10179 / CIP 106290 / LMG 19151 / DSS12) OX=637905 GN=exsB PE=3 SV=1
MSKAVVVFSGGQDSTTCLIQALEQYDEVHGITFDYGQRHSQEIEVAKDLGKRLGLASHKVLDVTMLNELAISALTRDDIPVSNTLMDNGLPNTFVPGRNILFLTLAGIFAYQLGAEAVITGVCETDYSGYPDCRNDFVKAMASALVQGMDIELELVTPLMWLNKAETWALADKYNCLALVRDETLTCYNNILGSGCGTCPACLLRQTGLDDYLSNKTQVQFDLAAKTA

SEQ ID NO: 42215 - protein, 233 aa, Shewanella woodyi
  REGION 1..233: note = tr|B1KGW0|B1KGW0_SHEWM 7-cyano-7-deazaguanine synthase OS=Shewanella woodyi (strain ATCC 51908 / MS32); OX = 392500 GN=queC PE=3 SV=1
MSKAVSKAVVVFSGGQDSTTCLIQALTQYDEVHGITFDYGQRHRQEIEVAETLGQQLGLKSHKTLDVSMLNELAISALTRDSIQVSNELMDNGLPNTFVPGRNILFLTLAGIFAYQLGADTVITGVCETDFSGYPDCRNDFVKAMQSALEQGMDRKLTLSTPLMWLNKAETWALADKYHSLDLVRDETLTCYNGIVGTGCGTCPACLLRQKGLDDYCNNKEQVQQELNTKCQS

SEQ ID NO: 42216 - protein, 238 aa, Shewanella xiamenensis
  REGION 1..238: note = tr|A0A073KP65|A0A073KP65_9GAMM 7-cyano-7-deazaguanine synthase OS=Shewanella xiamenensis; OX = 332186 GN=queC PE=3 SV=1
MSASVSKVVVVFSGGQDSTTCLIQALTQYDEVHGITFDYGQRHREEIDVAKSLAQRLNITSHKVMDVSLLNELAISALTRDAIPVSHELMENGLPNTFVPGRNILFLTLAGIYAYQLGAEAIITGVCETDFSGYPDCRHDFVRAMESALVQGMDKKLEIITPLMWLNKAQTWALADKYQQLDLVRHNTLTCYNGIVGDGCGDCPACHLRKRGLEDYLQNKAEVMTSLDKATETGKPQA

SEQ ID NO: 42217 - protein, 238 aa, Shewanella xiamenensis
  REGION 1..238: note = tr|A0A1E3V147|A0A1E3V147_9GAMM 7-cyano-7-deazaguanine synthase OS=Shewanella xiamenensis; OX = 332186 GN=queC PE=3 SV=1
MSASVSKVVVVFSGGQDSTTCLIQALTQYDEVHGITFDYGQRHREEIDVAKSLAKRLNITSHKVMDVSLLNELAISALTRDAIPVSHELMENGLPNTFVPGRNILFLTLAGIYAYQLGAEAIITGVCETDFSGYPDCRNDFVRAMESALVQGMDKKLEIITPLMWLNKAQTWALADKYQQLDLVRHHTLTCYNGIVGDGCGDCPACHLRKRGLEDYLQNKAEVMVSLDKATATGKPQA

SEQ ID NO: 42218 - protein, 231 aa, Shigella boydii
  REGION 1..231: note = tr|F3WEN0|F3WEN0_9ENTR 7-cyano-7-deazaguanine synthase OS=Shigella boydii 5216-82 OX=766141 GN=queC PE=3; SV = 1
MKRAVVVFSGGQDSTTCLVQALQQYDEVHCVTFDYGQRHRAEIDVARELALKLGARAHKVLDVTLLNELAVSSLTRDSIPVPDYEPEADGIPNTFVPGRNILFLTLAAIYAYQVKAEAVITGVCETDFSGYPDCRDEFVKALNHAVSLGMAKDIRFETPLMWIDKAETWALADYYGKLDLVRNETLTCYNGIKGDGCGHCAACNLRANGLNHYLADKPTVMAAMKQKTGLK

SEQ ID NO: 42219 - protein, 231 aa, Shigella boydii
  REGION 1..231: note = sp|B2U4P9|QUEC_SHIB3 7-cyano-7-deazaguanine synthase; OS = Shigella boydii serotype 18 (strain CDC 3083-94 / BS512) OX=344609 GN=queC PE=3 SV=1
MKRAVVVFSGGQDSTTCLVQALQQYDEVHCVTFDYGQRHRAEIDVARELALKLGARAHKVLDVTLLNELAVSSLTRDSIPVPDYEPEADGIPNTFVPGRNILFLTLAAIYAYQVKAEAVITGVCETDFSGYPDCRDEFVKALNHAVSLGMAKDIRFETPLMWIDKAETWALADYYGKLDLVRNETLTCYNGIKGDGCGHCAACNLRANGLNHYLADKPTVMAAMKQKTGLR

SEQ ID NO: 42220 - protein, 231 aa, Shigella dysenteriae; identical to SEQ ID NO: 42219
  REGION 1..231: note = tr|A0A3P6KJ96|A0A3P6KJ96_SHIDY 7-cyano-7-deazaguanine synthase OS=Shigella dysenteriae; OX = 622 GN=queC PE=3 SV=1

SEQ ID NO: 42221 - protein, 231 aa, Shigella dysenteriae
  REGION 1..231: note = sp|Q32JK2|QUEC_SHIDS 7-cyano-7-deazaguanine synthase; OS = Shigella dysenteriae serotype 1 (strain Sd197); OX = 300267 GN=queC PE=3 SV=1
MKRAVVVFSGGQDSTTCLVQALQQYDEVHCVTFDYGQRHRAEIDVARELALKLGARAHKVLDVTLLNELAVSSLTRDSIPVPDYEPEADGIPNTFVPGRNILFLTLAAIYAYQVKAEAVITGVCETDFSGYPDCRDEFVKALNHAVSLGMAKHIRFETPLMWIDKAETWALADYYGKLDLVRNETLTCYNGIKGDGCGHCAACNLRANGLNHYLADKPTVMAAMKQKTGLK

SEQ ID NO: 42222 - protein, 231 aa, Shigella flexneri
  REGION 1..231: note = tr|A0A4P7TP75|A0A4P7TP75_SHIFM 7-cyano-7-deazaguanine synthase OS=Shigella flexneri serotype 5a (strain M90T) OX=1086030 GN=queC PE=3 SV=1
MKRAVVVFSGGQDSTTCLVQALQQYDEVHCVTFDYGQQHRAEIDVARELALKLGARAHKVLDVTLLNELAVSSLTRDSIPVPDYEPEADGIPNTFVPGRNILFLTLAAIYAYQVKAEAVITGVCETDFSGYPDCRDEFVKALNHAVSLGMAKDIRFETPLMWIDKAETWALADYYGKLDLVRNETLTCYNGIKGDGCGHCAACNLRANGLNHYLADKPTVMAAMKQKTGLR

SEQ ID NO: 42223 - protein, 231 aa, Shigella flexneri; identical to SEQ ID NO: 42222
  REGION 1..231: note = sp|Q0T7D9|QUEC_SHIF8 7-cyano-7-deazaguanine synthase; OS = Shigella flexneri serotype 5b (strain 8401) OX=373384; GN = queC PE=3 SV=1

SEQ ID NO: 42224 - protein, 231 aa, Shigella sonnei; identical to SEQ ID NO: 42218
  REGION 1..231: note = tr|A0A5F0BSM0|A0A5F0BSM0_SHISO 7-cyano-7-deazaguanine synthase OS=Shigella sonnei OX=624; GN = queC PE=3 SV=1

SEQ ID NO: 42225 - protein, 231 aa, Shigella sonnei; identical to SEQ ID NO: 42219
  REGION 1..231: note = sp|Q3Z4V4|QUEC_SHISS 7-cyano-7-deazaguanine synthase; OS = Shigella sonnei (strain Ss046) OX=300269 GN=queC PE=3; SV = 1

SEQ ID NO: 42226 - protein, 232 aa, Shigella sp.
  REGION 1..232: note = tr|A0A1D3DGE0|A0A1D3DGE0_9ENTR 7-cyano-7-deazaguanine synthase OS=Shigella sp. FC1655; OX = 1898038 GN=queC PE=3 SV=1
MKKTVVVFSGGQDSTTCLIQALEKYDEVHCITFNYGQRHKEEIEVAQKVSQLLGATAHKVLDVSLLNELAISSLTRDNIPVPDFKESEESDIPSTFVPGRNILFLTLAAIYAYQIGAESVITGVCETDFSGYPDCRDEFVKALNHAVSLGIARDIKFITPLMWLDKAETWALADYYKKLDFVRHETLTCYNGIQGDGCGECAACHLRQRGLNTYLADKTLIMQTMKRKVGLK

SEQ ID NO: 42227 - protein, 231 aa, Shigella sp.
  REGION 1..231: note = tr|A0A1E3MZQ6|A0A1E3MZQ6_9ENTR 7-cyano-7-deazaguanine synthase OS=Shigella sp. FC569; OX = 1892897 GN=queC PE=3 SV=1
MKRAVVVFSGGQDSTTCLVQALQQYDEVHCVTFDYGQRHRAEIDVARELALKLGARAHKVLDVTLLNELAVSSLTRDSIPVPDYEPEADGIPNTFVPGRNILFLTLAAIYAYQVKAEAVITGVCETDFSGYPDCRDEFVKALNHAVSLGMAKDIRFETPLMWINKAETWALADYYGKLDLVRNETLTCYNGIKGDGCGHCAACNLRANGLNHYLADKPTVMAAMKQKTGLK

SEQ ID NO: 42228 - protein, 496 aa, unidentified
  source 1..496: note = Shimia abyssi
  REGION 1..496: note = tr|A0A2P8F859|A0A2P8F859_9RHOB Queuosine biosynthesis protein QueC OS=Shimia abyssi OX=1662395; GN = CLV88_114121 PE=4 SV=1
MGAVAPLSKVEVRWLPPLTKSGGDEVLRLDIAGREVAMTLRIGQLNRQLVEGLQDRALDLLEIAALVYCADAAVSRGGPADQKMGEKWHRRFVATMPVRDLKFWQRESVIQALEETLMFLSGDRFEFSFSTKDEQDAERSRFFKFGRNSSWKPHRVLMFSGGLDSFAGAVEEIVEQKHRVALVSHASSTKIAPVQKRLISVLSERYGPETCRHIPMTAQLKSRSTAERTHRTRSFLFAVLGSITATAFGLDRVSFHENGVVSLNLPPVGNVVGTRATRTTHPKTLKLFTDFLRLVFENDMRVDNPFFARTKADVVERISHLGMADQIVETRSCADVHNQTHQYFHCGRCSQCIDRRFAMLSKGLERFDPEDAYRVDLMSDARPNGTDREMALSYLRNAVFFENATPDALTRSFPVVLDAVNHLDSPPDTAMSMIADLLNRHGKAVTSVMRRTLESKSPGEFPEQSLPRLYGEMQSALPLPFVPAASVDKTRMRNYR

SEQ ID NO: 42229 - protein, 234 aa, Shimia marina
  REGION 1..234: note = tr|A0A0P1EQH6|A0A0P1EQH6_9RHOB 7-cyano-7-deazaguanine synthase OS=Shimia marina OX=321267; GN = queC PE=3 SV=1
MKTTVVCSGGLDSVSLAHIVATEGNLSRLVSFDYGQRHRKELDSAAACAERLGVPHHIIDLRAVGAALTGSALTEADVDVPDGHYAEETMRITVVPNRNAIMLTIAYGIAAANGDRRVATAVHGGDHFIYPDCRPGFTEAFDTMQQAALEGYADVRLHTPFVHRSKADIVADGAAANTPFALTWSCYKGGAQHCGRCGTCVERREAFDLAGVSDPTPYEDPDFWRTAVAEREAS

SEQ ID NO: 42230 - protein, 231 aa, Shimwellia blattae
  REGION 1..231: note = tr|I2BBP4|I2BBP4_SHIBC 7-cyano-7-deazaguanine synthase OS=Shimwellia blattae (strain ATCC 29907 / DSM 4481 / JCM 1650 / NBRC 105725 / CDC 9005-74) OX=630626; GN = queCPE=3 SV=1
MKRAVVVFSGGQDSTTCLIQALHQYDDVHCVTFDYGQRHRAEIDVARELALKLGARAHKVLDVTLLNELAVSSLTRNSIPVPDYEPDADGIPNTFVPGRNILFLTLAAIYAYQVQAQAVITGVCETDFSGYPDCRDEFVRALNHAVSLGMARDIRFETPLMWLNKAETWALADYWGKLDLVRSETLTCYNGIKGDGCGECAACHLRANGIEHYLADKAAVMAQMKRKTGLA

SEQ ID NO: 42231 - protein, 195 aa, Shinella sp.
  REGION 1..195: note = tr|A0A1M3BGQ6|A0A1M3BGQ6_9RHIZ 7-cyano-7-deazaguanine synthase OS=Shinella sp. 65-6; OX = 1895831 GN=BGO06_15255 PE=3 SV=1
MSVVALVSGGLDSTLIAHLAIEEGVKIHPIFINYGQRALDRELAACEGVMRKLGLELTVADLSGYGALIRSGLTDPSLRVLEDAFTPGRNMLFLLVAAAHAYQLGADAISIGLLHEETSLFPDQTSAFLREAEALISRIMGRSIKVLAPLADFHKDEVIALAKQKGVEATYSCHLGQEAPCGKCIACNEFKVEEV

SEQ ID NO: 42232 - protein, 233 aa, Shinella sp.
  REGION 1..233: note = tr|A0A372NAA1|A0A372NAA1_9RHIZ 7-cyano-7-deazaguanine synthase OS=Shinella sp. WSJ-2; OX = 2303749 GN=queC PE=3 SV=1
MTSTALVLFSGGQDSSTCLAWALDRYERVETVGFDYGQRHRIELDCRDTIRRELSAMNPVWAQRIGEDHTISLASLGEISKTALTSEIAIEMEDTGLPNTFVPGRNIIFLTFAAALAYRRGLKHIVGGMCETDYSGYPDCRDDTIKALQVALNLGMEKRFVLDTPLMWLDKADTWRLAENLGGSRLVQTIVKESHTCYLGERGDLHDWGYGCGTCPACDLRANGYQRFVAEQV

SEQ ID NO: 42233 - protein, 231 aa, unidentified
  source 1..231: note = Siccibacter turicensis
  REGION 1..231: note = tr|A0A2P8VP05|A0A2P8VP05_9ENTR 7-cyano-7-deazaguanine synthase OS=Siccibacter turicensis; OX = 357233 GN=queC PE=3 SV=1
MKRAVVVFSGGQDSTTCLIQALQQYDEVHCVTFDYGQRHRAEIDVARELATALGARAHKVLDVTLLNELAVSSLTRDSIPVPDYQPDASGIPNTFVPGRNILFLTLTAIYAYQVQAEAVITGVCETDFSGYPDCRDEFVKALNHAVNLGMAREVRFETPLMWLDKAETWALADYWGKLDTVREETLTCYNGIKGDGCGQCAACNLRANGLHHYLADKPAVMAAMKQKTGLR

SEQ ID NO: 42234 - protein, 225 aa, unidentified
  source 1..225: note = Sideroxydans lithotrophicus
  REGION 1..225: note = tr|D5CMS8|D5CMS8_SIDLE 7-cyano-7-deazaguanine synthase OS=Sideroxydans lithotrophicus (strain ES-1); OX = 580332 GN=queC PE=3 SV=1
MTKRAVVLLSGGLDSATVLAMARTQGFECYALSVDYGQRHHAELAAAQRVAQSLGAREQRVVNIDLTGFGGSALTDANIAVPEQAGSGIPITYVPARNTIMLSLALAWAEVLKAQDIFFGVNAVDYSGYPDCRPEYVAAFERMANLATQAAVEGKPLTLHAPLLHLSKAEIIRQGVRLGVDYGLTVSCYQADDEGRACGRCDSCRLRREGFAAAGVPDSTRYRST

SEQ ID NO: 42235 - protein, 233 aa, unidentified
  source 1..233: note = Silicibacter sp.
  REGION 1..233: note = tr|C9D358|C9D358_9RHOB 7-cyano-7-deazaguanine synthase OS=Silicibacter sp. TrichCH4B OX=644076 GN=queC; PE = 3 SV=1
MKTLVICSGGLDSVSLAHITANEHQLTRLVSFDYGQRHRKEVDFAEAAAKRLGVPFHLIDMRGIGGALTGSALTDDIDVPDGHYAEETMKITVVPNRNAIMLSIGFGIAAAQGDAAVATAVHGGDHFIYPDCRPGFTRAFDAMQRAALEGYADVRLHTPFVEHSKAEIVRQGAQHGTPFAETWSCYKGGAFHCGRCGTCVERREAFHLAGVNDPTTYADPEYWTTALATRGES

SEQ ID NO: 42236 - protein, 207 aa, unidentified
  source 1..207: note = Silicibacter sp.
  REGION 1..207: note = tr|C9CW67|C9CW67_9RHOB 7-cyano-7-deazaguanine synthase OS=Silicibacter sp. TrichCH4B OX=644076; GN = SCH4B_1733 PE=3 SV=1
MKRVLLLASGGLDSTTVAYQLLEKGCLPKPIFFDYGQHCVETEWGRLLEVMPARAEYPERIDISGVFAGSKSRLLNEADLWSESISDDDLYVPYRTLFFFSAAAARAQSIGISEVYTGFINSNHAKEIDCSADFLNGLDALTENVGPVRFFSPFRHSSKADVALEALRLDVPIGRTFSCQAASKLPCGACPNCVERLAALRATGLLA

SEQ ID NO: 42237 - protein, 224 aa, Simiduia agarivorans
  REGION 1..224: note = tr|K4KPI9|K4KPI9_SIMAS 7-cyano-7-deazaguanine synthase OS=Simiduia agarivorans (strain DSM 21679 / JCM 13881 / BCRC 17597 / SA1) OX=1117647 GN=queC PE=3 SV=1
MTKPRAVVLVSGGLDSTTVVAMAQAQGFEVYALSFDYGQRHRAELIAAERTALSLGVAEHKVVSLDLRAIGGSALTDSSIAVPETESEGIPVTYVPARNTVFLSIALGWAEVLDSQAIFVGVNAVDYSGYPDCRPAFIEAFETMANLATKAGVEGRRLRIHTPLIDMSKADIVRRGSELGVDYSQTVSCYQATDEGLACGRCDSCRLRRAGFEAAGLADPTRYI

SEQ ID NO: 42238 - protein, 218 aa, Simonsiella muelleri
  REGION 1..218: note = tr|V9HAW9|V9HAW9_9NEIS 7-cyano-7-deazaguanine synthase OS=Simonsiella muelleri ATCC 29453 OX=641147; GN = queC PE=3 SV=1
MTIQKQALVIFSGGQDSTTCLFQAINEFGVGNVQAITFTYGQRHAIELERAQWIAQDLRVKQTVLDLSLIGSITHNALMDNTAAIDTSGSLPNTFVDGRNALFLLYAAIYAKSQNIHTIFVGVCETDFSGYPDCRDVFVKSMNVTLNLAMAYDFDIRTPLMYLTKKETWALADQMGVLDYVREHTHTCYLGVPNGCHECPSCVLRERGLSEYLQDKNQ

SEQ ID NO: 42239 - protein, 241 aa, Simplicispira metamorpha
  REGION 1..241: note = tr|A0A4R2NE12|A0A4R2NE12_9BURK 7-cyano-7-deazaguanine synthase OS=Simplicispira metamorpha OX=80881 GN=queC PE=3 SV=1
MRPGHALVLFSGGQDSTTCLAWALTHFAHVETIGFDYGQRHDVEMRVRLQVLQSLRAQFPHWAERLGEDHVVDLAVLGQISDTALTRDTAIAMTAAGLPNTFVPGRNLLFFQLAAAVGYRRGLHTLVGGMCETDFSGYPDCRDDTIKALQVAVSLGMGQRFTFETPLMWLDKAQTWALAQQLGGDALVATIVAQSHTCYEGVRDVLHAWGYGCGTCPACELRRVGYERWRAAETGKPIAGA

SEQ ID NO: 42240 - protein, 197 aa, Simplicispira sp.
  REGION 1..197: note = tr|A0A2U1CAI1|A0A2U1CAI1_9BURK 7-cyano-7-deazaguanine synthase OS=Simplicispira sp. 125; OX = 2135643 GN=C8D04_3229 PE=3 SV=1
MSSLLLLSGGIDSICLAAKYRPKVCLTVDYGQRAAQAEINSSKQVCHSLGLRSTVLNVNIGALGSGQMAGQTTSPVSQHVEFWPFRNQFLVTLAGMLALREQCTQILIGSVSTDQRHSDGSAAFRDLLHQLLRLQEGGLELLAPAADMTSEELIDFSEISLDVLSWAHSCHTGNLACGHCPGCNKHSQVMQSKGLDR

SEQ ID NO: 42241 - protein, 236 aa, Simplicispira sp.
  REGION 1..236: note = tr|A0A398C1M3|A0A398C1M3_9BURK 7-cyano-7-deazaguanine synthase OS=Simplicispira sp. NY-02; OX = 2315688 GN=queC PE=3 SV=1
MRNSHALVLFSGGQDSTTCLAWALENFAHVETIGFDYGQRHRIELDARLRVLAALREHFGQWQGRLGDDHVIDLAVLGQISDCALTQGTAIALGEAGLPNTFVPGRNLLFFQLAAAVGYRRGLRTLVGGMCETDYSGYPDCRDDTLKALQAAISLGMGQSFTIETPLMWLDKAQTWALARTLGGEALVALIVEHTHTCYEGERGVLHAWGYGCGHCPACELRKGGFERWSADLMAA

SEQ ID NO: 42242 - protein, 236 aa, unidentified
  source 1..236: note = Simplicispira suum
  REGION 1..236: note = tr|A0A2S0MYS3|A0A2S0MYS3_9BURK 7-cyano-7-deazaguanine synthase OS=Simplicispira suum; OX = 2109915 GN=queC PE=3 SV=1
MRSGHALVLFSGGQDSTTCLAWALEHFAHVETVGFDYGQRHHVELQARVAVLAQMRERFAHWSERLGQDHMIDLAVLGQISDCALTQDKAIALGEAGLPNTFVPGRNLMFFQIAAALGYRRGLRTLVGGMCETDYSGYPDCRDDTLKALQAALSLGMGQSFTIETPLMWLDKAQTWELADTLGGQALIDIVVEHTHTCYEGIRSERHAWGYGCSTCPACALRRKGFERWSARDGQT

SEQ ID NO: 42243 - protein, 231 aa, Singulisphaera acidiphila
  REGION 1..231: note = tr|L0DMW6|L0DMW6_SINAD 7-cyano-7-deazaguanine synthase OS=Singulisphaera acidiphila (strain ATCC BAA-1392 / DSM 18658 / VKM B-2454 / MOB10) OX=886293; GN = queC PE=3 SV =1
MAEGAKKAVVLLSGGLDSATAVAEAKAAGFDVYALTILYGQRHVVERDAARRVAKALGVTRYVEQSIDLRAFGASALTDEIAVPKDRSAEVMASGIPITYVPARNTVFLSLALAWAETLGAFDLFIGVNCVDYSGYPDCRPEYLRAFETLANLATRAGVEGTGRFVIHAPLLTMSKEQIITRGLELGVDFGLTHSCYDPTPEGLACGRCDACALRLAAFAGLGLTDPVRYQ

SEQ ID NO: 42244 - protein, 237 aa, Singulisphaera acidiphila
  REGION 1..237: note = tr|L0DMT8|L0DMT8_SINAD 7-cyano-7-deazaguanine synthase OS=Singulisphaera acidiphila (strain ATCC BAA-1392 / DSM 18658 / VKM B-2454 / MOB10) OX=886293; GN = Sinac_5863 P E=3 SV=1
MSDIGAIPQVAVLVSGGLESAILCVDLLRQFGRVHPLYVRFGLRWEEVELAYLRRYLQAVERPGLCPLEILDEPVASVYGRHWSVEGIAVPDASSPDAAVYLPGRNLLFLSKAAVWCRLRNVERLALGCLGTNPFPDSTPTFFEQMEAAVNQAMDGRLRILRPFDRMHKDEVLKRGFDLPLQLTFSCLSPVDGQHCGRCNKCAERRNGFRDACFPDPTNYAAPPPDGSMGMAVGSHF

SEQ ID NO: 42245 - protein, 237 aa, Singulisphaera sp.
  REGION 1..237: note = tr|A0A1N6FBD6|A0A1N6FBD6_9BACT 7-cyano-7-deazaguanine synthase OS=Singulisphaera sp. GP187 OX=1882752 GN=SAMN05444166_1638 PE=3 SV=1
MSELDAIPEVAVLVSGGLESAILCVDLLRQFRRVRPLYFRFGLHWEEVELGCLRRYLQAVEHPGLFPLEILDEPVANVYGRHWSVEGIAVPDATSPDEAVYLPGRNLLFISKAAVWCRLRNVEHLALGSLGTNPFPDSTPTFFEQIEAAVNQAMDGRLRILRPFDRMHKDEVLKRGRDLPLQFTFSCLSPVDGQHCGRCNKCEERRNGFRDARFPDPTNYAATSPDGPNGTAAGTDL

SEQ ID NO: 42246 - protein, 237 aa, Singulisphaera sp.
  REGION 1..237: note = tr|A0A1N6L3A6|A0A1N6L3A6_9BACT 7-cyano-7-deazaguanine synthase OS=Singulisphaera sp. GP187 OX=1882752 GN=queC PE=3 SV=1
MGHKRPAVVLLSGGLDSTTTLALAHRDGFDLFALSFRYGQRHLAELEAARRVAERLGVVKHIIADIDLRQFGGSALTSDLDVPKGRTPNEMGAGIPVTYVPARNTVFLSFALAWAEVLGSTDIFIGVNALDYSGYPDCRPEFIAAFESMANLATKMGVEGSRPLTIHTPLIALTKAEIIRTGIELGVDYAMTVTCYDPSPGGEACGACDACLLRRKGFEENGLSDPARYVSETAVVP

SEQ ID NO: 42247 - protein, 229 aa, unidentified
  source 1..229: note = Sinimarinibacterium flocculans
  REGION 1..229: note = tr|A0A318EEE3|A0A318EEE3_9GAMM 7-cyano-7-deazaguanine synthase OS=Sinimarinibacterium flocculans OX=985250 GN=queC PE=3 SV=1
MGSEARKAVVLFSGGLDSATVLALAREQGFALHALSVAYGQRHDAELAAARRIAERAGVVEHRLIQVNLDAFGGSALTDRRIDVPETPSEGVPVTYVPARNTLFLSLALGWAEVIGARDLFVGVNAVDYSGYPDCRPAFIEAFERLARVATKAGAEGQSFVVHAPLIKMSKADIVRTGTRLGVDYAQTVSCYQADAEGRACGRCDACRLRREGFAAAGLADPTRYVGQR

SEQ ID NO: 42248 - protein, 228 aa, unidentified
  source 1..228: note = Sinimarinibacterium sp.
  REGION 1..228: note = tr|A0A4U0GPT8|A0A4U0GPT8_9GAMM 7-cyano-7-deazaguanine synthase OS=Sinimarinibacterium sp. CAU 1509 OX=2562283 GN=queC PE=3 SV=1
MVERKKAVVLVSGGLDSVTVLAMMREQDYEIYALSVAYGQRHDAELRAAAAVAARYGAVRHECIDVQLGAVGGSALTDHSIAVPQEPSTGIPVTYVPARNTLFLALALGWAEVVGAEEIFIGVNAIDYSGYPDCRPPFIEAFEKLAAVATKAGSEGRPLRVRAPLIQMSKAQIIAEGTRLGVDYAQTVSCYQADAQGRACGECDSCRLRKEGFAEAGIADPTRYIANG

SEQ ID NO: 42249 - protein, 408 aa, unidentified
  source 1..408: note = Sinirhodobacter populi
  REGION 1..408: note = tr|A0A443IKP9|A0A443IKP9_9RHOB Uncharacterized protein OS=Sinirhodobacter populi OX=2306993; GN = D2T33_20020 PE=4 SV=1
MRQATGSVGNQLSAAVASLGVRIDERVFDFLTIALAVIAADTFIDRDQWAANGWSREIELDIPLAQPAIWTPVLPALKKALDFLSGDQWGISLQSGGPRPPNQAAILRKRKKIGIGAADCVSLFSGGLDSLLGVSKLVADGRTPVLVSHSYRGDKSYQRDLVPRIGKQLPWFEANAHPVKTGGGPHDTSMRTRSLGFLAYGVVVASAVASTRGAAQGQIDLFVPENGFIALNAPLTRRRVGSHSTRTTHPYFLNLIQEVLNAVGLPVRLTNEFRHYTKGEMMDEAAQAGRPTDIFSRTVSCGKWKRKNTQCGYCVPCLIRKAAFFKAGIDDHTRYRYDVAEAWRDPKIRDDLLAVVLAARNGTEDSRARAIASGPLPFEIVERDGWFSVNERGLSEVSEYLRSKGITG

SEQ ID NO: 42250 - protein, 222 aa, Sinobaca qinghaiensis
  REGION 1..222: note = tr|A0A419V6P4|A0A419V6P4_9BACL 7-cyano-7-deazaguanine synthase OS=Sinobaca qinghaiensis; OX = 342944 GN=queC PE=3 SV=1
MSLKNEKAIIVFSGGQDSTTCLFWALEQFKEVIAVTFDYGQRHSEELKVASDIAEDLNIEHHILDMTLLNQLAPNALTRDSIEVEEGKDGELPSTFVEGRNLLFFSFAAIAASQKGAKHIVTGVCETDYSGYPDCRDAFVKSLNVSLNLGIGKDFVIHTPLMWLDKKETWKLADDLGQLNYVRDYTLTCYHGIRGQGCGECPACKLRRAGLDQYRREKEREL

SEQ ID NO: 42251 - protein, 225 aa, unidentified
  source 1..225: note = Sinobacteraceae bacterium
  REGION 1..225: note = tr|A0A2T5MH97|A0A2T5MH97_9GAMM 7-cyano-7-deazaguanine synthase OS=Sinobacteraceae bacterium GT1R17 OX=2029166 GN=queC PE=3 SV=1
MAEVKKAVVLLSGGLDSATVLAMARAQGYECHALSVSYGQRHVAELNAATRVVASLGAAAHQVISVNLDALGGSALTDKNIAVPESPTSGIPVTYVPARNTTFLSLSLGWAEVIGARDIFIGINAVDYSGYPDCRPEFVEAFERLAQVATKAGVEGAGFKIHTPLIRMSKSEIIAEGLRLGVNYTETVSCYQADVDGRACGLCDSCRIRKQGFDDAGISDQTHYK

SEQ ID NO: 42252 - protein, 231 aa, unidentified
  source 1..231: note = Sinobacteraceae bacterium
  REGION 1..231: note = tr|A0A522J6Z6|A0A522J6Z6_9GAMM 7-cyano-7-deazaguanine synthase OS=Sinobacteraceae bacterium OX=1969813 GN=queC PE=3 SV=1
MERAAGTQRDAVLLLSGGLDSATVLALMRRDGYRVHALSVSYGQRHGVELASAARVAQSLGAASHLVMHVDMDAIGGSALTDSRIAVPEDAGDMPGIPVTYVPARNTIFLSLALSYAEKLGARDLFVGVNSVDYSGYPDCRPAFIAAFEKVANLGTCAVDDGTHFTVHAPLQALGKGDIIKAGSALGVDYSMTVSCYQADAKGRACGHCDACRLRRDGFREAGVPDPTRYV

SEQ ID NO: 42253 - protein, 218 aa, unidentified
  source 1..218: note = Sinobacterium caligoides
  REGION 1..218: note = tr|A0A3N2DEA5|A0A3N2DEA5_9GAMM 7-cyano-7-deazaguanine synthase OS=Sinobacterium caligoides OX=933926 GN=queC PE=3 SV=1
MAKVVVIYSGGMDSYTVLNKALQQGHEVFALSFNYGQKHSRELICAKQVCEDRGVTHKMSDITAIADLLQSSSLVSSDIAVPEGHYEAESMKSTVVPNRNMILISLAIGYAVDIGAEAVWYGAHSGDHTIYPDCRPEFVEKMNEVSRLANFEVVDVYAPYLYKNKTDILRDGLAMDLDYGETWTCYKGLEKACGLCGSCVERLEAFAALERRDPVAYD

SEQ ID NO: 42254 - protein, 245 aa, Sinorhizobium americanum
  REGION 1..245: note = tr|A0A1L3LAC3|A0A1L3LAC3_9RHIZ 7-cyano-7-deazaguanine synthase OS=Sinorhizobium americanum CCGM7 OX=1408224 GN=queC PE=3 SV=1
MATEHQDGALVLFSGGQDSTTCLAWALDRFPRVETVGFDYGQRHRVELDCRAKLREEFGRVNPDWANRLGDDHTISLEALGEISDTALTQDIEIEMANIGLPNTFVPGRNLIFLTFAAALACRRGLKHIVGGMCETDFSGYPDCRDDTIKALQVALNLGMEKRFVLETPLMWIDKAATWQLAESLGGSLLVDVIIEDTHTCYLGERGQRHDWGFGCGVCPACELRAKGYSKFIAEETGITRISNG

SEQ ID NO: 42255 - protein, 236 aa, Sinorhizobium americanum
  REGION 1..236: note = tr|A0A4R2C401|A0A4R2C401_9RHIZ 7-cyano-7-deazaguanine synthase OS=Sinorhizobium americanum OX=194963 GN=queC PE=3 SV=1
MKTIVICSGGLDSVSLAHRIAAEHELFGLLSFDYGQRHRKELDFAAACARRLSVPHQIIDIREIGRHLTGSALTDDVEVPDGHYAEETMKTTVVPNRNAIMLAIAFGVAAARKADAVAAAVHGGDHFIYPDCRPGFIDAFQTMQNHALDGYADITLYTPYVNVSKADIVADGAKNGTPFAETWSCYKGGARHCGRCGTCVERREAFHLAGVADPTEYEDRDFWVAATRAFAAEEVR

SEQ ID NO: 42256 - protein, 236 aa, unidentified
  source 1..236: note = Sinorhizobium fredii
  REGION 1..236: note = sp|Q6W2G5|QUEC_SINFN 7-cyano-7-deazaguanine synthase; OS = Sinorhizobium fredii (strain NBRC 101917 / NGR234); OX = 394 GN=queC PE=3 SV=1
MKTIVICSGGLDSVSLAHRIAAEHELLGLLSFDYGQRHRKELDFAAACAKRLGVPHQIIDIREIGRHLTGSALTDDVDVPDGHYAEETMKTTVVPNRNAIMLAIAFGVAATRKADAVAAAVHGGDHFIYPDCRPGFIDAFQVMQNHALEGYADVILYTPYVNVSKADIVADGAKHHTPFAETWSCYKGGTRHCGRCGTCVERREAFHLAGVTDPTEYEDPEFWVAATAAYVAEEVK

SEQ ID NO: 42257 - protein, 236 aa, unidentified
  source 1..236: note = Sinorhizobium fredii
  REGION 1..236: note = tr|A0A249Q439|A0A249Q439_RHIFR 7-cyano-7-deazaguanine synthase OS=Sinorhizobium fredii CCBAU 83666 OX=1128334 GN=queC PE=3 SV=1
MKTIVICSGGLDSVSLAHRIAAEHELLGLLSFDYGQRHRKELDFAAACARRLGVPHQVIDIREIGRHLTGSALTDDIDVPDGHYAEETMKTTVVPNRNAIMLAIAFGVAAARKADAVAAAVHGGDHFIYPDCRPGFIDAFQTMQNHALDGYADVTLHTPYVNVSKADIVADGAKHHTPFAETWSCYKGGARHCGRCGTCVERREAFHLAGVVDPTEYEDPDFWVAATRAFSAEEVK

SEQ ID NO: 42258 - protein, 236 aa, unidentified
  source 1..236: note = Sinorhizobium medicae
  REGION 1..236: note = tr|A6UJ91|A6UJ91_SINMW 7-cyano-7-deazaguanine synthase OS=Sinorhizobium medicae (strain WSM419); OX = 366394 GN=queC PE=3 SV=1
MKTIVICSGGLDSVSLAHKVAAEQELVCLLSFDYGQRHRKELDFAAVCARRLGVPHQIIDIREIGRHLTGSALTDEVDVPDGHYAEETMKTTVVPNRNAIMLAIAFGVAAARKADAVATAVHGGDHFIYPDCRPGFIDAFQAMQNHALDGYADVGLYAPYVNVAKAEIVADGSRYGTPFAETWSCYKGGARHCGRCGTCVERREAFHLADVADPTAYDDADFWVTVTGSFVAEEVE

SEQ ID NO: 42259 - protein, 236 aa, unidentified
  source 1..236: note = Sinorhizobium medicae
  REGION 1..236: note = tr|A0A508X474|A0A508X474_9RHIZ 7-cyano-7-deazaguanine synthase OS=Sinorhizobium medicae; OX = 110321 GN=queC PE=3 SV=1
MKTIVICSGGLDSVSLAHKVAAEQELVCLLSFDYGQRHRKELDFAAACARRLGVPHQIIDIREIGRHLTGSALTDEVDVPDGHYAEETMKTTVVPNRNAIMLAIAFGVAAARKADAIATAVHGGDHFIYPDCRPGFIDAFQAMQNHALDGYADVGLYAPYVNVAKADIVADGSRYGTPFAETWSCYKGGARHCGRCGTCVERREAFHLADVADPTAYDDADFWVTVTGSFVAEEVE

SEQ ID NO: 42260 - protein, 236 aa, unidentified; identical to SEQ ID NO: 41682
  source 1..236: note = Sinorhizobium meliloti
  REGION 1..236: note = tr|H0FYF6|H0FYF6_RHIML 7-cyano-7-deazaguanine synthase OS=Sinorhizobium meliloti CCNWSX0020 OX=1107881; GN = queC PE=3 SV=1

SEQ ID NO: 42261 - protein, 236 aa, unidentified; identical to SEQ ID NO: 41681
  source 1..236: note = Sinorhizobium meliloti
  REGION 1..236: note = tr|A0A0E0UMP8|A0A0E0UMP8_SINMB 7-cyano-7-deazaguanine synthase OS=Sinorhizobium meliloti (strain BL225C) OX=698936 GN=queC PE=3 SV=1

SEQ ID NO: 42262 - protein, 195 aa, unidentified
  source 1..195: note = Sinorhizobium saheli
  REGION 1..195: note = tr|A0A178Y7F7|A0A178Y7F7_SINSA 7-cyano-7-deazaguanine synthase OS=Sinorhizobium saheli; OX = 36856 GN=ATB98_15855 PE=3 SV=1
MSVVALVSGGLDSTLIAYLAIEEGVKIHPIFVNYGQRALDRELAACEGAMRKLGLELTVADLSGYGVLIRSGLTDPSLRVLEDAFTPGRNMLFLLVAAAHAYQVGADAISIGLLHEETSLFPDQTSAFLQEAEALISRIMGRSIKVLAPLADFHKDEVIALAKQKGVESTYSCHLGQETPCGHCIACNEFNVEEV

SEQ ID NO: 42263 - protein, 139 aa, unidentified
  source 1..139: note = Sinorhizobium saheli
  REGION 1..139: note = tr|D1CTG2|D1CTG2_SINSA 7-cyano-7-deazaguanine synthase (Fragment) OS=Sinorhizobium saheli OX=36856 PE=3; SV = 1
MSVVALVSGGLDSTLIAYLAIEEGVKIHPIFVNYGQRALDRELAACEGAMRKLGLELTVADLSGYGVLIRSGLTDPSLRVLEDAFTPGRNMLFLLVAAAHAYQVGADAISIGLLHEETSLFPDQTSAFLQEAEALISRI

SEQ ID NO: 42264 - protein, 236 aa, Sinorhizobium sp.
  REGION 1..236: note = tr|A0A249P1X0|A0A249P1X0_9RHIZ 7-cyano-7-deazaguanine synthase OS=Sinorhizobium sp. CCBAU 05631 OX=794846 GN=queC PE=3 SV=1
MKTIVICSGGLDSVSLAHGIAAEHELLGLLSFDYGQRHRKELDFAAACARRLGVPHQIIDIREIGRHLTGSALTDDVDVPDGHYAEETMKTTIVPNRNAIMLAIAFGVAAARKADAVAAAVHGGDHFIYPDCRPGFIAAFQTMQNHALEGYADITLHTPYVNVSKADIVADGAKHGTPFAETWSCYKGGARHCGRCGTCVERREAFHLAGAADPTEYEDPDFWIAATRAFAAEEVR

SEQ ID NO: 42265 - protein, 236 aa, Sinorhizobium sp.; identical to SEQ ID NO: 41656
  REGION 1..236: note = tr|A0A2A6MF46|A0A2A6MF46_9RHIZ 7-cyano-7-deazaguanine synthase OS=Sinorhizobium sp. NG07B; OX = 1538174 GN=queC PE=3 SV=1

SEQ ID NO: 42266 - protein, 245 aa, Skermanella aerolata
  REGION 1..245: note = tr|A0A512E4I4|A0A512E4I4_9PROT 7-cyano-7-deazaguanine synthase OS=Skermanella aerolata; OX = 393310 GN=queC PE=3 SV=1
MTEQFTDGALVLLSGGQDSTTCLAWALDRFPTVETIGFDYRQRHSVELECRASVREGLAALRPDWAEKLGVDHMLDLATLASLGETAMTHDVEIHMTAANLPNTFVPGRNLLFLTFAAALAYRRGLRHIVTGVCETDYSGYPDCRDDTLKALQVALNLGMEKRFVLHTPLMWIDKAATWQLAEDIGGEPLVDLMAERTHTCYKGDRSHRHAWGYGCGECPACDLRARGWEVYAAKRAHAGAFGNH

SEQ ID NO: 42267 - protein, 245 aa, Skermanella aerolata; identical to SEQ ID NO: 42266
  REGION 1..245: note = tr|A0A0D2WB40|A0A0D2WB40_9PROT 7-cyano-7-deazaguanine synthase OS=Skermanella aerolata KACC 11604 OX=1385368 GN=queC PE=3 SV=1

SEQ ID NO: 42268 - protein, 233 aa, Skermanella stibiiresistens
  REGION 1..233: note = tr|W9GRA7|W9GRA7_9PROT 7-cyano-7-deazaguanine synthase OS=Skermanella stibiiresistens SB22 OX=1385369; GN = queC PE=3 SV=1
MADKALVLFSGGQDSATCLAWALDRFDHVETIGFDYGQRHKVELDCRERFRTNLIQQVPAWASRLGDDHMLDLSVLGEVSDTALTGEAEIRYQENGLPTTFVPGRNLLFFTFASAVAYRRGIRHLVGGMCETDYSGYPDCRDDTLKSLQVTLNLGMDQRFVVDTPLMWIDKAATWVMAEHLGGKALVDLIVEDTHTCYVGDRTNRHAWGYGCGACPACELRSGGWERYQAAVE

SEQ ID NO: 42269 - protein, 268 aa, Slackia exigua
  REGION 1..268: note = tr|D0WE35|D0WE35_SLAES 7-cyano-7-deazaguanine synthase OS=Slackia exigua (strain ATCC 700122 / DSM 15923 / CIP 105133 / JCM 11022 / KCTC 5966 / S-7) OX=649764; GN = que C PE=3 SV=1
MSRQSKTTENVPVAASPPASGGMRASSPTCPTRALVLSSGGIDSTTCLALAVERFSTANVSTVSFFYGQRHRKELDAAQAVAERYGVAHYVLDIASVLRYSDNALMAGSTQDVARGTYADQKDAAGRPNTYVPFRNGLMLSAAAALAASLYPDEACAVYLGAHADDAAGDAYPDCSPAFTDAMSDAMRIGTYGNVTLEAPFVNDTKAGVVACGLERGVPYELTWSCYEGGDVACGTCGTCLDRIAAFHANGAEDPIRYSSAPDGASAL

SEQ ID NO: 42270 - protein, 235 aa, Slackia heliotrinireducens
  REGION 1..235: note = tr|C7N134|C7N134_SLAHD 7-cyano-7-deazaguanine synthase OS=Slackia heliotrinireducens (strain ATCC 29202 / DSM 20476 / NCTC 11029 / RHS 1) OX=471855 GN=queC PE=3; SV = 1
MTSTDQPTRAMVLSSGGVDSTTCLALACEQFGADNVTSVSVFYGQRHNKELACADAVAKHYGVAHHVLDLANILANSNNALMADSTQEIDHRDYATQIAENEDGMVNTYVPFRNGLMLSAVTALAISLNPTEKTAIYLGAHADDAAGGAYPDCTPEFFEAIARAIELGSYGKAVLREPFVNVNKADVVACGLKLGVPYELTWSCYEGGDAPCGTCATCIDRAKAFAANGVADPAL

SEQ ID NO: 42271 - protein, 268 aa, Slackia sp.
  REGION 1..268: note = tr|J6IDV4|J6IDV4_9ACTN 7-cyano-7-deazaguanine synthase OS=Slackia sp. CM382 OX=1111137 GN=queC PE=3 SV=1
MSGQSKMTENAPAAASLPVSGGMHASSPTCPTRALVLSSGGIDSTTCLALAVERFGTANVSTVSFFYGQRHRKELDAAQAVAERYGVAHYVLDIASVLRYSDNALMAGSAQDVARGTYADQKDAAGRPNTYVPFRNGLMLSAAAALAASLYPDEVCAVYLGAHADDAAGDAYPDCSPAFTDAMADAMRIGTYGNVMLEAPFVNDTKAGVVACGLERRVPYELTWSCYEGGDVACGTCGTCLDRIAAFHANGAEDPIRYSSAPNGASAL

SEQ ID NO: 42272 - protein, 233 aa, Smithella sp.
  REGION 1..233: note = tr|A0A1V5DVR2|A0A1V5DVR2_9DELT 7-cyano-7-deazaguanine synthase OS=Smithella sp. PtaU1.Bin162 OX=1811697 GN=queC PE=3 SV=1
MKTERKAVVLLSGGIDSATTLAIAKEMGFDLYALSFNYGQRHKVELQAAEKIAAGVGTVKHITLDIDLRQFGNSALTDDIAVPQGRGIEEMAKEIPVTYVPARNTIFLSFALAWAEVLESSDIFIGVNSLDYSGYPDCRPEYIAAYESMAGLATKAAVEGKQKLKIHVPLIKMTKAQIIRKGWELGVDFASTHSCYNPSAAGEACGGCDSCLLRMKGFKEAGIPDPTVYKLQK

SEQ ID NO: 42273 - protein, 233 aa, Smithella sp.
  REGION 1..233: note = tr|A0A354H4C7|A0A354H4C7_9DELT 7-cyano-7-deazaguanine synthase OS=Smithella sp.; OX = 2053614 GN=queC PE=3 SV=1
MKNNLKAVVLLSGGIDSATILAIAKDRGFDVYALSFRYGQRHIVELEAAKRVALCNKVAEHLIIDIDLRRIGGSALTADIAVPKSRNVEQMGEHIPVTYVPARNTIFLSYALAWAEVIGADDIFIGVNALDYSGYPDCRPEYIAAYEQMANLATKAGVESGEKLKINAPLIQMSKSQIIRKGIELGVNYSLTHSCYDPFPSGEACGECDSCLLRLKGFRDAGVKDPVRYKNES

SEQ ID NO: 42274 - protein, 51 aa, Sneathiella sp.
  REGION 1..51: note = tr|A0A2G1Z1A5|A0A2G1Z1A5_9PROT Uncharacterized protein OS=Sneathiella sp. OX=1964365 GN=COB93_07900 PE=4; SV = 1
MKTVVVCSGGMDSVVLTHLIAKEQDLARLISVSYGQRHVKEIDSAGAKGQG

SEQ ID NO: 42275 - protein, 196 aa, Sneathiella sp.
  REGION 1..196: note = tr|A0A2G1Z0Z5|A0A2G1Z0Z5_9PROT 7-cyano-7-deazaguanine synthase OS=Sneathiella sp.; OX = 1964365 GN=COB93_08650 PE=3 SV=1
MRAVVLASGGLDSTLLALLASEEGYEVFPLFVDFGQLAAKTELRHSIAAMEKNNLRKPVIADLNGFGELVPSGLTNSNLHIVDRAFTPGRNSLFLLSAASYAATIDANTIMIGLLDERFHLFPDQTKDYLEKAESFLSLAVGQSISIRAPLMAFSKQEVIAMAEAKNIGQTYSCHVGSDTPCGVCIACKEFDIGGV

SEQ ID NO: 42276 - protein, 220 aa, unidentified
  source 1..220: note = Snodgrassella alvi
  REGION 1..220: note = tr|A0A074VBR2|A0A074VBR2_9NEIS 7-cyano-7-deazaguanine synthase OS=Snodgrassella alvi SCGC AB-598-J21 OX=1385367 GN=queC PE=3 SV=1
MKQYSKALVIFSGGQDSTTCLLQAIAAYGRENVQTITFQYGQRHAVELEKARWIAQDQGVAQTVMDLSLLQSITHNALMDKQQTIEAPAEGLPNTFVDGRNALFLLYAAIFAKGQGIHDVIAGVCETDFSGYPDCRNVFVQSMNVTLNLAMDYEFRLITPLMYLDKAQTWALADELGYLDYVRKHTHTCYDGIEGGCGKCPSCVLRERGLQAYLAQKTGV

SEQ ID NO: 42277 - protein, 220 aa, unidentified
  source 1..220: note = Snodgrassella alvi
  REGION 1..220: note = tr|A0A2N9X495|A0A2N9X495_9NEIS 7-cyano-7-deazaguanine synthase OS=Snodgrassella alvi; OX = 1196083 GN=queC PE=3 SV=1
MKQHAQALVIFSGGQDSTTCLLQAIATYGRENVQTITFQYGQRHAIELKKARWIAQDLGVAQTVMDLSLLQSITHNALMDEQQEIEAPAEGLPNTFVDGRNALFLLYAAIFAKGQNIHDVIAGVCETDFSGYPDCRNVFVQSMNVTLNLAMDYEFRLITPLMYLDKAQTWALADELGYLDYVCEHTHTCYNGVEGGCGECPSCVLRERGLQTYLAQKAVV

SEQ ID NO: 42278 - protein, 220 aa, unidentified
  source 1..220: note = Snodgrassella sp.
  REGION 1..220: note = tr|A0A1C4BLB1|A0A1C4BLB1_9NEIS 7-cyano-7-deazaguanine synthase OS=Snodgrassella sp. R-53583 OX=1798181 GN=queC PE=3 SV=1
MKQYAEALVIFSGGQDSTTCLLQAIATYGRENVQTITFQYGQRHAIELEKARWIAQDLGVAQTVIDLSLLQSITHNALMDEQQVVEAPTAGLPNTFVDGRNALFLLYAAIFAKGKGIHDVIAGVCETDFSGYPDCRNVFVQSMNVTLNLAMDYEFRLITPLMYLDKAQTWSLADELGYLDYVRNHTHTCYNGVEGGCGECPSCVLRERGLQTYLAQKTVV

SEQ ID NO: 42279 - protein, 185 aa, unidentified
  source 1..185: note = Snowella sp.
  REGION 1..185: note = tr|A0A2W7BGB7|A0A2W7BGB7_9CYAN 7-cyano-7-deazaguanine synthase OS=Snowella sp. OX=2164131; GN = queC PE=3 SV=1
MARIAEVLEISKHYIVDVNLGDWGGSSLTDRTINLPTDGIDPDIIPSTYVPGRNTVFIAIALSLAEAQGASSIYLGINAVDYSGYPDCRPAYLEAYQNLIALSSKVGIEGNSIQLIAPLVRNSKIDIVRQAIALGVPINETWSCYQGDIEPCGVCDSCRLRDEALIAAGYPELATAVGRRLHKLP

SEQ ID NO: 42280 - protein, 470 aa, unidentified
  source 1..470: note = Snowella sp.
  REGION 1..470: note = tr|A0A2W7B1X6|A0A2W7B1X6_9CYAN Uncharacterized protein OS=Snowella sp. OX=2164131 GN=DCF12_19960 PE=4 SV=1
MISTLDKTKTNIYEIDYTFEFSCIANNDGNVQFIDHRKNRKTTVEIIVDDKNFQYRVLQEFPSVVADLTDLAIAIHAADRLAVQPFDQDQKRILIVLPVRHPELLNKNSFKTKLEDLLGWATGSRWFFDFQKRTIPGRIVERQQTFSTHSQECEVTLWSGGLDAFAGLYTRLTTDPVRHFMLFGTGSNNSASALQKKVFKALQPIFPNRLNLCQVPIRFCGGEEHKKNKNTRARGVVFIMLGSACAYLMGKKILHLYENGIGAINLPYRKSAIGLDHSRSVHPLTLLRISELVSELLGEEFHIKNPFLFWTKAQMCEALAQTPMSDVISVTQSCDRRHRQQPTQCGYCSSCILRRQAIAASKIKDKTHYVISHGKPPVSDPKEYFLNMLCQVSTFRDLLNVSEDPKLQWEHLTQKFLLDDIVDRCAKNENLSLVEMRHHLLNLYKTYVAEWSDVESHLSVGLLHKLTNQS

SEQ ID NO: 42281 - protein, 231 aa, Sodalis glossinidius
  REGION 1..231: note = tr|A0A193QHM8|A0A193QHM8_SODGM 7-cyano-7-deazaguanine synthase OS=Sodalis glossinidius (strain morsitans) OX=343509 GN=queC PE=3 SV=1
MKRAVVVFSGGQDSTTCLIQALSQYDEVHCVTFDYGQRHRAEIDVARKLAMQLGARAHKVIDAGLLNALAVSSLTRDNITFPGYEDSAGGLPSTFVPGRNILFLTLAAIYAYQVEASAVITGVCETDFSGYPDCRDNFIKALNAAVNLGMARELSFVTPLMWLDKAETWALADYYHQLDRVRHDTLTCYNGIKGDGCGQCAACHLRTHGLAAYRAQPQAVMASLKAKTGLH

SEQ ID NO: 42282 - protein, 231 aa, Sodalis glossinidius; identical to SEQ ID NO: 42281
  REGION 1..231: note = sp|Q2NV74|QUEC_SODGM 7-cyano-7-deazaguanine synthase; OS = Sodalis glossinidius (strain morsitans) OX=343509; GN = queC PE=3 SV=1

SEQ ID NO: 42283 - protein, 231 aa, unidentified
  source 1..231: note = Sodalis praecaptivus
  REGION 1..231: note = tr|W0I0K9|W0I0K9_9GAMM 7-cyano-7-deazaguanine synthase OS=Sodalis praecaptivus OX=1239307 GN=queC PE=3; SV = 1
MKRAVVVFSGGQDSTTCLIQALNQYDEVHCVTFDYGQRHRAEITVARELAIQLGARAHKVIDAGLLNALAVSSLTRDNIPVPGYEDTPDGLPSTFVPGRNILFLTLAAIYAYQVEADAVITGVCETDFSGYPDCRDDFIKALNHAVNLGMARELQFVTPLMWLDKAETWALADYYHQLERVRQDTLTCYNGIKGDGCGQCAACHLRARGLAAYRAQPQAVMASLKAKTGLR

SEQ ID NO: 42284 - protein, 233 aa, Sodalis sp.
  REGION 1..233: note = tr|A0A4R1NA04|A0A4R1NA04_9GAMM 7-cyano-7-deazaguanine synthase OS=Sodalis sp. 159R; OX = 2529856 GN=queC PE=3 SV=1
MKRAVVVFSGGQDSTTCLIQALTLYDEVHCITFDYGQRHRAEIDIARHLAQELGARVHKVIDAGLLNDLAISSLTRDNIPLPHYDDTAGDALPSTFVPGRNILFLTLASIYAYQVGAQTVITGVCETDFSGYPDCRDEFVQALNQAVKLGMARDIEFKTPLMWLNKAETWALADYYHQLDKIRHDTLTCYNGIKGDGCGECAACHLRARGLAEYQQDPERVAAEMKRKTGLMD

SEQ ID NO: 42285 - protein, 208 aa, unidentified
  source 1..208: note = Unknown
  REGION 1..208: note = tr|A0A151UJ76|A0A151UJ76_9GAMM 7-cyano-7-deazaguanine synthase (Fragment) OS=Sodalis-like endosymbiont of Proechinophthirus fluctus OX=1462730; GN = BG74_08685 PE=3 SV= 1
MKRAVVVFSGGQDSTTCLIQALSQYDEVHCVTFDYGQRHRAEITVARELAMQLGARVHKVIDAGLLNTLAVSSLTRDSIPVPGYEEMPDGLPSTFVPGRNILFLTLASIYAYQVEAEAVITGVCETDFSGYPDCRDGFIKALNHAVNLGIARELHFVTPLMWLDKAETWALADYYHQLDRVRNDTQTCYNGIKGDGCGQCAACRLRAR

SEQ ID NO: 42286 - protein, 226 aa, unidentified
  source 1..226: note = Solemya elarraichensis
  REGION 1..226: note = tr|A0A1T2LAG5|A0A1T2LAG5_9GAMM 7-cyano-7-deazaguanine synthase OS=Solemya elarraichensis gill symbiont OX=1918949 GN=queC PE=3 SV=1
MSEHGKKAVVLLSGGLDSATVLAIARHAGYDCYALSFDYGQRHSAELNAARKIAEEFNVRQHLVLPMALDAIGGSALTDEAIDVPETLAEGIPVTYVPARNTVFLSIALGWAEVLGARDIFIGVNAVDYSGYPDCRPEFIEAFEQLANLATKAGVEGDHFTVQAPLIEMSKSDIIHRGIELGVDYSKTVSCYQADEEGRACGVCDSCRLRKAGFERAGAEDSTNYQ

SEQ ID NO: 42287 - protein, 224 aa, unidentified
  source 1..224: note = Solemya pervernicosa
  REGION 1..224: note = tr|A0A1T2L4W4|A0A1T2L4W4_9GAMM 7-cyano-7-deazaguanine synthase OS=Solemya pervernicosa gill symbiont OX=642797 GN=queC PE=3 SV=1
MTRRAIVLVSGGLDSVTVLAIARELGYECYALSFDYGQRHEVELESARRVATLFGAVEHRVIRIDMGAIGGSALTDSSIDVPESPTEGIPVTYVPARNTVFLSFALGWAEVVGAHDIFIGVNAVDYSGYPDCRPEFIKAFERLAVLATKAGVEGEQFRVQAPLIDLSKADIIREGIRLGVDYSQTVSCYSADSSGRACGKCDSCRLRAVGFAEAGIEDPTHYRG

SEQ ID NO: 42288 - protein, 226 aa, unidentified
  source 1..226: note = Solemya velesiana
  REGION 1..226: note = tr|A0A1T2KTC7|A0A1T2KTC7_9GAMM 7-cyano-7-deazaguanine synthase OS=Solemya velesiana gill symbiont OX=1918948 GN=queC PE=3 SV=1
MNREPKRAVVLLSGGLDSATALAMARAEGYTCYALSMQYGQRHSTELDAARRVAQAQGVAEHIVVPLALDAFGGSALTDLDIDVPEESEEGIPVTYVPARNTIFLSLALGWAEVLGARDIFVGVNAVDYSGYPDCRPEFINAFENLANLATKAGMEGDRFHIHAPLIKMTKGEIIREGVRLGVDYGLTVSCYQADEQGRACGVCDSCRFRAQGFTEAGVEDPTPYQ

SEQ ID NO: 42289 - protein, 226 aa, Solemya velum
  REGION 1..226: note = tr|A0A0B0HAF2|A0A0B0HAF2_SOVGS 7-cyano-7-deazaguanine synthase OS=Solemya velum gill symbiont OX=2340 GN=queC PE=3 SV=1
MSEQKKRAVILLSGGLDSATVLAIAQHAGYDCYALSFDYGQRHNTELHAAKKIAQQFNVRQHLVLPMALDAIGGSALTDEAIDVPETLAEGIPVTYVPARNTVFLSIALGWAEVLGARDIFIGVNAVDYSGYPDCRPEFIEAFEQLANLATKAGVEGDHFSVQAPLIEMSKSDTIRRGIELGVDYSKTVSCYQADEEGRACGVCDSCRLRKAGFEQAGAGDPTNYQ

SEQ ID NO: 42290 - protein, 226 aa, Solemya velum
  REGION 1..226: note = tr|A0A1T2GB70|A0A1T2GB70_SOVGS 7-cyano-7-deazaguanine synthase OS=Solemya velum gill symbiont OX=2340 GN=queC PE=3 SV=1
MSEQKKRAVILLSGGLDSATVLAIAQHAGYDCYALSFDYGQRHNTELHAAKKIAQQFNVRQHLVLPMALDAIGGSALTDEAIDVPETLAEGIPVTYVPARNTVFLSIALGWAEVLGARDIFIGVNAVDYSGYPDCRPEFIEAFEQLANLATKAGVEGDHFSVQAPLIEMSKSDIIRRGIELGVDYSKTVSCYQADEEGRACGVCDSCRLRKAGFEQAGAGDPTNYQ

SEQ ID NO: 42291 - protein, 223 aa, Solibacillus sp.
  REGION 1..223: note = tr|A0A2D1SYZ1|A0A2D1SYZ1_9BACL 7-cyano-7-deazaguanine synthase OS=Solibacillus sp. R5-41; OX = 2048654 GN=queC PE=3 SV=1
MIQDKALVVFSGGQDSTTCLFWAIEHFAQVEVVTFDYGQRHRLEIECAKEIANEIGINHHILDMSLLNQLTSNALTREEIKIEENSDGLPSTFVPGRNLLFLSFAGVLASQIGAKHIVTGVCETDFSGYPDCRDIFIKSLNVTLNLSMDRTFVIHTPLMWINKAQTWELADQLGVLEFVRERTLTCYNGIIANGCGECPACKLRKKGLEDYINAKSKFHDENI

SEQ ID NO: 42292 - protein, 223 aa, unidentified
  source 1..223: note = Solibacter usitatus
  REGION 1..223: note = tr|Q02CA1|Q02CA1_SOLUE 7-cyano-7-deazaguanine synthase OS=Solibacter usitatus (strain Ellin6076); OX = 234267 GN=queC PE=3 SV=1
MPNAVCLLSGGLDSATCLALARREGYSCYALSFDYGQRHKVELDAAARVAQALGAERHLVVKIGLDVFGGSALTAAIDVPKGRSTGEMGAGIPITYVPARNTIFLSFALAWAEVLGSSDIFIGVNALDYSGYPDCRPEYIEAYERLANLATRAGVEGTTRMKIHTPLLHLSKAGIVKLGRELGLDFGLTFSCYDPGPGGLACGQCDACLLRRKGFDEAGIEDR

SEQ ID NO: 42293 - protein, 238 aa, unidentified
  source 1..238: note = Solimicrobium silvestre
  REGION 1..238: note = tr|A0A2S9H208|A0A2S9H208_9BURK 7-cyano-7-deazaguanine synthase OS=Solimicrobium silvestre; OX = 2099400 GN=queC PE=3 SV=1
MNSSALVLFSGGQDSTTCLAWALENYERVETLGFDYGQRHDIELVMRPILREKIAPLHPHWAERLGPDHLLDLSLISSISETAMTADIDIVMQENGLPNTFVPGRNLLFMTVAAALAYRRGIDVLVGGMCETDFSGYPDCRDDTMKALQVALNLGMNTRINLATPLMWLDKSQTWELAHKLGGTALIDLIRTETHTCYLGERGKKHDWGYGCETCPACLLRAKGYMEFIARNNIFTKK

SEQ ID NO: 42294 - protein, 223 aa, Solimonas aquatica
  REGION 1..223: note = tr|A0A1H9HHF0|A0A1H9HHF0_9GAMM 7-cyano-7-deazaguanine synthase OS=Solimonas aquatica; OX = 489703 GN=queC PE=3 SV=1
MNKKAVVLLSGGLDSATVLALAREQGYETYALSVSYGQRHVAELAAAQRVAAALGAVRHQTLHIDLDAVGGSALTDRSIAVPETPVTGIPITYVPARNTLFLSLSLGWAEVLGATDLFIGVNAVDYSGYPDCRPAFIDAFEQLANVATKAGVEGACFRIHAPLLKLSKAEIIREGLRLGLDYGLTVSCYQADEQGRACGRCDSCRLRAAGFAEAGIADPTPYR

SEQ ID NO: 42295 - protein, 223 aa, unidentified
  source 1..223: note = Solimonas fluminis
  REGION 1..223: note = tr|A0A2S5TDT4|A0A2S5TDT4_9GAMM 7-cyano-7-deazaguanine synthase OS=Solimonas fluminis; OX = 2086571 GN=queC PE=3 SV=1
MKKRAVVLLSGGLDSATVLAIAREQGYESYALSVSYGQRHVAELRAAERVVKALGAAGHQTLHVNLDAVGGSSLTDTSMAVPETPTTGIPSTYVPARNTLFLSMALGWAEVLEAQDLFIGVNAVDYSGYPDCRPAFIEAFEKLAGVATKAGVEGRPFRVHAPLLTLSKADIIREGLRLGVDYGLTVSCYQADEAGRACGRCDSCRLRREGFAAAGVPDPTPYR

SEQ ID NO: 42296 - protein, 223 aa, Solimonas sp.
  REGION 1..223: note = tr|A0A346N1Y1|A0A346N1Y1_9GAMM 7-cyano-7-deazaguanine synthase OS=Solimonas sp. K1W22B-7; OX = 2303331 GN=queC PE=3 SV=1
MKKKAVVLLSGGLDSATVLAMAREQGYESYALSVSYGQRHVAELRAADRVVKALGAAGHQTLHVNLDAVGGSSLTDTRIAVPETPTTGIPSTYVPARNTLFLSMALGWAEVLEAQDLFIGVNAVDYSGYPDCRPAFIEAFEKLAGVATRAGVEGKPFRVHAPLLHLSKAEIIREGLRLGVDYGLTVSCYQADEAGRACGRCDSCRLRREGFAATGVADPTPYR

SEQ ID NO: 42297 - protein, 225 aa, Sorangium cellulosum
  REGION 1..225: note = tr|A0A2L0F5E4|A0A2L0F5E4_SORCE 7-cyano-7-deazaguanine synthase OS=Sorangium cellulosum; OX = 56 GN=exsB PE=3 SV=1
MQAPTIVLTTGGADSTTLLHVMHTRARVVPVFVDYGQRAAHREHQAAERQCAALGLSLRRFDMGAVGAAFRAEQQAKLHIPLPHRNLIVLSLATSYAAQIEAASIAIAVIRDDVDGYASASLGFLEAYRRLASTLGSVTIETPLIGFDKSAVLAEGVRLGVDFGHTYSCMLGYERHCGRCPQCKKRRAAFVAAGMPENPGFYLDDARAPEGGTAGAEGPPESPQG

SEQ ID NO: 42298 - protein, 237 aa, Sorangium cellulosum
  REGION 1..237: note = tr|A0A150QS92|A0A150QS92_SORCE 7-cyano-7-deazaguanine synthase OS=Sorangium cellulosum; OX = 56 GN=queC PE=3 SV=1
MLNKPKAVVLLSGGLDSTTTLAIAQSEGYDTHALTFRYGQRHEGEIEAARRVAQRFGGIQHVVAQIDLRVFGGSALTSDIAVPKGRSLDAIGNGIPVTYVPARNTIFLSFALAWAEVLGASDIFLGVNALDYSGYPDCRPEYIEAFERMANLATKSGVEGRQHLKIHTPLIHLTKAQIIQRGLALGVEYELTLTCYDPSAQGEACGRCDACLLRLKGFAESGLTDPAPYRVDARALA

SEQ ID NO: 42299 - protein, 230 aa, unidentified
  source 1..230: note = Spartobacteria bacterium
  REGION 1..230: note = tr|A0A3C0R465|A0A3C0R465_9BACT 7-cyano-7-deazaguanine synthase OS=Spartobacteria bacterium OX=2052183 GN=queC PE=3 SV=1
MKHAVVLLSGGLDSTTTLAIAIAQGYEVYSLSFDYGQRHNLELEAARRVADSLGVKEHRVVKIDMRLFGGSALTADVDVPKKRSEKEMAQGIPITYVPARNTIFLAHALAWAEVIGAGHIFLGVNAIDYSGYPDCRPEFIAMFETLANIGTKAGLEGRRFQIHAPLIKFSKADIIRKARELDVDLSLTHSCYDPTPDGLACGLCDSCQLRLKGFREAGLADPIQYAPVAP

SEQ ID NO: 42300 - protein, 233 aa, unidentified
  source 1..233: note = Spartobacteria bacterium
  REGION 1..233: note = tr|A0A2A2XX26|A0A2A2XX26_9BACT 7-cyano-7-deazaguanine synthase OS=Spartobacteria bacterium AMD-G4 OX=1982325 GN=queC PE=3 SV=1
MPKLLRKRVIVLCSGGMDSVVALHDAAEVHEVVAALSFHYGSKHNNREIPFAAYHAGLLQTPHLMIPLDFMERLFESRLLNSGESIPKGHYEEETMKQTVVPFRNGIMLAVAAGLAESRHAGGVVIAAHAGDHAIYPDCREDFMGAMADAIRLGTYADVELLRPFISMTKSEIARRGDELGVDFSKTWSCYVGGETHCGECGTCVERREAFLLARLKDPTKYLSYAPLPSKPL

SEQ ID NO: 42301 - protein, 338 aa, Sphaerisporangium album
  REGION 1..338: note = tr|A0A367ENC5|A0A367ENC5_9ACTN Uncharacterized protein OS=Sphaerisporangium album OX=509200; GN = DQ384_38100 PE=4 SV=1
MDQVQSCARCPNTTRNPTVRILPSGLCAICHWWAESPHASIRRRELQHVRALAGGGRGEVDALVGLSGGKDSTATLVRVLKMGFTPVAITFDTGYYPAHITQRAARVAAQLGVRHEVVDLRPHIQPEDRASYVLTAELYDREETPLLAERFRELYLLGRERYSVKQREPMAYVRTCQLCRRLVVPAYHREAARHGARVFFLGTNEWVGLSQNPGNGRYTFSAVRRLQPPGAHEPVLVVHLPFLLGAGLEDTVSVLREVGWEPPAGERVVESSANSCLLGRVAEAKAARLLGFHPDTVRLAREVTCGFLPREEAERALAAPHEATGSVRQVLTGAGILS

SEQ ID NO: 42302 - protein, 237 aa, Sphaerisporangium sp.
  REGION 1..237: note = tr|A0A366LRJ1|A0A366LRJ1_9ACTN 7-cyano-7-deazaguanine synthase OS=Sphaerisporangium sp. LHW63015 OX=2248750 GN=queC PE=3 SV=1
MITTQRQAGHAVVVSSGGLDSTTLAYWLQAKGTGRLTLLGIDYGQRHRVELSRLTAFAQALDAECVILDLRGLKPVLSGTALTDDQATVPAGHYTDHSMRATVVPNRNALLLDVAVALAISVKADTVAFGAHAGDHPIYPDCRPSFLYAYRRMAAVASEGLTVSGFQVVAPFMDVTKADIVRLGADLGVPFADTWSCYVGGARHCGRCGTCTERKEAFALARVPDPTDYETRETPCT

SEQ ID NO: 42303 - protein, 236 aa, Sphaerisporangium sp.
  REGION 1..236: note = tr|A0A2W2H3K3|A0A2W2H3K3_9ACTN 7-cyano-7-deazaguanine synthase OS=Sphaerisporangium sp. 7K107 OX=2070365 GN=queC PE=3 SV=1
MTTQRQAGHAIVVSSGGLDSTTLAYWLQANGTGRLTLLGIDYGQRHRVELSRLTTLAQALDAECVILDLRRLRPVLSGTALIDEQATVPAGHYTDGSMRATVVPNRNALLLDIAVALAISVKADTVAFGAHAGDHPIYPDCRPSFLYAYRRMAAVANEGLTVSGFQVIAPFMDMTKADIVRLGADLGVPFADTWSCYAGGARHCGRCGTCTERKEAFVLARVPDPTDYESPETPCT

SEQ ID NO: 42304 - protein, 230 aa, Sphaerobacter thermophilus
  REGION 1..230: note = tr|D1C6Z9|D1C6Z9_SPHTD 7-cyano-7-deazaguanine synthase OS=Sphaerobacter thermophilus (strain DSM 20745 / S 6022) OX=479434 GN=queC PE=3 SV=1
MQAQANERPGAVVLLSGGVDSTTVAYLARASGYAIYALSFDYGQRHRRELDAAAAVARAVEAVEHRVVRIDLAGIGGSSLTGHGEIPTGGVTDGIPSTWVPARNHIFLAVASGYAEVVGARAIYIGVSQVDYSGYPDCRAEFLEAYQRAADLASKQFVEEGRSIPVVAPLLHLSKAGTVRLGLALGVDYGLTWSCYQGGESPCGVCDSCRLRAEAFAAAGAVDPLVGRPR

SEQ ID NO: 42305 - protein, 250 aa, Sphaerochaeta sp.
  REGION 1..250: note = tr|A0A3C1LQJ9|A0A3C1LQJ9_9SPIO ATP-dependent sacrificial sulfur transferase LarE OS=Sphaerochaeta sp.; OX = 1972642 GN=larE PE=4 SV=1
MTLNEFFKENPKVAIAFSGGVDSSYLLYEAKKCNAEVIAYYVSSQFQPGFELEDAKRIAQYTDCEMKILEVDVLCDPIVASNPKDRCYHCKRRIFSTILEAAAKDGFTTILDGTNYSDDIADRPGYRALGEMKVLSPLRLCELTKAEIRKRSREAGLFTWNKSAYACLATRIPTGDQITAEKLKMTENAEELLFSMGFDDFRVRYLDGYARIQVRASQLAKLMDYRDKIKQELGKDYKGVLLDLETRDEQ

SEQ ID NO: 42306 - protein, 225 aa, unidentified
  source 1..225: note = Sphaerospermopsis kisseleviana
  REGION 1..225: note = tr|A0A1Z4UVU0|A0A1Z4UVU0_9CYAN 7-cyano-7-deazaguanine synthase OS=Sphaerospermopsis kisseleviana NIES-73 OX=1973480 GN=queC PE=3 SV=1
MMKAVILLSGGLDSSTVLYQARADGCECYAISFDYQQRHRRELQSAMFVAQSVGVVQHQIVNFDLRLWGGSALTDEAIALPQARSLDEMSQSIPVTYVPARNTIFLSFALGYAETICAQRVYIGVNALDYSGYPDCRPDYIQAMQEVFRLGTKQGREGQPIDIIAPLINLKKTEIIQLGNQLDVPWELTWSCYAGGDQACGVCDSCRLRLAAFAQLGLKDPVDYL

SEQ ID NO: 42307 - protein, 225 aa, unidentified
  source 1..225: note = Sphaerospermopsis reniformis
  REGION 1..225: note = tr|A0A479ZWH6|A0A479ZWH6_9CYAN 7-cyano-7-deazaguanine synthase OS=Sphaerospermopsis reniformis OX=531300 GN=queC PE=3 SV=1
MMKAVILLSGGLDSSTVLYQARADGCECYAISFDYQQRHRRELQSAMFVAQSVGVVQHQIVNFDLRLWGGSALTDEAIALPQARSLDEMSQSIPVTYVPARNTIFLSFALGYAETIGAQRVYIGVNALDYSGYPDCRPDYIQAMQEVFRLGTKQGREGQPIDIIAPLINLKKTEIIQLGNQLDVPWELTWSCYAGGDQACGVCDSCRLRLAAFAQLGLKDPVDYL

SEQ ID NO: 42308 - protein, 240 aa, Sphaerotilus hippei
  REGION 1..240: note = tr|A0A318GY31|A0A318GY31_9BURK 7-cyano-7-deazaguanine synthase OS=Sphaerotilus hippei; OX = 744406 GN=queC PE=3 SV=1
MTDPRTALVLFSGGQDSTTCLAWALERHARVETLGFDYGQRHRIELDCRLTVLDELRARFPHWADRLGDDHVLDLSLIGQISDTALTSERAIELQADGLPNTFVPGRNLLFLGFAATLAYRRSASVLVGGMCETDYSGYPDCRDNTLKALQVALSLGLDAPMTVETPLMFLTKAQTWTLAHELGGDALVDLMIEHTHTCYLGERGRRHAWGHGCGHCPACALRASGHATWIGTRPGPAAG

SEQ ID NO: 42309 - protein, 241 aa, Sphaerotilus natans
  REGION 1..241: note = tr|A0A059KG37|A0A059KG37_9BURK 7-cyano-7-deazaguanine synthase OS=Sphaerotilus natans subsp. natans DSM 6575 OX=1286631 GN=queC PE=3 SV=1
MSALTNAARDPRTALVLFSGGQDSTTCLAWALERFQRVETLGFDYGQRHHIEMDCRLTVREELRAAFPHWAARLGEDHVLDLSLIGQISDTALTTEREIELQANGLPNTFVPGRNLLFLGFAATLAYRRGASVLVGGMCETDYSGYPDCRDNTMKALQVALSLGLDTAMTLETPLMFLTKAQTWDLAEQLGGQTLVELIVEHTHTCYLGERGARHPWGHGCGHCPACELRRSGHAAWLADA

SEQ ID NO: 42310 - protein, 241 aa, Sphaerotilus natans
  REGION 1..241: note = tr|A0A5C1Q506|A0A5C1Q506_9BURK 7-cyano-7-deazaguanine synthase OS=Sphaerotilus natans subsp. sulfidivorans OX=639200 GN=queC PE=3 SV=1
MSAVTHAARDPRTALVLFSGGQDSTTCLAWALERFQRVETLGFDYGQRHHIEMDCRLTVREELQAAFPHWAARLGEDHVLDLSLIGQISDTALTTEREIELQANGLPNTFVPGRNLLFLGFAATLAYRRGASVLVGGMCETDYSGYPDCRDNTMKALQVALSLGLDTPMTLETPLMFLTKAQTWDLAEQLGGQTLVELIVEHTHTCYLGERGARHPWGHGCGHCPACELRRAGHAAWLADL

SEQ ID NO: 42311 - protein, 369 aa, unidentified
  source 1..369: note = Sphingobacteriaceae bacterium
  REGION 1..369: note = tr|A0A2A3U8L4|A0A2A3U8L4_9SPHI ExsB family protein; OS = Sphingobacteriaceae bacterium OX=2021370 GN=CNR22_06945; PE = 4 SV=1
MLKCSNCILTSEDSDVFALDEKGICNYCNYYYSSVNKLGDAAQRKKWLDTKVNEIKLAGKGKAYDCILGVSGGVDSSYLAYWTKQQGLRPLMVHFDNGWNSELAVKNIESLCDRLGYELQTHVINWEEFKELQLAYLKAGVVDIEAITDHAIYSTILNIAQKYKIKYTINGFNFATEAIMPKGWAFDKMDWKNIVDIYSKYGSGKPLKTFPHVTFWKKLYYHWFLKLESIQVLNYLNYNKDQAVEVITKEVGWRNYGGKHHESIFTKFYQTYILPQKFKIDKRRAHLATLICSGQVTKEQALLELQKPPYNPEEILKEREYVLKKLGLSEEAFEKIMQEKPRSHFEFKTEKQMWSNYFKFLKILKPWKK

SEQ ID NO: 42312 - protein, 175 aa, unidentified
  source 1..175: note = Sphingobacteriaceae bacterium
  REGION 1..175: note = tr|A0A4Q3E8M1|A0A4Q3E8M1_9SPHI 7-cyano-7-deazaguanine synthase (Fragment); OS = Sphingobacteriaceae bacterium OX=2021370 GN=EOP45_18345; PE = 3 SV=1
MSKTAILLSGGIDSIALTYWKKPDVAITVNYGQAPAETEIRTSATIAKALNIPHYIVTADCSKLGSGDLLNQAALSVSPSSEWWPYRNQLLVTLACMKGIALGIGELMLASVKSDGFHKDGTAQFYKLMSQLSAGALDVAICPMNPAAVAEGFQFVPVLPGRNVIACGSHHPLLR

SEQ ID NO: 42313 - protein, 202 aa, Sphingobacterium daejeonense
  REGION 1..202: note = tr|A0A4U9JA23|A0A4U9JA23_9SPHI 7-cyano-7-deazaguanine synthase OS=Sphingobacterium daejeonense OX=371142 GN=NCTC13534_00240 PE=3 SV=1
MSTGILLSGGIDSIALAYLKRPKYAFTINYGQIPAEAEFLASAAICNELNIIHHRINIDCSSLGSGDLLDQDSIEDSPSSEWWPYRNQLLVTLAVMKAISLGVKELMVGSVKSDGFHKDGTEKFYQLLNDLSSYQEGGVSITSPAIHYTSAELVRASNVPDNLLLWAHSCHKSNSPCGNCRGCNKYLQVMYEIKGGAYESYT

SEQ ID NO: 42314 - protein, 198 aa, Sphingobacterium sp.
  REGION 1..198: note = tr|A0A1R4J2H2|A0A1R4J2H2_9SPHI 7-cyano-7-deazaguanine synthase OS=Sphingobacterium sp. JB170 OX=1434842 GN=FM107_04915 PE=3 SV=1
MEPIKKAILLSGGMDSICLSFGIKPEIAYTINYGQNVAEREIYVSKHVCEFLKIEHKIIEVDCRSLGSGSLANNINHELAPSPEWWPYRNQLLITLALMQGIKDDITELHLALVKSDSFHKDGTEAFYKLINDLTSYQEGSIKVCCESIGYYTHELAKMYKVPVELLSLAHSCHTSNIACGKCSGCKKNLRVRYELNI

SEQ ID NO: 42315 - protein, 225 aa, Sphingobacterium sp.
  REGION 1..225: note = tr|A0A349VWE1|A0A349VWE1_9SPHI 7-cyano-7-deazaguanine synthase OS=Sphingobacterium sp.; OX = 341027 GN=queC PE=3 SV=1
MPNSVLNSEKAIVVFSGGQDSTTCLFYAKRHFKEVELVTFNYGQRHNTEIEVASKIAKDQGLKHHILDMSLLSQLTPNALTKHDMKIETGEDGIPNTFVPARNLLFLSFAGALAYQVNAKHIITGVCETDFSGYPDCRDSFIKSMNVTLSLSMDRDFVIHTPLMWLDKTQPWELSDELGVLDYVRHNTLTCYNGIIGDGCGECPACKLRQRGLHQYLEQKGDASL

SEQ ID NO: 42316 - protein, 198 aa, Sphingobacterium spiritivorum
  REGION 1..198: note = tr|D7VTP5|D7VTP5_9SPHI 7-cyano-7-deazaguanine synthase OS=Sphingobacterium spiritivorum ATCC 33861; OX = 525373 GN=HMPREF0766_14365 PE=3 SV=1
MESLKQGLLLSGGVDSICLAYGLKPDIAYTINYGQIPASREIYVSRYICNLLRIQHKVIEVNCKSLGSGILINEERLDISPSQEWWPYRNQLLITLAAMQAIKDKIGVLHLASVKSDSFHKDGTPQFYDLINELVKYQEGNISIVCESTGYYSHELVKKYNVPLEIIAFAHSCHISNTACGQCPGCKKQIKVRHELSI

SEQ ID NO: 42317 - protein, 230 aa, unidentified
  source 1..230: note = Sphingobium algicola
  REGION 1..230: note = tr|A0A5J5HJT5|A0A5J5HJT5_9SPHN 7-cyano-7-deazaguanine synthase QueC OS=Sphingobium algicola OX=2048546 GN=queC PE=4 SV=1
MVANEGKFAVVLLSGGLDSMVAGGLAREAGYRIFALSIDYNQRHRVELRAAARIAESLNAIRHIVLPLDLTAFGGSALTADIAVPKSGVGEEIPVTYVPARNTIFLSLTLGLAEVAGASDIFIGVNALDYSGYPDCRPEFIDAFQTMATLATKAGVEGHPIRIQTPLQYMSKADIAREADRLGLDAGLSWSCYDPTPDNKHCGLCDSCRLRSKGYEEAGLPDPTIYAARP

SEQ ID NO: 42318 - protein, 235 aa, unidentified
  source 1..235: note = Sphingobium algorifonticola
  REGION 1..235: note = tr|A0A437JBL8|A0A437JBL8_9SPHN 7-cyano-7-deazaguanine synthase OS=Sphingobium algorifonticola OX=2008318 GN=queC PE=3 SV=1
MPSSSRSDTDNSFAVVLLSGGLDSMVAAGLAREAGHRLFALTIDYNQRHRVELQAAARVAKALNVLSHIVLPLDLTAFGGSALTADIAVPKGGVGNDIPVTYVPARNTIFLSLTLGFAEVTGARDIFIGVNALDYSGYPDCRPAFIAAFEAMAALATKAGVEGHAVRINAPLQHMTKADIVREADRLGLDAGMSWSCYDPTPDGLHCGLCDSCRLRAKGFVEAGLPDPTRYAVKP

SEQ ID NO: 42319 - protein, 230 aa, Sphingobium amiense
  REGION 1..230: note = tr|A0A494WDH4|A0A494WDH4_9SPHN 7-cyano-7-deazaguanine synthase OS=Sphingobium amiense; OX = 135719 GN=queC PE=3 SV=1
MVAKETKFAVVLLSGGLDSMVAGGLAREAGYRILALSIDYNQRHRVELRAAARVAESLNAMRHIVLPLDLTAFGGSALTADIAVPKGGVGPEIPVTYVPARNTIFLSLTLGLAEVAGASDIFIGVNALDYSGYPDCRPEFIDAFQKMATLATKAGVEGHPIRINTPLQYMSKADIVREANRLGMDAGISWSCYDPTPDGKHCGLCDSCRLRAKGFDEAGLPDPTVYATRP

SEQ ID NO: 42320 - protein, 230 aa, unidentified
  source 1..230: note = Sphingobium baderi
  REGION 1..230: note = tr|T0GN84|T0GN84_9SPHN 7-cyano-7-deazaguanine synthase OS=Sphingobium baderi LL03 OX=1114964 GN=queC; PE = 3 SV=1
MAENNGKFAVVLLSGGLDSMVAGALAREAGFHLLALTIDYNQRHRVELRAASRIAKALNAMSHIVLPLDLTAFGGSALTADIAVPKGGVGADIPITYVPARNTIFLSLTLGLAEAAGANDIFIGVNALDYSGYPDCRAEFIEAFEKMAALATKAGVEGNPIRIKTPLQHMSKADIVREADRLGLDAGMSWSCYDPTPDGKHCGLCDSCRLRAKGFEEAGLPDPTGYATRP

SEQ ID NO: 42321 - protein, 230 aa, unidentified
  source 1..230: note = Sphingobium baderi
  REGION 1..230: note = tr|A0A0S3EXF9|A0A0S3EXF9_9SPHN 7-cyano-7-deazaguanine synthase OS=Sphingobium baderi; OX = 1332080 GN=queC PE=3 SV=1
MVANKGKFAVVLLSGGLDSMVAGGLAREAGYHVLALTIDYNQRHRVELRAAARIAKALNAMSHIVLPLDLTAFGGSALTADIAVPKGGVGADIPVTYVPARNAIFLSLTLGLAEAAGANDVFIGVNALDYSGYPDCRPEFIDAFQKMATLATKAGVEGKPVRINTPLQHMSKADIVREAHRLGLDAGMSWSCYDPAPNGQHCGLCDSCRLRAKGFQEAGLTDPTHYATRP

SEQ ID NO: 42322 - protein, 230 aa, unidentified
  source 1..230: note = Sphingobium barthaii
  REGION 1..230: note = tr|A0A4R6FIT1|A0A4R6FIT1_9SPHN 7-cyano-7-deazaguanine synthase OS=Sphingobium barthaii; OX = 1054037 GN=queC PE=3 SV=1
MVAHNGKFAVVLLSGGLDSMVAGGLAREAGYRLFALSIDYNQRHRLELQAAVRVASALNAISHIVLPLDLTAFGGSALTADIAVPKGGVGDGIPVTYVPARNTIFLSLTLGLAEVVGANDVFIGVNALDYSGYPDCRPEFIDAFQKMAALATKAGVEGHPIRINAPLQHMSKADIVREADRLGLDAGLSWSCYDPTPDGSHCGLCDSCRLRSKGFVEAGLPDPTIYAKKP

SEQ ID NO: 42323 - protein, 230 aa, Sphingobium chinhatense
  REGION 1..230: note = tr|W1KMG3|W1KMG3_9SPHN 7-cyano-7-deazaguanine synthase OS=Sphingobium chinhatense IP26 OX=1346790; GN = queC PE=3 SV=1
MVAHNGKFAVVLLSGGLDSMVAGGLAREAGYRLFALSIDYNQRHRLELQAAGRVATALNAISHIVLPLDLTAFGGSALTADIAVPKGGVGAGIPITYVPARNTIFLSLTLGLAEVAGANDVFIGVNALDYSGYPDCRPEFIDAFQKMAALATKAGVEGHPIRINAPLQHMSKADIVREAYRLGLDTGLSWSCYDPTPDGRHCGLCDSCRLRSKGFVEAGLPDPTVYAVKP

SEQ ID NO: 42324 - protein, 230 aa, Sphingobium chlorophenolicum
  REGION 1..230: note = tr|A0A081RGL3|A0A081RGL3_SPHCR 7-cyano-7-deazaguanine synthase OS=Sphingobium chlorophenolicum OX=46429 GN=queC PE=3 SV=1
MVANSGKFAVVLLSGGLDSMVAGGLAREAGYRVLALSIDYNQRHRLELRAAGRVAAALNAISHIVLPLDLTAFGGSALTADIAVPKGGVGPGIPVTYVPARNTIFLSLTLGLAEVAGANDVFIGVNALDYSGYPDCRPEFIDAFQKMAALATKAGVEGHPIRINAPLQHMSKADIVREAHRLGLDAGLSWSCYDPTPDGKHCGQCDSCRLRSKGFVEAGLPDPTIYAVKP

SEQ ID NO: 42325 - protein, 237 aa, Sphingobium chlorophenolicum
  REGION 1..237: note = tr|F6EUF0|F6EUF0_SPHCR 7-cyano-7-deazaguanine synthase OS=Sphingobium chlorophenolicum L-1 OX=690566; GN = queC PE=3 SV=1
MSNADASALVVFSGGQDSATCLAWALNRFDRVETIGFRYGQRHEIELAVRNPLREGIADAFPNWAPRLGPDRIIDLAVLGEVSESALTSDIDIGMRDDGLPTTFVPGRNLIFLTFAAITAYQRGLKHVVTGVCETDYSGYPDCRDDTIKALQAALNLGMGSHLVLDTPLMWIDKAATWRLAAELGGSALVDIIREHSHSCYLGDRAHRHDWGYGCGSCPACDLRANGWRIFTEGCSA

SEQ ID NO: 42326 - protein, 230 aa, Sphingobium chungbukense
  REGION 1..230: note = tr|A0A0M3ATD9|A0A0M3ATD9_9SPHN 7-cyano-7-deazaguanine synthase OS=Sphingobium chungbukense OX=56193 GN=queC PE=3 SV=1
MVANSGKFAVVLLSGGLDSMVAGGLAREAGYHVFALSIDYNQRHRLELQAAGRIASALNAISHIVLPLDLTAFGGSALTADIAVPKGGVGPGIPVTYVPARNTIFLSLTLGLAEVSGASDVFIGVNALDYSGYPDCRPEFIEAFQKMAALATKAGVEGHPIRINAPLQHMSKADIVREAHRLGLDAGLSWSCYDPTPDGKHCGQCDSCRLRSKGFVEAGLPDPTIYAVKP

SEQ ID NO: 42327 - protein, 211 aa, Sphingobium cloacae
  REGION 1..211: note = tr|A0A1E1F296|A0A1E1F296_9SPHN 7-cyano-7-deazaguanine synthase OS=Sphingobium cloacae; OX = 120107 GN=queC PE=3 SV=1
MVAGGLAREAGYHVLALTIDYNQRHRVELQAAARIARALNAMSHIVLPLDLTAFGGSALTADIAVPKGGVGADIPVTYVPARNTIFLALTLGLAEASGANEVFIGVNALDYSGYPDCRPEFIDAFQKMAALATKAGVEGHPIRINTPLQHMSKADIAREADRLGLDAGMSWSCYDPTPDGRHCGLCDSCRLRAKGFAEAGLPDPTRYATRP

SEQ ID NO: 42328 - protein, 230 aa, unidentified
  source 1..230: note = Sphingobium cupriresistens
  REGION 1..230: note = tr|A0A4Q4JM56|A0A4Q4JM56_9SPHN 7-cyano-7-deazaguanine synthase OS=Sphingobium cupriresistens OX=1132417 GN=queC PE=3 SV=1
MVANNGKFAVVLLSGGLDSMVAGGLAREQGYRILALSIDYNQRHRVELRAASRVAEALNAIRHIVLPLDLTAFGGSALTADIAVPKSGVGDQIPVTYVPARNAIFLSLTLGLAEVAGASDIFIGVNALDYSGYPDCRPEFIDAFQKMATLATKAGVEGHPIRIQTPLQYMSKADIAREADRLGLDAGISWSCYDPTPDGKHCGLCDSCRLRSKGYQEAGLPDPTIYAVQP

SEQ ID NO: 42329 - protein, 230 aa, unidentified; identical to SEQ ID NO: 42328
  source 1..230: note = Sphingobium czechense
  REGION 1..230: note = tr|A0A0J7Y015|A0A0J7Y015_9SPHN 7-cyano-7-deazaguanine synthase OS=Sphingobium czechense LL01 OX=1420583 GN=queC PE=3 SV=1

SEQ ID NO: 42330 - protein, 211 aa, Sphingobium faniae
  REGION 1..211: note = tr|A0A1G4UH82|A0A1G4UH82_9SPHN 7-cyano-7-deazaguanine synthase OS=Sphingobium faniae; OX = 570446 GN=queC PE=3 SV=1
MVAGGLAREAGYEVVALTIDYNQRHRVELDAASRIAKALNAASHIVLPLNLAAFGGSALTADIAVPKGGVGADIPVTYVPARNAIFLALTLGLAEASGANDVFIGVNALDYSGYPDCRPEFIDAFQKMATLATKAGVEGHPIRINTPLQHMSKADIAREADRLGLDAGMSWSCYDPTPDGRHCGLCDSCRLRAKGFAEAGLPDPTRYAIRP

SEQ ID NO: 42331 - protein, 616 aa, Sphingobium faniae
  REGION 1..616: note = tr|A0A1G4TIV0|A0A1G4TIV0_9SPHN 7-cyano-7-deazaguanine synthase OS=Sphingobium faniae; OX = 570446 GN=SAMN02927924_03044 PE=3 SV=1
MQFEFACGGVDFLLPAQGDRRAMDVQGAARNINLRIADISKALVSNIPDVLLDLLEVAAYVYCADQQTRRGSELLTDYGAGWRRRMVFQIPVRSHIIWQREEVREGLENMLGFLSDDHYTFEFVPAKSPLAASEAYFSDLTDRTDQPDEIALFSGGMDSFAGVIEAQAEGKKMVLVGHHAASKIFNIQKQLIEALNQRASGPRMFFVPVNITNTGSDPVEYTQRTRSFLFATLGVVVARMFGKDEITFYENGVVSLNIPIAADVLGARATRTTHPRVIRGFETFFSSILEREINVRTPFQWLTKTDVARKIDEHSGADLLAKTNSCTRPRAMTKKQPHCGVCSQCIDRRFAVLAAGLGEVESADLYRVDLLTGDRTHDRDVRMAAAYVKFFRDFGDVPKDRFLAKYTEIVSAIDQFTDTPRHEAPDRIYDMYLRHHHDVMAVLEGAAQTNRSELIRGTLPPGSLLAMLHNRSRIEVCEPSNYQQDAKEFVDRLSAPVLEFAVDAKAHAIRFRGDVVLDGKNFELFNALVAPFRQGKSEGEDVPFVSAPKLAAELGITEQSVRQQVGRLREAVTEQLVVGQGLPLDRKSLIESQAGNGYRINPQLRELSLGDLLQQE

SEQ ID NO: 42332 - protein, 230 aa, Sphingobium francense
  REGION 1..230: note = tr|A0A4Q4J8Z8|A0A4Q4J8Z8_9SPHN 7-cyano-7-deazaguanine synthase OS=Sphingobium francense; OX = 332057 GN=queC PE=3 SV=1
MVAHNGKFAVVLLSGGLDSMVAGGLAREAGYRLFALSIDYNQRHRLELQAAGRVAAALNAISHIVLPLDLTAFGGSALTADIAVPKGGVGAGIPITYVPARNTIFLSLTLGLAEVAGANDVFIGVNALDYSGYPDCRPEFIDAFQKMAALATKAGVEGHPIRINAPLQHMSKADIVREAYRLGLDTGLSWSCYDPTPDGRHCGLCDSCRLRSKGFVEAGLPDPTVYAVKP

SEQ ID NO: 42333 - protein, 237 aa, Sphingobium fuliginis
  REGION 1..237: note = tr|A0A4Q4ITB3|A0A4Q4ITB3_SPHSA 7-cyano-7-deazaguanine synthase OS=Sphingobium fuliginis (strain ATCC 27551) OX=336203 GN=queC PE=3 SV=1
MSSADGSALVLFSGGQDSATCLAWALDRFNHVETIGFDYGQRHRVELEVRDRLRAGMMELQADWRTKLGTDHMIALAALGQISDTSLTTGVEIAMAASGLPNTFVPGRNLLFLTFAAAVAYRRGIKHIVTGVCETDYSGYPDCRDDTIKALQVALNLGMEQRFVLHTPLMWIDKAATWSLAHALGGPDLVNLVRVESHTCYLGDRGTTHEWGAGCGHCPACELRRAGWQEFSARLDT

SEQ ID NO: 42334 - protein, 230 aa, Sphingobium fuliginis
  REGION 1..230: note = tr|A0A292ZJR6|A0A292ZJR6_SPHSA 7-cyano-7-deazaguanine synthase OS=Sphingobium fuliginis (strain ATCC 27551) OX=336203 GN=queC PE=3 SV=1
MVAHNGKFAVVLLSGGLDSMVAGGLAREAGYRLFALSIDYNQRHRLELQAAGRVASALNAISHIVLPLDLTAFGGSALTADIAVPKGGVGTGIPVTYVPARNTIFLSLTLGLAEVAGANDVFIGVNALDYSGYPDCRPEFIDAFQKMAALATKAGVEGNPVRINAPLQHMSKADIVREAYRLGLDTGLSWSCYDPTPDGRHCGLCDSCRLRSKGFVEAGLPDPTDYAVKP

SEQ ID NO: 42335 - protein, 230 aa, Sphingobium herbicidovorans
  REGION 1..230: note = tr|A0A086P6T4|A0A086P6T4_SPHHM 7-cyano-7-deazaguanine synthase OS=Sphingobium herbicidovorans (strain ATCC 700291 / DSM 11019 / NBRC 16415 / MH) OX=1219045 GN=queC P E=3 SV=1
MAANNGKFAVVLLSGGLDSMVAGGLAREAGYRIFALTIDYNQRHRVELGAAARVASALGALRHIILPLDLTAFGGSALTADISVPKGGVGPGIPNTYVPARNTIFLSLTLGLAEVSGANDVFIGVNALDYSGYPDCRPEFIDAFQKMAALATKAGVEGHPLRINAPLQHMSKADIVREAHRLGLDAGMSWSCYDPAPGDLHCGLCDSCRLRSKGFEEAGLPDPTRYATKP

SEQ ID NO: 42336 - protein, 230 aa, unidentified
  source 1..230: note = Sphingobium hydrophobicum
  REGION 1..230: note = tr|A0A249MQG5|A0A249MQG5_9SPHN 7-cyano-7-deazaguanine synthase OS=Sphingobium hydrophobicum OX=1673076 GN=queC PE=3 SV=1
MGSNERKFAVVLLSGGLDSMVAGGLAREAGYHLLALSIDYNQRHRVELRAAGRVAQALNAMRHIVLPLDLTAFGGSALTADIAVPKGGVGDDIPVTYVPARNTIFLSLTLGLAEVAGASDIFIGVNALDYSGYPDCRPEFIDAFQTMAALATKAGVEGHPIRINAPLQHMSKADIVREAHRLGLDAGVSWSCYDPTPDGKHCGLCDSCRLRSKGFEEAGLPDPTIYAARP

SEQ ID NO: 42337 - protein, 230 aa, Sphingobium indicum; identical to SEQ ID NO: 42332
  REGION 1..230: note = tr|A0A1L5BR58|A0A1L5BR58_SPHIB 7-cyano-7-deazaguanine synthase OS=Sphingobium indicum (strain DSM 16412 / CCM 7286 / MTCC 6364 / B90A) OX=861109; GN = queC PE=3 SV=1

SEQ ID NO: 42338 - protein, 230 aa, Sphingobium japonicum; identical to SEQ ID NO: 42332
  REGION 1..230: note = tr|D4Z5L4|D4Z5L4_SPHJU 7-cyano-7-deazaguanine synthase OS=Sphingobium japonicum (strain DSM 16413 / CCM 7287 / MTCC 6362 / UT26 / NBRC 101211 / UT26S) OX=452662; GN = e xsB PE=3 SV=1

SEQ ID NO: 42339 - protein, 237 aa, Sphingobium lactosutens
  REGION 1..237: note = tr|T0J4B8|T0J4B8_9SPHN 7-cyano-7-deazaguanine synthase OS=Sphingobium lactosutens DS20 OX=1331060; GN = queC PE=3 SV=1
MSSADGSALVLFSGGQDSATCLAWALDRFNHVETIGFDYGQRHRVELEVRDRLRAGMMELQADWRTKLGTDHMIALAALGQISDTSLTTGVEIAMAASGLPNTFVPGRNLLFLTFAAAVAYRRGIKHIVTGVCETDYSGYPDCRDDTIKALQVALNLGMEQRSVLHTPLMWIDKAATWSLAHALGGPDLVNLVRVESHTCYLGDRGTTHEWGAGCGHCPACELRRAGWQEFSARLDT

SEQ ID NO: 42340 - protein, 233 aa, Sphingobium lactosutens
  REGION 1..233: note = tr|T0IFQ5|T0IFQ5_9SPHN 7-cyano-7-deazaguanine synthase OS=Sphingobium lactosutens DS20 OX=1331060; GN = queC PE=3 SV=1
MVAGQDKFAVVLLSGGLDSMVAGALAREAGFRIFALSIDYNQRHRVELRAAARVAQALNAIRHIVLPLDLTAFGGSALTADIAVPKSGVGGDIPVTYVPARNTIFLSLTLGLAEVAGASDIFIGVNALDYSGYPDCRPEFIDAFQKMATLATKAGVEGHPIRINTPLQYMTKADIAREADRLGLDAGISWSCYDPTPDGKHCGLCDSCRLRSKGYQEAGLPDPTIYAVQPPKA

SEQ ID NO: 42341 - protein, 230 aa, unidentified; identical to SEQ ID NO: 42317
  source 1..230: note = Sphingobium limneticum
  REGION 1..230: note = tr|A0A5J5HF73|A0A5J5HF73_9SPHN 7-cyano-7-deazaguanine synthase QueC OS=Sphingobium limneticum OX=1007511 GN=queC PE=4 SV=1

SEQ ID NO: 42342 - protein, 230 aa, unidentified; identical to SEQ ID NO: 42317
  source 1..230: note = Sphingobium paulinellae
  REGION 1..230: note = tr|A0A5J5I633|A0A5J5I633_9SPHN 7-cyano-7-deazaguanine synthase QueC OS=Sphingobium paulinellae OX=2048545 GN=queC PE=4 SV=1

SEQ ID NO: 42343 - protein, 230 aa, Sphingobium quisquiliarum
  REGION 1..230: note = tr|T0H0L0|T0H0L0_9SPHN 7-cyano-7-deazaguanine synthase OS=Sphingobium quisquiliarum P25 OX=1329909; GN = queC PE=3 SV=1
MVANKGKFAVVLLSGGLDSMVAGGLAREAGFHVLALTIDYNQRHRVELRAAARVAGALNAMSHIVLPLDLTAFGGSALTADIAVPKGGVGSAIPITYVPARNTIFLSLTLGLAEVSGANDIFIGVNALDYSGYPDCRPEFIEAFQKMAALATKAGVEGQPLRINAPLQHMSKADIVREAHRLGLDAGLSWSCYDPAPDNRHCGLCDSCRLRAKGFQEAGLPDPTDYAAKP

SEQ ID NO: 42344 - protein, 233 aa, Sphingobium sp.
  REGION 1..233: note = tr|A0A196MR40|A0A196MR40_9SPHN 7-cyano-7-deazaguanine synthase OS=Sphingobium sp. TCM1; OX = 453246 GN=queC PE=3 SV=1
MVANQGKFAVVLLSGGLDSMVAGGLARESGYHLLALSIDYNQRHRVELNAAARVAESLGAMRHIVLPLDLTAFGGSALTADIAVPKGGVGGDIPVTYVPARNTIFLSLTLGLAEVAGASDIFIGVNALDYSGYPDCRPEFIDAFQKMATLATKAGVEGHPIRINTPLQYMSKADIAREAHRLGLDAGISWSCYDPTPDGKHCGLCDSCRLRSKGFEEAGLPDPTIYAVQPPKA

SEQ ID NO: 42345 - protein, 230 aa, Sphingobium sp.; identical to SEQ ID NO: 42334
  REGION 1..230: note = tr|A0A197BRZ5|A0A197BRZ5_9SPHN 7-cyano-7-deazaguanine synthase OS=Sphingobium sp. 20006FA; OX = 2056888 GN=queC PE=3 SV=1

SEQ ID NO: 42346 - protein, 231 aa, Sphingobium ummariense
  REGION 1..231: note = tr|T0IYW4|T0IYW4_9SPHN 7-cyano-7-deazaguanine synthase OS=Sphingobium ummariense RL-3 OX=1346791 GN=queC; PE = 3 SV=1
MAANNEGKFAVVLLSGGLDSMVAGGLAREAGFRVLALSIDYNQRHRLELRAAGRVATALNAIRHIVLPLDLRAFGGSALTADIAVPKGGVGAEIPITYVPARNTVFLSLTLGLAEVAGAQDIFIGVNALDYSGYPDCRPEFIDAFQKMAALATKAGVEGHPVRINAPLQHMSKADIVREAHRLGLDAGMSWSCYDPTPDGRHCGLCDSCRLRAKGFDEAGLPDPTVYATRP

SEQ ID NO: 42347 - protein, 211 aa, Sphingobium wenxiniae
  REGION 1..211: note = tr|A0A562K578|A0A562K578_SPHWJ 7-cyano-7-deazaguanine synthase OS=Sphingobium wenxiniae (strain DSM 21828 / JZ-1) OX=595605 GN=queC PE=3 SV=1
MVAGALAREAGFHLLALTIDYNQRHRVELRAASRIAKALNAMSHIVLPLDLTAFGGSALTADIAVPKGGVGADIPITYVPARNTIFLSLTLGLAEAAGANDIFIGVNALDYSGYPDCRAEFIEAFEKMAALATKAGVEGNPIRIKTPLQHMSKADIVREADRLGLDAGMSWSCYDPTPDGKHCGLCDSCRLRAKGFEEAGLPDPTGYATRP

SEQ ID NO: 42348 - protein, 230 aa, Sphingobium xenophagum
  REGION 1..230: note = tr|A0A401J587|A0A401J587_SPHXE 7-cyano-7-deazaguanine synthase OS=Sphingobium xenophagum; OX = 121428 GN=queC PE=3 SV=1
MASNERKFAVVLLSGGLDSMVAGGLAREAGYHLLALSIDYNQRHRVELRAAGRVAQALNAMRHIVLPLDLTAFGGSALTADIAVPKGGVGDDIPVTYVPARNTIFLSLTLGLAEVAGASDIFIGVNALDYSGYPDCRPEFIDAFQTMAALATKAGVEGHPIRINAPLQHMSKADIVREAHRLGLDAGVSWSCYDPTPDGKHCGLCDSCRLRSKGFEEAGLPDPTIYAARP

SEQ ID NO: 42349 - protein, 233 aa, Sphingobium yanoikuyae
  REGION 1..233: note = tr|A0A084EQT8|A0A084EQT8_SPHYA 7-cyano-7-deazaguanine synthase OS=Sphingobium yanoikuyae; OX = 13690 GN=queC PE=3 SV=1
MVAQNGKFAVVLLSGGLDSMVAGGLAREAGYRVLALTIDYNQRHRVELRAAAKVATALNAMSHIVLPLDLTAFGGSALTADIEVPKGGVGDEIPVTYVPARNTIFLSLTLGLAEVASASDIYIGVNALDYSGYPDCRPEFIDAFQKMATLATKAGVEGHPIRINTPLQFMTKADIVREAHRLGLDAGLSWSCYDPTPDNKHCGLCDSCRLRSKGFEEAGLPDPTVYATRPGKA

SEQ ID NO: 42350 - protein, 233 aa, Sphingobium yanoikuyae
  REGION 1..233: note = tr|A0A0J9CWX7|A0A0J9CWX7_SPHYA 7-cyano-7-deazaguanine synthase OS=Sphingobium yanoikuyae; OX = 13690 GN=queC PE=3 SV=1
MVAQNGEFAVVLLSGGLDSMVAGGLAREAGYRVLALTIDYNQRHRVELRAAAKVATALNAMSHIVLPLDLTAFGGSALTADIEVPKGGVGDEIPVTYVPARNTIFLSLTLGLAEVASASDIYIGVNALDYSGYPDCRPEFIDAFQKMATLATKAGVEGHPIRINTPLQFMTKADIVREAHRLGLDAGLSWSCYDPTPDNKHCGLCDSCRLRSKGFEEAGLPDPTVYATRPGKA

SEQ ID NO: 42351 - protein, 227 aa, unidentified
  source 1..227: note = Sphingomonadaceae bacterium
  REGION 1..227: note = tr|A0A257DP93|A0A257DP93_9SPHN 7-cyano-7-deazaguanine synthase OS=Sphingomonadaceae bacterium PASS1 OX=2015579 GN=queC PE=3 SV=1
MTAKSKSAIVLLSGGLDSMVVAGLAREAGYNLIALTIDYNQRHRIELDSAATIAAHLGAIEHIVLPLDLTRFGGSALTADIAVPKEGVEENAIPATYVPARNTIFLSLCLGLAEARGARDLWIGVNALDYSGYPDCRPEFIRAFEGMANLATKAGVEGDHFSVHTPLLHMSKADIATQAARLGLDAGMSWSCYDPTPDNNACGRCDSCRLRAKGFADAGLPDPTIYA

SEQ ID NO: 42352 - protein, 234 aa, unidentified
  source 1..234: note = Sphingomonadaceae bacterium
  REGION 1..234: note = tr|A0A520WWU7|A0A520WWU7_9SPHN 7-cyano-7-deazaguanine synthase OS=Sphingomonadaceae bacterium OX=1930536 GN=queC PE=3 SV=1
MQSDSPGAAAILLSGGLDSMVTAGLAREQGFVLHALTINYGQRHIVELQAARAIATRLQVARHVELSVDLRALGGSALTDNIDVPKDGIGDDIPVTYVPARNLVFLSLTTAFAEASGAHDIFIGVNALDYSGYPDCRPEFIQSFMETANLATRAGVEEGSPFRIHAPLQHMSKADIARETNRLGLDSALSWSCYDPLPEGDPCGACDSCRLRRKGFADAGLVDGLKYPADAPAV

SEQ ID NO: 42353 - protein, 221 aa, unidentified
  source 1..221: note = Sphingomonadales bacterium
  REGION 1..221: note = tr|A0A258JDT4|A0A258JDT4_9SPHN 7-cyano-7-deazaguanine synthase OS=Sphingomonadales bacterium 32-65-25 OX=1970594 GN=queC PE=3 SV=1
MNRLAVVLLSGGLDSTTVAAIARAQGWRILALTIDYNQRHRIELEHAARVAETLGAERHIVLPLDLTGFGGSALTADIDVPKGGVEPGIPVTYVPARNTIFLSVALGWAEAAGARDLFIGVNALDFSGYPDCRPEFIAAFEAMANTATKAGVEGEGFKVHTPLMTLDKAGIIAAAQAVNAPLHLTWSCYDPTPAGTPCGLCDSCRLRGKGFAEAGIADPAL

SEQ ID NO: 42354 - protein, 239 aa, unidentified
  source 1..239: note = Sphingomonadales bacterium
  REGION 1..239: note = tr|A0A4Q3ACW3|A0A4Q3ACW3_9SPHN 7-cyano-7-deazaguanine synthase OS=Sphingomonadales bacterium OX=1978525 GN=queC PE=3 SV=1
MAERIEDAAGSPAVVLLSGGLDSMVVAALAKERGYAVHALSIDYGQRHRRELEAARGIAERLGVSRHVVLPLDLTVFGGSALTADIAVPKDGVEEGIPVTYVPARNLVFLALTTAFAETAGARDLFIGVNAIDYSGYPDCRPEFIASFAETARLGTKAGVEGRPFAIHAPLQHMSKADIAAECARLGLDPAWSWSCYDPTPEGIACGTCDSCRLRRKGFADAGVADSTPHAEDIATRAG

SEQ ID NO: 42355 - protein, 232 aa, Sphingomonas adhaesiva
  REGION 1..232: note = tr|A0A2A4I7X4|A0A2A4I7X4_9SPHN 7-cyano-7-deazaguanine synthase OS=Sphingomonas adhaesiva; OX = 28212 GN=queC PE=3 SV=1
MTHPTPAVALISGGLDSMVSAALAREAGYPLLALSIDYNQRHQIELAAARRVARALGAERHVVLPIDLSAFGGSALTDSAIDVPKDGVGDAIPVTYVPARNTIFLSLALGWAEAAGARDLFLGVNALDYSGYPDCRPEFIAAFERLAELATKAGVEGAPFRFHAPLQHMTKADIVREGARLGLDMGLSWSCYDPAPGAKHCGLCDSCRLRHKGFEEAGIADPTVYAVAPPAP

SEQ ID NO: 42356 - protein, 234 aa, Sphingomonas aerolata
  REGION 1..234: note = tr|A0A2T4YTJ7|A0A2T4YTJ7_9SPHN 7-cyano-7-deazaguanine synthase OS=Sphingomonas aerolata; OX = 185951 GN=queC PE=3 SV=1
MTSSAPLAVALVSGGLDSMVSAAMLRESGRRLLALSFDYNQRHRVELDAARRVATALGAERHIVLPMDLSAFGGSALTADIDVPKDGVGTDDAGGIPVTYVPARNTIFLSLALGWAEAAGARDIYIGVNALDYSGYPDCRPEFIAAFEGLAELATKAGVEGDPFRIQAPLQHMTKADIVREGTRLGLDLGLSWSCYDPTPDGKHCGECDSCRLRSRGFDEAGIADPTVYAVKPV

SEQ ID NO: 42357 - protein, 235 aa, Sphingomonas aquatilis
  REGION 1..235: note = tr|A0A511Q7A4|A0A511Q7A4_9SPHN 7-cyano-7-deazaguanine synthase OS=Sphingomonas aquatilis NBRC 16722 OX=1219039 GN=queC PE=3 SV=1
MNQNQAAPLAVVLVSGGLDSMISAASAREQGYRVLALSVDYNQRHRVELAAARRVANMLGAERHIILPLDLSAFGGSALTDDIAVPKDGVGTEEGGGIPVTYVPARNTIFLSLALGWAEAAGARDLFIGVNALDYSGYPDCRPEFIAAFEGLAEIATKAGVEGQRFTIHAPLQHMTKADIVREGQRLGVDMGLSWSCYDPAPGGVHCGTCDSCRLRSKGFEDAGIPDPTVYAVRV

SEQ ID NO: 42358 - protein, 197 aa, Sphingomonas aquatilis
  REGION 1..197: note = tr|A0A511Q3R6|A0A511Q3R6_9SPHN 7-cyano-7-deazaguanine synthase OS=Sphingomonas aquatilis NBRC 16722 OX=1219039 GN=queC PE=3 SV=1
MKAILLSGGMDSIALAYWLRPAFAFTMDYGQAAAAAEIDASVQIAHDLGIDHEVIRVDCSSLGSGDMAGSTALDVAPASEWWPFRNQLLVTLAGMRAVAMGVTEIMVGSVLSDGVHADGRPAFYGTLDLLMREQEGGLRVTAPAIGMSTVDLIRQSGIPRDLLAWAHSCHTGPLACGSCRGCVKHLETTLALGGVGY

SEQ ID NO: 42359 - protein, 238 aa, Sphingomonas aurantiaca
  REGION 1..238: note = tr|A0A2T5GTP8|A0A2T5GTP8_9SPHN 7-cyano-7-deazaguanine synthase OS=Sphingomonas aurantiaca; OX = 185949 GN=queC PE=3 SV=1
MTSPAPYAVALVSGGLDSMVSAALAREAGQRVLALSFDYNQRHRIELDAARRVAQALGAERHIVLPMDLSAFGGSALTADIDVPKDGVGTEDGGGIPVTYVPARNTIFLSLALGWAEASGARDIYIGVNALDYSGYPDCRPEFIAAFEGLAELATKAGVEGDPFRIQAPLQMMTKADIVREGTRLGLDLGLSWSCYDPTPDGKHCGACDSCRLRSKGFEDAGIADPTVYAARPGTEHG

SEQ ID NO: 42360 - protein, 462 aa, Sphingomonas aurantiaca
  REGION 1..462: note = tr|A0A2T5GJC2|A0A2T5GJC2_9SPHN 7-cyano-7-deazaguanine synthase in queuosine biosynthesis; OS = Sphingomonas aurantiaca OX=185949 GN=C8J26_3180 PE=4; SV = 1
MTAKAYHVADAVPHRVDAIEPGEVPRDGARIATLGETITLSIEGLKDFFFASWRYDLIDLLVIAAAVEYCDLSIRRPAWGWARAFDMLVAVHEEEKWSTPPVRHALEEALAFLTGDRWSVSFTKRRNSVVKITPRRLDLNTPDKVIMPYSDGLDSRAVAAIVEEQEKGGLVRVRLGSKGVDSAKVPRKKRRFATVPFEVKLGKRQRVESSARSRGFKFAVITGIAAQLAPVDRIVVTESGQGALGPVLASSGQSYPDYRVHPAFTRRIEHLFLALTNKAPTYEYPRIWNTKGETLAMASALANPPTWHDTRSCWQDSRRVSFEGERRQCGVCAACMLRRMSIHSAGIDEPASRYIWEDLGAAEMEDGVVAGFSGMSPAFRDYGLAGILHLDHLAALSGSALHERTVRRVARETADALGIEMAEGERALTGLLERHRAEWLGFLSSLGSQSFVARVAMVSPWH

SEQ ID NO: 42361 - protein, 231 aa, unidentified
  source 1..231: note = Sphingomonas carotinifaciens
  REGION 1..231: note = tr|A0A1G7KIS9|A0A1G7KIS9_9SPHN 7-cyano-7-deazaguanine synthase OS=Sphingomonas carotinifaciens OX=1166323 GN=queC PE=3 SV=1
MTSTAPLAVALVSGGLDSMISAALARAAGYRLLALSVDYNQRHQVELAAAARIARALGAERHIVLPLDLSAFGGSALTADIAVPKDGVQPGIPVTYVPARNTIFLSLALGWAEAAGARDLFIGVNALDYSGYPDCRPEFIAGFERLAELATKAGVEGEPFKIQAPLQHMTKADIVREGTRLGLDLGMSWSCYDPAPGDLHCGACDSCRLRSKGFADAGIADPTAYAVSPQG

SEQ ID NO: 42362 - protein, 235 aa, Sphingomonas changbaiensis
  REGION 1..235: note = tr|A0A0E9MJG5|A0A0E9MJG5_9SPHN 7-cyano-7-deazaguanine synthase OS=Sphingomonas changbaiensis NBRC 104936 OX=1219043 GN=queC PE=3 SV=1
MTLQSEPALVLFSGGQDSATCLAWALDRFARVETVGFDYGQRHRVELDCRASLRDGMGKVWPGKLGEDHLLDLSLLGQISDTALTRDAEIAFDADGLPSTFVPGRNLIFFNLAAAIGYRRGIRHLVGGMCETDYSGYPDCRDDTLKALQVALGLGLDRRIVIHAPLMWRDKAATWALTAELGGDALVELIRTESHSCYLGDRGTLHDWGYGCGTCPACELRMRGWRDYRRSRSSP

SEQ ID NO: 42363 - protein, 228 aa, Sphingomonas desiccabilis
  REGION 1..228: note = tr|A0A4Q2IZJ8|A0A4Q2IZJ8_9SPHN 7-cyano-7-deazaguanine synthase OS=Sphingomonas desiccabilis OX=429134 GN=queC PE=3 SV=1
MTDQPLAVALVSGGLDSMVSAALAREAGYRLLALSVDYNQRHQIELAAAGRVAAALGAERHVTLSLDLSAFGGSALTADIAVPKDGVAPGIPITYVPARNTIFLSLSLGWAEAAGARDLFIGVNALDYSGYPDCRPEFIAGFEHLAALATKAGVEGEGFKIHAPLQHMTKADIVREGTRLGLDLGISWSCYDPQGDLHCGLCDSCRLRSKGFEEAGVPDPTRYATAAA

SEQ ID NO: 42364 - protein, 214 aa, Sphingomonas dokdonensis
  REGION 1..214: note = tr|A0A245ZVS2|A0A245ZVS2_9SPHN 7-cyano-7-deazaguanine synthase OS=Sphingomonas dokdonensis OX=344880 GN=queC PE=3 SV=1
MISAAIAREAGYRIFALSIDYNQRHQVELAAARRIAQTLGAVRHVVLPIDLSAFGGSALTADISVPKDGVGTDIPVTYVPARNTVFLSLALAWAEAAGARSLFIGVNALDYSGYPDCRPEFIAGFEHLAELATKAGVEGEAFRIHAPLQHMTKADIVREGTRLGLDLGMSWSCYDPSPAGTHCGLCDSCRLRHKGFEDAGIADPTIYAVAPPAP

SEQ ID NO: 42365 - protein, 229 aa, unidentified
  source 1..229: note = Sphingomonas edaphi
  REGION 1..229: note = tr|A0A418PYS9|A0A418PYS9_9SPHN 7-cyano-7-deazaguanine synthase OS=Sphingomonas edaphi; OX = 2315689 GN=queC PE=3 SV=1
MSTRQAVVLLSGGLDSMVCAALAREEGFSVLALTIDYNQRHRVELEAAKRIATDLADRHIILPLDLTAFGGSALTSDIDVPKDGVGADGDGGIPVTYVPARNTVFLSLALAWAEAAGAHDLFVGVNALDYSGYPDCRPAFIEAFEELANKATRDGVEGRGFTVHAPLQNMTKADIAREAARLGLDAGISHSCYDPAPDGAACGYCDACRLRAKGFEEAGLVDPTRYVAR

SEQ ID NO: 42366 - protein, 227 aa, unidentified
  source 1..227: note = Sphingomonas elodea
  REGION 1..227: note = tr|A0A495F1N8|A0A495F1N8_SPHEL 7-cyano-7-deazaguanine synthase OS=Sphingomonas elodea; OX = 179878 GN=queC PE=3 SV=1
MTQSIAIALVSGGLDSMVSAARAREDGHRLLALSIDYNQRHKVELEAAAKIAAMLGAERHVVLPLDLRAFGGSALTADIDVPKTGVGSDIPVTYVPARNTIFLSLALGWAEAAGARDLYIGVNALDYSGYPDCRPEFIAGFEKLAELATKAGVEGEPFRIQAPLQNMSKADIVREAARLGLDAGLSWSCYDPTPEGLHCGLCDSCRLRSRGFEEAGLPDPTRYATHP

SEQ ID NO: 42367 - protein, 232 aa, unidentified
  source 1..232: note = Sphingomonas endophytica
  REGION 1..232: note = tr|A0A147I8S5|A0A147I8S5_9SPHN 7-cyano-7-deazaguanine synthase OS=Sphingomonas endophytica OX=869719 GN=queC PE=3 SV=1
MTSPTPAVALVSGGLDSLVSAALAREAGHPLLALSIDYNQRHQVELAAARRIARALGAVRHVVLPIDLSAFGGSALTDESIAVPKEGVGDAIPVTYVPARNTIFLSLALGWAEAAGARDVFLGVNALDYSGYPDCRPEFISAFEHLAELATKAGVEGAPFRFHAPLQHMTKADIVREGARLGLDMGMSWSCYDPAPGAKHCGLCDSCRLRHKGFEEAGIADPTDYAVIPPLS

SEQ ID NO: 42368 - protein, 234 aa, Sphingomonas faeni
  REGION 1..234: note = tr|A0A2T5U4K3|A0A2T5U4K3_9SPHN 7-cyano-7-deazaguanine synthase OS=Sphingomonas faeni; OX = 185950 GN=queC PE=3 SV=1
MTSPAPFAVALVSGGLDSMVSAALAREAGQRVLALSFDYNQRHRIELDAARRVASALGAERHIVLPMDLSAFGGSALTADIDVPKDGAGTEDGGGIPVTYVPARNTIFLSLALGWAEAAGARDIYIGVNALDYSGYPDCRPEFIAAFEGLAELATKAGVEGEPFRIQAPLQMMTKADIVREGTRLGLDLGLSWSCYDPTPAGEHCGECDSCRLRSRGFDEAGIADPTRYAVKPA

SEQ ID NO: 42369 - protein, 230 aa, Sphingomonas fennica
  REGION 1..230: note = tr|A0A2T4HQ09|A0A2T4HQ09_9SPHN 7-cyano-7-deazaguanine synthase OS=Sphingomonas fennica; OX = 114404 GN=queC PE=3 SV=1
MSQDRPGAVVLLSGGLDSMVAGGIAREQGFAINALTVNYNQRHSVELAAAARIAAMLGAARHITMPLDLSLFGGSALTDAIDVPKTGVEEDAIPVTYVPARNTIFLSLALGWAEACGARDIFLGVNALDYSGYPDCRPDFIQAFQNLADIATKAGVEGRGFTIHSPLLHMTKADIATEAVRLGLDAGQSWSCYDPTPEGLHCGLCDSCRLRQRGYEDAGIPDPTIYAARP

SEQ ID NO: 42370 - protein, 227 aa, unidentified
  source 1..227: note = Sphingomonas gei
  REGION 1..227: note = tr|A0A4S1X339|A0A4S1X339_9SPHN 7-cyano-7-deazaguanine synthase OS=Sphingomonas gei; OX = 1395960 GN=queC PE=3 SV=1
MTDSVAVALISGGLDSMVSAALAREAGHRLLALSIDYNQRHHVELAAARRIAQVLGAERHVVLPLDLRAFGGSALTAEIDVPKDGVGDDIPVTYVPARNTIFLSLALGWAEAAGARDLYIGVNALDYSGYPDCRPEFIAGFEKLAELATKAGVEGEPFHIRAPLQDMTKADIVREGMRLGLDLGMSWSCYDPAPGSVHCGLCDSCRLRAKGFEEAGVPDPTGYATAP

SEQ ID NO: 42371 - protein, 232 aa, Sphingomonas ginsenosidimutans
  REGION 1..232: note = tr|A0A2A4I0T4|A0A2A4I0T4_9SPHN 7-cyano-7-deazaguanine synthase OS=Sphingomonas ginsenosidimutans OX=862134 GN=queC PE=3 SV=1
MTHQTPAVALISGGLDSMVSAALAREAGYPLLALSIDYNQRHQIELAAARRVAHALGAVRHVVLPIDLSAFGGSALTDSAIDVPKDGVGEAIPVTYVPARNTIFLSLALGWAEAAGARDLFLGVNALDYSGYPDCRPEFIAAFERLAELATKAGVEGAPFRFHAPLQHMTKADIVREGARLGLDMGLSWSCYDPAPGAKHCGLCDSCRLRHKGFEEAGIADPTVYAVKPPAP

SEQ ID NO: 42372 - protein, 241 aa, unidentified
  source 1..241: note = Sphingomonas ginsenosidivorax
  REGION 1..241: note = tr|A0A5C6UA56|A0A5C6UA56_9SPHN 7-cyano-7-deazaguanine synthase OS=Sphingomonas ginsenosidivorax OX=862135 GN=queC PE=3 SV=1
MTSSPIAVALVSGGLDSMVSAAAAREAGYRLLALSVDYNQRHRVELAAARRIADALGAERHIVLPLDLSAFGGSALTADIAVPKDGVGTEDGGGIPVTYVPARNTIFLSLALGWAEAAGARDLFIGVNALDYSGYPDCRPEFIQAFEGLAELATKAGVEGEPFRIRAPLQHMTKADIVREGTRLGLDMGMSWSCYDPAPGGVHCGQCDSCRLRSKGFEDAGIADPTIYATVPGVSAITEGS

SEQ ID NO: 42373 - protein, 236 aa, Sphingomonas glacialis
  REGION 1..236: note = tr|A0A502FZX6|A0A502FZX6_9SPHN 7-cyano-7-deazaguanine synthase OS=Sphingomonas glacialis; OX = 658225 GN=queC PE=3 SV=1
MTNQPVSAAPAGVAPLAVVLVSGGLDSMVAAAFAREAGYRLLALSVDYNQRHRLELASARRIAHVLGAERHVVLPLDLAAFGGSALTADIDVPKDGVQPGIPVTYVPARNTIFLSLALGWAEAAGARDLFIGVNALDYSGYPDCRPEFIAAFEGLAELATKAGVEGSPFRIHAPLQDMTKADIVREAARLNIDPALSWSCYDPAPGGLHCGVCDSCRLRKKGFEEAGLPDPTAYAV

SEQ ID NO: 42374 - protein, 229 aa, unidentified
  source 1..229: note = Sphingomonas guangdongensis
  REGION 1..229: note = tr|A0A285QEL3|A0A285QEL3_9SPHN 7-cyano-7-deazaguanine synthase OS=Sphingomonas guangdongensis OX=1141890 GN=queC PE=3 SV=1
MNPEHTAAVVLVSGGLDSMVSAARAKEDGHRLFALSIDYNQRHRLELAAARRIAQHLGAERHVVLPLDLSAFGGSALTADIAVPKTGVEPGIPVTYVPARNTIFLSLALGWAEAAGARDLYIGVNALDYSGYPDCRPEFIAAFEGLAELATKAGVEGAPFRIRAPLQHLTKAEIVTEAARLGLDAGMSWSCYDPAPGGVHCGLCDSCRLRAKGFEDAGLPDPTVYAVRP

SEQ ID NO: 42375 - protein, 230 aa, Sphingomonas haloaromaticamans; identical to SEQ ID NO: 42369
  REGION 1..230: note = tr|A0A1S1HGC8|A0A1S1HGC8_9SPHN 7-cyano-7-deazaguanine synthase OS=Sphingomonas haloaromaticamans OX=653954 GN=queC PE=3 SV=1

SEQ ID NO: 42376 - protein, 197 aa, unidentified
  source 1..197: note = Sphingomonas hengshuiensis
  REGION 1..197: note = tr|A0A2W4Z7M4|A0A2W4Z7M4_9SPHN 7-cyano-7-deazaguanine synthase OS=Sphingomonas hengshuiensis OX=1609977 GN=DI632_06660 PE=3 SV=1
MRAVLLSGGMDSIALAHWKRPEVAITIDYGQKAAATELAAAAEVARGLAMRHETLRVDCSSLGSGDMVGGAPLAAAPVTEWWPFRNQMLLTLAGMRAVAIGIVELMVGSVASDGSHADGRAEFYAAADRLMSLQEGGIRVTAPAIGMTTAELIRTSGVSREMLGWAHSCHTGPLACGDCRGCHKHFQVTEELYGDAY

SEQ ID NO: 42377 - protein, 233 aa, unidentified
  source 1..233: note = Sphingomonas hengshuiensis
  REGION 1..233: note = tr|A0A2W5BCI5|A0A2W5BCI5_9SPHN 7-cyano-7-deazaguanine synthase OS=Sphingomonas hengshuiensis OX=1609977 GN=queC PE=3 SV=1
MTNNPLSVVLVSGGLDSMVSAALAREAGHRLLALSIDYNQRHLVELAAARRIATALGAERHVVLPLDLSAFGGSALTDASIAVPKDGVVEDVIPVTYVPARNTIFLSLALGWAEAAGARDLWIGVNALDYSGYPDCRPEFIAGFERLAELATRAGVEGDPFRIHAPLQTMTKADIAREAARLGIDAGMSWSCYDPVGELHCGQCDSCRLRARGFVEAGLPDPTRYAERPDTGR

SEQ ID NO: 42378 - protein, 230 aa, Sphingomonas histidinilytica
  REGION 1..230: note = tr|A0A1T5C4B8|A0A1T5C4B8_9SPHN 7-cyano-7-deazaguanine synthase OS=Sphingomonas histidinilytica OX=439228 GN=queC PE=3 SV=1
MSDIANKEGRRAIVLLSGGLDSMVSGGIAREQGFALAALTIDYNQRHRVELEAAKRVAAALDVDRHVTLPLNLRAFGGSSLTDDIDVPKDGVMPGIPSTYVPARNTIFLSLALGFAEATGARDIFLGVNALDYSGYPDCRPEFIAAFQHLADLATKMGVEGQGFTIHAPLQHMTKADIAREAARLGLDAGMSWSCYDPTQDGKHCGLCDSCRLRSKGFAEAGLADPTVYA

SEQ ID NO: 42379 - protein, 230 aa, unidentified
  source 1..230: note = Sphingomonas indica
  REGION 1..230: note = tr|A0A1X7FZ19|A0A1X7FZ19_9SPHN 7-cyano-7-deazaguanine synthase OS=Sphingomonas indica; OX = 941907 GN=queC PE=3 SV=1
MTQSQKFAVVLLSGGLDSMVAAAQAREAGYGLFALTVDYNQRHRIELEAAARIATALGAARHVVLPLDLSAFGGSALTADIAVPKGGVAAEGIPITYVPARNTIFLSLALGWAEAAGARDLFIGVNALDYSGYPDCRPEFVEAFEAMAARATKAGVEGDRFVVHTPLMEMTKADIAAEAARLGLDAGMSWSCYDPTTDGRHCGLCDSCRLRAKGFAEAGLADPTVYAARP

SEQ ID NO: 42380 - protein, 230 aa, unidentified
  source 1..230: note = Sphingomonas jatrophae
  REGION 1..230: note = tr|A0A1I6JY90|A0A1I6JY90_9SPHN 7-cyano-7-deazaguanine synthase OS=Sphingomonas jatrophae; OX = 1166337 GN=queC PE=3 SV=1
MTQTSPAAVVLLSGGLDSMTVAALARERGFRLMALTIDYNQRHKVELDAARRLAAALGAERHVILPVDLTAFGGSALTADIDVPKDGLKDDIPVTYVPARNTIFLSLALGWAEATGARDLFLGINALDYSGYPDCRREFIDAFEALAAVATKAGTEGDRFRVHAPLVAMTKADIVREAARLGLDAGMSWSCYDPAPGDLHCGLCDSCRLRSRGFVEAGVVDPTRYAVGPA

SEQ ID NO: 42381 - protein, 232 aa, unidentified
  source 1..232: note = Sphingomonas jeddahensis
  REGION 1..232: note = tr|A0A1V2EUM8|A0A1V2EUM8_9SPHN 7-cyano-7-deazaguanine synthase OS=Sphingomonas jeddahensis OX=1915074 GN=queC PE=3 SV=1
MSNDQSSAVVLVSGGLDSMISAALAREAGHTIYALSIDYNQRHQVELAAARRIAKTLGAVRHVVLPIDLSAFGGSALTADIDVPKDGVGSDIPVTYVPARNTVFLSLALAWAEATGSRALYIGVNALDYSGYPDCRPEFIAGFERLAELATKAGVEGHPFRIHAPLQHMTKADIVREGTRLGLDLGLSWSCYDPAPGGLHCGLCDSCRLRHKGFDDARVVDPTAYAVTPPAP

SEQ ID NO: 42382 - protein, 229 aa, Sphingomonas koreensis
  REGION 1..229: note = tr|A0A1L6JEX4|A0A1L6JEX4_9SPHN 7-cyano-7-deazaguanine synthase OS=Sphingomonas koreensis; OX = 93064 GN=queC PE=3 SV=1
MTDSQIAVALVSGGLDSFVSAARARADGYRLLALSVDYNQRHHVELAAARRIAQALGAERHVVLPLDLSQFGGSALTADIDVPKDGVGEDIPVTYVPARNTIFLSLALGWAEAAGARDLYIGVNALDYSGYPDCRPEFVEGFEKLAELATKAGVEGAPFRIRAPLQFMSKADIVQEGMRLGLDLGLSWSCYDPAPGGLHCGLCDSCRLRSKGFEEAGVPDPTRYAETAG

SEQ ID NO: 42383 - protein, 229 aa, Sphingomonas koreensis
  REGION 1..229: note = tr|A0A2M8WG47|A0A2M8WG47_9SPHN 7-cyano-7-deazaguanine synthase OS=Sphingomonas koreensis; OX = 93064 GN=queC PE=3 SV=1
MTDSQIAVALVSGGLDSFVSAARARADGYRLLALSVDYNQRHHVELAAARRIAQALGAERHVVLPLDLSQFGGSALTADIDVPKDGVGEDIPVTYVPARNTIFLSLALGWAEAAGARDLYIGVNALDYSGYPDCRPEFIEGFEKLAELATKAGVEGAPFRIRAPLQFMSKADIVQEGMRLGLDLGLSWSCYDPAPGGLHCGLCDSCRLRSKGFEEAGVPDPTRYAETAG

SEQ ID NO: 42384 - protein, 229 aa, unidentified
  source 1..229: note = Sphingomonas laterariae
  REGION 1..229: note = tr|A0A239CZQ4|A0A239CZQ4_9SPHN 7-cyano-7-deazaguanine synthase OS=Sphingomonas laterariae; OX = 861865 GN=queC PE=3 SV=1
MNEQKPGAVVLLSGGLDSMVAAGIARERGFAINALTINYNQRHLVELAAARRIAAMLDVARHVTLPLDLTLFGGSALTDDIAVPKTGVGEEIPVTYVPARNTIFLSLALGWAEACGAYDIFLGVNALDYSGYPDCRPEFVEKFQELADLATKAGVEGRRFTIHSPLLHMTKADIAREADRLGLDAGQSWSCYDPAPGGKHCGLCDSCRLRARGYEEAGIPDPTQYATRP

SEQ ID NO: 42385 - protein, 236 aa, Sphingomonas melonis
  REGION 1..236: note = tr|A0A175Y0G1|A0A175Y0G1_9SPHN 7-cyano-7-deazaguanine synthase OS=Sphingomonas melonis TY; OX = 621456 GN=queC PE=3 SV=1
MMNQNQAAPLAVVLVSGGLDSMISAASAREQGYRVLALSVDYNQRHRVELAAARRVANVLGAERHIILPLDLSAFGGSALTDDIAVPKDGVGTEEGGGIPVTYVPARNTIFLSLALGWAEAAGARDLFIGVNALDYSGYPDCRPEFIAAFEGLAEIATKAGVEGQRFAIHAPLQHMTKADIVREGQRLGVDMGLSWSCYDPAPGGVHCGTCDSCRLRSKGFEDAGIPDPTVYAVRV

SEQ ID NO: 42386 - protein, 236 aa, Sphingomonas melonis
  REGION 1..236: note = tr|A0A0D1K3V0|A0A0D1K3V0_9SPHN 7-cyano-7-deazaguanine synthase OS=Sphingomonas melonis; OX = 152682 GN=queC PE=3 SV=1
MMNQNQAAPLAVVLVSGGLDSMISAASAREQGYRVLALSVDYNQRHRVELAAARRVANVLGAERHIILPLDLSAFGGSALTDDIAVPKDGVGTEEGGGIPVTYVPARNTIFLSLALGWAEAAGARDLFIGVNALDYSGYPDCRPEFIAAFEGLAEIATKAGVEGQRFTIHAPLQHMTKADIVREGQRLGVDMGLSWSCYDPAPGGVHCGTCDSCRLRSKGFEDAGIPDPTVYAVRV

SEQ ID NO: 42387 - protein, 214 aa, Sphingomonas mucosissima
  REGION 1..214: note = tr|A0A245ZT27|A0A245ZT27_9SPHN 7-cyano-7-deazaguanine synthase OS=Sphingomonas mucosissima OX=370959 GN=queC PE=3 SV=1
MISAALAREAGHQIFALSIDYNQRHQVELAAARRIARALGAVRHVVLPIDLSAFGGSALTAEIDVPKDGVGGDIPVTYVPARNTVFLSLALAWAEAAGARSLYIGVNALDYSGYPDCRPEFIAGFERLAELATKAGVDGEAFRIHAPLQHMTKADIVREGTRLGLDLGLSWSCYDPTPAGTHCGLCDSCRIRHKGFEDAAIADPTIYAVTPPAP

SEQ ID NO: 42388 - protein, 227 aa, unidentified
  source 1..227: note = Sphingomonas naasensis
  REGION 1..227: note = tr|A0A4S1W802|A0A4S1W802_9SPHN 7-cyano-7-deazaguanine synthase OS=Sphingomonas naasensis; OX = 1344951 GN=queC PE=3 SV=1
MTDSVAIALISGGLDSMVSAARARADGHRLLALSIDYNQRHQIELAAARRIAHALGAERHVVLPLDLRAFGGSALTAEIDVPKTGVGDDIPVTYVPARNTIFLSLALGWAEAAGARDIYIGVNALDYSGYPDCRPEFIAGFERLAELATKAGVEGAPFHIRAPLQDMTKADIVREGMRLGLDLGMSWSCYDPAPGGLHCGLCDSCRLRSKGFEEAGVPDPTGYAAAP

SEQ ID NO: 42389 - protein, 232 aa, unidentified
  source 1..232: note = Sphingomonas olei
  REGION 1..232: note = tr|A0A4S4G9N4|A0A4S4G9N4_9SPHN 7-cyano-7-deazaguanine synthase OS=Sphingomonas olei; OX = 1886787 GN=queC PE=3 SV=1
MTNDQPSAVVLVSGGLDSMISAALAREAGYRLYALSIDYNQRHQVELAAARQIARQLGAVRHVVLPIDLSAFGGSALTADIDVPKDGVGEGIPITYVPARNTVFLSLALAWAETVGARALYIGVNALDYSGYPDCRPEFIAGFENLAELATKAGVEGHAFRIQAPLQHMTKADIVREGDRLGLDLGLSWSCYDPAPGGLHCGLCDSCRLRHKGFQDAGIVDPTAYATTPPAP

SEQ ID NO: 42390 - protein, 235 aa, unidentified
  source 1..235: note = Sphingomonas oleivorans
  REGION 1..235: note = tr|A0A2T5FTE9|A0A2T5FTE9_9SPHN 7-cyano-7-deazaguanine synthase OS=Sphingomonas oleivorans; OX = 1735121 GN=queC PE=3 SV=1
MSHIVTNGRKAVVLLSGGLDSMVAAGLAREAGYGLLALTINYNQRHAVELASAARIAEALGVERHIVLPLDLTLFGGSALTSDMAVPKEGLTPGIPTTYVPARNTIFLSLTLGFAEASGARDLFIGVNALDYSGYPDCRPEFIAAFQAMADLATKAGVEGNGFTVHTPLQYMSKADIAREADRLGLDAGMSWSCYDPADGLHCGRCDSCRLRSRGYKEAGLPDPTRYAVRPEEAA

SEQ ID NO: 42391 - protein, 227 aa, Sphingomonas oligophenolica
  REGION 1..227: note = tr|A0A502CRV4|A0A502CRV4_9SPHN 7-cyano-7-deazaguanine synthase OS=Sphingomonas oligophenolica OX=301154 GN=queC PE=3 SV=1
MTTAPLAVVLVSGGLDSMIAAASAREAGYRLLALSIDYNQRHRIELAAARRVARTLGAERHIVMPMDLSAFGGSALTDDIAVPKDGVQPGIPVTYVPARNTIFLSLALGWAEAAGARDLFIGVNALDYSGYPDCRPEFIAAFESLAELATKAGVEGEPFRIHAPLQDMTKADIVREGTRLGVDMGISWSCYDPAPGGIHCGRCDSCRLRAKGFDEAGIADPTVYAAS

SEQ ID NO: 42392 - protein, 227 aa, unidentified
  source 1..227: note = Sphingomonas panacis
  REGION 1..227: note = tr|A0A1B3Z9C2|A0A1B3Z9C2_9SPHN 7-cyano-7-deazaguanine synthase OS=Sphingomonas panacis; OX = 1560345 GN=queC PE=3 SV=1
MTRGNTLAVALISGGLDSMVSAARAREDGHRLLALSIDYNQRHQIELAAARRIASVLGAERHVVLPLDLSAFGGSALTADIDVPKDGVGDGIPVTYVPARNTIFLSLALGWAEAAGARDLYIGVNALDYSGYPDCRPEFIKAFEDMAEVATKAGVEGAPFRIQAPLQHMTKADIVREAARLGLDAGMSWSCYDPTQEGLHCGRCDSCRLRAKGFIEAGLPDPTAYAA

SEQ ID NO: 42393 - protein, 236 aa, Sphingomonas parapaucimobilis
  REGION 1..236: note = tr|A0A0A1W5B7|A0A0A1W5B7_9SPHN 7-cyano-7-deazaguanine synthase OS=Sphingomonas parapaucimobilis NBRC 15100 OX=1219049 GN=queC PE=3 SV=1
MTDERALVLFSGGQDSATCLAWALETFGWVETLGFDYGQRHRVELECREAFRQGVITSNDAWGARLGPDHMLDLSILGQVSETALTRDAEIALRTDGLPNTFVPGRNLIFFTLAAALASRRELRHLVGGMCETDFSGYPDCRDDTLKSLQVTLNLGMGTRSVLHTPLMWLDKAQTWAMAERLGGDPLVTLIRTSTHTCYLGVHDRLHDWGYGCGTCPSCELRIKGWEGFDASRHNA

SEQ ID NO: 42394 - protein, 225 aa, Sphingomonas parapaucimobilis
  REGION 1..225: note = tr|A0A0A1W4G6|A0A0A1W4G6_9SPHN 7-cyano-7-deazaguanine synthase OS=Sphingomonas parapaucimobilis NBRC 15100 OX=1219049 GN=queC PE=3 SV=1
MAVVLVSGGLDSMISAASAKAAGYRVLALSVDYNQRHKVELAAAARVAESLGAERHIVLPLDLSAFGGSALTADIDVPKDGVQPGIPVTYVPARNTIFLSLALGWAEAAGARDLFIGVNALDYSGYPDCRPEFIAAFEGLAEIATKAGVEGQPFKIHAPLQHMTKADIVREGTRLGVDMGISWSCYDPTPEGLHCGECDSCRLRSRGFEEAGIPDPTAYAVKPQG

SEQ ID NO: 42395 - protein, 232 aa, Sphingomonas paucimobilis
  REGION 1..232: note = tr|A0A411LPF7|A0A411LPF7_SPHPI 7-cyano-7-deazaguanine synthase OS=Sphingomonas paucimobilis OX=13689 GN=queC PE=3 SV=1
MMTSSAPMAVVLVSGGLDSMISAASAKAAGYRILALSVDYNQRHKVELAAARRVAVALGAERHIVLPLDLSAFGGSALTADIDVPKDGVQPGIPVTYVPARNTIFLSLALGWAEAAGARDLFIGVNALDYSGYPDCRPEFVAAFEGLAEIATKAGVEGQPFKIHAPLQHMTKADIVREGTRLGVDMGLSWSCYDPAPGGLHCGRCDSCRLRSKGFEEAGIPDPTAYAVKPQG

SEQ ID NO: 42396 - protein, 225 aa, Sphingomonas paucimobilis
  REGION 1..225: note = tr|A0A0C9N5R7|A0A0C9N5R7_SPHPI 7-cyano-7-deazaguanine synthase OS=Sphingomonas paucimobilis NBRC 13935 OX=1219050 GN=queC PE=3 SV=1
MAVVLVSGGLDSMISAASAKAAGYRILALSVDYNQRHKVELAAARRVAVALGAERHIVLPLDLSAFGGSALTADIDVPKDGVQPGIPVTYVPARNTIFLSLALGWAEAAGARDLFIGVNALDYSGYPDCRPEFVAAFEGLAEIATKAGVEGQPFKIHAPLQHMTKADIVREGTRLGVDMGLSWSCYDPAPGGLHCGRCDSCRLRSKGFEEAGIPDPTAYAVKPQG

SEQ ID NO: 42397 - protein, 230 aa, unidentified
  source 1..230: note = Sphingomonas pokkalii
  REGION 1..230: note = tr|A0A2U0SE07|A0A2U0SE07_9SPHN 7-cyano-7-deazaguanine synthase OS=Sphingomonas pokkalii; OX = 2175090 GN=queC PE=3 SV=1
MAPMTQSIAIALVSGGLDSMVSAARAREDGHRLLALSIDYNQRHKIELAAAAKIAATLGAERHIVLPLDLRAFGGSALTADIDVPKTGVGSDIPVTYVPARNTIFLSLALGWAEAAGARDLYIGVNALDYSGYPDCRPEFIAGFEKLAELATKAGVEGHPFRIQAPLQNMTKADIVREAARLGLDAGLSWSCYDPTPEGLHCGLCDSCRLRSRGFEEAGLPDPTRYAVHP

SEQ ID NO: 42398 - protein, 258 aa, Sphingomonas rubra
  REGION 1..258: note = tr|A0A1I5UFX3|A0A1I5UFX3_9SPHN 7-cyano-7-deazaguanine synthase OS=Sphingomonas rubra; OX = 634430 GN=queC PE=3 SV=1
MLSPSIKPYGAATLLRPFLFASDRRSARRIMTDQPLAVALVSGGLDSMVSAASAVEAGYRLLALSVDYNQRHRIELAAAARVAETLGAERHIVLPLDLSAFGGSALTADIAVPKDGVQPGIPVTYVPARNTIFLSLALGWAEAAGARDLYIGVNALDYSGYPDCRPEFVAGFEHLAELATKAGAEGERFRIRAPLQHMTKADIVREGTRLGLDLGISWSCYDPVMQGDDALHCGACDSCRLRALGFEEAGIADPTRYA

SEQ ID NO: 42399 - protein, 231 aa, Sphingomonas sanguinis
  REGION 1..231: note = tr|A0A147HTS1|A0A147HTS1_9SPHN 7-cyano-7-deazaguanine synthase OS=Sphingomonas sanguinis; OX = 33051 GN=queC PE=3 SV=1
MTSSAPMAVVLVSGGLDSMISAASAKAAGYRILALSVDYNQRHQIELAAARRVAHELGAERHIILPLDLSAFGGSALTADIEVPKDGVQPGIPVTYVPARNTIFLSLALGWAEAAGARDLFIGVNALDYSGYPDCRPEFISAFEGLAEIATKAGVEGQPFKIHAPLQHMTKADIVREGTRLDVDMGLSWSCYDPAPGGLHCGRCDSCRLRSKGFEEAGIPDPTAYAVKPQG

SEQ ID NO: 42400 - protein, 196 aa, Sphingomonas sanguinis
  REGION 1..196: note = tr|A0A147JCJ6|A0A147JCJ6_9SPHN 7-cyano-7-deazaguanine synthase OS=Sphingomonas sanguinis; OX = 33051 GN=NS258_02490 PE=3 SV=1
MSVVTLVSGGLDSSLVALLAKEEGLEQFPLFVDYGQRAKVRELDACRAVMRRMGLPEPAVAELGGFGALIRSGLTDASLHVVDDAFTPGRNMLFLLVASAHAFQRGADAVSIGLLHEDASIFPDQTSAFLADAEAMIRRCMGREIRVLAPLAGFHKVDVVALAQEKGVVGTYSCHLGLEDACGACIACNEFRFGDA

SEQ ID NO: 42401 - protein, 230 aa, Sphingomonas sanxanigenens
  REGION 1..230: note = tr|A0A2W5C0H4|A0A2W5C0H4_9SPHN 7-cyano-7-deazaguanine synthase OS=Sphingomonas sanxanigenens OX=397260 GN=queC PE=3 SV=1
MSAQPKRAVVLLSGGLDSMVAAGLAREAGFSVLALTVNYNQRHAVEIEAAGRIAAALGAERHIVLPIDLRAFGGSALTDDIDVPKDGVVEGVIPSTYVPARNTIFLSLALGWAEAAGARDLFIGVNALDYSGYPDCRPEFVAGFERLAELATRAGVEGQAFHVQAPLLHMSKADIATEAARLGLDAGMSWSCYDPTPDGRHCGLCDSCRLRHGGFEAAGLPDPTDYATLP

SEQ ID NO: 42402 - protein, 230 aa, Sphingomonas sanxanigenens
  REGION 1..230: note = tr|W0A5V0|W0A5V0_9SPHN 7-cyano-7-deazaguanine synthase OS=Sphingomonas sanxanigenens DSM 19645 = NX02; OX = 1123269 GN=queC PE=3 SV=1
MSQSTSPLAVVLLSGGLDSMVSAARAREDGFRLLALTIDYNQRHAVEIASASRIAQALGAERHVRLPMDLRSFGGSALTADIAVPKDGVGDDIPVTYVPARNTIFLSLALGWAEAAGARDLYVGVNALDYSGYPDCRPEFIDAFEALANLATKAGVEGDRFRIRAPLQHMTKAEIVREAARLGLDAGMSWSCYDPAPGGLHCGLCDSCRLRARGFEEAGLPDPTGYAQQP

SEQ ID NO: 42403 - protein, 231 aa, Sphingomonas sp.
  REGION 1..231: note = tr|A0A1R1YV18|A0A1R1YV18_9SPHN 7-cyano-7-deazaguanine synthase OS=Sphingomonas sp. Sph1(2015) OX=1628084 GN=queC PE=3 SV=1
MTSSAPMAVVLVSGGLDSMISAASAKAAGYRVLALSVDYNQRHKVELAAAARVAESLGAERHIVLPLDLSAFGGSALTADIAVPKDGVQPGIPVTYVPARNTIFLSLALGWAEAAGARDLFIGVNALDYSGYPDCRPEFIAAFEGLAEIATKAGVEGQPFKIHAPLQHMTKADIVREGTRLGVDMGISWSCYDPTPEGLHCGECDSCRLRSRGFEEAGIPDPTAYAVKPQG

SEQ ID NO: 42404 - protein, 230 aa, Sphingomonas sp.
  REGION 1..230: note = tr|A0A0Q8QIX0|A0A0Q8QIX0_9SPHN 7-cyano-7-deazaguanine synthase OS=Sphingomonas sp. Root710 OX=1736594 GN=queC PE=3 SV=1
MASQVNSEGRRAIVLLSGGLDSMVSGGIAREQGFQLAALTIDYNQRHRVELEAARRVAAALGVDRHVTMPLNLRAFGGSSLTDDIDVPKDGVMPGIPSTYVPARNTIFLSLALGFAEATGARDIFLGVNALDYSGYPDCRPEFIAAFQHLADLATKMGVEGQGFTIHAPLQHMTKADIAREADRLGLDAGMSWSCYDPTPDGRHCGLCDSCRLRSKGFAEAGLADPTVYA

SEQ ID NO: 42405 - protein, 228 aa, unidentified
  source 1..228: note = Sphingomonas spermidinifaciens
  REGION 1..228: note = tr|A0A2A4B210|A0A2A4B210_9SPHN 7-cyano-7-deazaguanine synthase OS=Sphingomonas spermidinifaciens OX=1141889 GN=queC PE=3 SV=1
MSAAPLAVVLVSGGLDSMVAAGRAREAGFDILALSVDYNQRHQVELAAARRIARALEAKRHVVLPLDLSAFGGSALTAEIEVPKGGVGDDIPVTYVPARNTIFLSLALGWAEAAGARDLFIGVNALDYSGYPDCRPEFIAAFEGLAELATKAGVEGEPFRIHAPLQHMTKADIAREAARLGLDAGMSWSCYDPAPGGMHCGLCDSCRLRSKGFEEAGLPDPTIYAARP

SEQ ID NO: 42406 - protein, 236 aa, unidentified
  source 1..236: note = Sphingomonas spermidinifaciens
  REGION 1..236: note = tr|A0A2A4B2F0|A0A2A4B2F0_9SPHN 7-cyano-7-deazaguanine synthase OS=Sphingomonas spermidinifaciens OX=1141889 GN=queC PE=3 SV=1
MTPDTGALVLFSGGQDSATCLAWALDRFETVETVGFDYGQRHRVELECRGDFRARVAELDPEWSDRLGPDHMLDLSVLGQVSETALTREAEIALRDDGLPNTFVPGRNLLFFTLAAALASRRQLRHLVGGMCETDYSGYPDCRDDTLKSLQVTLNLGMGSRAVVHTPLMWLDKAQTWALADRLGGQPLVELIRTGTHTCYRGEHEILHDWGYGCGGCPACELRSKGWEAFASAADR

SEQ ID NO: 42407 - protein, 238 aa, unidentified
  source 1..238: note = Sphingomonas taxi
  REGION 1..238: note = tr|A0A2W4YVZ7|A0A2W4YVZ7_9SPHN 7-cyano-7-deazaguanine synthase OS=Sphingomonas taxi; OX = 1549858 GN=queC PE=3 SV=1
MTSPAPFAVALVSGGLDSMVSAAMAREAGQRLLALSFDYNQRHRVELAAARRIADALGAERHIVLPMDLSAFGGSALTADIDVPKDGVGTEDGGGIPVTYVPARNTIFLSLALGWAEAAGARDIYIGVNALDYSGYPDCRPEFIAAFEGLAELATKAGVEGDPFRIQAPLQNMTKADIVREGTRLGLDLGLSWSCYDPAPGSLHCGECDSCRLRARGFEEAGIADPTRYAVPPASGPA

SEQ ID NO: 42408 - protein, 232 aa, unidentified
  source 1..232: note = Sphingomonas taxi
  REGION 1..232: note = tr|A0A2W5P790|A0A2W5P790_9SPHN 7-cyano-7-deazaguanine synthase OS=Sphingomonas taxi; OX = 1549858 GN=queC PE=3 SV=1
MTSKTPAVALVSGGLDSLVSAALAREAGHPLLALSIDYNQRHQVELAAARRVARALGAVRHVVLPIDLSAFGGSALTDAAIDVPKDGVGAAIPVTYVPARNTIFLSLALGWAEAAGARDVYLGVNALDYSGYPDCRPEFITAFEQMAELATKAGVEGAPFRFRAPLQHMTKADIVREGTRLGLDLGMSWSCYDPAPGAKHCGLCDSCRLRHKGFADAGVADPTDYAVVPPAP

SEQ ID NO: 42409 - protein, 227 aa, Sphingomonas trueperi; identical to SEQ ID NO: 42366
  REGION 1..227: note = tr|A0A543M6K5|A0A543M6K5_9SPHN 7-cyano-7-deazaguanine synthase OS=Sphingomonas trueperi; OX = 53317 GN=queC PE=3 SV=1

SEQ ID NO: 42410 - protein, 228 aa, unidentified
  source 1..228: note = Sphingomonas turrisvirgatae
  REGION 1..228: note = tr|A0A1E3LSY4|A0A1E3LSY4_9SPHN 7-cyano-7-deazaguanine synthase OS=Sphingomonas turrisvirgatae OX=1888892 GN=queC PE=3 SV=1
MTHSKLAVALISGGLDSYVSAACARADGYRLLALSIDYNQRHHVELAAARRIANVLGAERHVVLPLDLSLFGGSALTADIDVPKDGVGDDIPITYVPARNTIFLSLALGWAEAAGARDLYIGVNALDYSGYPDCRPEFVAGFEKLAELATKAGVEGEPFRVRAPLLEMSKADIVRKGTELGLDLGISWSCYDPAPGGVHCGLCDSCRLRSKGFEESGIADPTTYAVTP

SEQ ID NO: 42411 - protein, 230 aa, Sphingomonas wittichii
  REGION 1..230: note = tr|A0A1X9UJ23|A0A1X9UJ23_SPHSD 7-cyano-7-deazaguanine synthase OS=Sphingomonas wittichii (strain DC-6 / KACC 16600) OX=1283312 GN=queC PE=3 SV=1
MSDIANREGRRAIVLLSGGLDSMVSGGIAREQGFALAALTIDYNQRHRVELEAAKRVAAALGVDRHVTLPLNLRAFGGSSLTDDIDVPKDGVMPGIPSTYVPARNTIFLSLALGFAEATGARDIFLGVNALDYSGYPDCRPEFIAAFQHLADLATKMGVEGQGFTIHAPLQHMTKADIAQEAARLGLDAGMSWSCYDPTPDGKHCGLCDSCRLRSKGFADAGLADPTVYA

SEQ ID NO: 42412 - protein, 230 aa, Sphingomonas wittichii
  REGION 1..230: note = sp|A5V652|QUEC_SPHWW 7-cyano-7-deazaguanine synthase; OS = Sphingomonas wittichii (strain RW1 / DSM 6014 / JCM 10273) OX=392499 GN=queC PE=3 SV=1
MSDNANREGRRAIVLLSGGLDSMVSGGIAREQGFALAALTIDYNQRHRVELEAAKRVAAALGVDRHVTLPLNLRAFGGSSLTDDIDVPKDGVMPGIPSTYVPARNTIFLSLALGFAEATGARDIFLGVNALDYSGYPDCRPEFIAAFQHLADLATKMGVEGQGFTIHAPLQHMTKADIAQEAARLGLDAGMSWSCYDPTPDGKHCGLCDSCRLRSKGFADAGLADPTVYA

SEQ ID NO: 42413 - protein, 231 aa, Sphingomonas yabuuchiae
  REGION 1..231: note = tr|A0A147IJK8|A0A147IJK8_9SPHN 7-cyano-7-deazaguanine synthase OS=Sphingomonas yabuuchiae; OX = 172044 GN=queC PE=3 SV=1
MTSSAPMAVVLVSGGLDSMISAASAKAAGYRVLALSVDYNQRHKVELAAAARVAEALGAERHIVLPLDLSAFGGSALTADIDVPKDGVQPGIPVTYVPARNTIFLSLALGWAEAAGARDLFIGVNALDYSGYPDCRPEFIAAFEGLAEIATKAGVEGQPFKIHAPLQHMTKADIVREGTRLGVDMGISWSCYDPTPEGLHCGECDSCRLRSRGFEEAGIPDPTAYAVKPQG

SEQ ID NO: 42414 - protein, 224 aa, Sphingopyxis alaskensis
  REGION 1..224: note = sp|Q1GTF3|QUEC1_SPHAL 7-cyano-7-deazaguanine synthase 1 OS=Sphingopyxis alaskensis (strain DSM 13593 / LMG 18877 / RB2256) OX=317655 GN=queC1 PE=3 SV=2
MSGKTVIVLLSGGLDSMVCAGLAREAGARIVALTIDYNQRHRVELESAARIAAHVGAAEHIVLPLDLRRFGGSALTADIDVPKDGVGTDIPVTYVPARNLIFLSLTLGLAEARQAADIVIGVNALDYSGYPDCRPAFIQGFEKLAALATRDGDQGVRFHIHAPLQHMTKADIAAEAARLGMDAAMSWSCYDPTPEGLHCGACDSCRLRRKGFADAGLADPTRYA

SEQ ID NO: 42415 - protein, 236 aa, Sphingopyxis alaskensis
  REGION 1..236: note = sp|Q1GPS4|QUEC2_SPHAL 7-cyano-7-deazaguanine synthase 2 OS=Sphingopyxis alaskensis (strain DSM 13593 / LMG 18877 / RB2256) OX=317655 GN=queC2 PE=3 SV=1
MTGDAGALVLFSGGQDSATCLAWALDRFETVETVGFDYGQRHRVELECRDDFRARIVELNPAWAARLGPDHKLDLSVLGQVSETALTRDAEIALRADGLPNTFVPGRNLLFFTLAAALASRRELRHLVGGMCETDYSGYPDCRDDTLKSLQVTLNLGIGSRSVVHTPLMWLDKAQTWGLAKILGGEKLVDLIRTGTHTCYRGDHDRLQDWGYGCGTCPACELRMKGWQEHRSSLDE

SEQ ID NO: 42416 - protein, 230 aa, Sphingopyxis bauzanensis
  REGION 1..230: note = tr|A0A246JRF3|A0A246JRF3_9SPHN 7-cyano-7-deazaguanine synthase OS=Sphingopyxis bauzanensis OX=651663 GN=queC PE=3 SV=1
MHDVAGKTLIVLLSGGLDSMVCAGLAREAGARIVALTIDYNQRHRVELESAARIAAEVGAAEHIVLPLDLRRFGGSALTADIDVPKNGVGSVVPVTYVPARNLIFLSLTLGLAEARRAQDIVIGVNALDYSGYPDCRPDFIAGFEDLARLATRDGDQGVDFRIHAPLQHMTKADIAAEAARLGMDAGMSWSCYDPTPEGLHCSYCDSCRLRSKGFADAGLADPTRYAVGP

SEQ ID NO: 42417 - protein, 272 aa, unidentified
  source 1..272: note = Sphingopyxis flava
  REGION 1..272: note = tr|A0A1T5D766|A0A1T5D766_9SPHN 7-cyano-7-deazaguanine synthase OS=Sphingopyxis flava; OX = 1507287 GN=queC PE=3 SV=1
MCPSPYGFVPNWAAGTARAAHFLGAVQHPLLRARLAGRIGRGMQDICGKTVIVLLSGGLDSMVCAGLASEAGARIVALTVDYNQRHRVELDSAARIAGHVGAAEHIILPLDLRRFGGSALTADIDVPKDGPLGEASDIPVTYVPARNLIFLSLTLGLAEARRAQDIVIGVNALDYSGYPDCRPEFISGFESLARLATRDGDRGVDFHIHAPLQHMTKADIAAEAARLGLDAGMSWSCYDPTPAGLHCGRCDSCRLRSKGFADAGLADPTRYD

SEQ ID NO: 42418 - protein, 227 aa, unidentified
  source 1..227: note = Sphingopyxis fribergensis
  REGION 1..227: note = tr|A0A0A7PEC5|A0A0A7PEC5_9SPHN 7-cyano-7-deazaguanine synthase OS=Sphingopyxis fribergensis OX=1515612 GN=queC1 PE=3 SV=1
MQDLAGKTLIVLLSGGLDSMVCAGLAREAGARIVALTIDYNQRHRVELESAARIAATVGAAEHIVLPLDLRRFGGSALTADIDVPKDGVGSDVPVTYVPARNLIFLSFTLGLAEARQAQDIVIGVNALDYSGYPDCRPEFIQGFEDLARLATRDGDQGVEFRIHAPLQHMPKADIATEAARLGMDAGMSWSCYDPTPEGLHCGGCDSCRLRSKGFADAGLTDPTRYA

SEQ ID NO: 42419 - protein, 273 aa, Sphingopyxis granuli
  REGION 1..273: note = tr|A0A0X8R3E7|A0A0X8R3E7_9SPHN 7-cyano-7-deazaguanine synthase OS=Sphingopyxis granuli; OX = 267128 GN=queC1 PE=3 SV=1
MWFFFLKAFMPNWAVQQRLRGPFPLSARALRGRRRERNGRRMQDLAGKPLVVLLSGGLDSMVCAGLAREAGARIVALTIDYNQRHRVELESAARIAAAVGADEHIVLPLDLRRFGGSALTADIAVPKDGVGEDIPVTYVPARNLIFLSLTLGLAEARRAADIVIGVNALDYSGYPDCRPEFIAGFEALARLATRDGDQGVAFRIHAPLQYMSKADIAAEAARLGLDAGMSWSCYDPAPDGLHCGLCDSCRLRSKGFAEAGLTDPTRYAVKPPA

SEQ ID NO: 42420 - protein, 231 aa, unidentified
  source 1..231: note = Sphingopyxis indica
  REGION 1..231: note = tr|A0A239E9F2|A0A239E9F2_9SPHN 7-cyano-7-deazaguanine synthase OS=Sphingopyxis indica; OX = 436663 GN=queC PE=3 SV=1
MQMMHGKTMIVLLSGGLDSMVCAGLAREAGARIVALTVDYNQRHRVELESAARIAAAVGAAEHIVLPLDLRRFGGSALTDDIAVPKEGVSQDDIPVTYVPARNLIFLSLTLGLAEARLAQDIAIGVNALDYSGYPDCRPEFIAGFEALARLATRDGDKGVDFKIHAPLQHMTKADIAAEAARLGMDAGMSWSCYDPTPEGLHCGQCDSCRLRHKGFVDAGLADPTRYAVAV

SEQ ID NO: 42421 - protein, 227 aa, unidentified
  source 1..227: note = Sphingopyxis lindanitolerans
  REGION 1..227: note = tr|A0A2S8BB82|A0A2S8BB82_9SPHN 7-cyano-7-deazaguanine synthase OS=Sphingopyxis lindanitolerans OX=2054227 GN=queC PE=3 SV=1
MQQLSGKTVIVLLSGGLDSMVCAGLAREAGARIVALTVDYNQRHRVELESAARIADHIGAAEHIVLPLDLRRFGGSALTADIDVPKDGVGSDVPITYVPARNLIFLSLTLGLAEARQAQDIMIGVNALDYSGYPDCRPDFIAGFEALATLATRDGDRGVAFRIHAPLQHMTKADIAAEAARLGMDAGMSWSCYDPTPEGLHCGACDSCRLRSKGFAEAGLADPTRYA

SEQ ID NO: 42422 - protein, 230 aa, Sphingopyxis macrogoltabida
  REGION 1..230: note = tr|A0A2W5L019|A0A2W5L019_SPHMC 7-cyano-7-deazaguanine synthase OS=Sphingopyxis macrogoltabida OX=33050 GN=queC PE=3 SV=1
MQDLAGKTLIVLLSGGLDSMVCAGLASEAGARIVALTIDYNQRHRVELESAARIAAAVGAAEHIVLPLDLRRFGGSALTADIDVPKEGVGADIPVTYVPARNLIFLSLTLGLAEARQAQDIVIGVNALDYSGYPDCRPEFIAGFQDLARLATRDGDKGVAFRIHAPLQQMSKADIAAEAARLGMDAGMSWSCYDPAPGGLHCGYCDSCRLRAKGFADAGLTDPTRYAAKA

SEQ ID NO: 42423 - protein, 229 aa, Sphingopyxis macrogoltabida
  REGION 1..229: note = tr|A0A0P0DTB2|A0A0P0DTB2_SPHMC 7-cyano-7-deazaguanine synthase OS=Sphingopyxis macrogoltabida OX=33050 GN=queC PE=3 SV=1
MQNLAGKTLIVLLSGGLDSMVCAGLAREAGARIVALTIDYNQRHRVELESAARIARDVGAAEHIVLPLDLRRFGGSALTADIDVPKDGVGDDVPITYVPARNLIFLSLTLGLAEARQAQDIVIGVNALDYSGYPDCRPEFIAGFQDLARLATRDGDKGVDFHIHAPLQHMTKADIAAEAARLGMDAGMSWSCYDPTPDHLHCGLCDSCRLRSKGFADAGLPDPTRYTGA

SEQ ID NO: 42424 - protein, 230 aa, Sphingopyxis sp.
  REGION 1..230: note = tr|A0A270BKU7|A0A270BKU7_9SPHN 7-cyano-7-deazaguanine synthase OS=Sphingopyxis sp. GW247-27LB OX=2012632 GN=queC PE=3 SV=1
MHDMHGKTVIVLLSGGLDSMVCAGLAREAGARIVALTVDYNQRHRVELESAAHIADYVGAAEHIVLPLDLRRFGGSALTADIDVPKDGPIGEASDVPVTYVPARNLIFLSLTLGLAEARRAQDIVIGVNALDYSGYPDCRPEFIASFEALARLATRDGDKGVDFHIHAPLQHMTKADIAAEAARLGMDAGMSWSCYDPTPEGLHCGHCDSCRLRSKGFADAGLTDPTRYA

SEQ ID NO: 42425 - protein, 227 aa, Sphingopyxis sp.
  REGION 1..227: note = tr|A0A0W1DUV9|A0A0W1DUV9_9SPHN 7-cyano-7-deazaguanine synthase OS=Sphingopyxis sp. H050; OX = 1759072 GN=queC PE=3 SV=1
MQQVSGKTVIVLLSGGLDSMVCAGLAREAGARIVALTIDYNQRHRVELESAARIAATIGAGEHIVLPLDLRRFGGSALTDDIDVPKDGVGPDIPVTYVPARNLIFLSLTLGLAEARQARDIVIGVNALDYSGYPDCRPEFIQGFENLAALATRDGDKGVDFHIHAPLQHMTKADIAAEAARLGLDAGMSWSCYDPTPEGLHCGSCDSCRLRSKGFVDAGLPDPTHYA

SEQ ID NO: 42426 - protein, 230 aa, Sphingopyxis terrae
  REGION 1..230: note = tr|A0A142W2X6|A0A142W2X6_9SPHN 7-cyano-7-deazaguanine synthase OS=Sphingopyxis terrae subsp. terrae NBRC 15098 OX=1219058 GN=queC PE=3 SV=1
MQDLSGKTVIVLLSGGLDSMVCAGLAREAGARIVALTVDYNQRHRVELDSAARIATAVGAAEHIVLPLDLRRFGGSALTADIDVPKDGVCEDIPVTYVPARNLIFLSLTLGLAEARRSQDIFIGVNALDYSGYPDCRPEFIAGFQHLAQLATRDGDKGVDFVIHAPLQHMTKADIAAEAARLGMDAGMSWSCYDPTPEGLHCGLCDSCRLRRKGFADAGLADPTRYAVEA

SEQ ID NO: 42427 - protein, 230 aa, Sphingopyxis terrae
  REGION 1..230: note = tr|A0A1Y6EII3|A0A1Y6EII3_9SPHN 7-cyano-7-deazaguanine synthase OS=Sphingopyxis terrae subsp. ummariensis OX=429001 GN=queC PE=3 SV=1
MQDLSGKTVIVLLSGGLDSMVCAGLAREAGARIVALTVDYNQRHRVELDSAARIATAVGAAEHIVLPLDLRRFGGSALTADIDVPKDGVGEDIPVTYVPARNLIFLSLTLGLAEARRSQDIFIGVNALDYSGYPDCRPEFIAGFQHLAQLATRDGDKGVDFAIHAPLQHMTKADIAAEAARLGMDAGMSWSCYDPTPEGLHCGLCDSCRLRRKGFADAGLADPTRYAVEA

SEQ ID NO: 42428 - protein, 230 aa, Sphingopyxis witflariensis
  REGION 1..230: note = tr|A0A246K4R1|A0A246K4R1_9SPHN 7-cyano-7-deazaguanine synthase OS=Sphingopyxis witflariensis OX=173675 GN=queC PE=3 SV=1
MQDISGKTLIVLLSGGLDSMVCAGLAREAGARIVALTIDYNQRHRVELESAARIAKSIGAAEHIVLPLDLRRFGGSALTADIDVPKDGMSSDVPITYVPARNLIFLSLTLGLAEARQAQDIVIGVNALDYSGYPDCRPDFIAGFEDLARLATRDGDIGVAFRIHAPLQYMTKADIAVEATRLGMDAGMSWSCYDPTPEGLHCGLCESCRLRSKGFADAGIPDPTRYAAGV

SEQ ID NO: 42429 - protein, 227 aa, unidentified
  source 1..227: note = Sphingorhabdus contaminans
  REGION 1..227: note = tr|A0A553WH46|A0A553WH46_9SPHN 7-cyano-7-deazaguanine synthase OS=Sphingorhabdus contaminans OX=1343899 GN=queC PE=3 SV=1
MNANRKSAIVLLSGGLDSMVVAGLAREAGYALVALTIDYNQRHRVELESATHIARHLDAIEHIILPLDLTRFGGSALTADIDVPKEGVEEDAIPVTYVPARNTIFLSLCLGLAEARGARDLWIGVNALDYSGYPDCRPEFIRSFEAMANLATKAGVEGDAFTIHTPLLHMSKAQIATEAARLGLDAGMSWSCYDPTPDHKACGKCDSCRLRAKGFADAGLVDPTIYA

SEQ ID NO: 42430 - protein, 229 aa, unidentified
  source 1..229: note = Sphingorhabdus marina
  REGION 1..229: note = tr|A0A1N6F586|A0A1N6F586_9SPHN 7-cyano-7-deazaguanine synthase OS=Sphingorhabdus marina DSM 22363 OX=1123272 GN=queC PE=3 SV=1
MSQVRKTAIILLSGGLDSMVAGAIAREQGYDIVALTVDYNQRHKIELQSALQIAAELGVAEHIVLPLDLSRFGGSALTDDIAVPKSGVTNDIPVTYVPARNLIFLSLTLGLAEARDARDIFIGVNALDYSGYPDCRPEFIEGFERLADLATKAGDEGSGFNIRTPLQFMTKADIAKEAHRLQIDPALSWSCYDPAEGNLHCGRCDSCRLRQKGFEEAGIADPTRYVSST

SEQ ID NO: 42431 - protein, 228 aa, unidentified
  source 1..228: note = Sphingorhabdus sp.
  REGION 1..228: note = tr|A0A220W3Z7|A0A220W3Z7_9SPHN 7-cyano-7-deazaguanine synthase OS=Sphingorhabdus sp. SMR4y OX=2584094 GN=queC PE=3 SV=1
MTSESKTAIILLSGGLDSMVSAAIAAEQGYRLIALTVDYNQRHKVELQSARTIAAKLDVAEHIILPLDLSRFGGSALTADIDVPKSGVTDDIPVTYVPARNLIFLSLTLGLAEARDARDIFIGVNALDYSGYPDCRPEFIQGFERLADLATKAGDQGSGFTIRTPLQHMSKADIASEAIRLGLDPAWSWSCYDPTEDGLPCGLCDSCRLRQKGFEEAGIIDPTRYATL

SEQ ID NO: 42432 - protein, 231 aa, unidentified
  source 1..231: note = Sphingorhabdus sp.
  REGION 1..231: note = tr|A0A5C6ULI4|A0A5C6ULI4_9SPHN 7-cyano-7-deazaguanine synthase OS=Sphingorhabdus sp. D-2Q-5-6 OX=2601267 GN=queC PE=3 SV=1
MNTLDENLAVVLLSGGLDSMVCAALAREAGRDVLALTIDYNQRHRIELESAARIAAHVGALRHVVLPLDLSAFGGSALTADIAVPKSGVGDDIPVTYVPARNTVFLSLCLAWAEAAGAREIYIGVNSMDYSGYPDCRPEFIAAFADLAALATKAGDGGERFAIQTPLQHMTKADIAAEAVRLGLDPAMSWSCYDPTPDLKHCGLCDSCRLRRAGFAAAGLDDPTRYAAAAD

SEQ ID NO: 42433 - protein, 227 aa, unidentified
  source 1..227: note = Sphingorhabdus wooponensis
  REGION 1..227: note = tr|A0A3R8Q9J1|A0A3R8Q9J1_9SPHN 7-cyano-7-deazaguanine synthase OS=Sphingorhabdus wooponensis OX=940136 GN=queC PE=3 SV=1
MSIQNTSAIVLLSGGLDSMVVAGLAREAGYDLIALTIDYNQRHRVELDSAARIAMHLGAKEHIVLPLDLTRFGGSALTADIDVPKQGVESGAIPVTYVPARNTIFLSLCLGLAEARDARDLWIGVNALDYSGYPDCRPEFIRAFEATANLATKAGVEGDSFTIHTPLLDMSKADIAREAARLGLDAGMSWSCYDPSPDHKACGQCDACRLRAKGFADAGLLDPTIYA

SEQ ID NO: 42434 - protein, 231 aa, unidentified
  source 1..231: note = Sphingosinicella ginsenosidimutans
  REGION 1..231: note = tr|A0A5C6TQL9|A0A5C6TQL9_9SPHN 7-cyano-7-deazaguanine synthase OS=Sphingosinicella ginsenosidimutans OX=1176539 GN=queC PE=3 SV=1
MAQASKAPLGVVLLSGGMDSMVVAGLAREAGYRLAALTIDYNQRHRVELQAAARIAAHLDAERHVVLPLDLTRFGGSALTADIAVPKGGVGEGIPVTYVPARNTIFLSLCLGWAEAIGARDLFIGVNALDYSGYPDCRPEFVRAFEDMANLATKAGVEGDRFTVHTPLMAMTKADISREAARLGLDAAMSWTCYDPTPAGEHCGACDSCRLRARGFAEAGLPDPTVYAARS

SEQ ID NO: 42435 - protein, 233 aa, Sphingosinicella microcystinivorans
  REGION 1..233: note = tr|A0A495RW65|A0A495RW65_SPHMI 7-cyano-7-deazaguanine synthase OS=Sphingosinicella microcystinivorans OX=335406 GN=queC PE=3 SV=1
MITSQPAIVLLSGGLDSVTCAAIARESGYAVHALTVDYNQRHRVELEAARRAAAMYAVRHIVLPLDLRAFGGSALTDEIAVPKGDGAVDSGVIPPTYVPARNTVFLSVALAWAEAIDARDIFIGVNALDYSGYPDCRPAFIAAFEALAATATKAGSEGERFKVHTPLIDLDKAGIAREATRLGVDIAGTWTCYDPATAADGTPLHCGRCDACRLRHKGFEEAGLPDPTTYAAP

SEQ ID NO: 42436 - protein, 231 aa, Sphingosinicella sp.
  REGION 1..231: note = tr|A0A4P6FTK6|A0A4P6FTK6_9SPHN 7-cyano-7-deazaguanine synthase OS=Sphingosinicella sp. BN140058 OX=1892855 GN=queC PE=3 SV=1
MTSNARNAVALVSGGLDSMVSAAHAREAGFALFALTIDYGQRHRIELEAAARVAAALGAVRHIVLPLDLTAFGGSALTADIDVPKSGVAAEDEVPVTYVPARNTIFLSLALGWAEAAGARDLFIGVNALDYSGYPDCRPDFIAAFEHVASLGTKAGAEGDRFRIHAPLQHMTKADIAKEAARLGLDAGISWSCYDPTPRGEHCGFCDSCRLRAKGFEEAGLADPTRYAARP

SEQ ID NO: 42437 - protein, 230 aa, Sphingosinicella sp.
  REGION 1..230: note = tr|A0A2P7QJ24|A0A2P7QJ24_9SPHN 7-cyano-7-deazaguanine synthase OS=Sphingosinicella sp. GL-C-18 OX=2116704 GN=queC PE=3 SV=1
MTSASRKAVALVSGGLDSMISAAHARERGFELYALTVDYGQRHRIELEAAGRVAAALGAVRHIVLPLDLTAFGGSALTADIDVPKSGVDEDAVPVTYVPARNTIFLSLALGWAEAAGARDLFIGVNALDYSGYPDCRPDFIAAFERVAALGTKAGSEGDGFKIHAPLQHMTKADIAKEAARLGLDAGISWSCYDPTPQGEHCGFCDSCRLRSKGFEEAGLPDPTVYAARP

SEQ ID NO: 42438 - protein, 241 aa, unidentified
  source 1..241: note = Spiribacter salinus
  REGION 1..241: note = tr|A0A540VRQ3|A0A540VRQ3_9GAMM 7-cyano-7-deazaguanine synthase OS=Spiribacter salinus; OX = 1335746 GN=FKY71_08610 PE=3 SV=1
MTKVILNSGGMDSFFVARMVPDAHHVFVDVGQRYAHKEREAARRIADHVGQPLEIVLSADIAKFEHKPSGIIPLRNAELILQAAQYGNDIYLGILSNEINSDKSPEFLRAMEEVLNISCRAQYWSAGTHFTLHTPLGTQSKAQLVAGLLAAVRRDITYHAAWQTMLSTVSCYDGGGLHCGKCPSCFKRWVALTVATGVDADSLHPFVEDPATWATLEEWEAKGYPEERIQEIRDAYAIAGL

SEQ ID NO: 42439 - protein, 254 aa, unidentified
  source 1..254: note = Spiribacter sp.
  REGION 1..254: note = tr|A0A2U2MY32|A0A2U2MY32_9GAMM Uncharacterized protein OS=Spiribacter sp. E85 OX=2182432 GN=DEM34_15135; PE = 4 SV=1
MRHVLWSAGWDSTFLVAKAVLVDCATIQPYYLFTTSRRSAGRELFTLQRLKMRIRAMAAGRAGRILPTRVVEHDALPVSETRAAQYASFRKLAYLGEQYLLLACMADYLSLDQLEIGVYWDGRIGSFLRDARVGRYPAWAAGRTPELEDALRLLEPFEFPLLDLTKHDMAEQAARYGFLPILRETWFCHRPRGERPCGECNPCRYAMEEGFGWRIPLGNRVRGRIRRTFYRAHRLISDPDYVVSLWSRMHRSGQ

SEQ ID NO: 42440 - protein, 221 aa, unidentified; identical to SEQ ID NO: 39282
  source 1..221: note = Spirochaetaceae bacterium
  REGION 1..221: note = tr|A0A2E8PWY4|A0A2E8PWY4_9SPIO 7-cyano-7-deazaguanine synthase OS=Spirochaetaceae bacterium OX=1898206 GN=queC PE=3 SV=1

SEQ ID NO: 42441 - protein, 226 aa, unidentified
  source 1..226: note = Spirochaetaceae bacterium
  REGION 1..226: note = tr|A0A1W9VVZ9|A0A1W9VVZ9_9SPIO 7-cyano-7-deazaguanine synthase OS=Spirochaetaceae bacterium 4572_7 OX=1972456 GN=queC PE=3 SV=1
MKKQLQIKKALCVMSGGMDSTLSAYMMKNDGYEIIAVHFNYDQRTQTKELECFNSICNDLNVKEKYILDLDFFKQLGASALTDKSIDVPIGGVEKGVPITYVPFRNGIFLSMAAAIAEKEGAEVISIGVVEEDSSGYPDCRESYIRSMQDSINLGTKDETNIEIKMPLVHLQKSQIVQESLKLDVPLHLTWSCYKNEDRACGVCDSCRLRLNGFSLAGEKDPIEYE

SEQ ID NO: 42442 - protein, 231 aa, unidentified
  source 1..231: note = Spirochaetae bacterium
  REGION 1..231: note = tr|A0A2N1TG24|A0A2N1TG24_9SPIR 7-cyano-7-deazaguanine synthase OS=Spirochaetae bacterium HGW-Spirochaetae-1 OX=2013832 GN=queC PE=3 SV=1
MTSHEKAVVLLSGGLDSATVAAIAVQRGFSLHALTFNYGQRHDVELRSAGKLAGFFRTESHVIIDIPSKVFSTALVKNSGIDVPKNRLHDADVIPSTYVPARNIIFLSFALAYAESSGARHIFIGANAVDYSGYPDCRPEFFRAFQVMADAGTRAGVEGRGFIIETPLLEWTKAEIIRKGVELGVDYSMTHSCYDPGDDGTSCGECDSCIIRSRGFAEAGVPDPTIYRKKS

SEQ ID NO: 42443 - protein, 228 aa, unidentified
  source 1..228: note = Spirochaetae bacterium
  REGION 1..228: note = tr|A0A2N1RWK4|A0A2N1RWK4_9SPIR 7-cyano-7-deazaguanine synthase OS=Spirochaetae bacterium HGW-Spirochaetae-5 OX=2013837 GN=queC PE=3 SV=1
MNKKGVILLSGGLDSATVAAIAVKEGYSLSALTFFYSQRHEVEITFAERLAKHFRMDNHIKISIPAEIFRTALTAESGIDVPKNREISESSIPETYVPARNIIFLSYALAFAESTGASDIFIGANAVDYSGYPDCRPEFFEAFKKMAQMGTKAGVEGKGFNIHTPLMNMNKNEIIRLGTELGVDYSLTHSCYDPSPDGSSCGECDSCFLRMKGFAEAGVPDPTRYRAE

SEQ ID NO: 42444 - protein, 243 aa, unidentified
  source 1..243: note = Spirochaetales bacterium
  REGION 1..243: note = tr|A0A2E9KWP1|A0A2E9KWP1_9SPIR 7-cyano-7-deazaguanine synthase OS=Spirochaetales bacterium OX=2026792 GN=queC PE=3 SV=1
MKKALVILSGGQDSTTCLFWAINKGYSCSTITFNYNQLHKIEINSAIKISQLASIKDHEIIDIGPIFDGDSPLTNPNKALEQHSKIEDFPTGIQQTFVPARNLLFLSIAANRAYSKNISTIIIGVCQEDFGGYPDCRQDFITSMTETISLSLEKKIEILTPVINLKKSEIIKLANQLGDPCWSSLAYTHTSYDGRYPPSSEDHANILRSKGFEEAGLPDPLVLRAASEKLIELPKTKNYETKS

SEQ ID NO: 42445 - protein, 231 aa, unidentified
  source 1..231: note = Spirochaetes bacterium
  REGION 1..231: note = tr|A0A1G3NYG4|A0A1G3NYG4_9SPIR 7-cyano-7-deazaguanine synthase OS=Spirochaetes bacterium GWF1_31_7 OX=1802187 GN=queC PE=3 SV=1
MEQCYLNEDAVVLTSGGQDSTTCLVWALQNFRKVHAISFFYNQKHSNENDIARRICEKLSVPFKLVDISFMKDLVISNLFKGGGDLNEKHQSSNSVPSSFVPYRNLLFLTLASAWAGTVGARHIVTGVCETDFSGYADCRDVFIKSTQVTLNLATDFKDKNVVLHTPLMWLTKAEEFKMAADIGCLDLILKETLTCYNGVETMNEYGKGCGECPSCLLRKKGYDEFRKKYN

SEQ ID NO: 42446 - protein, 227 aa, unidentified
  source 1..227: note = Spirochaetes bacterium
  REGION 1..227: note = tr|A0A1V5VZ81|A0A1V5VZ81_9SPIR 7-cyano-7-deazaguanine synthase OS=Spirochaetes bacterium ADurb.Bin218 OX=1852906 GN=queC_1 PE=3 SV=1
MAKVGIVLLSGGLDSATVAAIARNEGYDLHAMTFLYSQRHKIEVLFAERLVQHFGIKKHIKIEIPSEIFQTALVEGSNISVPKNRDIDETSIPETYVPGRNILFLSYALAYGESVGADAIFIGANAVDYSGYPDCRPDFFEAFKKMADKGTKAGVEGRGINIFAPLMYLKKHEIIKLGISLGVDYSLTHSCYDPFEDGSSCGNCDSCILRKRGFAEAGVADPTKYRE

SEQ ID NO: 42447 - protein, 231 aa, unidentified; identical to SEQ ID NO: 42445
  source 1..231: note = Spirochaetia bacterium
  REGION 1..231: note = tr|A0A354G7M7|A0A354G7M7_9SPIR 7-cyano-7-deazaguanine synthase OS=Spirochaetia bacterium; OX = 2053615 GN=queC PE=3 SV=1

SEQ ID NO: 42448 - protein, 230 aa, unidentified
  source 1..230: note = Spirochaetia bacterium
  REGION 1..230: note = tr|A0A3D3AMZ6|A0A3D3AMZ6_9SPIR 7-cyano-7-deazaguanine synthase OS=Spirochaetia bacterium; OX = 2053615 GN=queC PE=3 SV=1
MSSTAIVLLSGGLDSATVSAIAKSEGKRILALTFDYGQKHKIEIERALAIGKMMGVAEHQVIKIDLKVFGGSSLTEDSIEVQKNRSEKEMGSGIPLTYVPARNTIFISYALAFAEVRNADSIYIGVNALDYSGYPDCRPEYIDAFNHLASLALKKTVENKPVVIKTPIIHMTKAQIIKKGLELGIDYSKTHSCYDPIEDKACGACDSCLLRKKGFQEAGMEDPTLYYHPS

SEQ ID NO: 42449 - protein, 223 aa, Spongiibacter sp.
  REGION 1..223: note = tr|A0A2E9SQP1|A0A2E9SQP1_9GAMM 7-cyano-7-deazaguanine synthase OS=Spongiibacter sp.; OX = 2024860 GN=queC PE=3 SV=1
MSKKAIVLVSGGLDSATVLAKARAEGYECYALAFDYGQRHRAELLAAQRVADAMAAAAFKVIKLDLSSIGGSALTDINIDVPDAGGEGIPVTYVPARNTVFLSIALGWAEVIGANSIHIGVNAVDYSGYPDCRPAFIDAFEKLANVATKAGIEGQGLHIETPLIDLSKSEIIQLGMQLNVDYGLTVSCYRADDNGLACGRCDSCYLRREGFAQAGVADPTRYK

SEQ ID NO: 42450 - protein, 223 aa, Spongiibacter sp.
  REGION 1..223: note = tr|A0A2D7WEG9|A0A2D7WEG9_9GAMM 7-cyano-7-deazaguanine synthase OS=Spongiibacter sp.; OX = 2024860 GN=queC PE=3 SV=1
MTKKAIVLVSGGLDSATVLAQARADGYECYALAFDYGQRHRAELIAARRVADAHGAKEFKIIKLDLSSIGGSALTDASIDVPDAGGEGIPITYVPARNTVFLSIALGWAEVIGANSIHIGVNAVDYSGYPDCRPAFIDAFEHLANVATKVGVEGQAMHIATPLIDLSKAQIIGLGTDLGVDYSLTVSCYQADDEGYACGRCDSCHLRRQGFIEAGVSDPTRYR

SEQ ID NO: 42451 - protein, 231 aa, unidentified
  source 1..231: note = Spongiibacteraceae bacterium
  REGION 1..231: note = tr|A0A2E2K5M7|A0A2E2K5M7_9GAMM 7-cyano-7-deazaguanine synthase OS=Spongiibacteraceae bacterium OX=2026793 GN=queC PE=3 SV=1
MTTPKRAVILVSGGLDSATVLAMARAEDYDCYTLAFDYGQRHRAELLAAERVSKALGAVEHKVIPLDLTAIGGSALTDNTIAVPDHSDEAGIPVTYVPARNTVFLSIGLGWAEVLGADDIFIGVNAVDYSGYPDCRPDFIEAFERMANLATKAGVEGHPLRIRTPLIDLSKGEIIRRGMVLGVDYALTVSCYQADADGRACGKCDSCYLRREGFTAAGLDDPTRYWGSVID

SEQ ID NO: 42452 - protein, 226 aa, unidentified
  source 1..226: note = Spongiibacteraceae bacterium
  REGION 1..226: note = tr|A0A2E7IPR1|A0A2E7IPR1_9GAMM 7-cyano-7-deazaguanine synthase OS=Spongiibacteraceae bacterium OX=2026793 GN=queC PE=3 SV=1
MTDKKRAVVLVSGGLDSATVLAMARADGYDCYALAFDYGQRHRAELHAARNVAEISGAIEYKVIPLDLTAIGGSALTDANIAVPDHSDAPGIPVTYVPARNTVFLSIALGWAEVLGAESIFIGVNAVDYSGYPDCRPDFIQAFETLANLATKAGVEGGGLRVVTPLIDLSKADIIRKGIALGVDYAQTVSCYQADDGGQACGRCDSCFLRRQGFDAAGVEDPTRYQ

SEQ ID NO: 42453 - protein, 231 aa, Sporolactobacillus inulinus
  REGION 1..231: note = tr|A0A0U1QPM3|A0A0U1QPM3_9BACL 7-cyano-7-deazaguanine synthase OS=Sporolactobacillus inulinus CASD OX=1069536 GN=queC PE=3 SV=1
MKKRAVVVLSGGLDSTTCMGVAKEQGYELWPMTFSYGQRHDREVEQARKIADYFQVNTHRIVNLDFFKQLGGSALTDQQLDVPQNEENPGIPITYVPARNMIFLALASAYAEVIGASAVFTGVSSVDYSGYPDCRPEFIESMAKTVNLATRAGVTDHKISIETPLMHLTKAETIRLGTRLHVPYERTTSCYNGGDKACGTCDSCRLRIKGFQEAGLVDPIDYAIPIDWSRE

SEQ ID NO: 42454 - protein, 231 aa, Sporolactobacillus inulinus; identical to SEQ ID NO: 42453
  REGION 1..231: note = tr|A0A4Y3T8P5|A0A4Y3T8P5_9BACL 7-cyano-7-deazaguanine synthase OS=Sporolactobacillus inulinus OX=2078 GN=queC PE=3 SV=1

SEQ ID NO: 42455 - protein, 230 aa, Sporolactobacillus laevolacticus
  REGION 1..230: note = tr|V6IYD3|V6IYD3_9BACL 7-cyano-7-deazaguanine synthase OS=Sporolactobacillus laevolacticus DSM 442; OX = 1395513 GN=queC PE=3 SV=1
MAKKAVVVLSGGLDSTTCMGIANREGYELYPLTFSYGQRHQREVEQAKKIAAYYGVSEHRIVDLDFFKQLGGSALTDKSIEVPDDGEEKGIPVTYVPARNMIFLSLASAYAEVIGAETIFTGVSSVDYSGYPDCRPEFIASMSETINLATKSGVTDHHLTIKTPLMHLTKGETIRLGTELGVPYQLTTSCYNGEEEACGTCDSCRLRIKGFKEAGQIDPISYRIPIDWLN

SEQ ID NO: 42456 - protein, 229 aa, unidentified
  source 1..229: note = Sporolactobacillus nakayamae
  REGION 1..229: note = tr|A0A1I2Q5A5|A0A1I2Q5A5_9BACL 7-cyano-7-deazaguanine synthase OS=Sporolactobacillus nakayamae OX=269670 GN=queC PE=3 SV=1
MKKAVIVLSGGLDSTTCMSIANNVGYELCPITFCYGQRHQREVEQAKKIAAFYEVKEHRIVDLDFFRQLGGSALTDASIRVPEDGTEKGIPVTYVPARNMIFLSLATAYAEVIGADTIFTGVSSVDYSGYPDCRPEFIRSMNQTINLATKTGVSAHHLTIKTPLMHLTKADTVRLGMKLSAPYQLTTSCYNGGEKACGTCDSCRLRIKGFKEAGLVDPIPYQITVDWTN

SEQ ID NO: 42457 - protein, 230 aa, unidentified
  source 1..230: note = Sporolactobacillus shoreae
  REGION 1..230: note = tr|A0A4Z0GNZ4|A0A4Z0GNZ4_9BACL 7-cyano-7-deazaguanine synthase OS=Sporolactobacillus shoreae OX=1465501 GN=queC PE=3 SV=1
MTKKAVVVLSGGLDSTTCMGIAKSEGFELYPLTFSYGQRHQREIEQAKKIASFFNVTEHRIIDLDFFRQIGGSALTDQSIDVPDDGEDNGIPVTYVPARNMIFLSLASAYAEVIGAEAIFTGVSSVDYSGYPDCRPEFIESMNQTINLATKTGVTNHHLSIKTPLMYLTKGETIRLGTELGVPYDLTTSCYKGGEEACGTCDSCRLRIKGFKEAGQVDPIAYQLPIDWTN

SEQ ID NO: 42458 - protein, 230 aa, Sporolactobacillus sp.
  REGION 1..230: note = tr|A0A4Q4IPW2|A0A4Q4IPW2_9BACL 7-cyano-7-deazaguanine synthase OS=Sporolactobacillus sp. THM7-4 OX=2511170 GN=queC PE=3 SV=1
MTRKAVVVLSGGLDSTTCMGIARDRGYELYPVTFSYGQRHDREVEQAKKVANYFHARHHRIVDIDFFKQIGGSALTDLSIDVPQAGVGEGIPATYVPARNMIFLSLASAYAEVLGAEAIFIGVSSVDYSGYPDCRPEFIESMNQTVNLATKTGTTDHGLTIEAPLMHLTKSETIKLGTRLGVPYHLTTSCYNGGETACGTCDSCRLRIKGFKEAGLIDPVPYQIAIDWNA

SEQ ID NO: 42459 - protein, 230 aa, Sporolactobacillus sp.
  REGION 1..230: note = tr|A0A4Q4J6Q9|A0A4Q4J6Q9_9BACL 7-cyano-7-deazaguanine synthase OS=Sporolactobacillus sp. THM7-7 OX=2511172 GN=queC PE=3 SV=1
MAKKAVVVLSGGLDSTTCMGIAKDQGYELYPITFSYGQRHDREIEQAKKVAAYFQVKQHRIVDIGFFKQIGGSALTDASVSVPQDGLGQDIPVTYVPARNMIFLSLASAYAEVLGAEAIFTGVSSVDYSGYPDCRPEFIDSMNQTINLATKAGVTDHRLSIQTPLIHLSKSETIKLGTKLGVPYHLTTSCYNGGDKACGVCDSCRLRIKGFKEAGLVDPIPYQVDIDWNA

SEQ ID NO: 42460 - protein, 231 aa, Sporolactobacillus terrae
  REGION 1..231: note = tr|A0A410D5Q2|A0A410D5Q2_9BACL 7-cyano-7-deazaguanine synthase OS=Sporolactobacillus terrae OX=269673 GN=queC PE=3 SV=1
MKKRAVVVLSGGLDSTTCMGVAKDQGYELWPMTFSYGQRHDREVEQARKIADYFQVNTHRIVNLDFFKQLGGSALTDQQLDVPQNEENPGIPITYVPARNMIFLALASAYAEVIGASAVFTGVSSVDYSGYPDCRPEFIESMAKTVNLATRAGVTEHKISIETPLMHLTKAETIRLGTRLHVPYERTTSCYNGGDKACGTCDSCRLRIKGFQEAGLVDPIDYAIPIDWSRA

SEQ ID NO: 42461 - protein, 223 aa, Sporolituus thermophilus
  REGION 1..223: note = tr|A0A1G7NX16|A0A1G7NX16_9FIRM 7-cyano-7-deazaguanine synthase OS=Sporolituus thermophilus DSM 23256 OX=1123285 GN=queC PE=3 SV=1
MFGLNKEIALVVFSGGQDSTTCLFWAMKHFKGVEAVTFDYGQRHRAEIECAQKIAAEQGISHTILDLSLLNQLAPSALTRKDIEVRVGENGSLPTTFVPGRNLLFLSFAAVLARQKNIRHIVTGVCETDFSGYPDCRDAFIKSLNVTIQLAMDYQFVIHTPLMWLNKAETWQLADELGVLDYIRTNTLTCYHGVIGDGCGQCPACRLRAAGLAAYLEQKGRTK

SEQ ID NO: 42462 - protein, 228 aa, Sporomusa acidovorans
  REGION 1..228: note = tr|A0A259UAN6|A0A259UAN6_9FIRM 7-cyano-7-deazaguanine synthase OS=Sporomusa acidovorans DSM 3132 OX=1123286 GN=queC PE=3 SV=1
MNKKAVVLLSGGLDSTVCMAVAYNQGYELLPISFNYHQRHKRELAAAAQVAKHYKVDRHLIIETNMDAIGGSALTDTSIAVPAGEIGAATVPITYVPARNLIFLSYALGYAEVTGAERVYIGVNALDYSGYPDCRPEFIAMFQQLANYSTKATAEDGRKIMIETPLIRLTKKDIVLLGDKLGAPLHLTTSCYEGQDKACGQCDSCLLRLKGFAEAGLIDPILYQTRGE

SEQ ID NO: 42463 - protein, 228 aa, Sporomusa malonica
  REGION 1..228: note = tr|A0A1W2E9T5|A0A1W2E9T5_9FIRM 7-cyano-7-deazaguanine synthase OS=Sporomusa malonica; OX = 112901 GN=queC PE=3 SV=1
MNRKAVVLLSGGLDSTVCMAVANSEGYELLPISFNYHQRHSRELVAAASVAQHYKIDRHLVIETNMEAIGGSALTDASLAVPTGQIGAVGVPVTYVPARNLIFLSYALGYAEVTGADRVYIGVNALDYSGYPDCRPEFIALFQQLADYSTKAAVEDGRKIIIETPLINLTKKDIVLLGDRLGAPLHLTTSCYQGTDEACGQCDSCLLRLKGFAEAGLPDPILYRTRSD

SEQ ID NO: 42464 - protein, 219 aa, Sporomusa silvacetica
  REGION 1..219: note = tr|A0A259UCQ8|A0A259UCQ8_9FIRM 7-cyano-7-deazaguanine synthase OS=Sporomusa silvacetica DSM 10669 OX=1123289 GN=queC PE=3 SV=1
MSKAALVVFSGGQDSTTCLFWAMQHFDKVAAITFNYNQRHKQEIECAATIASEFNIPHMVLDMSLLNQLAPNALTRSDIEIKAGENGQLPTTFVDGRNLLFLSFAAVAAKQKQIRHIVTGVCETDFSGYPDCRDVFVKSMNVTLNLAMDYPFVIHTPLMWIDKADTWALADKLDKLDYIRQHTLTCYNGIMGDGCGECPACKLRNAGLKKYLETKAGKQ

SEQ ID NO: 42465 - protein, 219 aa, Sporomusa sp.
  REGION 1..219: note = tr|A0A0U1L4Y7|A0A0U1L4Y7_9FIRM 7-cyano-7-deazaguanine synthase OS=Sporomusa sp. An4; OX = 411922 GN=queC PE=3 SV=1
MSKAALVVFSGGQDSTTCLFWAMQHFDTVAAITFNYNQRHKQEIECAAAIASEFNIPHMVLDMSLLNQLAPNALTRSDIEIKAGENGQLPTTFVDGRNLLFLSFAAVAAKQQQIRHIVTGVCETDFSGYPDCRDVFVKSMNVTLNLAMDYPFVIHTPLMWIDKADTWALADRLGKLEYIRQHTLTCYNGIIGDGCGECPACKLRNAGLKKYLETKAGKQ

SEQ ID NO: 42466 - protein, 219 aa, Sporomusa sp.
  REGION 1..219: note = tr|A0A562GRP4|A0A562GRP4_9FIRM 7-cyano-7-deazaguanine synthase OS=Sporomusa sp. KB1; OX = 943346 GN=queC PE=3 SV=1
MSKAALVVFSGGQDSTTCLFWAMQHFDKVEAITFNYNQRHKQEIECATTIANEFKIPHMVLDMSLLNQLAPNALTRSDIEIKAGENGQLPTTFVDGRNLLFLSFAAVAAKQKQIRHIVTGVCETDFSGYPDCRDVFVKSMNVTLNLAMDYPFVIHTPLMWIDKADTWALADSLGKLEYIRQNTLTCYNGIMGDGCGECPACKLRNAGLKKYLETKAGKQ

SEQ ID NO: 42467 - protein, 228 aa, Sporomusa sphaeroides
  REGION 1..228: note = tr|A0A1U7MKC5|A0A1U7MKC5_9FIRM 7-cyano-7-deazaguanine synthase OS=Sporomusa sphaeroides DSM 2875 OX=1337886 GN=queC PE=3 SV=1
MKKKAVVLLSGGLDSTVCMAVANSEGYELLPISFNYHQRHKRELAAAASVAQHYNVDRHLIIETNMDAIGGSALTDPKLAVPEGDTGAAEVPITYVPARNLIFLSYALGYAEVTEAERVYIGVNALDYSGYPDCRPEFIAMFQQLANYSTKATAEDGRKIIIETPLIALSKKDIVLLGDKLAAPLHLTTSCYQGQDAACGQCDSCLLRLKGFAEAGLKDPILYHTRSE

SEQ ID NO: 42468 - protein, 228 aa, Sporomusa termitida
  REGION 1..228: note = tr|A0A517DSQ2|A0A517DSQ2_9FIRM 7-cyano-7-deazaguanine synthase OS=Sporomusa termitida; OX = 2377 GN=queC PE=3 SV=1
MNKKAVVLLSGGLDSTVCMAVANSEGYELLPISFNYHQRHSRELAAAASVARHYQVDRHLVIETNMEAIGGSALTDTSLAVPAGNINATGVPVTYVPARNLIFLSYALGYAEVTGADRVYIGVNALDYSGYPDCRPEFIALFQQLADYSTKAATEDGRKTSIETPLIKLTKRDIVLLGNRLSAPLHLTTSCYQGGDEACGQCDSCLLRLKGFAGAGLADPILYRTRSE

SEQ ID NO: 42469 - protein, 223 aa, unidentified
  source 1..223: note = Sporomusaceae bacterium
  REGION 1..223: note = tr|A0A402BPY4|A0A402BPY4_9FIRM 7-cyano-7-deazaguanine synthase OS=Sporomusaceae bacterium; OX = 1917525 GN=queC PE=3 SV=1
MKAVVLLSGGLDSTVCMAVAKSNDYEVFPLSFNYQQRHSVELESARKVAQYYQANRHLVIENNMGEFGGSALTDKSIEVPDGDLHRKDIPPTYVPARNLIFLSYALGYAEALGAERIFIGVNALDYSGYPDCRPEFINLFQQLADYSTKAAVQDKQRILIETPLIHLSKKDIVMLGKQLDAPLHLTHSCYRGGETACGTCDSCVLRLKGFAEAGIPDPITYLE

SEQ ID NO: 42470 - protein, 218 aa, unidentified
  source 1..218: note = Sporomusaceae bacterium
  REGION 1..218: note = tr|A0A3C0UE05|A0A3C0UE05_9FIRM 7-cyano-7-deazaguanine synthase OS=Sporomusaceae bacterium; OX = 1917525 GN=queC PE=3 SV=1
MAVHNSSALVVFSGGQDSTTCLFWALERFNKVEAVTFNYNQRHKQEIDCAKAIASELGIVHTVLDMSLLHQLTANALTRPEMEISSGGKGDLPSTFVDGRNLLFMSFAAVLAKQKGMQHIVTGVCETDFSGYPDCRDVFIKSLNVTVNLAMEYQFVIHTPLMWLNKAQTWKLADDMGKLDYIRMKTLTCYEGVMGEGCGQCPACKLRNNGLIQYKQGK

SEQ ID NO: 42471 - protein, 219 aa, Sporosarcina globispora
  REGION 1..219: note = tr|A0A0M0GEV3|A0A0M0GEV3_SPOGL 7-cyano-7-deazaguanine synthase OS=Sporosarcina globispora; OX = 1459 GN=queC PE=3 SV=1
MKNDKALVVFSGGQDSTTCLFWAKERFAEVEAVTFNYNQRHKLEIECARQISKELGIRHHILDMSLLNQLAPNALTRDEIEVKDGEEGELPSTFVPGRNLLFLSFAGVLASQINAKHIITGVCETDFSGYPDCRDVFIKSLNVTLNLSMDAQFVIHTPLMWLNKAETWKLADELDALDYVREKTLTCYNGIPAGGCGECPACHLRKNGLEEYLKEKGEL

SEQ ID NO: 42472 - protein, 216 aa, Sporosarcina luteola
  REGION 1..216: note = tr|A0A511Z6Y7|A0A511Z6Y7_9BACL 7-cyano-7-deazaguanine synthase OS=Sporosarcina luteola; OX = 582850 GN=queC PE=3 SV=1
MEKAVVVFSGGQDSTTCLLWAQKTFDSVEAVTFLYGQRNSSELDSAKKIAKDLGVAHTIMDLSLLNQLTENAMTRSDMEIDETGEVPNTFVEGRNHVFLSFAAIYAKRIGARHIITGVSETDFSGYPDCRNDFIKSLNVTLNLAMDARFEIHTPLMWKTKADTWEMADRMGRLDYIREHTTTCYNGVIGDGCGDCPSCKLRKQGLDAYMEKGYERV

SEQ ID NO: 42473 - protein, 217 aa, Sporosarcina newyorkensis
  REGION 1..217: note = tr|F9DRZ1|F9DRZ1_9BACL 7-cyano-7-deazaguanine synthase OS=Sporosarcina newyorkensis 2681 OX=1027292; GN = exsB PE=3 SV=1
MKQEKAVVVFSGGQDSTTCLFWALKQFKEVTTVTFDYGQRHHAEIECARNIAEELGVSFKVLDMTLINQLSANALTRDTIKITEEVGELPSTFVPGRNHLFFSFAAVYAQAIGARHLVTGVSETDFSGYPDCRDTFVKSLNVTLNLAMDAKFVMHTPLMWLDKASVWELSDQLGAFDFIQQRTLTCYNGIPAAGCGTCPACKLRSQGLEEYLERREA

SEQ ID NO: 42474 - protein, 217 aa, Sporosarcina newyorkensis; identical to SEQ ID NO: 42473
  REGION 1..217: note = tr|A0A1T4Y9V7|A0A1T4Y9V7_9BACL 7-cyano-7-deazaguanine synthase OS=Sporosarcina newyorkensis OX=759851 GN=queC PE=3 SV=1

SEQ ID NO: 42475 - protein, 214 aa, Sporosarcina pasteurii
  REGION 1..214: note = tr|A0A380C1Y7|A0A380C1Y7_SPOPA 7-cyano-7-deazaguanine synthase OS=Sporosarcina pasteurii; OX = 1474 GN=queC PE=3 SV=1
MEKAVVVFSGGQDSTTCLLWALEEFDEVETVTFLYGQRHELEVDCAKKIANDLGVKHKMIQMDLLNQLTENALTRKDMEIEEGKVPNTYVEGRNHIFLSFAAIYAKTIGAKNIITGVSETEFSGYPDCRDAFIQSLNTTVNLAMDAELKFITPLMWKDKAEVWEMADQMGRLEYIRENTLTCYNGVIGDGCGKCPSCKLRNEGLQTYLQKRAVL

SEQ ID NO: 42476 - protein, 221 aa, Sporosarcina psychrophila
  REGION 1..221: note = tr|A0A127VXX9|A0A127VXX9_SPOPS 7-cyano-7-deazaguanine synthase OS=Sporosarcina psychrophila OX=1476 GN=queC PE=3 SV=1
MKNEKAVVVFSGGQDSTTCLFWALKNFREVATVTFDYGQRHSEEIECARKIADELGVSFKVLDMNLINQLSANALTRDDIEVNEVVGELPSTFVPGRNHLFLSFAAVYADAIGARHLITGVSETDFSGYPDCRDNFIKSLNVTLNLAMDGRFVIHTPLMWLDKSEVWALSDELGAFDFVQNKTLTCYNGVPSTGCGKCPACVLRNDGLATYLSKKSVGVSE

SEQ ID NO: 42477 - protein, 221 aa, Sporosarcina sp.
  REGION 1..221: note = tr|A0A2G5XHJ4|A0A2G5XHJ4_9BACL 7-cyano-7-deazaguanine synthase OS=Sporosarcina sp. P19; OX = 2048258 GN=queC PE=3 SV=1
MEECRVSKAVIVFSGGQDSTTCLLWAMKEFDEVETVTFLYGQRHKLEVDCATKIAKDLGVKQKIIQMDVLNQLTSNALTRNDMQIEAEEGRVPNTFVEGRNHIFLSFAAIYAKTVGANAIITGVSETDFSGYPDCRDTFIRSLNTTLNLAMDYQFDLITPLMWKDKAQVWELADQMNRLEYVRENTLTCYNGVIADGCQECPACKLRNDGLAKYLQGEHVS

SEQ ID NO: 42478 - protein, 221 aa, Sporosarcina sp.
  REGION 1..221: note = tr|A0A5B0DI80|A0A5B0DI80_9BACL 7-cyano-7-deazaguanine synthase OS=Sporosarcina sp. ANT_H38 OX=2597358 GN=queC PE=3 SV=1
MKNEKAVVVFSGGQDSTTCLFWALKNFGEVATVTFDYGQRHSEEIECARKIADELGVSFKVLDMNLINQLSANALTRDDIEVKEVEGELPSTFVPGRNHLFLSFAAVYADAIGARHLITGVSETDFSGYPDCRDTFIKSLNVTLNLAMDGRFVIHTPLMWLDKSEVWALSDELGAFNFVQDNTLTCYNGIPSTGCGECPACVLRNDGLATYLAKKSVGAPE

SEQ ID NO: 42479 - protein, 420 aa, Stackebrandtia nassauensis
  REGION 1..420: note = tr|D3QAB4|D3QAB4_STANL Uncharacterized protein; OS = Stackebrandtia nassauensis (strain DSM 44728 / NRRL B-16338 / NBRC 102104 / LLR-40K-21) OX=446470 GN=Snas_3026; PE = 4SV=1
MRTPKRTWRFHFGGHPSRVPEGWVRLDAPLDNELLHDGPPQVGLTLAGLREAIGRQPPARVEDLFTIAVAVYTADRRAPRRRDGKPRRFELNIPVSEPDTWNRPQSRALLCALLGGLSGDEWTVQFRQDVNPPPWQSQLLPAEVEAVALFSGGLDSFCHAGLLRPASKVVLVSHGLGPNLRERKRELRAALGGETVMSAEFQVRINAVPGTEREPHPRTRALLLLAAGVLVCAANGVDTLHCPENGLLALHPAKAPLWSQSATPIPPMTVHLANALLDSLDVDTRVVNPYAELTKGEVCERAVDAGWRRSLLGRTITCVNPDKKSSGRFGNCGYCRHCLVRHAALVRVGGDLTEYRDVYPPEIPLMAPGPHDKDLRALRAWLGGELTAEQLAPLPPEADAARALAVVERARLELADIYRV

SEQ ID NO: 42480 - protein, 229 aa, Stakelama pacifica
  REGION 1..229: note = tr|A0A4R6FS29|A0A4R6FS29_9SPHN 7-cyano-7-deazaguanine synthase OS=Stakelama pacifica; OX = 517720 GN=queC PE=3 SV=1
MTDQMRYAVTLLSGGLDSMTVAARAKAEGYRLLALSVDYNQRHQVELDAARRIADYLGAERHIILPLDLRAFGGSALTADIDVPKDGVGDTIPVTYVPARNTIFLSLALGWAEAMGGRDLFIGVNALDYSGYPDCRPEFIVGFEQLAELATKAGAEGERFRIHAPLQHMSKADIVREGSRLGIDMGLSWSCYDPTPEGLHCGLCDSCRLRSKGFEEAGIEDPTRYATAP

SEQ ID NO: 42481 - protein, 223 aa, unidentified
  source 1..223: note = Stanieria cyanosphaera
  REGION 1..223: note = tr|K9XU30|K9XU30_STAC7 7-cyano-7-deazaguanine synthase OS=Stanieria cyanosphaera (strain ATCC 29371 / PCC 7437) OX=111780 GN=queC PE=3 SV=1
MTKAVVLLSGGLDSATTAAIAINEGFEAIALSFRYGQRHAKELSAAKQIAQLLQIKEHFIVDINLSQWGGSSLTDQSIDLPQTGVDPNIIPSTYVPGRNTVFIAIALALAEAKGATAIYLGINAVDYSGYPDCRPEYLAAYQNLANLSSKVGVEGKAPQLIAPLVQDSKVDIVRRALKLGVPIEVTWSCYQGGEQPCGLCDSCRIRDRALIEVGRPDLASRQL

SEQ ID NO: 42482 - protein, 225 aa, unidentified
  source 1..225: note = Stanieria sp.
  REGION 1..225: note = tr|A0A140K2C5|A0A140K2C5_9CYAN 7-cyano-7-deazaguanine synthase OS=Stanieria sp. NIES-3757; OX = 1807358 GN=queC PE=3 SV=1
MTKAVVLLSGGLDSATTAAIAINEGYEAIALSFRYGQRHAKELSAAKQIAQVLQIKEHFIVDINLSQWGGSSLTDSSIDLPQTGVEPNIIPSTYVPGRNTVFIAIALSLAEAKGATAIYLGINAVDYSGYPDCRPEYLAAYQNLANLSSKVGVEGKAPQLIAPLVQDSKVDIVRRALKLGVPIEVTWSCYQGGEQPCGLCDSCRIRDRALIEAGRPDLASNHNLI

SEQ ID NO: 42483 - protein, 222 aa, Staphylococcus agnetis
  REGION 1..222: note = tr|A0A2T4MLF5|A0A2T4MLF5_9STAP 7-cyano-7-deazaguanine synthase OS=Staphylococcus agnetis; OX = 985762 GN=queC PE=3 SV=1
MSDVLQNEKALVVFSGGQDSTTCLFYATAHFKEVELVTFEYGQRHAQEIEVAKKIAAEQGLKHHVLDMSLLSQLSPNALTSHDMTIDTTDGVPNTFVPARNLLFLSFAGALAYQINAKHIITGVCETDFSGYPDCRDAFIKSMNVTMNLAMDKDFVIHTPLMWLNKKETWALSDELGALDYIRTQTLTCYNGVIADGCGECPACLLRQKGLEAYLNEKGVQS

SEQ ID NO: 42484 - protein, 223 aa, unidentified
  source 1..223: note = Staphylococcus argensis
  REGION 1..223: note = tr|A0A2K4FHD3|A0A2K4FHD3_9STAP 7-cyano-7-deazaguanine synthase OS=Staphylococcus argensis; OX = 1607738 GN=queC PE=3 SV=1
MTEQTLDKEKAIVVFSGGQDSTTCLFWAQKHFEHVELVTFQYGQRHDKEIEVAEAIAKEQGLKHHVLDMSLLSQLTPNALTRHDMDIEQEGDEMPNTFVPARNLLFLSFAGALAYQLNAKNIITGVCETDFSGYPDCRDSFIKSMNVTLSLSMDKDFVIHTPLMWLDKKETWALSDELGVLDYIRHNTLTCYNGIIGEGCGTCPACQLRARGLNAYLEEKGEK

SEQ ID NO: 42485 - protein, 222 aa, unidentified
  source 1..222: note = Staphylococcus argenteus
  REGION 1..222: note = tr|A0A380BSP5|A0A380BSP5_9STAP 7-cyano-7-deazaguanine synthase OS=Staphylococcus argenteus OX=985002 GN=queC PE=3 SV=1
MESVLNNEKAIVVFSGGQDSTTCLFYAKKHFKEVELVTFNYGQRHDTEIEVAKQIANEQGMKHHVLDMSLLSQLTPNALTQHDMEITNNEDGIPNTFVPARNLLFLSFAGALAYQIGAKHIITGVCETDFSGYPDCRDSFIKSMNVTLSLAMDKDFVIHTPLMWLNKAETWQLSDELGVLDYIRTNTLTCYNGIVGNGCGECPACQLRQRGLNQYLESKGVL

SEQ ID NO: 42486 - protein, 222 aa, unidentified
  source 1..222: note = Staphylococcus argenteus
  REGION 1..222: note = tr|A0A5B8L8K2|A0A5B8L8K2_9STAP 7-cyano-7-deazaguanine synthase OS=Staphylococcus argenteus OX=985002 GN=queC PE=3 SV=1
MESVLNNEKAIVVFSGGQDSTTCLFYAKKHFKEVELVTFNYGQRHDTEIEVAKQIANEQGMKHHVLDMSLLSQLTPNALTQHDMEITNNEDGIPNTFVPARNLLFLSFAGALAYQIGAKHIITGVCETDFSGYPDCRDSFIKSMNVTLSLAMDKDFVIHTPLMWLNKAETWQLSDELGVLDYIRTNTLTCYNGIIGNGCGECPACQLRQRGLNQYLESKGVL

SEQ ID NO: 42487 - protein, 224 aa, Staphylococcus arlettae
  REGION 1..224: note = tr|A0A380CNT8|A0A380CNT8_9STAP 7-cyano-7-deazaguanine synthase OS=Staphylococcus arlettae; OX = 29378 GN=queC PE=3 SV=1
MTQDILDHSKALVVFSGGQDSTTCLFWAKARFDEVTLVTFDYGQRHQTEIDVAKRIAHEQNLQHHVLDMSLLSQLTPNALTNHELAIDTAEDGVPNTFVPARNLLFLSFAGALAYQLNIKNIITGVCETDFSGYPDCRDSFVKSMNVTMNLAMDKNFVLHTPLMWLDKKQTWELSDQLGVLDYIKDQTLTCYNGIIGQGCGECPACHLRTRGLTQYLATKGENL

SEQ ID NO: 42488 - protein, 222 aa, Staphylococcus aureus
  REGION 1..222: note = sp|Q2G1X6|QUEC_STAA8 7-cyano-7-deazaguanine synthase; OS = Staphylococcus aureus (strain NCTC 8325) OX=93061; GN = queC PE=3 SV=1
MESVLNNEKAIVVFSGGQDSTTCLFYAKKHFKEVELVTFNYGQRHDTEIEVAKQIAQDQGMKHHVLDMSLLSQLTPNALTQHDMEITNNEDGIPNTFVPARNLLFLSFAGALAYQIGAKHIITGVCETDFSGYPDCRDSFIKSMNVTLSLAMDKDFVIHTPLMWLNKAETWKLSDELEVLDYIRTKTLTCYNGIIGDGCGECPACHLRQRGLNQYLESKGAL

SEQ ID NO: 42489 - protein, 222 aa, Staphylococcus aureus
  REGION 1..222: note = tr|A0A033UWZ9|A0A033UWZ9_STAAU 7-cyano-7-deazaguanine synthase OS=Staphylococcus aureus C0673 OX=1413510 GN=queC PE=3 SV=1
MSERLKNEKAVVVFSGGQDSTTCLFYAKEHFKEVELVTFQYGQRHDLEIKVAEDIAKEQGLKHHILDMSLLSQLSPNALTDHSMQIENDENGIPNTFVPARNLLFLSFAGALAYQIGAKHIITGVCETDFSGYPDCRDSFIKSMNLSLNLSMDKDFVIHTPLMWLNKKETWALSDQLGALDYVREKTLTCYNGVMSDGCGECPACKLRKQGLDQYLETKGSL

SEQ ID NO: 42490 - protein, 223 aa, Staphylococcus auricularis
  REGION 1..223: note = tr|A0A2K4C4F7|A0A2K4C4F7_9STAP 7-cyano-7-deazaguanine synthase OS=Staphylococcus auricularis OX=29379 GN=queC PE=3 SV=1
MSQQSLDPNKAVVVFSGGQDSTTCLFWAKKHFEHVELVTFQYGQRHDTEIEVAQQIAQEQGLKHHILDMSLLSQLTPNALTQHDMDIEQTDDDMPNTFVPARNLLFLSFAGALAYQINAKNIITGVCETDFSGYPDCRDSFIKSMNVTLSLAMDKDFVIHTPLMWLDKKQTWALSDDLGVLDYVRYNTLTCYNGIIGTGCGECPACKLRARGLNAYLAEKGAN

SEQ ID NO: 42491 - protein, 223 aa, Staphylococcus capitis
  REGION 1..223: note = tr|A0A0U1EJL6|A0A0U1EJL6_STACP 7-cyano-7-deazaguanine synthase OS=Staphylococcus capitis; OX = 29388 GN=queC PE=3 SV=1
MTKSTLDKDKAIVVFSGGQDSTTCLFYAKKHFKEVELVTFNYGQRHDTEIEVAKKIANEQNLKHHILDMSLLSQLTPNALTQHDLEIEENDDGIPNTFVPARNLLFLSFAGALAYQLNAKHIITGVCETDFSGYPDCRDSFIKSMNVTLSLSMDKDFVIHTPLMWLDKAQTWELSDELGVLNYVRHNTLTCYNGVIGDGCGECPACKLRARGLHHYLESKGVE

SEQ ID NO: 42492 - protein, 223 aa, Staphylococcus capitis
  REGION 1..223: note = tr|A0A4U9THC4|A0A4U9THC4_STACP 7-cyano-7-deazaguanine synthase OS=Staphylococcus capitis; OX = 29388 GN=queC PE=3 SV=1
MTKSTLDKDKAIVVFSGGQDSTTCLFYAKKHFKEVELVTFNYGQRHDTEIEVARKIANEQNLKHHILDMSLLSQLTPNALTQHDLEIEENEDGIPNTFVPARNLLFLSFAGALAYQVNAKHIITGVCETDFSGYPDCRDSFIKSMNVTLSLSMDKDFVIHTPLMWLDKAQTWELSDELGVLDYIRHHTLTCYNGIIGDGCGECPACKLRARGLHHYLESKGVE

SEQ ID NO: 42493 - protein, 223 aa, Staphylococcus caprae
  REGION 1..223: note = tr|C5QQ81|C5QQ81_9STAP 7-cyano-7-deazaguanine synthase OS=Staphylococcus caprae M23864:W1 OX=525378; GN = queC PE=3 SV=1
MTESDLNKDKAIVVFSGGQDSTTCLFYAKKHFKEVELVTFNYGQRHDTEIEVAKKIANEQGLKHHILDMSLLSQLTPNALTQHDLDIEENEDGIPNTFVPARNLLFLSFAGALAYQINAKHIITGVCETDFSGYPDCRDSFIKSMNVTLSLSMGKDFVIHTPLMWLDKAQTWELSDELGVLDYIRYNTLTCYNGIIGDGCGECPACKLRARGLHHYLKSKGAE

SEQ ID NO: 42494 - protein, 223 aa, Staphylococcus carnosus
  REGION 1..223: note = tr|A0A431ZR15|A0A431ZR15_STACA 7-cyano-7-deazaguanine synthase OS=Staphylococcus carnosus subsp. carnosus OX=147448 GN=queC PE=3 SV=1
MTQQTLNKDKAIVVFSGGQDSTTCLFYAKKHFKDVELVTFNYGQRHDTEIEVAKQIAQEQGLKHHILDMSLLSQLTPNALTQHDMDIETGEDGIPNTFVPARNLLFLSFAGALAYQLNAKHIITGVCETDFSGYPDCRDSFIKSMNVTLSLSMDKDFVIHTPLMWLDKAQTWELSDELGVLDYIRYNTITCYNGIVGDGCGECPACKLRQRGLEQYLETKGVN

SEQ ID NO: 42495 - protein, 223 aa, Staphylococcus carnosus
  REGION 1..223: note = tr|B9DK41|B9DK41_STACT 7-cyano-7-deazaguanine synthase OS=Staphylococcus carnosus (strain TM300); OX = 396513 GN=queC PE=3 SV=1
MASHTLDDNKALVVFSGGQDSTTCLFYAKEKFEEVELVTFQYGQRHDTEIEVAKKIADEQGLKHHILDMSLLSQLTPNALTQHNLEIEQTDDGVPNTFVPARNLLFLSFAGALAYQIKARHIITGVCETDFSGYPDCRDDFVKSMNVTLNLSMDKNFVIHTPLMWLDKKETWALSDQLGVLDYVRNQTLTCYNGIIADGCGECPACKLRARGLNAYLEEKGVK

SEQ ID NO: 42496 - protein, 223 aa, Staphylococcus chromogenes
  REGION 1..223: note = tr|A0A4U0DFN2|A0A4U0DFN2_STACR 7-cyano-7-deazaguanine synthase OS=Staphylococcus chromogenes OX=46126 GN=queC PE=3 SV=1
MSEVLQNEKALVVFSGGQDSTTCLFYAKSHFKEVELVTFEYGQRHSQEIDVAKNIAQEQGLKHHILDMSLLSQLTPNALTSHDMAIDTSNDVPNTFVPARNLLFLSFAGALAYQINAKHIITGVCETDFSGYPDCRDAFIKSMNVTMSLAMDRDFVIHTPLMWLNKKETWALSDELGALDYIRHNTLTCYNGIIAEGCGTCPACQLRQNGLDAYLAEKGESHS

SEQ ID NO: 42497 - protein, 223 aa, Staphylococcus chromogenes
  REGION 1..223: note = tr|A0A2T4M0L4|A0A2T4M0L4_STACR 7-cyano-7-deazaguanine synthase OS=Staphylococcus chromogenes OX=46126 GN=queC PE=3 SV=1
MSEVLQNEKALVVFSGGQDSTTCLFYAKTHFKEVELVTFEYGQRHSQEIDVAKNIAQEQGLKHHVLDMSLLSQLTPNALTSHDMAIDTSNDVPNTFVPARNLLFLSFAGALAYQINAKHIITGVCETDFSGYPDCRDAFIKSMNVTMSLAMDRDFVIHTPLMWLNKKETWALSDELGALDYIRHNTLTCYNGIIAEGCGTCPACQLRQNGLDAYLAEKGESHS

SEQ ID NO: 42498 - protein, 223 aa, Staphylococcus cohnii
  REGION 1..223: note = tr|A0A2T4LU17|A0A2T4LU17_9STAP 7-cyano-7-deazaguanine synthase OS=Staphylococcus cohnii; OX = 29382 GN=queC PE=3 SV=1
MTQQPLNNNKAIVVFSGGQDSTTCLFWAKKHFDEVVLVTFEYGQRHDTEIQVAKQIAKEQAVEHHVLDMSLLSQLTPNALTQHDIDIDEDEDGMPNTFVPARNLLFLSFAGALAYQTNTKHIITGVCETDFSGYPDCRDNFIKSMNVTLSLSMDKDFVIHTPLMWLDKKQTWALSDELGVLDYVRNRTLTCYNGIIGEGCGECPACKLRARGLNAYLKEKGAN

SEQ ID NO: 42499 - protein, 223 aa, Staphylococcus cohnii; identical to SEQ ID NO: 36487
  REGION 1..223: note = tr|A0A0M2NYA3|A0A0M2NYA3_STACC 7-cyano-7-deazaguanine synthase OS=Staphylococcus cohnii subsp. cohnii OX=74704 GN=queC PE=3 SV=1

SEQ ID NO: 42500 - protein, 223 aa, Staphylococcus condimenti
  REGION 1..223: note = tr|A0A143PAE7|A0A143PAE7_9STAP 7-cyano-7-deazaguanine synthase OS=Staphylococcus condimenti OX=70255 GN=queC PE=3 SV=1
MASHTLDDNKALVVFSGGQDSTTCLFYAKEKFEEVELVTFQYGQRHDTEIEVAKKIADEQGLKHHILDMSLLSQLTPNALTQHNLEIGQTDDGVPNTFVPARNLLFLSFAGALAYQIKARHIITGVCETDFSGYPDCRDDFVKSMNVTLNLSMDKNFVIHTPLMWLDKKETWALSDQLGVLDYVRNQTLTCYNGIIADGCGECPACKLRARGLNAYLEEKGVK

SEQ ID NO: 42501 - protein, 222 aa, Staphylococcus delphini
  REGION 1..222: note = tr|A0A3S4M0R3|A0A3S4M0R3_9STAP 7-cyano-7-deazaguanine synthase OS=Staphylococcus delphini; OX = 53344 GN=queC PE=3 SV=1
MSEVLNNEKALVVFSGGQDSTTCLFYAKKHFKEVELVTFEYGQRHAKEIEVAKEIAEDQGLKHHVLDMALLSQLTPNALTSHDMTIDSHNDVPNTFVPARNLLFLSFAGALAYQIGAKHLITGVCETDFSGYPDCRDSFIKSMNVTLNLAMDRDFVIHTPLMWLNKKETWALSDDSGVLDYVRDRTLTCYNGMIAEGCGECPACQLRQRGLEQYLAEKGREV

SEQ ID NO: 42502 - protein, 222 aa, Staphylococcus delphini
  REGION 1..222: note = tr|A0A2A4HDH1|A0A2A4HDH1_9STAP 7-cyano-7-deazaguanine synthase OS=Staphylococcus delphini; OX = 53344 GN=queC PE=3 SV=1
MSEVLNNEKALVVFSGGQDSTTCLFYAKKHFKEVELVTFEYGQRHAKEIEVAKEIAEDQGLKHHVLDMALLSQLTPNALTSHDMTIDSHNDVPNTFVPARNLLFLSFAGALAYQIGAKHLITGVCETDFSGYPDCRDSFIKSMNVTLNLAMDRDFVIHTPLMWLNKKETWALSDDLGVLDYVRDRTLTCYNGMIAEGCGECPACQLRQRGLEQYLAEKGREV

SEQ ID NO: 42503 - protein, 223 aa, Staphylococcus devriesei
  REGION 1..223: note = tr|A0A2K4DUX2|A0A2K4DUX2_9STAP 7-cyano-7-deazaguanine synthase OS=Staphylococcus devriesei OX=586733 GN=queC PE=3 SV=1
MTNSALNKDKALVVFSGGQDSTTCLFYAKKHFKEVELVTFNYGQRHDTEIEVATKIAKEQDLKHHVLDMSLLSQLTPNALTQHDMDIETGDDGIPNTFVPARNLLFLSFAGALAYQLNAKHIITGVCETDFSGYPDCRDSFIKSMNVTLSLSMDKDFVIHTPLMWLDKAQTWELSDELGVLDYIRHHTLTCYNGIIGDGCGECPACKLRQRGLENYLETKGAN

SEQ ID NO: 42504 - protein, 223 aa, Staphylococcus devriesei
  REGION 1..223: note = tr|A0A2T4KAZ0|A0A2T4KAZ0_9STAP 7-cyano-7-deazaguanine synthase OS=Staphylococcus devriesei OX=586733 GN=queC PE=3 SV=1
MTNSALNKDKALVVFSGGQDSTTCLFYAKKHFKEVELVTFNYGQRHDTEIEVATKIAKEQNLKHHVLDMSLLSQLTPNALTQHDMDIETGDDGIPNTFVPARNLLFLSFAGALAYQLNAKHIITGVCETDFSGYPDCRDSFIKSMNVTLSLSMDKDFVIHTPLMWLDKAQTWELSDELGVLDYIRHNTLTCYNGVIGDGCGECPACKLRQRGLENYLESKGAN

SEQ ID NO: 42505 - protein, 223 aa, unidentified
  source 1..223: note = Staphylococcus edaphicus
  REGION 1..223: note = tr|A0A2C6WQM3|A0A2C6WQM3_9STAP 7-cyano-7-deazaguanine synthase OS=Staphylococcus edaphicus OX=1955013 GN=queC PE=3 SV=1
MSEQTLDNNKAIVVFSGGQDSTTCLFWAKKHFEHVELVTFAYGQRHDTEIEVAKQIAKEQDIKHHILDMSLLSQLTPNALTQHDLDIKVGEDGIPNTFVPARNLLFLSFAGALAYQTNAKHIITGVCETDFSGYPDCRDSFIKSMNVTLSLSMDKDFVIHTPLMWLDKQATWALSDELGALEYIRYNTLTCYNGVIGEGCGECPACKLRANGLNAYLEEKGVD

SEQ ID NO: 42506 - protein, 223 aa, Staphylococcus epidermidis
  REGION 1..223: note = sp|Q5HR20|QUEC_STAEQ 7-cyano-7-deazaguanine synthase; OS = Staphylococcus epidermidis (strain ATCC 35984 / RP62A); OX = 176279 GN=queC PE=3 SV=1
MSQNDLNKEKALVVFSGGQDSTTCLFYAKKHFKEVELVTFNYGQRHDKEIEVAKKIAKEQNLKHHILDMSLLSQLTPNALTQHELSIEDNDDGIPNTFVPARNLLFLSFAGALAYQIHAKHIITGVCETDFSGYPDCRDSFIKSMNVTLSLSMDKDFVIHTPLMWLDKAQTWALSDKLGVLDYIRHNTLTCYNGIIGDGCGECPACHLRARGLKHYLEHKGEE

SEQ ID NO: 42507 - protein, 223 aa, Staphylococcus epidermidis
  REGION 1..223: note = tr|A0A4Y4YN01|A0A4Y4YN01_STAEP 7-cyano-7-deazaguanine synthase OS=Staphylococcus epidermidis OX=1282 GN=queC PE=3 SV=1
MSQNDLNKEKALVVFSGGQDSTTCLFYAKKHFKEVELVTFNYGQRHDKEIEVAKKIAKEQNLKHHILDMSLLSQLTPNALTQHELSIEDNDDGIPNTFVPARNLLFLSFAGALAYQIHAKHIITGVCETDFSGYPDCRDSFIKSMNVTLSLSMDKDFVIHTPLMWLDKAQTWALSDRLGVLDYIRHNTLTCYNGIIGDGCGECPACHLRARGLKHYLEHKGEE

SEQ ID NO: 42508 - protein, 223 aa, Staphylococcus equorum
  REGION 1..223: note = tr|A0A1E5TIM2|A0A1E5TIM2_9STAP 7-cyano-7-deazaguanine synthase OS=Staphylococcus equorum; OX = 246432 GN=queC PE=3 SV=1
MTQQSLNSNKAIVVFSGGQDSTTCLFWAKQHYDDVELVTFEYGQRHDTEIKVAKQIAETQNVKHHILDMSLLSQLTPNALTQHDMDIEVGEDGVPNTFVPARNLLFLSFAGALAYQTNAKHIITGVCETDFSGYPDCRDSFIKSMNVTLSLSMDKDFVIHTPLMWLDKKETWALSDELGVLDYIRYNTLTCYNGVIGEGCGECPACELRARGLDAYLKEKGAE

SEQ ID NO: 42509 - protein, 223 aa, Staphylococcus equorum
  REGION 1..223: note = tr|A0A1E5TVE5|A0A1E5TVE5_9STAP 7-cyano-7-deazaguanine synthase OS=Staphylococcus equorum; OX = 246432 GN=queC PE=3 SV=1
MTQQSLSSNKAIVVFSGGQDSTTCLFWAKQHYADVELVTFEYGQRHDTEIKVAKQIAEAQNVKHHILDMSLLSQLTPNALTQHDMDIEVGEDGVPNTFVPARNLLFLSFAGALAYQTNAKHIITGVCETDFSGYPDCRDSFIKSMNVTLSLSMDKDFVIHTPLMWLDKKETWALSDELGVLDYIRYNTLTCYNGIVGEGCGECPACELRARGLDAYLKEKGAE

SEQ ID NO: 42510 - protein, 223 aa, Staphylococcus felis
  REGION 1..223: note = tr|A0A2K3Z3N2|A0A2K3Z3N2_9STAP 7-cyano-7-deazaguanine synthase OS=Staphylococcus felis; OX = 46127 GN=queC PE=3 SV=1
MSEVLHNEKALVVFSGGQDSTTCLFYALKHFESVELVTFEYGQRHAKEIEVARHIAKDQDLKHHVLDMSLLSQLSPNALTSSDIAISDNDGVPNTFVPARNLLFLSFAGALAYQINAKHIVTGVCETDFSGYPDCRDSFIKSMNLSLNLSMDRDFVIHTPLMWLNKKETWALSDELGVLDYVRYNTLTCYNGIIAEGCGTCPACRLRQRGLESYLEEKGAQNQ

SEQ ID NO: 42511 - protein, 222 aa, Staphylococcus fleurettii
  REGION 1..222: note = tr|A0A3A0I0N4|A0A3A0I0N4_9STAP 7-cyano-7-deazaguanine synthase OS=Staphylococcus fleurettii OX=150056 GN=queC PE=3 SV=1
MSETLKNAKALVVFSGGQDSTTCLFYAKEHFKEVELVTFQYGQRHDLEIKVAEDIAKEQGLKHHVLDMSLLSQLSPNALTDHNMKIENDENGIPNTFVPARNLLFLSFAGALAYQIGAKHIITGVCETDFSGYPDCRDSFIKSMNLSLNLSMDKDFVIHTPLMWLNKKETWALSDQLGALDYVREKTLTCYNGVMSDGCGECPACKLRNQGLGQYLQTKGSL

SEQ ID NO: 42512 - protein, 52 aa, Staphylococcus fleurettii
  REGION 1..52: note = tr|A0A3A0HR76|A0A3A0HR76_9STAP 7-cyano-7-deazaguanine synthase QueC (Fragment); OS = Staphylococcus fleurettii OX=150056 GN=BUY93_15790 PE=4; SV = 1
WALSDKLGVLDYIRYNTLTCYNGIIGEGCGECPACELRARGLDAYLKEKGAE

SEQ ID NO: 42513 - protein, 223 aa, Staphylococcus gallinarum
  REGION 1..223: note = tr|A0A3A0VQ49|A0A3A0VQ49_STAGA 7-cyano-7-deazaguanine synthase OS=Staphylococcus gallinarum OX=1293 GN=queC PE=3 SV=1
MTQQTLNNDKAIVVFSGGQDSTTCLFWAKKHFSEVELVTFQYGQRHDTEITVAQQIAQEQNVKHHLLDMSLLSQLTPNALTQHDMDIETTEDGVPNTFVPARNLLFLSFAGALAYQTNAKHIITGVCETDFSGYPDCRDSFIKSMNVTLSLSMDKNFVIHTPLMWLDKKATWALSDDLGVLDYIRTKTLTCYNGIIGEGCGECPACHLRARGLNAYLEEKGAR

SEQ ID NO: 42514 - protein, 126 aa, Staphylococcus gallinarum
  REGION 1..126: note = tr|A0A3A0VIN2|A0A3A0VIN2_STAGA 7-cyano-7-deazaguanine synthase (Fragment); OS = Staphylococcus gallinarum OX=1293 GN=BUZ14_13580 PE=3; SV = 1
FVPARYLLFLSFAGALAYQTNAKHIITGVCETDFSGYPDCRDSFVKSMNGTLSLSMDKDFVIHTPLMWLEKKATWALSDDLGVLDYIRYNTLTCYNGVIGDGCGECPACQLRANGLNAYLAEKGVD

SEQ ID NO: 42515 - protein, 223 aa, Staphylococcus haemolyticus
  REGION 1..223: note = sp|Q4L4D0|QUEC_STAHJ 7-cyano-7-deazaguanine synthase; OS = Staphylococcus haemolyticus (strain JCSC1435) OX=279808; GN = queC PE=3 SV=1
MTNQNLNKDKAIVVFSGGQDSTTCLFYAKKHFKDVELVTFNYGQRHDAEIEVATRIAKEQNLKHHILDMSLLSQLTPNALTQHDMDIETGEDGIPNTFVPARNLLFLSFAGALAYQRNAKHIITGVCETDFSGYPDCRDSFIKSMNVTLSLSMDKDFVIHTPLMWLDKAQTWELSDELGVLDYIRHNTLTCYNGVIGDGCGECPACQLRQRGLQHYLEAKGAN

SEQ ID NO: 42516 - protein, 223 aa, Staphylococcus haemolyticus
  REGION 1..223: note = tr|A0A2K0A9K9|A0A2K0A9K9_STAHA 7-cyano-7-deazaguanine synthase OS=Staphylococcus haemolyticus OX=1283 GN=queC PE=3 SV=1
MTNQNLNKDKAIVVFSGGQDSTTCLFYAKKHFKDVELVTFNYGQRHDAEIEVATRIAKEQNLKHHILDMSLLSQLTPNALTQHDMDIETGEDGIPNTFVPARNLLFLSFAGALAYQRNAKHIITGVCETDFSGYPDCRDSFIKSMNVTLSLSMDKNFVIHTPLMWLDKAQTWELSDELGVLDYIRHNTLTCYNGVIGDGCGECPACQLRQRGLQHYLEIKGAN

SEQ ID NO: 42517 - protein, 29 aa, Staphylococcus hominis
  REGION 1..29: note = tr|A0A4Q9WL92|A0A4Q9WL92_STAHO 7-cyano-7-deazaguanine synthase QueC (Fragment); OS = Staphylococcus hominis OX=1290 GN=EQ804_13160 PE=4 SV=1
IIGDGCGECPACHLSARGLKPYLEHKEEE

SEQ ID NO: 42518 - protein, 225 aa, Staphylococcus hominis
  REGION 1..225: note = tr|A0A533IYI4|A0A533IYI4_STAHO 7-cyano-7-deazaguanine synthase QueC OS=Staphylococcus hominis OX=1290 GN=queC PE=4 SV=1
MPNSVLNSEKAIVVFSGGQDSTTCLFYAKRHFKEVELVTFNYGQRHNTEIEVASKIAKDQGLKHHILDMSLLSQLTPNALTKHDMTIETGEDGIPNTFVPARNLLFLSFAGALAYQVNAKHIITGVCETDFSGYPDCRDSFIKSMNVTLSLSMDRDFVIHTPLMWLDKAQTWELSDELGVLNYVRHNTLTCYNGIIGDGCGKCPACKLRQRGLHQYLEQKGDASL

SEQ ID NO: 42519 - protein, 222 aa, Staphylococcus hyicus
  REGION 1..222: note = tr|A0A418JJ37|A0A418JJ37_STAHY 7-cyano-7-deazaguanine synthase OS=Staphylococcus hyicus; OX = 1284 GN=queC PE=3 SV=1
MSEVLQNEKALVVFSGGQDSTTCLFYAKAHFKEVELVTFEYGQRHAQEIEVAKKIAHEQGLKHHVLDMSLLSQLSPNALTSHDMAIDATHDVPNTFVPARNLLFLSFAGALAYQIKAKHIITGVCETDFSGYPDCRDTFIKSINITMNLAMDKDFVIHTPLMWLNKKETWALSDQLGALDYIRTQTLTCYNGIIAEGCGECPACQLRQNGLEVYLKEKGAHS

SEQ ID NO: 42520 - protein, 223 aa, Staphylococcus hyicus
  REGION 1..223: note = tr|A0A447YT17|A0A447YT17_STAHY 7-cyano-7-deazaguanine synthase OS=Staphylococcus hyicus; OX = 1284 GN=queC PE=3 SV=1
MAPHKLDDDKALVVFSGGQDSTTCLFYAKAKFKEVELVTFQYGQRHDTEIEVAKQIAQEQGLKHHILDMSLLSQLTPNALTQHDLQIVDTDDGVPNTFVPARNLLFLSFAGALAYQIKARHIITGVCETDFSGYPDCRDDFVKSMNVTLNLSMDKNFVIHTPLMWLDKKETWALSDELGVLDYVRYNTLTCYNGIIADGCGECPACQLRARGLNAYLAEKGVN

SEQ ID NO: 42521 - protein, 223 aa, Staphylococcus intermedius
  REGION 1..223: note = tr|A0A380GAN7|A0A380GAN7_STAIN 7-cyano-7-deazaguanine synthase OS=Staphylococcus intermedius NCTC 11048 OX=1141106 GN=queC_2 PE=3 SV=1
MSEVLNNEKALVVFSGGQDSTTCLFYAKKHFKDVELVTFEYGQRHAKEIEVAQEIAQDQGLKHHVLDMALLSQLTPNALTSHDMTIDSHNDVPNTFVPARNLLFLSFAGALAYQIGAKHLITGVCETDFSGYPDCRDSFIKSMNVTLNLAMDRDFVIHTPLMWLNKKETWALSDDLGVLDYVRDRTLTCYNGIIAEGCGECPACQLRQRGLDQYLAEKESEVQ

SEQ ID NO: 42522 - protein, 230 aa, Staphylococcus intermedius
  REGION 1..230: note = tr|A0A380G9U0|A0A380G9U0_STAIN 7-cyano-7-deazaguanine synthase OS=Staphylococcus intermedius NCTC 11048 OX=1141106 GN=queC_1 PE=3 SV=1
MSKAIVVFSGGQDSTTCLLWALKRYDEVETITFSYNQRHKQEIEVAKKISKDFGVKNQVIDASVINELTVNALTRDMDIDVDNDTGLPNTFVPGRNILFLTLASVVAYQRKADTIVTGVCETDFSGYPDCRNEFVRALEPALQLGLDKNITIETPLMWLNKAETWELAANLGHLKYVVNNTLTCYNGVIGQGCGECPACKLRRKGLEEFIQKHPKEVGLTTLVNTPFQQN

SEQ ID NO: 42523 - protein, 224 aa, Staphylococcus kloosii
  REGION 1..224: note = tr|A0A512QFK7|A0A512QFK7_9STAP 7-cyano-7-deazaguanine synthase OS=Staphylococcus kloosii; OX = 29384 GN=queC PE=3 SV=1
MNEQLLDNNKAIVVFSGGQDSTTCLFWAKKHFDEVELVTFKYGQRHAQEIEVAQAIAEEQQLKHHVLDMSLLSQLTPNALTDPNMAIEANDDEIPNTFVPARNLLFLSFAGALAYHLNAKNIITGVCETDFSGYPDCRDSFVKSMNVTLNLSMDKNFVIHTPLMWLDKKETWALSDDLGVLDYVRERTLTCYNGIIGDGCGTCPACKLRARGLNNYLVEKGANN

SEQ ID NO: 42524 - protein, 224 aa, Staphylococcus kloosii
  REGION 1..224: note = tr|A0A151A6R3|A0A151A6R3_9STAP 7-cyano-7-deazaguanine synthase OS=Staphylococcus kloosii; OX = 29384 GN=queC PE=3 SV=1
MNEQLLDNNKAIVVFSGGQDSTTCLFWAKKHFDEVELVTFKYGQRHAQEIEVAEAIAEEQQLKHHVLDMSLLSQLTPNALTDPNMAIEANDDEIPNTFVPARNLLFLSFAGALAYQLNAKNIITGVCETDFSGYPDCRDSFVKSMNVTLNLSMDKNFVIHTPLMWLDKKETWALSDDLGVLDYVREHTLTCYNGIIGDGCGTCPACKLRARGLNNYLVEKGANN

SEQ ID NO: 42525 - protein, 274 aa, Staphylococcus lentus
  REGION 1..274: note = tr|A0A4Y9KEY4|A0A4Y9KEY4_STALE Uncharacterized protein OS=Staphylococcus lentus OX=42858 GN=E4T78_01520; PE = 4 SV=1
MKVSDLLLKKLGDIQDQKVAVLLSGGSGSASVLFALIELGKKIHAYTFNLEGHESTDLKKAIELTNKYDIEFTSIPLPTDINTIKKDCVYLINDVGCQLKTDVEICFAFKNSLPLIQEKVLVTGLGDDNYFGLSKKAQIYYKNSIDLMDKNRIKMFEKLNVQHKLFEKMAESYGIKIVSPYQTEEMLNIFIGTSYEEINKPKQKQWILDTFPKYFSQEKCYHADLQKGDSKIADNFLQLLNSDWNYKGYKRTDGIYNSIGRGELPLESESGLYD

SEQ ID NO: 42526 - protein, 222 aa, Staphylococcus lentus
  REGION 1..222: note = tr|A0A5F0TWD1|A0A5F0TWD1_STALE 7-cyano-7-deazaguanine synthase OS=Staphylococcus lentus; OX = 42858 GN=queC PE=3 SV=1
MSETLKNDKALVVFSGGQDSTTCMFYAKENFKEVELVTFQYGQRHDLEIEVAENITKEQGLKHHILDMSLLSQLSPNALTDHNMEIENNEDGIPNTFVPARNLLFLSFAGALAYQIGAKHIITGVCETDFSGYPDCRDSFIKSMNLSLNLSMDKDFVIHTPLMWLNKQETWALSDELGALDYVRERTLTCYNGVIADGCGECPACILRNQGLSQYLELKGSL

SEQ ID NO: 42527 - protein, 223 aa, Staphylococcus lugdunensis
  REGION 1..223: note = tr|A0A4Q9WA23|A0A4Q9WA23_STALU 7-cyano-7-deazaguanine synthase OS=Staphylococcus lugdunensis OX=28035 GN=queC PE=3 SV=1
MTETTLNNNKAIVVFSGGQDSTTCLFYAKKHFDEVELVTFNYGQRHNTEIEVAKSIAHEQGLAHHILDMSLLSQLTPNALTQHDMKIETNEDGMPNTFVPARNLLFLSFAGALAYQLNAKHIITGVCETDFSGYPDCRDNFIKSMNVTLSLAMDKDFVIHTPLMWLNKAQTWALSDELGVLDYIRHQTLTCYNGIIGDGCGECPACHLRARGLQQYLNSKGAK

SEQ ID NO: 42528 - protein, 223 aa, Staphylococcus lugdunensis
  REGION 1..223: note = tr|A0A133Q1D7|A0A133Q1D7_STALU 7-cyano-7-deazaguanine synthase OS=Staphylococcus lugdunensis OX=28035 GN=queC PE=3 SV=1
MTETTLNNNKAIVVFSGGQDSTTCLFYAKKHFDEVELVTFNYGQRHNTEIEVAKSIAHEQGLAHHILDMSLLSQLTPNALTQHDMKIETNDDGMPNTFVPARNLLFLSFAGALAYQLNAKHIITGVCETDFSGYPDCRDNFIKSMNVTLSLAMDKDFVIHTPLMWLNKAQTWALSDELGVLDYIRHQTLTCYNGIIGDGCGECPACHLRARGLQQYLNSKGAK

SEQ ID NO: 42529 - protein, 221 aa, Staphylococcus lutrae
  REGION 1..221: note = tr|A0A1W6BN23|A0A1W6BN23_9STAP 7-cyano-7-deazaguanine synthase OS=Staphylococcus lutrae; OX = 155085 GN=queC PE=3 SV=1
MSEVLKNEKALVVFSGGQDSTTCLFYAKKHFKTVELVTFEYGQRHAKEIEVAKAIAQDQGLKHHILDMALLAQLSPNALTSHDMTIDQQNDIPNTFVPARNLLFLSFAGALAYQIGAKHLITGVCETDFSGYPDCRDTFIKSMNVTLNLAMDRDFVIHTPLMWLDKKETWALSDQLGVLDYVRNHTLTCYNGIIAEGCGTCPACQLRQRGLKQYLTEKGRE

SEQ ID NO: 42530 - protein, 222 aa, Staphylococcus massiliensis
  REGION 1..222: note = tr|K9AR88|K9AR88_9STAP 7-cyano-7-deazaguanine synthase OS=Staphylococcus massiliensis S46 OX=1229783; GN = queC PE=3 SV=1
MTKTLNKDRAIVVFSGGQDSTTCLFYAKQKYEEVILVTFEYGQRHDKEIEVAKAIAKEQGLEHHVLDMSLLSQLTPNALTNHDMDIETNDDGMPNTFVPARNLLFLSFAGALSYQLDAKTIITGVCETDFSGYPDCRDAFIKSMNVTLNLSMDQNFVIETPLMWLDKKETWALSDELGALDYVRNKTLTCYNGVIGDGCGECPACKLRQRGLEQYINSRGEA

SEQ ID NO: 42531 - protein, 223 aa, Staphylococcus microti
  REGION 1..223: note = tr|A0A0D6XV19|A0A0D6XV19_9STAP 7-cyano-7-deazaguanine synthase OS=Staphylococcus microti; OX = 569857 GN=queC PE=3 SV=1
MSNALKQEKALVVFSGGQDSTTCLFYAKQHFKEVELVTFEYGQRHAKEIEVAKAIAEDQGLKHHILDMSLLSQLSPNALTSSDMEIDTKDGVPNTFVPARNLLFLSFAGALAYQINAKHIITGVCETDFSGYPDCRDQFIKSMNVTMSLAMDRDFVIHTPLMWLDKKETWALSDELGVLDYIRYQTLTCYNGVIADGCGTCPACQLRQRGLEQYLNEKGANTL

SEQ ID NO: 42532 - protein, 222 aa, Staphylococcus muscae
  REGION 1..222: note = tr|A0A240BWD0|A0A240BWD0_9STAP 7-cyano-7-deazaguanine synthase OS=Staphylococcus muscae; OX = 1294 GN=queC PE=3 SV=1
MSNALNQEKALVVFSGGQDSTTCLFYAKKHFKEVELVTFEYGQRHAKEIEVAKTIAKDQGLKNHILDMSLLAQLSPNALTSSNIDIDTSDDIPNTFVPARNLLFLSFAGALAYQINAKHIITGVCETDFSGYPDCRDQFIKSMNVTMSLAMDRDFVIHTPLMWLDKKETWALSDELGVLDYVRNQTLTCYNGIIADGCGTCPACLLRQRGLEQYLNEKGVRQ

SEQ ID NO: 42533 - protein, 223 aa, Staphylococcus nepalensis
  REGION 1..223: note = tr|A0A2T4SCC0|A0A2T4SCC0_9STAP 7-cyano-7-deazaguanine synthase OS=Staphylococcus nepalensis OX=214473 GN=queC PE=3 SV=1
MTQRTLNNNKAIVVFSGGQDSTTCLFWAKAHFEEVALVTFEYGQRHDTEIQVAKQIAKEQQVEHHVLDMSLLSQLTPNALTQHDMDIEEGEDGVPNTFVPARNLLFLSFAGSLAYQTNAKHIITGVCETDFSGYPDCRDSFIKSMNVTLSLSMDKDFVIHTPLMWLDKKQTWALSDELGVLDYIRYQTLTCYNGIVGEGCGECPACKLRARGLNAYLEEKGAK

SEQ ID NO: 42534 - protein, 223 aa, Staphylococcus nepalensis; identical to SEQ ID NO: 37513
  REGION 1..223: note = tr|A0A291JN56|A0A291JN56_9STAP 7-cyano-7-deazaguanine synthase OS=Staphylococcus nepalensis OX=214473 GN=queC PE=3 SV=1

SEQ ID NO: 42535 - protein, 222 aa, Staphylococcus pasteuri
  REGION 1..222: note = tr|A0A3S0K5S0|A0A3S0K5S0_9STAP 7-cyano-7-deazaguanine synthase OS=Staphylococcus pasteuri; OX = 45972 GN=queC PE=3 SV=1
MSETLKNAKALVVFSGGQDSTTCLFYAKEHFKEVELVTFQYGQRHDLEIKVAEDIAKEQGLKHHVLDMSLLSQLSPNALTDHNMKIENDENGIPNTFVPARNLLFLSFAGALAYQIGAKHIITGVCETDFSGYPDCRDSFIKSMNLSLNLSMDKDFVIHTPLMWLNKKETWALSDQLGALDYVREKTLTCYNGVMSDGCGKCPACKLRNQGLGQYLQTKGSL

SEQ ID NO: 42536 - protein, 223 aa, Staphylococcus pasteuri
  REGION 1..223: note = tr|A0A0M2NMV2|A0A0M2NMV2_9STAP 7-cyano-7-deazaguanine synthase OS=Staphylococcus pasteuri; OX = 45972 GN=queC PE=3 SV=1
MVQDKLDNNKAIVVFSGGQDSTTCLFYAKKHFKEVVLVTFNYGQRHDTEIEVAKKIAQEQNVEHHILDMSLLSQLTPNALTQHDLKIEETEDGIPNTFVPARNLLFLSFAGALAYQIKAKHIITGVCETDFSGYPDCRDSFIKSMNVTLSLSMDRDFVIHTPLMWLDKAQTWELADNLGVLDYIRENTLTCYNGIIGDGCGECPACQLRSRGLEQYLEQKGVK

SEQ ID NO: 42537 - protein, 223 aa, unidentified
  source 1..223: note = Staphylococcus petrasii
  REGION 1..223: note = tr|A0A5F1B2B0|A0A5F1B2B0_9STAP 7-cyano-7-deazaguanine synthase OS=Staphylococcus petrasii subsp. petrasii OX=1276937 GN=queC PE=3 SV=1
MTQQTLNKDKAIVVFSGGQDSTTCLFYAKKHFKDVELVTFNYGQRHDTEIEVAKQIAKEQGLKHHVLDMSLLSQLTPNALTQHDMDIETGEDGIPNTFVPARNLLFLSFAGALAYQLNAKHIITGVCETDFSGYPDCRDSFIKSMNVTLSLSMDKDFVIHTPLMWLDKAQTWELSDELGVLDYVRYNTLTCYNGIVGDGCGECPACKLRQRGLEQYLETKGAK

SEQ ID NO: 42538 - protein, 223 aa, unidentified; identical to SEQ ID NO: 42537
  source 1..223: note = Staphylococcus petrasii
  REGION 1..223: note = tr|A0A380G4M0|A0A380G4M0_9STAP 7-cyano-7-deazaguanine synthase OS=Staphylococcus petrasii subsp. jettensis OX=1077965 GN=queC PE=3 SV=1

SEQ ID NO: 42539 - protein, 223 aa, Staphylococcus pettenkoferi
  REGION 1..223: note = tr|A0A2N6QMC9|A0A2N6QMC9_9STAP 7-cyano-7-deazaguanine synthase OS=Staphylococcus pettenkoferi OX=170573 GN=queC PE=3 SV=1
MTEQTLDKEKAIVVFSGGQDSTTCLFWAQKHFEHVELVTFQYGQRHDKEIEVAEAIAKEQVLKHHVLDMSLLSQLTPNALTQHDMDIEQEGDEMPNTFVPARNLLFLSFAGALAYQLNAKNIITGVCETDFSGYPDCRDSFIKSMNVTLSLSMDKDFVIHTPLMWLDKKETWALSDELGVLDYIRHNTLTCYNGIIGEGCGTCPACQLRARGLNAYLEEKGEK

SEQ ID NO: 42540 - protein, 223 aa, Staphylococcus piscifermentans
  REGION 1..223: note = tr|A0A239UF07|A0A239UF07_9STAP 7-cyano-7-deazaguanine synthase OS=Staphylococcus piscifermentans OX=70258 GN=queC PE=3 SV=1
MSAHTLDDNKALVVFSGGQDSTTCLFYAKEKFEEVELVTFQYGQRHDTEIEVAKKIADEQGLKHHILDMSLLSQLTPNALTQHNLEIEQTDDGVPNTFVPARNLLFLSFAGALAYQIKARHIITGVCETDFSGYPDCRDDFVKSMNVTLNLSMDKNFVIHTPLMWLDKKETWALSDQLGVLDYVRNQTLTCYNGIIADGCGECPACKLRARGLNAYLEEKGVK

SEQ ID NO: 42541 - protein, 223 aa, Staphylococcus piscifermentans; identical to SEQ ID NO: 42508
  REGION 1..223: note = tr|A0A431Z4C6|A0A431Z4C6_9STAP 7-cyano-7-deazaguanine synthase OS=Staphylococcus piscifermentans OX=70258 GN=queC PE=3 SV=1

SEQ ID NO: 42542 - protein, 222 aa, Staphylococcus pseudintermedius
  REGION 1..222: note = tr|A0A4V3SLY8|A0A4V3SLY8_STAPS 7-cyano-7-deazaguanine synthase OS=Staphylococcus pseudintermedius OX=283734 GN=queC PE=3 SV=1
MSEVLNNEKALVVFSGGQDSTTCLFYAKKHFKEVELVTFEYGQRHAKEIEVAKEIAEDQGLKHHVLDMALLSQLTPNALTSHDMTIDSHNDVPNTFVPARNLLFLSFAGALAYQIGAKHLITGVCETDFSGYPDCRDSFIKSMNVTLNLAMDRDFVIHTPLMWLNKKETWALSDDLGVLDYVRDRTLTCYNGIIAEGCGECPACQLRQRGLNQYLSERGREV

SEQ ID NO: 42543 - protein, 222 aa, Staphylococcus pseudintermedius
  REGION 1..222: note = tr|A0A2A4EKF3|A0A2A4EKF3_STAPS 7-cyano-7-deazaguanine synthase OS=Staphylococcus pseudintermedius OX=283734 GN=queC PE=3 SV=1
MSEVLNNEKALVVFSGGQDSTTCLFYAKKHFKEVELVTFEYGQRHAKEIEVAKEIAEDQGLKHHVLDMALLSQLTPNALTSHDMTIDSHNDVPNTFVPARNLLFLSFAGALAYQIGAKHLITGVCETDFSGYPDCRDSFIKSMNVTLNLAMDRDFVIHTPLMWLNKKETWALSDDLGVLDYVRDRTLTCYNGIIAEGCGECPACQLRQRGLNQYLAERGREV

SEQ ID NO: 42544 - protein, 223 aa, Staphylococcus rostri
  REGION 1..223: note = tr|A0A2K3YS33|A0A2K3YS33_9STAP 7-cyano-7-deazaguanine synthase OS=Staphylococcus rostri; OX = 522262 GN=queC PE=3 SV=1
MSKALKQEKALVVFSGGQDSTTCLFYAKQHFKDVELVTFEYGQRHAKEIEVAKAIAQEQGLKHHILDMSLLSQLSPNALTSPDMEIDSTDDIPNTFVPARNLLFLSFAGALAYQINAKHIITGVCETDFSGYPDCRDQFIKSMNVTMSLAMDRDFVIHTPLMWLDKKETWALSDELGVLDYIRNKTLTCYNGVVADGCGTCPACQLRQRGLEQYLEEKGARTL

SEQ ID NO: 42545 - protein, 223 aa, Staphylococcus saccharolyticus
  REGION 1..223: note = tr|A0A4Q8MXE6|A0A4Q8MXE6_9STAP 7-cyano-7-deazaguanine synthase OS=Staphylococcus saccharolyticus OX=33028 GN=queC PE=3 SV=1
MSQNDLNKDKAIVVFSGGQDSTTCLFYAKKHFKEVELVTFNYGQRHDAEIEVAKCISKEQNLKHHILDMSLLSQLTPNALTQHDLKIQENEDGIPNTFVPARNLLFLSFAGALAYQIKAKHIITGICETDFSGYPDCRDSFIKSMNVTLNLSIDKDFVIHTPLMWLDKAQTWELSDKLGVLNYIRHNTLTCYNGIIGDGCGTCPACGLRTRGLKHYLENKGEK

SEQ ID NO: 42546 - protein, 223 aa, Staphylococcus saccharolyticus
  REGION 1..223: note = tr|A0A380H944|A0A380H944_9STAP 7-cyano-7-deazaguanine synthase OS=Staphylococcus saccharolyticus OX=33028 GN=queC PE=3 SV=1
MSQNDLNKDKAIVVFSGGQDSTTCLFYAKKHFKEVELVTFNYGQRHEAEIEVAKRISKKQNLKHHILDLSLLSQLTPNALTQHDLKIQENEDGIPNTFVPARNLLFLSFAGALAYQIKAKHIITGVCETDFSGYPDCRDSFIKSMNVTLNLSIDKDFVIHTPLMWLDKAQTWELSDKLGVLNYIRHNTLTCYNGIIGDGCGTCPACDLRARGLKHYLENKGEK

SEQ ID NO: 42547 - protein, 223 aa, Staphylococcus saprophyticus
  REGION 1..223: note = sp|Q49VQ7|QUEC_STAS1 7-cyano-7-deazaguanine synthase; OS = Staphylococcus saprophyticus subsp. saprophyticus (strain ATCC 15305 / DSM 20229 / NCIMB 8711 / NCTC 7292 / S -41) OX=342451 GN=queC PE=3 SV=1
MSEQTLDNNKAIVVFSGGQDSTTCLFWAKKHFESVELVTFAYGQRHDTEIEVAKQIADEQGVKHHLLDMSLLSQLTPNALTQHDLDIEVGDDGIPNTFVPARNLLFLSFAGALAYQTNAKHIITGVCETDFSGYPDCRDSFVKSMNVTLSLSMDKDFVIHTPLMWLDKKATWALSDDLGVLDYIRYNTLTCYNGVIGDGCGECPACQLRANGLNAYLAEKGVD

SEQ ID NO: 42548 - protein, 223 aa, Staphylococcus saprophyticus
  REGION 1..223: note = tr|A0A4Y9KKF7|A0A4Y9KKF7_STASA 7-cyano-7-deazaguanine synthase OS=Staphylococcus saprophyticus OX=29385 GN=queC PE=3 SV=1
MTQQSLDNDKAIVVFSGGQDSTTCLFWAKKYFESVELVTFAYGQRHDTEIEVAKRIAEEQHVKHHILDMSLLSQLTPNALTQHDMDIEVGEDGIPNTFVPARNLLFLSFAGALAYQTNTKNIITGVCETDFSGYPDCRDSFIKSMNVTLSLSMDKDFVIHTPLMWLDKKATWALSDELGALDYIRYNTLTCYNGIVGEGCGECPACELRAHGLNTYLAEKGEN

SEQ ID NO: 42549 - protein, 222 aa, Staphylococcus schleiferi
  REGION 1..222: note = tr|A0A3S0JQR7|A0A3S0JQR7_9STAP 7-cyano-7-deazaguanine synthase OS=Staphylococcus schleiferi subsp. schleiferi OX=74707 GN=queC PE=3 SV=1
MSETLKNEKAVVVFSGGQDSTTCLFYAKEHFKEVELVTFQYGQRHDLEIKVAEDIAKEQGLKHHILDMSLLSQLSPNALTDHSMQIENDENGIPNTFVPARNLLFLSFAGALAYQIGAKHIITGVCETDFSGYPDCRDSFIKSMNLSLNLSMDKDFVIHTPLMWLNKKETWALSDQLGALDYVREKTLTCYNGVMSDGCGECPACKLRKQGLDQYLETKGSL

SEQ ID NO: 42550 - protein, 223 aa, Staphylococcus schleiferi
  REGION 1..223: note = tr|A0A0K0ZW99|A0A0K0ZW99_9STAP 7-cyano-7-deazaguanine synthase OS=Staphylococcus schleiferi OX=1295 GN=queC PE=3 SV=1
MSKVLNDEKAVVVFSGGQDSTTCLFYAKKHFKEVELVTFEYGQRHAKEIEVAKAIAEDQGLKHHILDMSLLSQLTPNALTSHDMQIKTDEQIPNTFVPARNLLFLSFAGALAYQIGAKHIITGVCETDFSGYPDCRDVFIKSMNVTLNLSMERDFVIHTPLMWLDKKETWALSDELGVLDYVRYRTLTCYNGIIAEGCGECPACRLRQRGLEQYLAEKGSEKS

SEQ ID NO: 42551 - protein, 222 aa, unidentified
  source 1..222: note = Staphylococcus schweitzeri
  REGION 1..222: note = tr|A0A2K4AJW1|A0A2K4AJW1_9STAP 7-cyano-7-deazaguanine synthase OS=Staphylococcus schweitzeri OX=1654388 GN=queC PE=3 SV=1
MQSVLNNEKAIVVFSGGQDSTTCLFYAKKHFKDVELVTFNYGQRHDTEIEVAKQIANEQGMKHHVLDMSLLSQLTPNALTQHDMEITNNEDGIPNTFVPARNLLFLSFAGALAYQIGAKHIITGVCETDFSGYPDCRDSFIKSMNVTLSLAMDKDFVIHTPLMWLNKAETWQLSDELGVLDYIRTNTLTCYNGIVGNGCGECPACQLRQRGLNQYLESKGGL

SEQ ID NO: 42552 - protein, 222 aa, Staphylococcus sciuri
  REGION 1..222: note = tr|A0A431Y7J6|A0A431Y7J6_STASR 7-cyano-7-deazaguanine synthase OS=Staphylococcus sciuri subsp. rodentium OX=147469 GN=queC PE=3 SV=1
MSEVLQNEKALVVFSGGQDSTTCLFYAKAHFKEVELVTFEYGQRHAQEIEVAKKIAREQGLKHHVLDMSLLSQLSPNALTSHDMAIDATHDVPNTFVPARNLLFLSFAGALAYQIKAKHIITGVCETDFSGYPDCRDTFIKSMNITMNLAMDKDFVIHTPLMWLNKKETWALSDQLGALDYIRTQTLTCYNGIIAEGCGECPACQLRQNGLEAYLKEKGAHS

SEQ ID NO: 42553 - protein, 222 aa, Staphylococcus sciuri
  REGION 1..222: note = tr|A0A5F0UW66|A0A5F0UW66_STASC 7-cyano-7-deazaguanine synthase OS=Staphylococcus sciuri; OX = 1296 GN=queC PE=3 SV=1
MSETLKNEKAVVVFSGGQDSTTCLFYAKEHFKEVELVTFQYGQRHDLEIKVAEDIAKEQGLKHHILDMSLLSQLPPNALTDHTMQIENDENDIPNTFVPARNLLFLSFAGALAYQIGAKHIITGVCETDFSGYPDCRDSFIKSMNLSLNLSMDKDFVIHTPLMWLNKKETWALSDQLGALDYVREKTLTCYNGVMSDGCGECPACKLRKQGLDQYLETKGSL

SEQ ID NO: 42554 - protein, 223 aa, Staphylococcus simiae
  REGION 1..223: note = tr|G5JG84|G5JG84_9STAP 7-cyano-7-deazaguanine synthase OS=Staphylococcus simiae CCM 7213 = CCUG 51256; OX = 911238 GN=queC PE=3 SV=1
MTESVLQNEKALVVFSGGQDSTTCLFYAKKYFKDVELVTFNYGQRHDSEIEVAKQIAQEQGLKHHVLDMSLLSQLTPNALTNHEMEISNNEDGIPNTFVPARNLLFLSFAGALAYQIDAKHIITGVCETDFSGYPDCRDNFIKSMNVTLSLAMDRDFVIHTPLMWLDKAATWELSDELGVLDYIRNNTITCYNGVIGDGCGECPSCQLRQRGLTQYLERKGAK

SEQ ID NO: 42555 - protein, 223 aa, Staphylococcus simulans
  REGION 1..223: note = tr|A0A133QNF3|A0A133QNF3_STASI 7-cyano-7-deazaguanine synthase OS=Staphylococcus simulans; OX = 1286 GN=queC PE=3 SV=1
MAPHKLDDDKALVVFSGGQDSTTCLFYAKAKFKEVELVTFQYGQRHDTEIEVAKQIAQEQGLKHHILDMSLLSQLTPNALTQHDLQIEDTDDGVPNTFVPARNLLFLSFAGALAYQIKARHIITGVCETDFSGYPDCRDDFVKSMNVTLNLSMDKNFVIHTPLMWLDKKETWALSDELGVLDYVRYNTLTCYNGIIADGCGECPACQLRARGLNAYLAEKGVN

SEQ ID NO: 42556 - protein, 223 aa, Staphylococcus simulans
  REGION 1..223: note = tr|A0A2T4R145|A0A2T4R145_STASI 7-cyano-7-deazaguanine synthase OS=Staphylococcus simulans; OX = 1286 GN=queC PE=3 SV=1
MAPHKLDDDKALVVFSGGQDSTTCLFYAKEKFKEVELVTFQYGQRHDTEIEVAKQIAQEQGLKHHILDMSLLSQLTPNALTQHDLQIEDTDDGVPNTFVPARNLLFLSFAGALAYQIKARHIITGVCETDFSGYPDCRDDFVKSMNVTLNLSMDKNFVIHTPLMWLDKKETWALSDELGVLDYVRYNTLTCYNGIIADGCGECPACQLRARGLNAYLAEKGVN

SEQ ID NO: 42557 - protein, 223 aa, Staphylococcus sp.
  REGION 1..223: note = tr|A0A1J4HE99|A0A1J4HE99_9STAP 7-cyano-7-deazaguanine synthase OS=Staphylococcus sp. HMSC34G04 OX=1608860 GN=queC PE=3 SV=1
MSQNDLNKEKALVVFSGGQDSTTCLFYAKKHFKEVELVTFNYGQRHDTEIEVAKKIAKEQNLKHHILDMSLLSQLTPNALTQHELKIEDNDDGIPNTFVPARNLLFLSFAGALAYQIHAKHIITGVCETDFSGYPDCRDSFIKSMNVTLSLSMDKDFVIHTPLMWLDKAQTWALSDKLGVLDYIRHNTLTCYNGIIGDGCGECPACHLRARGLKHYLEHKGEE

SEQ ID NO: 42558 - protein, 223 aa, Staphylococcus sp.
  REGION 1..223: note = tr|A0A2J6P323|A0A2J6P323_9STAP 7-cyano-7-deazaguanine synthase OS=Staphylococcus sp. UMB0328 OX=2029110 GN=queC PE=3 SV=1
MVQHTLDPNKAIVVFSGGQDSTTCLFYAKKHFKDVILVTFNYGQRHDTEIEVAKKIAQEQNVEHHILDMSLLSQLTPNALTQHDLKIEDTEDGIPNTFVPARNLLFLSFAGALAYQIKAKHIITGVCETDFSGYPDCRDSFIKSMNVTLNLSMDRDFVIHTPLMWLDKAQTWELADDLGVLNYIRENTLTCYNGIIGDGCGECPACQLRSRGLDRYLAKKGVQ

SEQ ID NO: 42559 - protein, 222 aa, unidentified
  source 1..222: note = Staphylococcus stepanovicii
  REGION 1..222: note = tr|A0A240A1H1|A0A240A1H1_9STAP 7-cyano-7-deazaguanine synthase OS=Staphylococcus stepanovicii OX=643214 GN=queC PE=3 SV=1
MSETLKNEKALVVFSGGQDSTTCMFYAKAHFKEVELVTFQYGQRHDLEIEVAKNIASEQGLKHHVLDMSLLSQLSPNALTDHSMQIEDNEDGVPNTFVPARNLLFLSFAGALAYQIGAKHIITGVCETDFSGYPDCRDSFIKSMNLSLNLSMDKDFVIHTPLMWLNKKETWALSDELDALSYIRNKTLTCYNGVMSDGCGECPACHLRNQGLQQYLESKGSL

SEQ ID NO: 42560 - protein, 223 aa, Staphylococcus succinus
  REGION 1..223: note = tr|A0A2T4Q9K1|A0A2T4Q9K1_9STAP 7-cyano-7-deazaguanine synthase OS=Staphylococcus succinus; OX = 61015 GN=queC PE=3 SV=1
MTQHTLNNNKAIVVFSGGQDSTTCLFWAKKHFDEVELVTFEYGQRHNTEIEVAKQIAQEQNLKHHVLDMSLLSQLTPNALTQHDLEIETNEDGVPNTFVPARNLLFLSFAGALAYQTNAKHIITGVCETDFSGYPDCRDSFIKSMNVTLSLSMDKDFVIHTPLMWLDKKATWSLSDDLGVLDYIRYNTLTCYNGIVGEGCGECPACHLRARGLNTYLEEKGAE

SEQ ID NO: 42561 - protein, 222 aa, Staphylococcus vitulinus
  REGION 1..222: note = tr|A0A2T4PW30|A0A2T4PW30_9STAP 7-cyano-7-deazaguanine synthase OS=Staphylococcus vitulinus OX=71237 GN=queC PE=3 SV=1
MSETLKNEKALVVFSGGQDSTTCLFYAKKQFKEVELVTFQYGQRHDLEIKVAEDIANEQGLKHHVLDMSLLSQLSPNALTDHNMKIENDENGIPNTFVPARNLLFLSFAGALAYQIGAKHIITGVCETDFSGYPDCRDSFVKSMNLSLNLSMDKDFVIHTPLMWLNKKETWALSDQLGALDYVREKTLTCYNGVMSDGCGECPACKLRKQGLDQYLETKGSL

SEQ ID NO: 42562 - protein, 223 aa, Staphylococcus warneri; identical to SEQ ID NO: 42558
  REGION 1..223: note = tr|A0A2V3ZE12|A0A2V3ZE12_STAWA 7-cyano-7-deazaguanine synthase OS=Staphylococcus warneri; OX = 1292 GN=queC PE=3 SV=1

SEQ ID NO: 42563 - protein, 223 aa, Staphylococcus warneri
  REGION 1..223: note = tr|A0A2T4Q261|A0A2T4Q261_STAWA 7-cyano-7-deazaguanine synthase OS=Staphylococcus warneri; OX = 1292 GN=queC PE=3 SV=1
MVQHTLDQNKAIVVFSGGQDSTTCLFYAKKHFKDVTLVTFNYGQRHDTEIEVAKKIAQEQNVEHHILDMSLLSQLTPNALTQHDLKIEDTEDGIPNTFVPARNLLFLSFAGALAYQIKAKHIITGVCETDFSGYPDCRDSFIKSMNVTLNLSMDRDFVIHTPLMWLDKAQTWELADDLGVLNYIRENTLTCYNGIIGDGCGECPACQLRSRGLKKYLAKKGVQ

SEQ ID NO: 42564 - protein, 223 aa, Staphylococcus xylosus
  REGION 1..223: note = tr|A0A418IGG2|A0A418IGG2_STAXY 7-cyano-7-deazaguanine synthase OS=Staphylococcus xylosus; OX = 1288 GN=queC PE=3 SV=1
MTQQSLDNNKAIVVFSGGQDSTTCLFWAKKHFENVELVTFAYGQRHDTEIEVAKRIAQEQHVKHHILDMSLLSQLTPNALTQHDMDIEVGDDGIPNTFVPARNLLFLSFAGALAYQTNTKNIITGVCETDFSGYPDCRDSFIKSMNVTLSLSMDKDFVIHTPLMWLDKKATWALSDELGALDYIRYNTLTCYNGIVGEGCGECPACELRANGLNTYLAEKGVN

SEQ ID NO: 42565 - protein, 223 aa, Staphylococcus xylosus; identical to SEQ ID NO: 42548
  REGION 1..223: note = tr|A0A418IN63|A0A418IN63_STAXY 7-cyano-7-deazaguanine synthase OS=Staphylococcus xylosus; OX = 1288 GN=queC PE=3 SV=1

SEQ ID NO: 42566 - protein, 229 aa, Stappia sp.
  REGION 1..229: note = tr|A0A5D0WBS6|A0A5D0WBS6_9RHOB 7-cyano-7-deazaguanine synthase OS=Stappia sp. BW2; OX = 2592622 GN=queC PE=3 SV=1
MKTLVICSGGMDSVTLAHKVAREHELIGLVSFDYGQRHKKELDYAKACADELKTEHILIDISNIGRQLTGSALTDDLDVPDGHYAEETMKITVVPNRNAIMLSIAFGIASARGAEAVATAVHGGDHFIYPDCRPAFTESFETMQRHALEGMGEISLYTPYVHTSKADIAAEGLELGVDYRKTWSCYKGGEVHCGRCGTCVERREAFHLAGGIDPTVYADEAFWKEACNV

SEQ ID NO: 42567 - protein, 240 aa, Starkeya novella
  REGION 1..240: note = tr|A0A2W5MD63|A0A2W5MD63_STANO 7-cyano-7-deazaguanine synthase OS=Starkeya novella OX=921; GN = queC PE=3 SV=1
MSDDRPPESRALVLFSGGQDSTTCLAWALERFDHVETVGFDYGQRHRVELERRDALRNGLGRLRPEWGARLGDDHTIDLSVLGQISDTALTRDAEIAMTEAGLPNTFVPGRNIAFLTFAAALGYRRGIFRLVGGMCDTDYSGYPDCRAETMRATATALSLGLDRPLEIDTPLMRLDKAATWALAEELGGEALVALIVEDSHTCYLGDRGERHAWGFGCGTCPACELRARGYEGYVASRTG

SEQ ID NO: 42568 - protein, 452 aa, Starkeya novella
  REGION 1..452: note = tr|A0A2W5QU93|A0A2W5QU93_STANO Uncharacterized protein OS=Starkeya novella OX=921 GN=DI549_16160 PE=4 SV=1
MLDKRLFVIEKGQKPGRTLPKDAATAEIGRHIRFNAAVLDTFDVKGCEPLHYDMLVVCAAVEFADRRWKRPLGWRRVLDVTVPVMDLKSWQRPEVLKSLHGVLNHLTGDTWQFTFVQAKNLSPIGSRQMPLDFGKTKTFAIAYSDGLDSRAVSALSGDEAEALCIRVAGNRQRRKNGDSFFTQIPFKVKGYRGNESSFRSRGFQFAAVTAIAAQLSSVSRVVVPESGQGALGPVLLPLHNIYADYRNHPTFFRKMEVFIKALLGHRLRFEQPRLWSTKGQTLRAFLGIAGKSEQHLTSTHSCWQTRRVVNVGGRRQCGLCAACLLRRLSLHAAGVNETPGTYVVSDLAASGSGDALSAIPQKADRDIMVEYGSVGARHLQHLAELSGLPDDALRVHASQIAAATGEIYEETLNKLRTMLVTHAEEWRAFLSAQGGKSFLKSWMDGGRYGRSE

SEQ ID NO: 42569 - protein, 255 aa, Stella humosa
  REGION 1..255: note = tr|A0A3N1KVT0|A0A3N1KVT0_9PROT 7-cyano-7-deazaguanine synthase OS=Stella humosa OX=94; GN = queC PE=3 SV=1
MRKHSSAMSLPGVQMSLAAEPALVLLSGGQDSATCLAWALDRFGRVETVGFDYGQRHRVELDCRPRLRDGFAGLNPAWAARLGDDHLLDLTTLGRISETALTREAEITVNAAGLPSTFVPGRNLLFFTYAAALAYRRGIRHLVGGMCETDYSGYPDCRDDTLKALQVALTLGMDRRVTLHTPLMWRDKAATWRLAEGLGGPALVEAIVEETVSCYLGDRTQRHDWGYGCGGCPACDLRRSGWIAYRAGGATAPAL

SEQ ID NO: 42570 - protein, 368 aa, Stenotrophomonas acidaminiphila
  REGION 1..368: note = tr|A0A2W5LZY7|A0A2W5LZY7_9GAMM 7-cyano-7-deazaguanine synthase OS=Stenotrophomonas acidaminiphila OX=128780 GN=DI562_01985 PE=3 SV=1
MAVTAADTFANRDLAPDGWARRIKLKVALADAAPWQAVIPTLERALGFLSGDEWSLRIIGGGEEPPEARTRVQHKVSLAGSDCVCLYSGGLDSAIGALDLRSQGRRPVLVSHAYPRDAARQEELLSHLGGGVVRFATSAHPVARLGRGHDVQMRTRSFNFLAMGALMATALGGGRKTLFVPENGLIAINPPLTNRRIGALSTRTTHPHYLRLVQSVLDTVGIDVALVNPYAQMTKGEMMTNCAEQLRLGRMAKRTVSCGKWKRSGMQCGRCVPCLIRRASFHAAGRQDRTDYAPQAVDLLRYFESGKESDDLMAMMLACEALDDMDMEAWVAKTGPLHLAEGDRQARVAAVHRGMIEVRDFLGSHHLV

SEQ ID NO: 42571 - protein, 221 aa, Stenotrophomonas acidaminiphila
  REGION 1..221: note = tr|A0A0R0DS19|A0A0R0DS19_9GAMM 7-cyano-7-deazaguanine synthase OS=Stenotrophomonas acidaminiphila OX=128780 GN=queC PE=3 SV=1
MKKAVVLLSGGMDSAAVVAMAQEQGFTVHALSVRYGQRHTSELDAAARVAQALGVAAHKVVDVDLRSIGGSALTDDIDVPDAGGDGIPVTYVPARNTIMLSLALGWAEVLGANDIFCGVNAVDYSGYPDCRPAFVAAFQALANLATKAGVEGAGIRVHAPLQYLSKAQIASEGARLGVDFGLTVSCYRADAQGRACGHCDACRLRADGFAAAGLPDPTHYA

SEQ ID NO: 42572 - protein, 221 aa, Stenotrophomonas chelatiphaga
  REGION 1..221: note = tr|A0A0R0CJQ6|A0A0R0CJQ6_9GAMM 7-cyano-7-deazaguanine synthase OS=Stenotrophomonas chelatiphaga OX=517011 GN=queC PE=3 SV=1
MKKAVVLLSGGMDSAAVIALAQEQGFAVHALSVRYGQRHTSELEAAARVAAAQGVVLHKTVDVDLRSIGGSALTDDIDVPEAGGEGIPVTYVPARNTIMLSLALGWAEVLGANDIFCGVNAVDYSGYPDCRPEFIAAFQALANLATKAGVEGAGITVHAPLQFLSKAQIVSEGVRLGVDFGLTVSCYNADAEGAACGHCDACRLRAQGFDEAGVADPTHYA

SEQ ID NO: 42573 - protein, 226 aa, Stenotrophomonas daejeonensis
  REGION 1..226: note = tr|A0A0R0E0R9|A0A0R0E0R9_9GAMM 7-cyano-7-deazaguanine synthase OS=Stenotrophomonas daejeonensis OX=659018 GN=queC PE=3 SV=1
MKKAVVLLSGGMDSAAVVAMAREQGFDVHALSVRYGQRHTSELDAAARVARAMGVTRHKVVDVDLRSIGGSALTDDIDVPVRTDEERGGDDIPVTYVPARNTIMLSLALGWAEVLGANDIFCGVNAVDYSGYPDCRPEFIAAFQTLANLATRAGVEGAGIRIHAPLQHLSKAQIASEGHRLGVDFALTVSCYRADAQGRACGHCDACRLRADGFAAAGLPDPTHYA

SEQ ID NO: 42574 - protein, 221 aa, Stenotrophomonas ginsengisoli
  REGION 1..221: note = tr|A0A0R0DAN0|A0A0R0DAN0_9GAMM 7-cyano-7-deazaguanine synthase OS=Stenotrophomonas ginsengisoli OX=336566 GN=queC PE=3 SV=1
MKKAVVLLSGGMDSAAVVAIAREQGFAVHALSVRYGQRHTSELDAAVRVAAALGVAEHKVVDVDLRSIGGSALTADIDVPEAGGQGIPVTYVPARNTIMLSLALGWAEVLGAADIFCGVNAVDYSGYPDCRPEFVAAFQALANLATKAGVEGAGIRVHAPLQFLSKAQIAAEGARLGVDFALTVSCYRADADGRACGHCDACKLRADGFADAGVADPTAYV

SEQ ID NO: 42575 - protein, 221 aa, Stenotrophomonas humi
  REGION 1..221: note = tr|A0A0R0C702|A0A0R0C702_9GAMM 7-cyano-7-deazaguanine synthase OS=Stenotrophomonas humi; OX = 405444 GN=queC PE=3 SV=1
MKKAVVLLSGGMDSAAVVAIAQEQGFEVYALSVRYGQRHTSELEAAARVASALGVAGHKVVDVDLRSIGGSALTADIDVPEAGGEGIPVTYVPARNTIMLSLALGWAEVLGANDIFCGVNAVDYSGYPDCRPEFVAAFQALANLATKSGVEGAGIVVHAPLQYLSKAQIAAEGQRLGVDFGLTVSCYQADAEGRACGHCDACRLRAEGFGAAGMADPTRYV

SEQ ID NO: 42576 - protein, 227 aa, Stenotrophomonas koreensis
  REGION 1..227: note = tr|A0A0R0BUH5|A0A0R0BUH5_9GAMM 7-cyano-7-deazaguanine synthase OS=Stenotrophomonas koreensis OX=266128 GN=queC PE=3 SV=1
MNKAVVLLSGGMDSAAVVAMAHEQGFAVHALSVRYGQRHTSELDAAMRVAAALGVAEHKVVDVDLRAIGGSALTADIEVPAAGGEGIPVTYVPARNTIMLSLALGWAEVLGAADIFCGVNAVDYSGYPDCRPEFIAAFQHLANLATKAGVEGAGITIHAPLQHLSKAQIAAEGTRLGVDFGLTVSCYRADARGRACGQCDACELRAEGFRAAGLSDPTHYVDGLRMV

SEQ ID NO: 42577 - protein, 221 aa, unidentified
  source 1..221: note = Stenotrophomonas lactitubi
  REGION 1..221: note = tr|A0A2M9QYZ0|A0A2M9QYZ0_9GAMM 7-cyano-7-deazaguanine synthase OS=Stenotrophomonas lactitubi OX=2045214 GN=queC PE=3 SV=1
MKKAVVLLSGGMDSAAVIAMAQEQGFAVHALSVRYGQRHTSELDAAARVAKAQGVIVHKTVDVDLRSIGGSALTDDIDVPEAGGEGIPVTYVPARNTIMLSLALGWAEVLGANDIFCGVNAVDYSGYPDCRPEFIAAFQALANLATKSGVEGAGITVHAPLQFLSKGQIVSEGVRLGVDFGLTVSCYNADANGAACGHCDACRLRAQGFTDAGVADPTLYA

SEQ ID NO: 42578 - protein, 221 aa, Stenotrophomonas maltophilia
  REGION 1..221: note = sp|B2FRM5|QUEC_STRMK 7-cyano-7-deazaguanine synthase; OS = Stenotrophomonas maltophilia (strain K279a) OX=522373; GN = queC PE=3 SV=1
MKKAVVLLSGGMDSAAVIAMAQEQGFAVHALSVRYGQRHTSELDAAARVAKAQGVVAHKIVDVDLRSIGGSALTDDIDVPEAGGAGIPVTYVPARNTIMLSLALGWAEVLGANDIFCGVNAVDYSGYPDCRPEFVAAFQALANLATKSGVEGAGIKVHAPLQFLSKGQIVSEGVRLGVDFGLTVSCYNADANGAACGHCDACRLRAQGFAEAGVPDPTLYA

SEQ ID NO: 42579 - protein, 221 aa, Stenotrophomonas maltophilia
  REGION 1..221: note = tr|T5KNX2|T5KNX2_STEMA 7-cyano-7-deazaguanine synthase OS=Stenotrophomonas maltophilia MF89 OX=1333853; GN = queC PE=3 SV=1
MKKAVVLLSGGMDSAAVIAMAQEQGFAVHALSVRYGQRHTSELDAAARVAKAQGVVAHKTVDVDLRSIGGSALTDDIDVPEAGGAGIPVTYVPARNTIMLSLALGWAEVLGANDIFCGVNAVDYSGYPDCRPEFVAAFQALANLATKSGVEGGGIKVHAPLQFLSKGQIVSEGVRLGVDFGLTVSCYNADANGAACGHCDACRLRAQGFAEAGVPDPTLYV

SEQ ID NO: 42580 - protein, 222 aa, unidentified
  source 1..222: note = Stenotrophomonas panacihumi
  REGION 1..222: note = tr|A0A0R0AQX0|A0A0R0AQX0_9GAMM 7-cyano-7-deazaguanine synthase OS=Stenotrophomonas panacihumi OX=676599 GN=queC PE=3 SV=1
MKKAVVLLSGGMDSAAVIAIAQEQGFAVHALSVRYGQRHTSELAAAARVAEALGVVAHKVVDVDLRSIGGSALTDDAIDVPEAGGEGIPSTYVPARNTIMLSLALGWAEVLGANDIFCGVNAVDYSGYPDCRPEFIAAFQALANLATKAGVEGAGLRVHAPLQFLSKADIVREGVRLGVDFGLTVSCYQADADGRACGHCDACRLRAAGFADAGVSDPTRYA

SEQ ID NO: 42581 - protein, 221 aa, Stenotrophomonas pavanii; identical to SEQ ID NO: 36467
  REGION 1..221: note = tr|A0A246KT48|A0A246KT48_9GAMM 7-cyano-7-deazaguanine synthase OS=Stenotrophomonas pavanii OX=487698 GN=queC PE=3 SV=1

SEQ ID NO: 42582 - protein, 221 aa, unidentified
  source 1..221: note = Stenotrophomonas pictorum
  REGION 1..221: note = tr|A0A0R0AR07|A0A0R0AR07_9GAMM 7-cyano-7-deazaguanine synthase OS=Stenotrophomonas pictorum JCM 9942 OX=1236960 GN=queC PE=3 SV=1
MKKAVVLLSGGMDSAAVIAIAQEQGYQVYALSVRYGQRHTSELDAAARVAAALGVAGHKVVDVDLRSIGGSALTDDIAVPEAGGAGIPVTYVPARNTIMLSLALGWAEVLGANDIFCGVNAVDYSGYPDCRPEFIAAFQALANLATKAGVEGAGIRVHAPLQHLSKAQIASEGQRLGVDFGLTVSCYQADTEGRACGHCDACRLRADGFAAAGLADPTHYV

SEQ ID NO: 42583 - protein, 221 aa, Stenotrophomonas rhizophila
  REGION 1..221: note = tr|A0A4U3GHY2|A0A4U3GHY2_9GAMM 7-cyano-7-deazaguanine synthase OS=Stenotrophomonas rhizophila OX=216778 GN=queC PE=3 SV=1
MKKAVVLLSGGMDSAAVIAIAQEQGFAVHALSVRYGQRHTSELDAAAAVAQALGVVAHKTVNVDLRSIGGSALTDDIDVPEAGGEGIPVTYVPARNTIMLSVALGWAEVLGASDIFCGVNAVDYSGYPDCRPEFIAAFQALANLATKAGVEGAGIQVHAPLQFLSKADIVREGVRLGVDFGLTVSCYNADDSGAACGHCDACRLRAQGFTDAGVADPTRYA

SEQ ID NO: 42584 - protein, 221 aa, Stenotrophomonas rhizophila
  REGION 1..221: note = tr|A0A1B2N734|A0A1B2N734_9GAMM 7-cyano-7-deazaguanine synthase OS=Stenotrophomonas rhizophila OX=216778 GN=queC PE=3 SV=1
MKNAVVLLSGGMDSAAVVAMAREQGFAVHALSVRYGQRHTSELDAAAAVAKALGVVAHKTVNVDLRSIGGSALTDDIDVPEAGGEGIPVTYVPARNTIMLSVALGWAEVLGANDIFCGVNAVDYSGYPDCRPEFISAFQTLANLATKAGVEGAGIQVHAPLQFLSKADIVREGVRLGVDFGLTVSCYNADDSGAACGHCDACRLRAQGFADAGVADPTRYA

SEQ ID NO: 42585 - protein, 222 aa, Stenotrophomonas sp.
  REGION 1..222: note = tr|A0A4R4IG59|A0A4R4IG59_9GAMM 7-cyano-7-deazaguanine synthase OS=Stenotrophomonas sp. ATCM1_4 OX=2259330 GN=queC PE=3 SV=1
MKKKAVVLLSGGMDSAAVVAIAQEQGFEVYALSVRYGQRHTSELEAARRVSAALGVAGHKVVDVDLRSIGGSALTDDIDVPEAGGAGIPVTYVPARNTIMLSLALGWAEVLGANDIFCGVNAVDYSGYPDCRPEFVAAFQALANLATKAGVEGAGIVVHAPLQYLSKAQIAAEGQRLGVDFGLTVSCYQADMNGRACGHCDACRLRADGFAAAGLADPTHYA

SEQ ID NO: 42586 - protein, 221 aa, Stenotrophomonas sp.
  REGION 1..221: note = tr|A0A3D5JUE4|A0A3D5JUE4_9GAMM 7-cyano-7-deazaguanine synthase OS=Stenotrophomonas sp.; OX = 69392 GN=queC PE=3 SV=1
MKKAVVLLSGGMDSAAVIAIAQEQGFAVHALSVRYGQRHTSELDAAAAVAQAQGVVAHKTVNVDLRSIGGSALTDDIDVPEAGGEGIPVTYVPARNTIMLSVALGWAEVLGANDIFCGVNAVDYSGYPDCRPEFIAAFQALANLATKAGVEGAGIQVHAPLQFLSKADIVREGVRLGVDFGLTVSCYNADATGAACGHCDACRLRAQGFTDAGVADPTRYA

SEQ ID NO: 42587 - protein, 223 aa, Stenotrophomonas terrae
  REGION 1..223: note = tr|A0A0R0CBU3|A0A0R0CBU3_9GAMM 7-cyano-7-deazaguanine synthase OS=Stenotrophomonas terrae; OX = 405446 GN=queC PE=3 SV=1
MKKKAVVLLSGGMDSAAVVAIAQEQGFEVHAMSVRYGQRHTSELEAAARVASALGVAGHKVVAVDLRSIGGSALTDDINVPDAGTGDAIPVTYVPARNTIMLSLALGWAEVLGANDIFCGVNAVDYSGYPDCRPEFIAAFQALANLATKAGVEGAGIRVHAPLQYLSKAQIALEGQRLGVDFGLTVSCYQADMDGKACGHCDACQLRADGFAAAGMADPTQYA

SEQ ID NO: 42588 - protein, 228 aa, Steroidobacter denitrificans
  REGION 1..228: note = tr|A0A127FC36|A0A127FC36_STEDE 7-cyano-7-deazaguanine synthase OS=Steroidobacter denitrificans OX=465721 GN=queC PE=3 SV=1
MSRSDARAVVLLSGGLDSATVLAIARHEGRQCYALSVDYGQRHRAELEAAARVAQSLGTVEHRCLRIDLSGIGGSALTDASIAIPETPQAGIPVTYVPARNTVMLSFALGWAEVLGAPRIYIGVNAIDYSGYPDCRPAFIAAFERLANLATKAAVEGIMTFRIETPLMDLTKAQIIRRGLELGVDYGLTVSCYQADEQGRACGACDACRLRREGFRTAGATDPTSYFR

SEQ ID NO: 42589 - protein, 229 aa, Stigmatella aurantiaca
  REGION 1..229: note = tr|A0A1H7WZ02|A0A1H7WZ02_STIAU 7-cyano-7-deazaguanine synthase OS=Stigmatella aurantiaca; OX = 41 GN=queC PE=3 SV=1
MKKAVVLLSGGLDSTTCLAMAKAAGFDPVCLAIDYGQRHAVELERARKVALAMGARDFRVVPIDLRSVGGSALTADIAVPKDRPETEMSHGIPVTYVPARNLLFLSLALGLAEVVGAYDIYIGVNAVDYSGYPDCRPQFIEAFAALAGLATKAGVEGQRFQVHAPLSGMTKAQIIQEGTRLGVNYGMTHSCYDPDAKGRACGRCDSCLLRKKGFQEARVPDPTPYTEGA

SEQ ID NO: 42590 - protein, 198 aa, Stigmatella aurantiaca
  REGION 1..198: note = tr|Q090S6|Q090S6_STIAD 7-cyano-7-deazaguanine synthase OS=Stigmatella aurantiaca (strain DW4/3-1); OX = 378806 GN=STAUR_6846 PE=3 SV=1
MKTALLLSGGMDSIAIAWWRRPELALTVDYGQRSALAELRAAASAAEAMGIEHLTVEADLSALGSGDMAGAEPLSLAPVTEWWPFRNQMLVTLAAMKAVAHGVQRLLIGTLKTDGLHADGRPDFVMALDALLRLQEGGLRLEAPAIALTSAELIRTSNIPMEVLAWAHSCHVGIHACGQCRGCQKHYQTLAELGVDPY

SEQ ID NO: 42591 - protein, 229 aa, Stigmatella erecta
  REGION 1..229: note = tr|A0A1I0H2Q3|A0A1I0H2Q3_9DELT 7-cyano-7-deazaguanine synthase OS=Stigmatella erecta; OX = 83460 GN=queC PE=3 SV=1
MKKAVVLLSGGLDSTTCLAMAKAAGFEPVCLAIDYGQRHAVELERARKVALAMGARDFRVVQMDLRSVGGSALTADIAVPKDRPEAEMSHGIPVTYVPARNLLFLSLALGLAEVVGAYDIYIGVNAVDYSGYPDCRPQFIEAFAALAGLATKAGVEGQRFQVHAPLSGMTKAQIIQEGTRLGVNYGMTHSCYDPDAKGRACGRCDSCLLRKKGFQDAGVPDPTPYTEGA

SEQ ID NO: 42592 - protein, 237 aa, Streptoalloteichus hindustanus
  REGION 1..237: note = tr|A0A1M5D0Z0|A0A1M5D0Z0_STRHI 7-cyano-7-deazaguanine synthase OS=Streptoalloteichus hindustanus OX=2017 GN=queC PE=3 SV=1
MATTVIVHFGHRGPHHTVVVASGGLDSTVLAYWLAARHSRLTLVSFDYGQRHRVELDYATEIARLLDSSHRVIDLTSLGALLTGSALTNTSVPVPDGHYTDESLASTVVPNRNAIMLDVAVSVAIAVHADAVAFGAHAGDHTVYPDCRPEFVERFARSVEAANEGLLTPGFQVLAPFLTLTKTDIVRVGEALSVPFALTWSCYRGQHVHCGRCSTCVERRRAFRDNNIPDPTAYETG

SEQ ID NO: 42593 - protein, 217 aa, Streptococcus australis
  REGION 1..217: note = tr|A0A4V0BUX7|A0A4V0BUX7_9STRE 7-cyano-7-deazaguanine synthase OS=Streptococcus australis; OX = 113107 GN=queC PE=3 SV=1
MKRQSALVVFSGGQDSTTCLFWAKEHYETVEAVTFAYGQRHHLEIQVAREIAKEQGIRHHILDMSLLGQITENALTSDLEIEQKEGEVPNTFVDGRNHLFLSFAAVLAKQRGIKDIVTGVCETDFSGYPDCRDVFVKSLNVTLNLAMDYNFVIQTPLMWLDKAETWKLADQLGAFDYVREKTLTCYNGIIGSGCGDCPACHLRQHGLDVYLSQKGEG

SEQ ID NO: 42594 - protein, 428 aa, Streptococcus constellatus
  REGION 1..428: note = tr|A0A380JJF0|A0A380JJF0_STRCV Uncharacterized protein OS=Streptococcus constellatus OX=76860; GN = NCTC11325_01135 PE=4 SV=1
MKVFCSNDRKKYLPEGYDEHIDIKCRSDVGFQFWDKHMKFDSEFSSLAIDLLYISIFVFAMDRKVLRAEQPDNWSRSIELNIPVSDVVFWDERKTLLHTMISFLSGDDWKFSFRKKEILDERDFYERNKYKKARAKSYDTVCMLSGGLDSYIGAIDLLEKRNNKVLFVSHYGGGKGTKEYQDLVFQSLKTEYELEDSDYIQFYASCKNGVEDTTRTRSFMFFSHAIALASAFNIDTQMYIPENGFISLNIPLTGARFGSSSTRTTHPYYMKLLKKLVKEMGLNLTIINPYQLKTKGDMVLECKNIELLKNNYTKTMSCSHPDVGRYDKESKTMHCGSCIPCIIRRAALLRGFTKDKTEVRDFKLTKTEAARLNKNAFLKKIETFKSDGAIMEIQKSGIIDENLNEIASMYCRGIDEIKMFFSEVIGDD

SEQ ID NO: 42595 - protein, 217 aa, Streptococcus criceti
  REGION 1..217: note = tr|G5JPD8|G5JPD8_STRCG 7-cyano-7-deazaguanine synthase OS=Streptococcus criceti HS-6 OX=873449 GN=queC; PE = 3 SV=1
MKRQSALVVFSGGQDSTTCLFWALRHYDHVEAVTFAYGQRHSQEVEVAKGIAKDLEIEHHILDMSLLGQITNNALTSDIEIEAQEGEVPNTFVDGRNHLFLSFAAVLAKQKGITDIVTGVCETDFSGYPDCRDAFVKSLNVTLNLAMDYDFVIQTPLMWLDKAETWALADQLGAFDYVKDKTLTCYNGVMGTGCGECPACKLRQHGLDTYLARRGEA

SEQ ID NO: 42596 - protein, 217 aa, Streptococcus downei
  REGION 1..217: note = tr|A0A380JGA6|A0A380JGA6_STRDO 7-cyano-7-deazaguanine synthase OS=Streptococcus downei MFe28 OX=764290 GN=queC PE=3 SV=1
MKRQSALVVFSGGQDSTTCLFWALKHYDHVEAVTFAYGQRHSHEVEVAKGIAKDLEIEHQVLDMSLLGQITNNALTSDMEIEAQEGQVPNTFVDGRNHLFLSFAAILAKQKGISDIVTGVCETDFSGYPDCRDAFVKSLNVTLNLAMGYNFVIQTPLMWLDKSETWELADQLGAFDYVKDKTLTCYNGIMGAGCGECPACKLRQHGLDTYLARRGEA

SEQ ID NO: 42597 - protein, 222 aa, Streptococcus dysgalactiae; identical to SEQ ID NO: 42488
  REGION 1..222: note = tr|A0A4V0BST9|A0A4V0BST9_STREQ 7-cyano-7-deazaguanine synthase OS=Streptococcus dysgalactiae subsp. equisimilis OX=119602 GN=queC PE=3 SV=1

SEQ ID NO: 42598 - protein, 224 aa, Streptococcus dysgalactiae
  REGION 1..224: note = tr|A0A4U9XXC4|A0A4U9XXC4_STREQ 7-cyano-7-deazaguanine synthase OS=Streptococcus dysgalactiae subsp. equisimilis OX=119602 GN=queC PE=3 SV=1
MNQKKAVILLSGGLDSATVVAMAKADGYACYTMSFDYGQRHRAELQAAERVARQLGAIEHKVIGLDLNGMGGSALTDDSIAVPEAPSQGIPVTYVPARNTVFLSLALGWAEVLEARDIFIGVNAVDYSGYPDCRPEFVEAFERMANLATKAGVEGNGFRIQAPLQYLSKAQIIQAGVARGVDYGLTVSCYQADDQGRACGKCDSCRLRADGFAAAGIPDPTPYF

SEQ ID NO: 42599 - protein, 244 aa, Streptococcus equinus
  REGION 1..244: note = tr|E0PEC6|E0PEC6_STREI 7-cyano-7-deazaguanine synthase OS=Streptococcus equinus ATCC 700338 OX=864569; GN = exsB PE=3 SV=1
MTELAPLWIPMRAFLLPKYLKRYRGDKMKRQSALVVFSGGQDSTTCLFWALKHYDHVETVTFNYGQRHSLEIEVAKHIAAEQGVKNHLLDMSLLGQLTENALTRDIVIENPDDDLPNTFVDGRNHLFLSFAAVLAKRLGITDIITGVCETDFSGYPDCRDAFVKSLNVTLNLAMDYNFVIQTPLMWLDKSETWELADQLGKFDYVRENTLTCYNGIKGSGCGECPACKLRQAGLEKYLAKKGQA

SEQ ID NO: 42600 - protein, 217 aa, Streptococcus equinus
  REGION 1..217: note = tr|A0A1G9MXT4|A0A1G9MXT4_STREI 7-cyano-7-deazaguanine synthase OS=Streptococcus equinus; OX = 1335 GN=queC PE=3 SV=1
MKRQSALVVFSGGQDSTTCLFWALKHYEHVETVTFNYGQRHSLEIEVAKQIAAEQGVKNHLLDMSLLGQLTENALTRDIEIENPDDDVPNTFVDGRNHLFLSFAAVLAKRLGITDIITGVCETDFSGYPDCRDAFVKSLNVTLNLAMDYNFVIQTPLMWLDKSETWELADKLGKFDYVRENTLTCYNGIKGSGCGECPSCKLRQAGLEKYLARRGQD

SEQ ID NO: 42601 - protein, 242 aa, Streptococcus gallolyticus
  REGION 1..242: note = tr|A0A0E1XFC8|A0A0E1XFC8_STRGY 7-cyano-7-deazaguanine synthase OS=Streptococcus gallolyticus subsp. gallolyticus TX20005 OX=545774 GN=exsB; PE = 3 SV=1
MTELAPLWIPMRAFLLPKYLKRYRGDKMKRQSALVVFSGGQDSTTCLFWALKHYDHVETVTFNYGQRHSLEIEVAKHIAAEQGVKNHLLDMSLLGQLTENALTRDIAIENPDDDLPNTFVDGRNHLFLSFAAVLAKRLGITDIITGVCETDFSGYPDCRDAFVKSLNVTLNLAMDYNFVIQTPLMWLDKSETWELADQLGKFDYVRENTLTCYNGIKGSGCGECPACKLRQAGLEKYLAKKG

SEQ ID NO: 42602 - protein, 217 aa, Streptococcus gallolyticus
  REGION 1..217: note = tr|A0A1H9LUM6|A0A1H9LUM6_9STRE 7-cyano-7-deazaguanine synthase OS=Streptococcus gallolyticus OX=315405 GN=queC PE=3 SV=1
MKRQSALVVFSGGQDSTTCLFWALKHYDHVETVTFNYGQRHSLEIEVAKHIAAEQGVKNHLLDMSLLGQLTENALTRDFAIENPDDDLPNTFVDGRNHLFLSFAAVLAKRLGITDIITGVCETDFSGYPDCRDAFVKSLNVTLNLAMDYNFVIQTPLMWLDKSETWELADQLGKFDYVRENTLTCYNGIKGSGCGDCPACKLRQAGLEKYLAKKGQA

SEQ ID NO: 42603 - protein, 217 aa, unidentified
  source 1..217: note = Streptococcus halitosis
  REGION 1..217: note = tr|A0A426FXR3|A0A426FXR3_9STRE 7-cyano-7-deazaguanine synthase OS=Streptococcus halitosis; OX = 2172545 GN=queC PE=3 SV=1
MKRQSALVVFSGGQDSTTCLFWAKEHYETVEAVTFAYGQRHHLEIQVAREIAKEQGIRHHILDMSLLGQITENALTSDLEIEQKEGELPNTFVDGRNHLFLSFAAVLAKQRGIKDIVTGVCETDFSGYPDCRDVFVKSLNVTLNLAMDYDFVIQTPLMWLDKAETWELADQLGAFDYVREKTLTCYNGIIGSGCGDCPACHLRQHGLDVYLSQKGEG

SEQ ID NO: 42604 - protein, 217 aa, Streptococcus henryi
  REGION 1..217: note = tr|A0A1G6A9E0|A0A1G6A9E0_9STRE 7-cyano-7-deazaguanine synthase OS=Streptococcus henryi; OX = 439219 GN=queC PE=3 SV=1
MKRQSALVVFSGGQDSTTCLFWALKHYDHVETVTFAYGQRHSLEIEVAQSIAKEQGVKNHLLDMSLLGQITANALTRDMEIENPDDDVPNTFVDGRNHLFLSFAAVLAKQLGITDIVTGVCETDFSGYPDCRDVFVKSLNVTLNLAMDYNFVIQTPLMWLDKAETWELADELGQFDYVRQETLTCYNGIKGSGCGECPACELRQAGLEKYLAKKGKD

SEQ ID NO: 42605 - protein, 216 aa, Streptococcus infantarius
  REGION 1..216: note = tr|A0A380KMH6|A0A380KMH6_9STRE 7-cyano-7-deazaguanine synthase OS=Streptococcus infantarius OX=102684 GN=queC PE=3 SV=1
MKRQSALVVFSGGQDSTTCLFWALEHYEHVETVTFNYGQRHSLEIEVAKHIAAEQGVKNHLLDMSLLGQLTENALTRDIEIENPDDDLPNTFVDGRNHLFLSFAAVLAKRLGITDIITGVCETDFSGYPDCRDAFVKSLNVTLNLAMNYNFVIHTPLMWLDKSETWELADQLGKFDYVRENTFTCYNGIKGSGCGECPACKLRQAGLEKYLARRGK

SEQ ID NO: 42606 - protein, 217 aa, Streptococcus infantis
  REGION 1..217: note = tr|E8K2R4|E8K2R4_9STRE 7-cyano-7-deazaguanine synthase OS=Streptococcus infantis ATCC 700779 OX=889204; GN = exsB PE=3 SV=1
MKRQSALVVFSGGQDSTTCLFWAKQHYERVEAVTFAYGQRHHLEIQVAKEISEEQGIRHHILDMSLLGQITENALTSDLEIEQKEGEVPNTFVDGRNHLFLSFAAVLAKQRGITDIVTGVCETDFSGYPDCRDVFVKSLNVTLNLAMDYDFVIQTPLMWLDKAETWELADQLGAFDYVREKTLTCYNGIIGTGCGDCPACHLRQHGLEVYLSQKGEA

SEQ ID NO: 42607 - protein, 217 aa, Streptococcus infantis
  REGION 1..217: note = tr|J1H2R6|J1H2R6_9STRE 7-cyano-7-deazaguanine synthase OS=Streptococcus infantis SPAR10 OX=1159208; GN = queC PE=3 SV=1
MKRQSALVVFSGGQDSTTCLFWAKQHYERVEAVTFAYGQRHHLEIQVAKEIAEEQGIRHHILDMSLLGQITENALTSDLEIEQKEGEVPNTFVDGRNHLFLSFAAVLAKQRGITDIVTGVCETDFSGYPDCRDVFVKSLNVTLNLAMDYDFVIQTPLMWLDKAETWELADQLGAFDYVREKTLTCYNGIIGTGCGDCPACHLRQHGLEVYLSQKGEA

SEQ ID NO: 42608 - protein, 217 aa, Streptococcus lutetiensis
  REGION 1..217: note = tr|A0A2X3W5V9|A0A2X3W5V9_9STRE 7-cyano-7-deazaguanine synthase OS=Streptococcus lutetiensis OX=150055 GN=queC PE=3 SV=1
MKRQPALVGFSGGQESTTCLFWALEHYEHVETVTFNYGQCHSLEIEVAKHIAAEQGVKNHLLDMSLLGQLTENALTRYIEIENPDDDVPNTFVDGRNHLFLSFAAVLAKRLGITDIITGVCETDFSGYPDCRDTFVKSLNVTLNLAMDYNFVIQTPLMWLDKSETWELANKLGKFDYVREKTLTCYNGIKGSGCGECPSCKLRQAGLEKYLARRGKT

SEQ ID NO: 42609 - protein, 154 aa, Streptococcus lutetiensis
  REGION 1..154: note = tr|A0A4V0E6B6|A0A4V0E6B6_9STRE 7-cyano-7-deazaguanine synthase OS=Streptococcus lutetiensis OX=150055 GN=queC PE=3 SV=1
MSLLGQLTENALTRYIEIENPDDDVPNTFVDGRNHLFLSFAAVLAKRLGITDIITGVCETDFSGYPDCRDTFVKSLNMTLNLAMDYNFVIQTPLMWLDKSETWELANKLGKFDYVREKTLTCYNGIKGSGCGECPSCKLRQAGLEKYLVRRGKT

SEQ ID NO: 42610 - protein, 217 aa, unidentified
  source 1..217: note = Streptococcus macedonicus
  REGION 1..217: note = tr|A0A2I1YHG7|A0A2I1YHG7_STRMC 7-cyano-7-deazaguanine synthase OS=Streptococcus macedonicus OX=59310 GN=queC PE=3 SV=1
MKRQSALVVFSGGQDSTTCLFWALKHYDHVETVTFNYGQRHSLEIEVAKHIAAEQGVKNHLLDMSLLGQLTENALTRDIVIENPDDDLPNTFVDGRNHLFLSFAAVLAKRLGITDIITGVCETDFSGYPDCRDAFVKSLNVTLNLAMDYNFVIQTPLMWLDKSETWELADQLGKFDYVRENTLTCYNGIKGSGCGECPACKLRQAGLEKYLAKKGQA

SEQ ID NO: 42611 - protein, 219 aa, unidentified
  source 1..219: note = Streptococcus macedonicus
  REGION 1..219: note = tr|A0A081JH73|A0A081JH73_STRMC 7-cyano-7-deazaguanine synthase OS=Streptococcus macedonicus OX=59310 GN=queC PE=3 SV=1
MKRQSALVVFSGGQDSTTCLFWALKHYDHVETVTFNYGQRHSLEIEVAKHIAAEQGVKNRLLDMSLLGQLTENALTRNIAIENPDDDLPNTFVDGRNHLFLSFAAVLAKHLGITDIITGVCETDFSGYPDCRDAFVKSLNVTLNLAMDYNFVIQTPLMWLDKSETWELADQLGKFDYVRENTLTCYNGIKGSGCGECPACKLRQAGLEKYLAKKGQPNV

SEQ ID NO: 42612 - protein, 217 aa, Streptococcus mitis
  REGION 1..217: note = tr|D3H7H9|D3H7H9_STRM6 7-cyano-7-deazaguanine synthase OS=Streptococcus mitis (strain B6) OX=365659; GN = queC PE=3 SV=1
MKRQSALVVFSGGQDSTTCLFWAKEHYETVEAVTFAYGQRHHLEIQVAQEIAKEQGIRHHILDMSLLGQITENALTSDLEIEQKEGEVPNTFVDGRNHLFLSFAAVLAKQQGITDIVTGVCETDFSGYPDCRDVFVKSLNVTLNLAMEYDFVIQTPLMWLDKAETWELADQLGAFDYVREKTLTCYNGIIGSGCGDCPACHLRQHGLDVYLSQKGEA

SEQ ID NO: 42613 - protein, 217 aa, Streptococcus mitis
  REGION 1..217: note = tr|F9HMH4|F9HMH4_STRMT 7-cyano-7-deazaguanine synthase OS=Streptococcus mitis SK1080 OX=1008453 GN=queC; PE = 3 SV=1
MKRQSALVVFSGGQDSTTCLFWAKEHYETVEAVTFAYGQRHHLEIQVAREIAKEQGIHHHILDMSLLGQITENALTSDLEIEQKEGEVPNTFVDGRNHLFLSFAAVLAKQRGIKDIVTGVCETDFSGYPDCRDVFVKSLNVTLNLAMDYDFVIQTPLMWLDKAETWELADQLGAFDYVREKTLTCYNGIIGSGCGDCPACHLRQHGLDVYLSQKGEA

SEQ ID NO: 42614 - protein, 217 aa, Streptococcus mutans
  REGION 1..217: note = sp|Q8DUK7|QUEC_STRMU 7-cyano-7-deazaguanine synthase; OS = Streptococcus mutans serotype c (strain ATCC 700610 / UA159) OX=210007 GN=queC PE=3 SV=1
MKRQSALVVFSGGQDSTTCLFWAMKHYEYVETVTFSYGQRHSQELEVAKEIAAEQGVKHHILDMSLLGQITENALTSDIAIETKDGEVPNTFVDGRNHLFLSFAAVLAKQRKIRDIVTGVCQTDFSGYPDCRDVFVKSLNVTLNLAMDYEFVIQTPLMWLDKAETWELADQLGKFDYVRQKTLTCYNGIRGTGCRQCPACHLRQAGLEKYLSQKGKN

SEQ ID NO: 42615 - protein, 217 aa, Streptococcus mutans
  REGION 1..217: note = tr|A0A448RXB3|A0A448RXB3_STRMG 7-cyano-7-deazaguanine synthase OS=Streptococcus mutans; OX = 1309 GN=queC PE=3 SV=1
MKRQSALVVFSGGQDSTTCLFWALQHYEHVETVTFAYGQRHSQELAVAKEIAAEQGVKHHILDMSLLGQITENALTSDIDIEAKNGEVPNTFVDGRNHLFLSFAAVLAKQRHITDIITGVCQTDFSGYPDCRDVFVKSLNVTLNLAMDYEFVIQTPLMWLDKSETWALADSLGKFDYVREKTLTCYNGIRGAGCGQCPACHLRQTGLDKYLAQKEKN

SEQ ID NO: 42616 - protein, 217 aa, Streptococcus oralis
  REGION 1..217: note = tr|D4FUD7|D4FUD7_STROR 7-cyano-7-deazaguanine synthase OS=Streptococcus oralis ATCC 35037 OX=655813; GN = exsB PE=3 SV=1
MKRQSALVVFSGGQDSTTCLFWAKEHYETVEAVTFSYGQRHHLEIQVAREIAKEQGIRHHILDMSLLGQITENALTSDMEIEQKEGEVPNTFVDGRNHLFLSFAAVLAKQRGIQDIVTGVCETDFSGYPDCRDVFVKSLNVTLNLAMDYDFVIQTPLMWLDKSETWELADQLDAFDYVRERTLTCYNGIIGSGCGDCPACHLRQHGLDVYLSQKGEG

SEQ ID NO: 42617 - protein, 217 aa, Streptococcus oralis
  REGION 1..217: note = tr|A0A1X1HMK5|A0A1X1HMK5_STROR 7-cyano-7-deazaguanine synthase OS=Streptococcus oralis subsp. oralis OX=1891914 GN=queC PE=3 SV=1
MKRQSALVVFSGGQDSTTCLFWAKEHYETVEAVTFAYGQRHHLEIQVAREIAKEQGIRHHILDMSLLGQITENALTSDLEIEQKEGEVPNTFVDGRNHLFLSFAAVLAKQRGIKDIVTGVCETDFSGYPDCRDVFVKSLNVTLNLAMDYDFVIQTPLMWLDKAETWELADQLGAFDYVREKTLTCYNGIIGSGCGDCPACHLRQHGLDVYLSQKGEG

SEQ ID NO: 42618 - protein, 217 aa, unidentified; identical to SEQ ID NO: 42610
  source 1..217: note = Streptococcus pasteurianus
  REGION 1..217: note = tr|F5X768|F5X768_STRPX 7-cyano-7-deazaguanine synthase OS=Streptococcus pasteurianus (strain ATCC 43144 / JCM 5346 / CDC 1723-81) OX=981540 GN=queC PE=3 SV=1

SEQ ID NO: 42619 - protein, 217 aa, unidentified; identical to SEQ ID NO: 42610
  source 1..217: note = Streptococcus pasteurianus
  REGION 1..217: note = tr|A0A2X4S2L0|A0A2X4S2L0_9STRE 7-cyano-7-deazaguanine synthase OS=Streptococcus pasteurianus OX=197614 GN=queC PE=3 SV=1

SEQ ID NO: 42620 - protein, 217 aa, Streptococcus peroris
  REGION 1..217: note = tr|E8KDG9|E8KDG9_9STRE 7-cyano-7-deazaguanine synthase OS=Streptococcus peroris ATCC 700780 OX=888746; GN = exsB PE=3 SV=1
MKRQSALVVFSGGQDSTTCLFWAKQHYERVEAVTFAYGQRHHLEIQVAKEIAEEQGIHHHILDMSLLGQITENALTSDLEIEQKEGEVPNTFVDGRNHLFLSFAAVLAKQRGITDIVTGVCETDFSGYPDCRDVFVKSLNVTLNLAMDYDFVIQTPLMWLDKAETWALADQLGAFDYVREKTLTCYNGIRGAGCGDCPACHLRQHGLEVYLSQKGEA

SEQ ID NO: 42621 - protein, 177 aa, Streptococcus pneumoniae
  REGION 1..177: note = tr|A0A0E8GJV8|A0A0E8GJV8_STREE NADPH-dependent 7-cyano-7-deazaguanine reductase OS=Streptococcus pneumoniae OX=1313 GN=queF PE=3 SV=1
MKHQSALVVFSGGQDSTTCLFWAMQHYETVEAVTFAYGQRHHLEIQITREIAKEQGIRHHILDMSLLGQITAQPDFATIHISYIPDKLCVESKSLKLYLFSYRNHGDFHENCINTIGKDLVNLLDPRYLEVWGKFTPRGGISIDPYYNYGKQGTKYEGLAEQRLFQHDLYPEKIDNR

SEQ ID NO: 42622 - protein, 154 aa, Streptococcus pneumoniae
  REGION 1..154: note = sp|Q97P67|QUEF_STRPN Putative NADPH-dependent 7-cyano-7-deazaguanine reductase OS=Streptococcus pneumoniae serotype 4 (strain ATCC BAA-334 / TIGR4); OX = 170187 GN=queFPE=3 SV=1
MQHYETVEAVTFAYGQRHHLEIQITREIAKEQGIRHHILDMSLLGQITAQPDFATIHISYIPDKLCVESKSLKLYLFSYRNHGDFHENCINTIGKDLVNLLDPRYLEVWGKFTPRGGISIDPYYNYGKQGTKYEGLAEQRLFQHDLYPEKIDNR

SEQ ID NO: 42623 - protein, 217 aa, Streptococcus pseudopneumoniae
  REGION 1..217: note = tr|G0I717|G0I717_STRES 7-cyano-7-deazaguanine synthase OS=Streptococcus pseudopneumoniae (strain IS7493); OX = 1054460 GN=queC PE=3 SV=1
MKRQSALVVFSGGQDSTTCLFWAKEHYETVEAVTFAYGQRHHLEIQVAQEIAEEQGIRHHILDMSLLGQITENALTSDLEIEQKEGEVPNTFVDGRNHLFLSFAAVLAKQRGITDIVTGVCETDFSGYPDCRDVFVKSLNVTLNLAMDYDFVIQTPLMWLDKAETWELADQLGAFDYVREKTLTCYNGIIGSGCGDCPACHLRQHGLDVYLSQKGED

SEQ ID NO: 42624 - protein, 217 aa, Streptococcus pseudopneumoniae
  REGION 1..217: note = tr|A0A1S9ZI22|A0A1S9ZI22_9STRE 7-cyano-7-deazaguanine synthase OS=Streptococcus pseudopneumoniae OX=257758 GN=queC PE=3 SV=1
MKRQSALVVFSGGQDSTTCLFWAKEHYETVEAVTFAYGQRHHLEIQVAREIATEQGIRHHILDMSLLGQITENALTSDMEIEQKEGEVPNTFVDGRNHLFLSFAAVLAKQRGIKDIVTGVCETDFSGYPDCRDVFVKSLNVTLNLAMDYDFVIQTPLMWLDKAETWELADQLGAFDYVREKTLTCYNGIIGSGCEDCPACHLRQHGLDVYLSQKGEA

SEQ ID NO: 42625 - protein, 218 aa, Streptococcus ratti
  REGION 1..218: note = tr|M7DZH1|M7DZH1_STRRT 7-cyano-7-deazaguanine synthase (Fragment) OS=Streptococcus ratti FA-1 = DSM 20564 OX=699248 GN=D822_03379 PE=3 SV=1
IMKRQSALVVFSGGQDSTTCLFWALQHYEHVETVTFAYGQRHSQELAVAKEIAAEQGVKHHILDMSLLGQITENALTSDIDIEAKNGEVPNTFVDGRNHLFLSFAAVLAKQRHITDIITGVCQTDFSGYPDCRDVFVKSLNVTLNLAMDYEFVIQTPLMWLDKSETWALADSLGKFDYVREKTLTCYNGIRGAGCGQCPACHLRQTGLDKYLAQKEKN

SEQ ID NO: 42626 - protein, 217 aa, Streptococcus ratti; identical to SEQ ID NO: 42615
  REGION 1..217: note = tr|A0A5J6NMV9|A0A5J6NMV9_STRRT 7-cyano-7-deazaguanine synthase QueC OS=Streptococcus ratti OX=1341 GN=queC PE=4 SV=1

SEQ ID NO: 42627 - protein, 217 aa, Streptococcus salivarius
  REGION 1..217: note = tr|A0A074J2I2|A0A074J2I2_STRSL 7-cyano-7-deazaguanine synthase OS=Streptococcus salivarius OX=1304 GN=queC PE=3 SV=1
MKRQSALVVFSGGQDSTTCLFWALKHYETVELVTFAYGQRHSLEIEVAKEIAQEQELKHHVLDMSLLGQITENALTSDIEIEAEEGEVPNTFVDGRNHLFLSFAAVLAKQRGITDIVTGVCETDFSGYPDCRDVFVKSLNVTLNLAMAYDFVIQTPLMWLDKAETWALADQLGAFDYVREKTLTCYNGIIGTGCGECPACHLRQKGLEKYLAERGEA

SEQ ID NO: 42628 - protein, 217 aa, Streptococcus salivarius
  REGION 1..217: note = tr|A0A3S4LTL2|A0A3S4LTL2_STRSL 7-cyano-7-deazaguanine synthase OS=Streptococcus salivarius OX=1304 GN=queC PE=3 SV=1
MKRQSALVVFSGGQDSTTCLFWALKHYETVELVTFAYGQRHSLEIEVAKEIAQEQGLKHHVLDMSLLGQITENALTSDIEIEAEEGEVPNTFVDGRNHLFLSFAAILAKQRGITDIVTGVCETDFSGYPDCRDVFVKSLNVTLNLAMAYDFVIQTPLMWLDKAETWALADQLGAFDYVREKTLTCYNGIIGTGCGECPACHLRQKGLEKYLAERGEA

SEQ ID NO: 42629 - protein, 217 aa, Streptococcus sobrinus
  REGION 1..217: note = tr|U2IK98|U2IK98_9STRE 7-cyano-7-deazaguanine synthase OS=Streptococcus sobrinus W1703 OX=1227275; GN = queC PE=3 SV=1
MKRQSALVVFSGGQDSTTCLFWALKHYDHVEAVTFAYGQRHSQEVEVAKEIAKDLKIKHQVLDMSLLGQITNNALTSDIEIDAKEGEVPNTFVDGRNHLFLSFAAVLAKQKGITDIVTGVCETDFSGYPDCRDAFVKSLNVTLNLAMDYDFVIQTPLMWLDKAETWELADQLDAFDYVKDRTLTCYNGIMGAGCGECPACKLRQHGLETYLARRGEA

SEQ ID NO: 42630 - protein, 217 aa, Streptococcus sp.
  REGION 1..217: note = tr|E0PZQ9|E0PZQ9_9STRE 7-cyano-7-deazaguanine synthase OS=Streptococcus sp. oral taxon 071 str. 73H25AP; OX = 864570 GN=exsB PE=3 SV=1
MKRQSALVVFSGGQDSTTCLFWAKEHYETVEAVTFAYGQRHHLEIQVAREIAKEQGIRHHILDMSLLGQITENALTSDLEIEQKEREVPNTFVDGRNHLFLSFAAVLAKQRGIKDIVTGVCETDFSGYPDCRDVFVKSLNVTLNLAMDYDFVIQTPLMWLDKAETWKLADQLGAFDYVREKTLTCYNGIIGSGCGDCPACHLRQHGLDVYLSQKGEG

SEQ ID NO: 42631 - protein, 67 aa, Streptococcus sp.
  REGION 1..67: note = tr|K0YYW2|K0YYW2_9STRE 7-cyano-7-deazaguanine synthase (Fragment) OS=Streptococcus sp. GMD6S OX=1169675; GN = GMD6S_11880 PE=3 SV=1
FVIQTPLMWLDKAETWELADQLGAFDYVREKTLTCYNGIIGSGCGDCPACHLRQHGLDVYLSQKGES

SEQ ID NO: 42632 - protein, 217 aa, Streptococcus thermophilus
  REGION 1..217: note = sp|Q5M4S5|QUEC_STRT2 7-cyano-7-deazaguanine synthase; OS = Streptococcus thermophilus (strain ATCC BAA-250 / LMG 18311) OX=264199 GN=queC PE=3 SV=1
MKRQSALVVFSGGQDSTTCLFWALKHYETVELVTFAYGQRHSLEIEVAKEIAQEQGLKHHVLDMSLLGQITENALTSDIEIEAEKGEVPNTFVDGRNHLFLSFAAVLAKQRGIIDIVTGVCETDFSGYPDCRDVFVKSLNVTLNLAMAYDFVIQTPLMWLDKAETWALADQLGAFDYVREKTLTCYNGIIGTGCGDCPACHLRQKGLEKYLAEKGDA

SEQ ID NO: 42633 - protein, 217 aa, Streptococcus thermophilus
  REGION 1..217: note = tr|V8LVP3|V8LVP3_STRTR 7-cyano-7-deazaguanine synthase OS=Streptococcus thermophilus TH1435 OX=1415776; GN = queC PE=3 SV=1
MKRQSALVVFSGGQDSTTCLFWALKHYETVELVTFAYGQRHSLEIEVAKEIAQEQGLKHHVLDMSLLGQITENALTSDIEIEAEEGEVPNTFVDGRNHLFLSFAAVLAKQRGITDIVTGVCETDFSGYPDCRDVFVKSLNVTLNLAMAYDFVIQTPLMWLDKAETWALADQLGVFDYVREKTLTCYNGIIGTGCGDCPACHLRQKGLEKYLAEKGDA

SEQ ID NO: 42634 - protein, 225 aa, unidentified
  source 1..225: note = Streptococcus troglodytae
  REGION 1..225: note = tr|A0A1L7LK84|A0A1L7LK84_9STRE 7-cyano-7-deazaguanine synthase OS=Streptococcus troglodytae OX=1111760 GN=queC PE=3 SV=1
MKRQSALVVFSGGQDSTTCLFWAMKHYEYVETVTFSYGQRHSQELEVAKEIAAEQGVKHHILDMSLLGQITENALTSDIAIETKDGEVPNTFVDGRNHLFLSFAAVLAKQRNIKDIVTGVCQTDFSGYPDCRDVFVKSLNVTLNLAMDYEFVIQTPLMWLDKAETWELADRLGKFDYVRQKTLTCYNGIRGTGCGQCPACHLRQAGLEKYLSQKGKINVLSSKRN

SEQ ID NO: 42635 - protein, 217 aa, Streptococcus vestibularis
  REGION 1..217: note = tr|E8KVK8|E8KVK8_STRVE 7-cyano-7-deazaguanine synthase OS=Streptococcus vestibularis ATCC 49124; OX = 889206 GN=exsB PE=3 SV=1
MKRQSALVVFSGGQDSTTCLFWALKHYETVELVTFAYGQRHSLEIEVAKEIAQEQGLKHHVLDMSLLGQITENALTSDLEIEAEEGEVPNTFVDGRNHLFLSFAAVLAKQRGITDIITGVCETDFSGYPDCRDVFVKSLNVTLNLAMAYDFVIQTPLMWLDKAETWALADQLGAFDYVREKTLTCYNGIIGTGCGECPACHLRQKGLEKYLAERGEA

SEQ ID NO: 42636 - protein, 217 aa, Streptococcus vestibularis
  REGION 1..217: note = tr|E3CQ02|E3CQ02_STRVE 7-cyano-7-deazaguanine synthase OS=Streptococcus vestibularis F0396 OX=904306; GN = queC PE=3 SV=1
MKRQSALVVFSGGQDSTTCLFWALKHYETVELVTFAYGQRHSLEIEVAKEIAQEQGLKHHVLDMSLLGQITENALTSDIEIEAEEGEVPNTFVDGRNHLFLSFAAVLAKQRGITDIITGVCETDFSGYPDCRDVFVKSLNVTLNLAMAYDFVIQTPLMWLDKAETWALADQLGAFDYVREKTLTCYNGIIGTGCGDCPACHLRQKGLEKYLAERGEA

SEQ ID NO: 42637 - protein, 429 aa, Streptohalobacillus salinus
  REGION 1..429: note = tr|A0A2V3WBN9|A0A2V3WBN9_9BACI 7-cyano-7-deazaguanine synthase in queuosine biosynthesis; OS = Streptohalobacillus salinus OX=621096 GN=DES38_1034; PE = 4 SV=1
MINIVYKFSNSEEYSVEGNSITCSFEDYRYTFWKSKLELLPEFPSNEAIDLLVISLAVYGADRIIKRKDSFNAWKRSIHLHLPVLNSDLLEENVELLKRTINFLTGDSWEFTFRDRELTLEERKIRDQMRQTRIDKLDINKLCMFSGGLDSFIGAIDLLEDESKDTIFVSHYGGGKGTIEYQEALREELIKEYSLSKDNFYSFFAAPNGGKEETMRSRSFMFFSHAIALAACFKKRLELIIPENGYISLNIPLTYSRTGTSSTRTTHPHYMELFQDLLNNLGLEITLYNPYQFKTKGEMVTECKNKDFLAGNIINTMSCSHPDVGRMRGKSETQHCGRCLPCIIRRAAINSAGIDDRTSYYDEDFSSGKTARKNLNSYLLGLEKFDSERAYLDIQMSGPLNSNLEQYESIFKRGIAELKEVLKDYHENT

SEQ ID NO: 42638 - protein, 244 aa, Streptomyces acidiscabies
  REGION 1..244: note = tr|A0A117EAK8|A0A117EAK8_9ACTN 7-cyano-7-deazaguanine synthase OS=Streptomyces acidiscabies OX=42234 GN=queC PE=3 SV=1
MDTQDTAAHHDAGRDPFTAVVVLSGGMDSTTLLAHYAALRFTLVAVTVDYGQRHRKEIDSARRIARHYGATHHVVDFAGFGRLLGGSALTDADVAVPDGHFAEDAMRATVVPNRNAVLANIALSVAVARGADTVALGMHAGDHFVYPDCRPAFIDALRHLAAVANEGFVVPRIEAPFMTWSKRDIALHGTRLGAPLELSWSCYKGGDIHCGTCGTCYERREAFREADVADPTAYLDSVTRFAAP

SEQ ID NO: 42639 - protein, 244 aa, Streptomyces acidiscabies
  REGION 1..244: note = tr|A0A0L0JHP4|A0A0L0JHP4_9ACTN 7-cyano-7-deazaguanine synthase OS=Streptomyces acidiscabies OX=42234 GN=queC PE=3 SV=1
MDTQDTAAHHDAGRDPFTAVVVLSGGMDSTTLLAHYAALRFTLVAVTVDYGQRHRKEIDSARRIARHYGAAHHVVDFAGFGRLLGGSALTDADVAVPDGHFAEDAMRATVVPNRNAVLANIALSVAVARGADTVALGMHAGDHFVYPDCRPAFIDALRHLAAVANEGFVVPRIEAPFMTWSKRDIALHGTRLGAPLELSWSCYKGGDIHCGTCGTCYERREAFREADVADPTAYLDSVTRFAAP

SEQ ID NO: 42640 - protein, 238 aa, unidentified
  source 1..238: note = Streptomyces ahygroscopicus
  REGION 1..238: note = tr|K7RWX1|K7RWX1_9ACTN 7-cyano-7-deazaguanine synthase OS=Streptomyces ahygroscopicus subsp. wuzhouensis; OX = 387850 GN=tymM PE=3 SV=1
MDQDDSRTDPFTAVVVLSGGLDSTTLMAHYAALQYRLIAVTVDYGQRHHREIDAARAVAAHFGAEHHVVDLRGYGALLRGSALTDDRVSVPDGHYAEQSMRATVVPNRNAVLANVAVSIGVAHRASVVALGMHAGDHFIYPDCRPEFVAALRELVATANEGFAVPQVEAPFLSWAKTDIATHGVRLGAPLELSWSCYKGGDRHCGTCGTCYERREAFRNAGLADPTGYLDDVTAYPAP

SEQ ID NO: 42641 - protein, 443 aa, Streptomyces albidoflavus
  REGION 1..443: note = tr|A0A5B8DPJ0|A0A5B8DPJ0_9ACTN Uncharacterized protein OS=Streptomyces albidoflavus OX=1886; GN = FE156_05400 PE=4 SV=1
MTRPGHFFWWRGHHADRSGDGRWTEVGEEAFQEDERRITGRHRLPGPVPDWAEDLFRVARAAFIVDKYVRRDGGRDRWARHVRLSVPVTEYGRWRSGTVRDDLAGLFQLLTGDAWEIEFRPLTGHGVEEALDFPEEPRASEVALFSGGLDSTSWAAARSRVEDSRPLLLVMFREIGLLRQQRQVYSAVERLSGARPVMLLPMSQTPRGDGSPLRLETSSRTRGLLYASGAVRAATAHGVATVHVPENGQLALNPPLTPARSAACSTRSVHPRTLALLNSVLGVVGEGAGAVTVVNPWGWLTKGEVCAAGKAAGLTPSELESTLSCGKPPARRKGGPSLANCGVCFPCLVRRSGLLHANGADRTPYEAAPWEDHLSLRRGEDWRALRRWLLGSYGLTDVITDTPLPPDVAPTAALELIERGRGELARLFELAAARRFSGETVGP

SEQ ID NO: 42642 - protein, 837 aa, Streptomyces albidoflavus
  REGION 1..837: note = tr|A0A3S4BV04|A0A3S4BV04_9ACTN Condensation domain-containing protein OS=Streptomyces albidoflavus; OX = 1886 GN=EQK42_00855 PE=4 SV=1
MTTTTPDATAAPEPADSLDRDGIRVLERQIEDALLADDRIADCAVVFQGVAVDSVPAERCVRCGMDVAYPGTRLDRDGVCDLCLMYAEHGPEILSYFGEVDEFTRILRERAEAAGSDYDALLLFSGGKDSTYVLHQLVRMGLRVMTFTFDNGFISRTALENVETITKSLGIEHLTMTRADQNRVFLRSLEQHKSVCNGCFRSLLDLSHRLAHERGIPSIVTGLSRGQIIDERLLWFYRNGEFDPARIEQQLEVGRKVYHQVGSDLSDGVLDRVEVVDYYRYSDVTKDDIRAFLAEAETLWAAPKDTGFCSSNCMINDVGVYVHRLERGYHNYESPTRWEVRLGHLARAEADAELRTPVNTGRVRSMLATIGYTDPGDRSRLGRRMAAYFVPRTGLTPDRARAAVAARLPEILLPEHWVELAEVPRTADGAVDRRALPDPAPETGKRLAPDTGEVQAAAGVPDAGRPTPAQRLLLEQDGAGPDGRARALLLDLLEGTTAETVRKAVLALVQRHEALRTRFRRADGGWRREVAGLTGGVPVAALDLTRYEPARVPGALRVAAERLRARLDVARGPLFAAALAERREGAPQLLLIAHELAADTEGWRRILDDLGTALGRIAVGGPAGLAAAPAPRTAAEPAPVPVEDELWSPPAAEQDGTPDPVRRTVLEADRTAALAATGTPVAALVAAAVTHALSETCGAAGVLLAVTDHTAALPHPAGLFAVTGTAGTGAARTLERVRSALGTPVTAPAGAVPVGITHLGDLDGLPAAGGPLRHAGSTDHHLAAPFGPRARTPYVVSHLGDGRLHLTWTGTPAPAAAADAAAAALVQLAATAQEGTA

SEQ ID NO: 42643 - protein, 238 aa, Streptomyces albulus
  REGION 1..238: note = tr|A0A059WCJ2|A0A059WCJ2_STRA9 7-cyano-7-deazaguanine synthase OS=Streptomyces albulus; OX = 68570 GN=queC PE=3 SV=1
MDEDDSRTDPFTAVVVLSGGLDSTTLMAHYAALQYRLIAVTVDYGQRHHREIDAARAVAAHFGAEHHVVDLRGYGALLRGSALTDDRVSVPDGHYAEQSMRATVVPNRNAVLANVAVSIGVAHRASVVALGMHAGDHFIYPDCRPEFVAALRELVATANEGFAVPQVEAPFLSWAKTDIATHGVRLGAPLELSWSCYKGGDRHCGTCGTCYERREAFRNAGLADPTGYLDDVTAYPAP

SEQ ID NO: 42644 - protein, 238 aa, Streptomyces albulus; identical to SEQ ID NO: 42643
  REGION 1..238: note = tr|X0N1G2|X0N1G2_STRA9 7-cyano-7-deazaguanine synthase OS=Streptomyces albulus PD-1 OX=1395572 GN=queC; PE = 3 SV=1

SEQ ID NO: 42645 - protein, 224 aa, Streptomyces albus
  REGION 1..224: note = tr|A0A0X7JBM6|A0A0X7JBM6_9ACTN 7-cyano-7-deazaguanine synthase OS=Streptomyces albus subsp. albus OX=67257 GN=ADL21_33450 PE=3 SV=1
MTSAKTLVVLSGGIDSVVLAHACKAEGREVSAIAIDYGQRHRKELEYAGRAAGKLNIDLTVADLGGYSRLMRGFSLTDADVTVPDEHYTRTGSVNVVPNRNPVFMTVAYAHAVLAGAQEMCLGFLAEDAATAPDTSPAFLTAFNAMEARALEGLADPPPRVTAPLLTLRKADVLLLGTELGVDWRETWTCFKGERFHCGSCASCHDRRNAFAEADLTDPTRYQR

SEQ ID NO: 42646 - protein, 445 aa, unidentified
  source 1..445: note = Streptomyces antioxidans
  REGION 1..445: note = tr|A0A1V4D6Q8|A0A1V4D6Q8_9ACTN Uncharacterized protein OS=Streptomyces antioxidans OX=1507734; GN = VT50_0212555 PE=4 SV=1
MTGSDHFLWWRGHRGDRPRDDRWTEIGKEAFQEKERRITGRHHLPGPVSDWAEDLFRVARAAFIADKYVRRTGEGDRWTRRISLAVPVTEHERWESAAVRTHLTALLQVLTGDLWNVDFRPLTGHYVEDALVSPDEPRASEVALFSGGLDSLSWAATRSGADDSGPLLLVMFREIGLLRLQQRVYKAVERLVRARPVLLLPMSQTPAGDGSGARLETSSRTRGLLYAAGAIRAATAHGVGTVHIPENGQLALNPPLTPARSAACSTRSVHPRTLGSLNALLTAVSDTERTVQVVNPLAQLTKGEVCKAGRDAGLTLSDLESTLSCGKPPTRRSGGPPIANCGVCFPCLVRRSGLLHANGSDGTRYEALPWAGGLPLDRGVDWRALQRWLLGPYTLTDVFTDTPLPPDTDPAVAFDLIRRGREELARLLQIADATEAAGAAQVRSG

SEQ ID NO: 42647 - protein, 235 aa, Streptomyces caeruleatus
  REGION 1..235: note = tr|A0A101U6C8|A0A101U6C8_9ACTN 7-cyano-7-deazaguanine synthase OS=Streptomyces caeruleatus OX=661399 GN=queC PE=3 SV=1
MTGHVPRHAVVIASGGLDSSAVAYLLAAQGASLSLLSFDYGQRHRKELQSAALIAEELGASHDVVDLRSLGHILGGSALTDTTIPVPDGHYSDDSMRITVVPNRNAIMLSVAAGVAVASKADTVAFGAHAGDHAIYPDCRPQFLEHIARTIHVGNEGFLAEDFQVLAPFLNATKADIVTAAEELGVPFKQTWSCYKGGDLHCGTCGTCWERREAFQVAGVSDPTPYADKAAGERR

SEQ ID NO: 42648 - protein, 223 aa, unidentified
  source 1..223: note = Streptomyces cattleya
  REGION 1..223: note = tr|F8JT15|F8JT15_STREN 7-cyano-7-deazaguanine synthase OS=Streptomyces cattleya (strain ATCC 35852 / DSM 46488 / JCM 4925 / NBRC 14057 / NRRL 8057) OX=1003195; GN = que C PE=3 SV=1
MSRPLAVLSFSGGMDSTTLAAHYHDSGYEMMLLSFDYGQRHSRELLAARRVAQHFDAEHQVVDLTAVGALMPGSALTDPAIEVPDGHYEAESMRVTVVPNRNAIMANIAVGIAAARRAQLVGLGIHAGDHAIYPDCRPAFLDALRACVTRALEGHHTPRIEAPFITWTKAQIAEHAHLLGAPLGLSWSCYKGQKQHCGTCGTCTERREAFADAGVPDPTDYAV

SEQ ID NO: 42649 - protein, 231 aa, Streptomyces chartreusis
  REGION 1..231: note = tr|A0A2N9B6Y3|A0A2N9B6Y3_STRCX 7-cyano-7-deazaguanine synthase OS=Streptomyces chartreusis NRRL 3882 OX=1079985 GN=queC PE=3 SV=1
MDRPAIVLLSGGLDSTTVLAIAKDQGFTPYALSFRYGQRHSIELEAAQRVAQAQGVARHVIADIDLRVFGGSALTADIEVPKHESLADVEEAGVPITYVPARNTIFLSFALAFAETVGASDIFTGVTAVDYSGYPDCRPEYMEAFATMANLATKAGVEGTSKITLHSPLIALSKADIVREGLRLGVDYSLTSSCYDPDEQGRACGKCDTCLLRLKGFAEAGVTDPVRYQSA

SEQ ID NO: 42650 - protein, 136 aa, Streptomyces coelicoflavus
  REGION 1..136: note = tr|H1QDG4|H1QDG4_9ACTN 7-cyano-7-deazaguanine synthase (Fragment) OS=Streptomyces coelicoflavus ZG0656; OX = 1120227 GN=SMCF_2942 PE=3 SV=1
FVPGRNLIFLVAAAALADRRGLEVLVGGMCETDYSGYPDCRHETMEAMARALSLGLDKPVVIETPLMWLTKAQTWDLADRIGGETLVELIIEDSHTCYQGDRTHRHAWGYGCGECPACELRAAGHADWVAGRGAQT

SEQ ID NO: 42651 - protein, 238 aa, Streptomyces diastatochromogenes; identical to SEQ ID NO: 42640
  REGION 1..238: note = tr|A0A1L7B5M4|A0A1L7B5M4_9ACTN 7-cyano-7-deazaguanine synthase OS=Streptomyces diastatochromogenes OX=42236 GN=toyM PE=3 SV=1

SEQ ID NO: 42652 - protein, 229 aa, Streptomyces filamentosus
  REGION 1..229: note = tr|D6AIR5|D6AIR5_STRFL 7-cyano-7-deazaguanine synthase OS=Streptomyces filamentosus NRRL 15998 OX=457431; GN = queC PE=3 SV=1
MQEGVTVARVIAIVSGGLDSVVLAHHLHAEGHEVHLLSIDYGQRHRKEHDYARIAADRIGAEHEIVDLSNVASMLPGYSLTDSQVDVPDQHYTAPGSVNVVPNRNVILLSVAYGKAAAVKADQVAIGALAGDASTAPDCSAEFISSFNAMEKIACAGYAPAHLEVVAPFIDLHKHDVIRLGEKLGVDWTETWSCFKGTEVHCGTCAACVDRIQAFERAETTDTTVYFKE

SEQ ID NO: 42653 - protein, 240 aa, Streptomyces filamentosus
  REGION 1..240: note = tr|W9FP17|W9FP17_STRFL 7-cyano-7-deazaguanine synthase OS=Streptomyces filamentosus NRRL 11379 OX=457430; GN = queC PE=3 SV=1
MPASGPHHPFRLQEGVTVARVIAIVSGGLDSVVLAHHLHAEGHEVHLLSIDYGQRHRKEHDYARIAADRIGAEHEIVDLSNVASMLPGYSLTDSQVDVPDQHYTAPGSVNVVPNRNVILLSVAYGKAAAVKADQVAIGALAGDASTAPDCSAEFISSFNAMEKIACAGYAPAHLEVVAPFIDLHKHDVIRLGEKLGVDWTETWSCFKGTEVHCGTCAACVDRIQAFERAETTDTTVYFKE

SEQ ID NO: 42654 - protein, 226 aa, Streptomyces griseocarneus
  REGION 1..226: note = tr|A0A3L8IG64|A0A3L8IG64_9ACTN 7-cyano-7-deazaguanine synthase OS=Streptomyces griseocarneus OX=51201 GN=queC PE=3 SV=1
MTRPLAVLAFSGGMDSTTLAAQYDAEGYALLLLSFDYGQRHARELESARAVAVHFGAEHHVVDLAAVGRLMPGSALTDPSVDVPDGHYAEESMRVTVVPNRNAIMANVAVGIASARQAAVVALGIHAGDHAVYPDCRPEFVDALRSCVACALDGLHTPRVEAPFVHRSKSEIATLADTLGAPLHLSWSCYRGGARHCGTCGTCTERREAFAEAGLDDPTEYEEVER

SEQ ID NO: 42655 - protein, 222 aa, Streptomyces griseochromogenes
  REGION 1..222: note = tr|A0A1B1B2M6|A0A1B1B2M6_9ACTN 7-cyano-7-deazaguanine synthase OS=Streptomyces griseochromogenes OX=68214 GN=queC PE=3 SV=1
MPKTVVLFSGGVESTVVAHQLSREGHELRLLAIDYGQRHRREHEFARIIAEGLGASFRVIDIRQVGGLLPGNSLTDDKVAVPDYDPAIRGREFVVPNRNAILLSIAFAVAVAEQADQVAIGSIAGDAQTGDCTREFLLAFNTMERVATAELAPAGLSVVAPLIDMQKADVIRLGESLGVRWQETWSCFRGGDKQCGTCATCYDRRTAFAKAEVMDPTEYARD

SEQ ID NO: 42656 - protein, 236 aa, Streptomyces griseochromogenes
  REGION 1..236: note = tr|A0A1B1B435|A0A1B1B435_9ACTN 7-cyano-7-deazaguanine synthase OS=Streptomyces griseochromogenes OX=68214 GN=queC PE=3 SV=1
MAERPAIVLLSGGLDSTTVLAIAKDQGYTPYALSFRYGQRHSVELEAAKRVASAQGVARHVIADIDLRVFGGSALTSDIEVPKHESLDTADDKGIDSSVPITYVPARNTIFLSFALAFAETVGASDIFTGVTAVDFSGYPDCRPEYMEAYEQMANLATRAGVEGTQKLKLHSPLIAMSKADIVREGLRLGVDYSLTSSCYDPDEQGRACGHCETCLLRLKGFAEAGVTDPVQYQGA

SEQ ID NO: 42657 - protein, 231 aa, Streptomyces griseoflavus
  REGION 1..231: note = tr|D9XKX4|D9XKX4_9ACTN 7-cyano-7-deazaguanine synthase OS=Streptomyces griseoflavus Tu4000 OX=467200; GN = queC PE=3 SV=1
MDRPAIVLLSGGLDSTTVLAIAKDQGFTPYALSFRYGQRHSIELEAAKRVAEVQGVARHVIADIDLRVFGGSALTADIEVPKHESLDDVEDGGVPITYVPARNTIFLSFALAFAETVGASDIFTGVTAVDYSGYPDCRPEYMDAFATMANLATRAGVEGISRMTLHSPLIAMSKADIVREGLRLGVDYSLTSSCYNPDDQGQACGKCDTCLLRLKGFAEAGVTDPVRYQSA

SEQ ID NO: 42658 - protein, 224 aa, Streptomyces griseoflavus
  REGION 1..224: note = tr|A0A0L8NMW0|A0A0L8NMW0_9ACTN 7-cyano-7-deazaguanine synthase OS=Streptomyces griseoflavus OX=35619 GN=ADK76_10885 PE=3 SV=1
MTSAKTLVVLSGGIDSVVLAHACKAEGREVSAIAIDYGQRHRKELEYAGRAAGKLNIDLTVADLGGYSRLMRGFSLTDADVTVPDEHYTRTGSVNVVPNRNPLFMTVAYAHAVLAGAQEMCLGFLAEDAATAPDTSPAFLTAFNAMEARALEGLADPPPRVTAPLLTLRKAEVLLLGRELGVDWRETWTCFKGERFHCGSCASCHDRRNAFAEADLTDPTRYQR

SEQ ID NO: 42659 - protein, 423 aa, Streptomyces griseoluteus
  REGION 1..423: note = tr|A0A4Z1DKQ3|A0A4Z1DKQ3_STRGP Queuosine biosynthesis protein queC OS=Streptomyces griseoluteus; OX = 29306 GN=E5082_10485 PE=4 SV=1
MTTAYEVLPHDGQQHEPSATALHWPRTRAHSPTPTVTCTVGWDLDLLGPAPAAAADLVRIAASAYLADRSARRPTTFARTIDLTVHTVDPDPWNASSGRLTEDLLSWLTGDAWHLHAVPAAPGGRRPAPVPDADDVMLLSGGLDSLCGAADHLGDTAERIHLSHYDGSTVIRHAQQQTTAWLNGRGRQPLRHLSVKLCQTHSAAESSSRSRSLLFAALASAVAAGASSPQVTVPENGFTSINPPLTAARGGALSTRSTHPGTFARINELLANLDIPVTVANPYAYLTKGQLLARALDRAGQSLLLAGAKTLSCSKLDGNWYSGGDPTLNCGLCLACLVRRGSFTAGPHRDATTYLVDHLTGAAHQLLLDRRRKDVHDVRQAIARGIDDTDILAVGELPPDTDLDAVVDMCQRGLQELNHVPLP

SEQ ID NO: 42660 - protein, 231 aa, Streptomyces griseoruber
  REGION 1..231: note = tr|A0A117R9I5|A0A117R9I5_9ACTN 7-cyano-7-deazaguanine synthase OS=Streptomyces griseoruber OX=1943 GN=queC PE=3 SV=1
MDRPAIVLLSGGLDSTTVLAIAKDLGFTPYALSFRYGQRHSIELEAAQRVAEVQGVARHVIADIDLRVFGGSALTADIEVPKHESLTDVEDAGVPITYVPARNTIFLSFALAFAETVGASDIFTGVTAVDYSGYPDCRPEYMEAFATMANLATRAGVEGTSKITLHSPLIALSKADIVREGLRLGVDYSLTSSCYDPDGQGRACGRCDTCLLRLKGFAEAGVKDPVRYQNA

SEQ ID NO: 42661 - protein, 429 aa, Streptomyces griseorubiginosus
  REGION 1..429: note = tr|A0A385ZE39|A0A385ZE39_9ACTN 7-cyano-7-deazaguanine synthase OS=Streptomyces griseorubiginosus OX=67304 GN=queC PE=4 SV=1
MPAYTLRLDADISPSEPDGITPFWWPAGPGGSFVSTLGPRLGALGPVPEPNIELVRLAALVYAADRTTPRRAARANWTQRAFELDVPVYAPARWDVLRERLEALLGFLSGDRWSIRFHRADPPQETVRDTPYPGVRRVVLLSGGADSAIGALLSRHDLGPDRHLLLSHVGATTLAPIQRDIAACIARLIDGPPQYHQALRFSRRSHQPTGAKLRNEYSTRTRSLLFLALGLAAAAVEKVPLWIPENGFASLNVPLTADQRGALSTRTTHPFFLQTLAAVARDAGAHAVIHNPFATRTKGEMFTQAAELVGPAPAARLLSSTHSCAHTGHRSHRIPVRTHCGVCFGCLLRRASFRAAALDDSTDYLHARHDENLNTYLHGKSVEPSLRTFLARGLRPADITTLNLPPDYPTRQAYELCRRGIAELELLYP

SEQ ID NO: 42662 - protein, 236 aa, Streptomyces griseus
  REGION 1..236: note = tr|A0A2X2PAP9|A0A2X2PAP9_STRGR 7-cyano-7-deazaguanine synthase OS=Streptomyces griseus; OX = 1911 GN=queC PE=3 SV=1
MPRTAVPRHAVLIFSGGLDSAVTAYKLRDEGVTVSLLSFNYGQRHVKELAHAADLADQLGASHDIVDLTSLGRILGGSALTDPAITVPHGHYRAETMRSTVVPNRNAIMLEIAAGAAVAAGADAVAFGAHSGDHAIYPDCRPEFFTLIEASMKAANEGHIANDFRLVAPFLNLTKADIVREGVRLGVPFALTWSCYEGGAAHCGACGTCVERQEAFAEAGVGDPTIYVPAQEGAVR

SEQ ID NO: 42663 - protein, 236 aa, Streptomyces hainanensis
  REGION 1..236: note = tr|A0A4R4TMB2|A0A4R4TMB2_9ACTN 7-cyano-7-deazaguanine synthase OS=Streptomyces hainanensis OX=402648 GN=queC PE=3 SV=1
MTRRPAIVLLSGGLDSTTVLAIAKDQGFATYALSFRYGQRHSVELEAAKRVAAAHGIERHVVADIDLRVFGGSALTADIDVPKHESLHGPGLQASASSVPVTYVPARNTIFLSFALAYAETVGSSDVFTGVNAVDYSGYPDCRPEYMEAYERMANLATRAGVEGTQKLKIHSPLIAMSKADIVREGLRLGVDYSLTSSCYDPDEQGRACGHCETCLLRLKGFAEVGVSDPVLYQGA

SEQ ID NO: 42664 - protein, 150 aa, Streptomyces ipomoeae
  REGION 1..150: note = tr|A0A540PMS5|A0A540PMS5_9ACTN Uncharacterized protein OS=Streptomyces ipomoeae OX=103232; GN = SipoB123_18345 PE=4 SV=1
MSDMESAVQVVNPLAQLTKGEVCKAGRDAGLTPSDLESTLSCGKAPTRRSGGPPIANCGVCFPCLVRRSGLLHATTSTAPGTRHCHGRTTYRLTGVPTGAHYSGGCWPVHPYGRLHRYPTAAGNGPGGGVRFDQARAGRVGPAASDRGCN

SEQ ID NO: 42665 - protein, 229 aa, Streptomyces iranensis
  REGION 1..229: note = tr|A0A061A7Z2|A0A061A7Z2_9ACTN 7-cyano-7-deazaguanine synthase OS=Streptomyces iranensis; OX = 576784 GN=SIRAN8001 PE=3 SV=1
MPKTVAIVSGGLDSVTMAYHLQAQGHTLRLLSVNYGQRHLIEHEFAEKAARTLGVPHDVVDLSPVGKLMHGSSLTDPDVDVPDQKRESPGESPNVVPNRNALLLSVAFAVAVAEKAEAVAIGVIDDAQAAPDANTAFLDSFLAMEKIATRGYAHPELTLSAPLAELRKSGVVSLGEELGVPWTETWTCMRGGALHCGRCASCWDRQEAFRDAGVTDPTAYQTSHAKELP

SEQ ID NO: 42666 - protein, 223 aa, Streptomyces iranensis
  REGION 1..223: note = tr|A0A060ZZV5|A0A060ZZV5_9ACTN 7-cyano-7-deazaguanine synthase OS=Streptomyces iranensis; OX = 576784 GN=queC PE=3 SV=1
MLSGGVDSTTLLAHYAALRFQLVAVTVDYGQRHRKEIDSARRIAQRYEAEHHVVDLSGFGSLLGGVTLTDHRADVPDGHFADESMRATVVPNRNAVLANIAVSVAVARRADTVALGIHSGDHFVYPDCRPAFIDTLRDLVTVANEGFAPPRVEAPFMTWSKADIVRHGSRLGAPLELSWSCYKGADIHCGTCGTCYERREAFREAVLVDPTEYLDSVTRFAAP

SEQ ID NO: 42667 - protein, 235 aa, Streptomyces lydicus
  REGION 1..235: note = tr|A0A0D4DFC8|A0A0D4DFC8_9ACTN 7-cyano-7-deazaguanine synthase OS=Streptomyces lydicus; OX = 47763 GN=queC PE=3 SV=1
MNQPVPRHAVLIASGGLDSSVAAYHFAALGSKVSMLSFNYGQRHLRELVSAAEIAGLLDVAHDVVDLSSLGRLLGGSALTDRTMAVPHGHYRDDTMKVTVVPNRNAIMLEIAVGVAVAAGADAVAFGAHAGDHTIYPDCRPTFFDAISDSIRAGNEGFLADGFQLQAPFLHQSKADIVGRGAELGVPLELTWSCYEGGERQCGACGTCVERREAFNRAGVTDPTEYAVHGVESGR

SEQ ID NO: 42668 - protein, 229 aa, Streptomyces lydicus
  REGION 1..229: note = tr|A0A1D7VQ77|A0A1D7VQ77_9ACTN 7-cyano-7-deazaguanine synthase OS=Streptomyces lydicus; OX = 47763 GN=SL103_22620 PE=3 SV=1
MSKTVAIVSGGLDSVTMAYHLQAQGHTLHLLSVNYGQRHLVEHEFAAKAARSLGVPHDVVDLSPVGTLLSGSSLTDPRVDVPDHRSGSSGGSPNVVPNRNALLLSVAFAVAVAQKAEAVAVGVVDDLQAAPDSNAAFIDSFLAMERIATRGYAHPDLTLTAPLVRLRKSDVVSLGEELGVPWTDTWSCFRGDALQCGRCAACRERQEAFRDAGVTDPTDYRTSDSKELP

SEQ ID NO: 42669 - protein, 231 aa, unidentified
  source 1..231: note = Streptomyces mangrovisoli
  REGION 1..231: note = tr|A0A1J4NKU5|A0A1J4NKU5_9ACTN 7-cyano-7-deazaguanine synthase OS=Streptomyces mangrovisoli OX=1428628 GN=queC PE=3 SV=1
MDRPAIVLLSGGLDSTTVLAIAKDQGFTPYALSFRYGQRHSIELEAAERVARAQGVARHVIADIDLRVFGGSALTSDIEVPKHDSLADVEEAGVPVTYVPARNTIFLSFALAFAETVGASDIFTGVTAVDYSGYPDCRPEYMDAFAAMANLATRAGVEGTSTMTLHSPLIALSKADIVREGLRLGVDYSLTSSCYDPDEQGRACGRCDTCLLRLKGFAEAGVKDPVRYQSV

SEQ ID NO: 42670 - protein, 439 aa, Streptomyces melanosporofaciens
  REGION 1..439: note = tr|A0A1H4TUU5|A0A1H4TUU5_STRMJ Queuosine biosynthesis protein QueC OS=Streptomyces melanosporofaciens OX=67327 GN=SAMN04490356_4775 PE=4 SV=1
MTEAHTRLFWLSRPDAEAPPMHWQPLHDAMYWERPSRGPDRRPLFAPAPDWADDLQRVARAVFAADRYARRAKSFDHWTRRITLSVPVARPERWDRALASLTAVLETVTGDLWEVVFRPLHGKSVREGPLTFTDEDYAHDVALFSGGLDSLGWAAQQAALPFARALLLVTFEERNFEALQDQVYEAVRGLRRRPVRRLTQSQTVRKPRGSGIELELTTRSRGLLYAATAVHAAAAEHVPVVHLPENGQLALNPPLSAARAGACSTRSVHPWTLHHLNRVISEVAEPGSAIRVENPFATLTKGDVCAAAHDAGMSQRVLEATLSCGAPPDRRPAGPALAHCGLCYPCLVRRSGLLHAFGEDRTPYAADPWDPALPASRTGNWQALRRWLDTEWSMLDLVADAPLPPDTQPASLMEVVERGREELRALIAWAGKRTPRKAS

SEQ ID NO: 42671 - protein, 439 aa, unidentified
  source 1..439: note = Streptomyces oceani
  REGION 1..439: note = tr|A0A1E7KL41|A0A1E7KL41_9ACTN Uncharacterized protein OS=Streptomyces oceani OX=1075402 GN=AN216_06805; PE = 4 SV=1
MTDSYEYFRWLSHPAAERPPEPWKPLSDANYRERPARRPDHIRTLALAPAWAEDLQRVARAVFAADRCAPRTERFDRWTRHLRLDVPVTAPDRWTQALPHLLSLLSTVTGDVWDVSFRTHEKKRHHADPLGTESRYIASEYTADEVALFSGGLDSLGWAARRTSNTTSRLLLVSFEEANFETEQRRLFGFVSGLRKPLPRLLSENQAVIGPGGRRHAERSTRSRGLLYAAGAVKAAAAERVPLVHVPENGQLAVNFPLSAARSAACSTRSVHPWTLHHLNRVIAEIAAPGAEVRVTNPFADRTKGEVCVAARDAGLPREVLEATISCGQPPRRQPGRSDLAHCGVCFPCLIRRSGLLYAFGEDNTPYAADPWDAGLPTEKQRLWSALRRWLARDYSVLDLIADHPLPAQAEPGELLKVIERGRDELRGWVAWSVDSRRR

SEQ ID NO: 42672 - protein, 231 aa, unidentified
  source 1..231: note = Streptomyces oceani
  REGION 1..231: note = tr|A0A1E7JW58|A0A1E7JW58_9ACTN 7-cyano-7-deazaguanine synthase OS=Streptomyces oceani; OX = 1075402 GN=queC PE=3 SV=1
MARPAIVLLSGGLDSTTVLAIAKDQGYTPYALSFRYGQRHSVELEAAKRVVEAQGAARHVIADIDLRVFGGSALTSDIEVPKHDSLDHTEGGGVPITYVPARNTIFLSFALAYAETVNASDIFTGVTAVDYSGYPDCRPEYIDAYAKMANLATRAGVEGTQQLKIHSPLVEMSKADIVREGLRLGVDYSITSSCYDPDEQGRACGCCETCLLRLKGFAEAGSTDPVRYQDA

SEQ ID NO: 42673 - protein, 229 aa, Streptomyces olivochromogenes
  REGION 1..229: note = tr|A0A250VKV3|A0A250VKV3_STROL 7-cyano-7-deazaguanine synthase OS=Streptomyces olivochromogenes OX=1963 GN=queC PE=3 SV=1
MPKTVAIVSGGLDSVTMAYHLQAQGHTLHLLSVNYGQRHLVEHEFAVKAARSLGVPHDVVDLSPVGKLLSGSSLTDPTVDVPDHKSGSSGESPNVVPNRNALLLSVAFAVAVAEKAEAVAVGVVDDLQAAPDSNAAFIDSFLAMERIATRGYAHPDLTLTAPLVRLRKSDVVSLGEELGVPWTETWSCFRGDALQCGRCAACRERQEAFRDAGVTDPTTYQTSDSKELR

SEQ ID NO: 42674 - protein, 226 aa, unidentified
  source 1..226: note = Streptomyces palmae
  REGION 1..226: note = tr|A0A4Z0H1R7|A0A4Z0H1R7_9ACTN 7-cyano-7-deazaguanine synthase OS=Streptomyces palmae; OX = 1701085 GN=queC PE=3 SV=1
MSKVIAIVSGGMDSVTMAHQLDQQGHEVHLLSVDYGQRHRKEHDFAAAAAERLGAVHQIADLSAVGAMFRGSSLTDPSVDVPEQTWEGYGESPNIVPNRNALLLSVAFAIAVVEKAEAVAIGIMADDATSVPDSTPAFLRSFIAMERLATKGYAHPDLDLLAPLAGLRKSGVVLLGEELRVPWAQTWTCLRGGEAHCGRCAACWERQEAFTEAGVDDPTVYQEIRG

SEQ ID NO: 42675 - protein, 440 aa, unidentified
  source 1..440: note = Streptomyces pini
  REGION 1..440: note = tr|A0A1I4I6Q3|A0A1I4I6Q3_9ACTN 7-cyano-7-deazaguanine synthase (Queuosine biosynthesis); OS = Streptomyces pini OX=1520580 GN=SAMN05192584_12016 PE=4; SV = 1
MTGSDHFLWWRGHRGDRPHDARWKEIGEEAFQEKERRITGRHHLPGPVPDWAEDLFRVARASFIADKYVRRTGVRDRWTRRISLTVPVAEHERWQSAAVRTHFTALLRTLTGDLWSVDFRPLTGHRVEEAMIFPDDPRASEVALFSGGLDSLSWAATRSRADDSRPLLLVMFREIGLLRLQQRVYKAVERLGGARPVMLLPMSQTPAGDGTGLRLETSSRTRGLLYAAGAIRAATAHGVATVHIPENGQLALNPPLTAARSAACSTRSVHPRTLDRLNTLLAAVGDAGSAVRVVNPLAQLTKGEVCRAGRDAGLTSSDLESTLSCGKPPTRRSGGPPIANCGVCFPCLVRRSGLLHANGTDGTRYEVSPWANDLPLDRSTDWRALQRWLLGRYTLTDVLTDTPLPPGTDPASALDVIRRGREELTRLLQPAAAAEAAGAG

SEQ ID NO: 42676 - protein, 231 aa, unidentified
  source 1..231: note = Streptomyces pini
  REGION 1..231: note = tr|A0A1I4J2V8|A0A1I4J2V8_9ACTN 7-cyano-7-deazaguanine synthase OS=Streptomyces pini; OX = 1520580 GN=queC PE=3 SV=1
MDRPAIVLLSGGLDSTTVLAIAKDQGFTPCALSFRYGQRHSVELEAARRVAQAQGVARHVIADIDLRVFGGSALTADIEVPKHESLQDTPQSGVPITYVPARNTIFLSFALAFAETVGASDIFTGVTAVDYSGYPDCRPEYMEAFAAMANLATRAGVEGTSKITLHSPLITLSKAGIVREGLRLGVDYSLTSSCYDPDDQGRACGKCETCLLRLKGFAEAGVTDPVQYQSA

SEQ ID NO: 42677 - protein, 226 aa, unidentified
  source 1..226: note = Streptomyces pluripotens
  REGION 1..226: note = tr|A0A221P8D5|A0A221P8D5_9ACTN 7-cyano-7-deazaguanine synthase OS=Streptomyces pluripotens OX=1355015 GN=queC PE=3 SV=1
MSRIVAVVSGGIDSVTMAHHLATAGHELHVLAVDYGQRHRKELEFAAAVAERLGAPYEQVDLRSLRSVMRGSSLTDPSVSVPRPDRPVGGNPNIVPNRNAVLLSVAFALAVTVRADAVAFGVMAEDVGPSDTSPEFLRLFLEMERVATKGSLAPEVELLAPLIELPKTGVIALGQRLGVPWDKTWTCFRGEDIHCGACAACVERRGAFADLGITDPTDYREALTPR

SEQ ID NO: 42678 - protein, 229 aa, Streptomyces puniciscabiei
  REGION 1..229: note = tr|A0A1D7YJE5|A0A1D7YJE5_9ACTN 7-cyano-7-deazaguanine synthase OS=Streptomyces puniciscabiei OX=164348 GN=BFF78_35775 PE=3 SV=1
MPKTVAIVSGGLDSVTMAHHLQARGHTLHLLSVNYGQRHLVEHEFAAKAARSLGVPHDVVDLSPVGKLLSGSSLTDPTVDVPDHEIGSSGESPNVVPNRNALLLSVAFAVAVAERAEAVAIGVVDDLQAAPDSNSAFIDSFLAMERIATRGYAHPDLTLTAPLARLRKSDVVSLGEELRVPWTETWSCFRGDVLQCGRCAACRERQEAFRDAGVTDPTHYQTSESKELP

SEQ ID NO: 42679 - protein, 231 aa, Streptomyces qinglanensis
  REGION 1..231: note = tr|A0A0U1XAH1|A0A0U1XAH1_9ACTN 7-cyano-7-deazaguanine synthase OS=Streptomyces qinglanensis OX=943816 GN=queC PE=3 SV=1
MARPAIVLLSGGLDSTTVLAIAKDQGYTPYALSFRYGQRHSVELEAAKRVVEAQGAARHVIADIDLRVFGGSALTSDIEVPKHDSLDRTEGGGVPITYVPARNTIFLSFALAYAETVNASDIFTGVTAVDYSGYPDCRPEYIDAYAKMANLATRAGVEGTQQLKIHSPLMEMSKADIVREGLRLGVDYSITSSCYDPDEQGRACGRCETCLLRLKGFAEAGSTDPVRYQDA

SEQ ID NO: 42680 - protein, 439 aa, Streptomyces rapamycinicus
  REGION 1..439: note = tr|A0A3L8RQC1|A0A3L8RQC1_STRRN Uncharacterized protein OS=Streptomyces rapamycinicus (strain ATCC 29253 / DSM 41530 / NRRL 5491 / AYB-994) OX=1343740; GN = D3C57_126390PE=4 SV=1
MTEAHARIYWLSRPGAEAPPPRWQPLDDAVYWERPSRGPDRRPLLAPAPDWAVDLQRVARAVFAADRYVRRAQVFDRWTRRITVSVPVTEPERWSRALPALTAVLGTMTGDLWEVVFRALDGKTVREGPFTFGSDEYAHDVALFSGGLDSLGWAAQRAGLPSSHPLLLVTFGERNFEAVQDHVYEAVRGLRRRPLRRIAQSQTVRKPHGSGIKLELTTRARGLLYAATAVHAAAAEHVPVVHLPENGQLALNPPLSAARAGACSTRSVHPWTLHHLNRVIAEVAEPGSAVRVENPFATLTKGEVCSVARDAGLPRKVLEATLSCGTPPARRPAGPELAHCGLCFPCLVRRSGLLHTFGHDRTPYAADPWDRALPASRTTHWRALRRWLDTDWSTLDLVADAPLPPDTQIAPLLEVVERGREELRALIAWADTTASRKAS

SEQ ID NO: 42681 - protein, 229 aa, Streptomyces rapamycinicus
  REGION 1..229: note = tr|A0A3L8RC76|A0A3L8RC76_STRRN 7-cyano-7-deazaguanine synthase OS=Streptomyces rapamycinicus (strain ATCC 29253 / DSM 41530 / NRRL 5491 / AYB-994) OX=1343740 GN=D3C5 7_103080 PE=3 SV=1
MPKTVAIVSGGLDSVTMAYHLQAQGHTLRLLSVNYGQRHLIEHEFAAKAARTLGVPHDVVDLSPVGKLMHGSSLTDPDVDVPDQKRDSPGESPNVVPNRNALLLSVAFAVAVAEKAEAVAIGVIDDPQAAPDANSAFLDSFLAMEKIATHGYAHPELTLTAPLAELRKSGVVSLGEELGVPWTDTWTCMRSGPLHCGRCASCWDRQEAFQDAGVTDPTTYQTSNAKVLP

SEQ ID NO: 42682 - protein, 224 aa, Streptomyces rimosus
  REGION 1..224: note = tr|A0A0M8QQY6|A0A0M8QQY6_STRRM 7-cyano-7-deazaguanine synthase OS=Streptomyces rimosus subsp. rimosus OX=132474 GN=ADK43_35835 PE=3 SV=1
MTSAKTLVVLSGGIDSVVLAHACKAEGREVSAIAIDYGQRHRKELEYAGRAAGKLNIDLTVADLGGYSRLMRGFSLTDADVTVPDERYTRTGSVNVVPNRNPVFMTVAYAHAVLAGAQEMCLGFLAEDAATAPDTSPEFLTAFNAMEARALEGLADPPPRVTAPLLTLRKADVLLLGTELGVDWRETWTCFKGERFHCGSCASCHDRRNAFAEAGLTDPTRYQR

SEQ ID NO: 42683 - protein, 238 aa, Streptomyces rimosus
  REGION 1..238: note = tr|B6CWJ6|B6CWJ6_STRRM 7-cyano-7-deazaguanine synthase OS=Streptomyces rimosus OX=1927 GN=toyM PE=3 SV=1
MPESPVEADPFSAVVVLSGGMDSTTLLAHYAMLRYRLTAVTVDYGQRHRREIDAARTIAGHYGAEHHVVDLSGIGVLLGGSALTDSEVDVPSGHYAEESMRATVVPNRNAILANVAVGAAVARQAGIVALGMHAGDHFVYPDCRPAFVEALDGLVRVANEGFATPRVEAPFIHWSKTDIARYGSRLEAPLDKSWSCYRGGELHCGTCGTCYERREAFRDADVPDPTEYLDAATEFAAP

SEQ ID NO: 42684 - protein, 819 aa, Streptomyces scabrisporus
  REGION 1..819: note = tr|A0A1T3NLT9|A0A1T3NLT9_9ACTN Condensation domain-containing protein OS=Streptomyces scabrisporus; OX = 159449 GN=B4N89_36560 PE=4 SV=1
MTDQPLDAERIESVERRVRTAVLDQDGVLDCAVVFNEADPAAAGARACVRCGISAAYPGLRFDSDGVCSLCARYAAHRSAMHAYFRDPRELAPRLREAARGRGSHYDCLLLFSGGKDSTYVLYQLVELGLRVMTFTFDNGFISRTALRNVESVTAELGIEHVTATHADQKRIFLNSLQEHKSVCNGCFRSLLDLSTELAHRRDIPTVVTGLSRGQIMDERLSWFHEQGIFDVAEIEEKLRLGREVYHRAAGTVDAAAVNAVQVVDYFRYSAVTKEDVRAFLRERSSFWAQPTDTGFCSSNCMINDVGTYVHAAERGFHNYEAPTRWEVRLGHLDVAEADAELRAPVETAQVKRMLARIGYPDPADADRTGARLAVYYVADPSASGDRLAAAVADALPPALVPAQWVRVAEIPRVAGAVDRWALRGMHRPKAPGSRGGGVTADADSDRSVAVRPVQRRILDGDPVRAAHRARALFLTSESGFPVADLKRVWLQLLLHHEALRLRFGHGDQGWRQSRGGLGGAVHVSRVDLTGQDPDAQGRVLRRLTDRMRARLHVDRGPLLRAAVVDRGARPAGLLIVVHELAADVESWRVLLADLALGLGQLRAGSDVRLPPAASFLDHPAEPAGVEDEAGPEVAGAGCVLPGSPAPEPIAEESLEARCPVRAATARDVAAAIAHVLVEEFGGGRLVADVLDHTTRRPATRVIGPLAEADRWVVTPLARGASVVRVASAAEPARVRYEHFGDPAAALLPSGVAWTLRDTVWRDFAGPVHPGDTDVTITGVVDAGELVLTWWCPASVGTRLAAAHIPERVARRLIGEQAG

SEQ ID NO: 42685 - protein, 430 aa, Streptomyces sp.
  REGION 1..430: note = tr|A0A1S2KPM0|A0A1S2KPM0_9ACTN Uncharacterized protein OS=Streptomyces sp. CC77 OX=1906739 GN=BJP39_15255; PE = 4 SV=1
MPAYTLHLDAADPSQPEPAGLTPFWWPPGTGGSFVSTLGPRLGALGPVPEPNIELVRLAALVYAADRPTPRRAARSNWTRRTFELDVPVYAPARWDVLCERLEALLGFLSGDRWSIRFRRADTPQETVRDTPHPGVRRVVLLSGGADSAIGALLSRHDLGPGRHLLLSHVGATTLAPIQRNIAADIAHLIGGPPQPHQALRFSRKNRQPTGTKLPNEYSTRTRSLLFLALGLAAAAVEKVPLWIPENGFASLNVPLTADQRGALSTRTTHPFFLQTLAAIAHDAGAHAVIHNPFATHTKGEMFTQAAELVGTAPAARLLSRTHSCAHTGHRSHRIPVRTHCGVCFGCLLRRASFRAAQLEDSTDYLHTRHDEKLKPYLRSKSVEPSLRTFLARGLRPADITTLNLPPDYPTRQAYELCRRGLAELELLYP

SEQ ID NO: 42686 - protein, 236 aa, Streptomyces sp.
  REGION 1..236: note = tr|A0A365YQE1|A0A365YQE1_9ACTN 7-cyano-7-deazaguanine synthase OS=Streptomyces sp. PT12; OX = 1510197 GN=queC PE=3 SV=1
MTEHAPRHAVVIASGGLDSTTVAFRLASQGVQVSLLSVDYGQRHRKELDCARRIAGHLGAWHEVVDLTGLGRLLAGSALTDAAVRVPDGHYTAASMRATVVPNRNAILLSIAAGTAIAAGADAVAFGAHAGDHTIYPDCRPEFFEQFAAAIRTGNAGFLPDGFQLLAPFLTVSKADIVEAAAKLGVPFELTWSCYKGDAVHCGTCGTCVERREAFTVAGVADPTVYAAALSVGSGR

SEQ ID NO: 42687 - protein, 236 aa, Streptomyces stelliscabiei
  REGION 1..236: note = tr|A0A0L0JSQ7|A0A0L0JSQ7_9ACTN 7-cyano-7-deazaguanine synthase OS=Streptomyces stelliscabiei OX=146820 GN=queC PE=3 SV=1
MAERPAIVLLSGGLDSTTVLAIAKDQGYTPYALSFRYGQRHSVELEAAKRVAGAQGVARHVIADIDLRVFGGSALTSEIEVPKHESLDDASSKDTGSSVPITYVPARNTIFLSFALAYAETVGASDIFTGVTAVDYSGYPDCRPEYMDAYAKMANLATRAGVEGTQELKLHSPLIAMSKADIVREGLRLGVDYSLTSSCYDPDEQGRACGHCETCLLRLKGFAEAGVTDPVQYQGA

SEQ ID NO: 42688 - protein, 236 aa, Streptomyces thermoautotrophicus
  REGION 1..236: note = tr|A0A132MIR6|A0A132MIR6_9ACTN 7-cyano-7-deazaguanine synthase OS=Streptomyces thermoautotrophicus OX=1469144 GN=queC PE=3 SV=1
MTGQAPRHAVVIASGGLDSTAVAYWLADQGSELLLVSFDYGQRHRIELDHARRIAETLNARHEIVDLTSVGRLLTGSALTDANVPVPDGHYTDVSMRSTVVPNRNALMLDVAVGAAVAAGADAVALGIHAGDHPIYPDCRPAFLDAYARLAKVANEGFLVAGFRVLAPFLCSSKADIVRTAAALGVPFELTWSCYKGGPTHCGVCGTCTERREAFTLAGVPDPTTYASAEDAEVSR

SEQ ID NO: 42689 - protein, 215 aa, Streptomyces thermoautotrophicus
  REGION 1..215: note = tr|A0A132MLE7|A0A132MLE7_9ACTN 7-cyano-7-deazaguanine synthase OS=Streptomyces thermoautotrophicus OX=1469144 GN=queC PE=3 SV=1
MAYWLADQGSELLLVSFDYGQRHRIELDHARRIAETLNARHEIVDLTSVGRLLTGSALTDANVPVPDGHYTDVSMRSTVVPNRNALMLDVAVGAAVAAGADAVALGIHAGDHPIYPDCRPAFLDAYARLAKVANEGFLVAGFRVLAPFLRSSKADIVRTAAALGVPFELTWSCYKGGPTHCGVCGTCTERREAFDLAGVPDPTIYVGAEDAEVSQ

SEQ ID NO: 42690 - protein, 231 aa, Streptomyces varsoviensis
  REGION 1..231: note = tr|A0A0L8QX47|A0A0L8QX47_9ACTN 7-cyano-7-deazaguanine synthase OS=Streptomyces varsoviensis OX=67373 GN=queC PE=3 SV=1
MERPAVVLLSGGLDSTTTTAIAKSEGFTPYALSFRYGQRHSVELEAAKAVARSLGVARHIIADIDLRVFGGSALTSDIDVPKRGSLDEAEDGGIPVTYVPARNTIFLSFALAYAEVVAAHDIFIGVTAVDYSGYPDCRPEYIEAYARMANLATREGVRGARPLVIHTPLMRLTKAEIIRRGTSLGVDYSRTCSCYDPDERGRACGRCDTCLLRLKGFSEAGMVDPVPYQGS

SEQ ID NO: 42691 - protein, 213 aa, Streptomyces varsoviensis
  REGION 1..213: note = tr|A0A0L8QLV8|A0A0L8QLV8_9ACTN 7-cyano-7-deazaguanine synthase OS=Streptomyces varsoviensis OX=67373 GN=ADK38_21265 PE=3 SV=1
MSQRRAVCLLSGGPDSVVAAAIARDAGYLVSGLYVDYGQRTASREAEFAARNAAWLGVESLRTAAVPFLGEIKGSALTDTDSRVTDETRHLEYVPFRNTVLNSLAIAWAETLGAERVVTGSIGGPWITPDNSPDYFRALNDLIAVGTRSDITAWAPLGECSKAESLRRGIDLGVPLGETWSCQNDSDVPCGECNNCLDRSRAFKELGVQDPLG

SEQ ID NO: 42692 - protein, 236 aa, Streptomyces venezuelae
  REGION 1..236: note = tr|F2R9F0|F2R9F0_STRVP 7-cyano-7-deazaguanine synthase OS=Streptomyces venezuelae (strain ATCC 10712 / CBS 650.69 / DSM 40230 / JCM 4526 / NBRC 13096 / PD 04745); OX = 953739 GN=queC PE=3 SV=1
MPRTAAPRHAVLIFSGGLDSAVTAYKLLDAGVTVSLLSFNYGQRHVKELAQAATLADQLGVSHDIVDLTSLNRILGGSALTDPAIEVPHGHYRAETMRSTVVPNRNAIMLEIAAGAAVAAGADAVAFGAHSGDHAIYPDCRPEFFTLIEAAMKAGNEGHIVADFQLVAPFLQLTKADIVREGARLDVPFKLTWSCYEGGELHCGACGTCVERREAFDEAGVADPTLYAAAPKGAAR

SEQ ID NO: 42693 - protein, 440 aa, Streptomyces violaceusniger
  REGION 1..440: note = tr|A0A4D4L6D1|A0A4D4L6D1_STRVO Uncharacterized protein OS=Streptomyces violaceusniger OX=68280; GN = SVIO_072580 PE=4 SV=1
MTGSDHFLWWRGHRGDRPRDDRWMEIGKESFQERERRITGRHHLPGPVPDWAEDLFRVARAAFIADKYVRRTGVRDRWTRRISLAVPVTEHERWGSAAVRTHLTALLQGLTGDLWNVDFRPLTGHYVEEALVSPDEPRASEVALFSGGLDSLSWAATRSRADDSRPLLLVMFREVGLLRLQQRVYRAVEQLDVVRPVLLLPMSQTPAGDGSGARLETSSRTRGLLYAAGAIRAATAHGVGTVHIPENGQLALNPPLTPARSAACSTRSVHPWTLGSLNALVTAVSDTESTVQVVNPLAQLTKGEVCKVGRDAGLTPSDLESTLSCGKPPTRRRGGPPIANCGVCFPCLVRRSGLLHANGSDGTRYEALPWADGLPLDRGADWRALQRWLLGPHTLTDVFTDTPLPADTDPAVAFDLIRRGREELSRLLQMAEATEAADAA

SEQ ID NO: 42694 - protein, 440 aa, Streptomyces violaceusniger
  REGION 1..440: note = tr|A0A0X3VPV8|A0A0X3VPV8_STRVO Uncharacterized protein OS=Streptomyces violaceusniger OX=68280; GN = ADL28_34430 PE=4 SV=1
MTDSDHFLWWRGHRGDQRRDDRWTEIGNEAFQERERRISGRHHLPGPVPDWAEDLFRVARAAFIADKYVRRTGVRDRWTRHISLAVPVMEHERWGSAAVRNHLTALLQVLTGDLWNVDFRPLTGHYVEDVLVSPDEPRASEVALFSGGLDSLSWAATRSRADDSRPLLLVMFREIGLLRLQKRVYKAVERLGGARPVLLLPMSQTPAGDGSGARLETSSRTRGLLYAAGAIRAATAHGVRTVHIPENGQLALNPPLTPARSAACSTRSVHPRTLGSLNALLTAVSDTESTVQVVNPLAQMTKGEVCKAGRGAGLTPSDLESTLSCGKPPTRRSGGPPIANCGACFPCLVRRSGLLHANGSDGTRYEALPWAGGLPLDRGVDWRALQRWLLGPYTLTDVFTDTPLPPDTDPAVAFDLIRRGREELARLLQIADATETADAA

SEQ ID NO: 42695 - protein, 223 aa, Streptomyces viridochromogenes
  REGION 1..223: note = tr|A0A0J7Z793|A0A0J7Z793_STRVR 7-cyano-7-deazaguanine synthase OS=Streptomyces viridochromogenes OX=1938 GN=queC PE=3 SV=1
MARIVAIVSGGLDSVVLAHELVDQGNDLLMLSIDYGQRHRKEHEFAQRTADRLSADYEVVDLRNIATMLPGYSLTDSRVDVPDQHYTAPGSVNVVPNRNVILLSVAFGRAAAEKADKVAIGTVAGDDATAPDCSRAFIDAFNTMERVATAGYAPEGLEVVAPFIDMPKHEVINLGERLGVPWQETWSCFNNYDLQCGLCAACQDRQLAFQKSDVSDPTQYRSS

SEQ ID NO: 42696 - protein, 434 aa, Streptomyces vitaminophilus
  REGION 1..434: note = tr|A0A0T6LRA9|A0A0T6LRA9_9ACTN Uncharacterized protein OS=Streptomyces vitaminophilus OX=76728; GN = AQ490_24330 PE=4 SV=1
MTERTAAVWWKSGEKDLPPAPDSWTVVGTDSFQEKEDRITGRYTFPDSVPDWAEDLFRVARAIFVADKRVRRQPGLDRWTRHIHLSVPVAEPGLWHTPEVAGHLTTLLNTLTSDRWDLSFRRHPARDSPPSAMFPVKGREVILLSGGLDSLAWAATRARADTAGTLLLVRFREVSMLRLQDRVCRSVQDLSSRREVLRLRWSQTPTGDGSGQRLEPSSRSRGLLYVAGAIRAAAALDAPEVHIPENGQLSVNPPLTAARRGACSTRSVHPWTLHHLNALLRTLCPDVTPIQVVNPLAGMTKGEVCGTALDAGLSPSDLEATVSCGKPPRRRKGGPRLDNCGVCFPCLVRRSALLRATGSDNTRYELAPWSVDPSDPRAADWRALQRWLLRPFTVADLLADAPLPPDADPRALWEVINRGREELAALLPDRRAAA

SEQ ID NO: 42697 - protein, 231 aa, unidentified
  source 1..231: note = Streptomyces wuyuanensis
  REGION 1..231: note = tr|A0A1H0DJU6|A0A1H0DJU6_9ACTN 7-cyano-7-deazaguanine synthase OS=Streptomyces wuyuanensis OX=1196353 GN=queC PE=3 SV=1
MDRPAIVLLSGGLDSTTALAVAKHRGFVPYALSFDYGQRHGVELEAAKRVAEAQGVARHLVLSIDLRLLGGSALTADIAVPKHDHVDELVRSSVPVTYVPARNTIFLSFALAYAEVVGSTDIFTGVTAVQYSGYPDCRPEYMEAFTTLANLATRAGVEGTRELKVHSPLMAMSKADIIREGLRLGVDYSLTHSCYDPDESGRACGHCDTCLMRLRGFAGVRMEDPVRYQDL

SEQ ID NO: 42698 - protein, 236 aa, unidentified
  source 1..236: note = Streptomyces zhaozhouensis
  REGION 1..236: note = tr|A0A286DY29|A0A286DY29_9ACTN 7-cyano-7-deazaguanine synthase OS=Streptomyces zhaozhouensis OX=1300267 GN=queC PE=3 SV=1
MAERPAIVLLSGGLDSTTVLAIAKDQGYTPYALSFRYGQRHSVELEASKRVAEAQGVARHVIADIDLRVFGGSALTSDIDVPKHESLDDTRDKDTGNSVPITYVPARNTIFLSFALAYAETVGASDIFTGVTAVDYSGYPDCRPEYMEAYERMANLATRAGVEGTQRLKLHSPLIAMSKADIVREGLRLGVDYSLTSSCYDPDEQGRACGHCETCLLRLKGFAEAGVTDPVQYQGA

SEQ ID NO: 42699 - protein, 232 aa, unidentified
  source 1..232: note = Streptosporangiaceae bacterium
  REGION 1..232: note = tr|A0A3A4AZJ6|A0A3A4AZJ6_9ACTN 7-cyano-7-deazaguanine synthase OS=Streptosporangiaceae bacterium YIM 75507 OX=2339229 GN=queC PE=3 SV=1
MERPAIILLSGGLDSATVLAMARAEGFVPHTLSFRYGQRHAVELAAAERVARHQKVARHVVADIDLRVFGGSALTDDIDVPKDSTPEQMAAGIPVTYVPARNTVFLSFALAYAEVTGATDIFTGVNAVDYSGYPDCRPEYLKAYEAMANLATRAAVEGDRPIRIHAPLVRMTKGEIIRTGLGLGVDYSLTSSCYDPDERGRACGRCDTCALRLKGFAEAGVTDPVPYRGGGS

SEQ ID NO: 42700 - protein, 230 aa, Succinatimonas hippei
  REGION 1..230: note = tr|E8LI39|E8LI39_SUCHY 7-cyano-7-deazaguanine synthase OS=Succinatimonas hippei (strain DSM 22608 / JCM 16073 / KCTC 15190 / YIT 12066) OX=762983 GN=queC PE=3 SV=1
MLKALVLSSGGVDSTTCLAFAVDKLGAENVSSVSIFYGQKHKKELQCAAQLADYYKVKHYELDLSMMFKNSNCALLENSSQDIEEGSYSTQIAVHGKVNTYVPFRNGLFLASVASLAGSIYPDDEVEIYLGAHADDAALNAYADCSMEFIEAMNKAISLGTYSKERIVAPFAGQNKAEVVKTGLKLKVPYEMTWSCYEGKDKPCGKCATCIDRRKAFEANGAVDPVEYKE

SEQ ID NO: 42701 - protein, 235 aa, Succinatimonas sp.
  REGION 1..235: note = tr|R5EU92|R5EU92_9GAMM 7-cyano-7-deazaguanine synthase OS=Succinatimonas sp. CAG:777 OX=1262974 GN=queC; PE = 3 SV=1
MSKALVVFSGGQDSSTCLYYALKKYDKVATIGFNYGQRHDVEMKCRLEFLEALKAFDKELYKKYEGDRVVDMLSFKDLTDSALTKAHEDYVMNEENHLPTSFVPGRNLIFMCYAASYAYTIKADTVITGVGQADYSGYPDCRDNTMKALERAVNLGMESNLKFETPLMFKSKAQTFYLGYELGGMDFVKLIVEKTHTCYEGQHDKLHAWGYGCGECPSCKLRKKGYEEFLDSLKK

SEQ ID NO: 42702 - protein, 230 aa, Succiniclasticum ruminis
  REGION 1..230: note = tr|A0A1G6MDX0|A0A1G6MDX0_9FIRM 7-cyano-7-deazaguanine synthase OS=Succiniclasticum ruminis OX=40841 GN=queC PE=3 SV=1
MKAIVLSSGGIDSTTCISLAMKKYDAENVVTLSIFYGQKHNKELVCAQKIAAYYKLKHYEFNLKQILQYSNCSLLSDSTETISHKSYAEQISERKDGIVSTYVPFRNGLMLSVCASLAMSLFPNEESVIYIGAHADDTAGNAYADCSPEFNRSMSDAIRIGTYDKVTVEAPFVHMHKADIIAEGLRLQTPYHLTWSCYEGADTPCGACGTCIDRAKAFAANGVKDPALHA

SEQ ID NO: 42703 - protein, 231 aa, Succiniclasticum ruminis
  REGION 1..231: note = tr|A0A1I2D201|A0A1I2D201_9FIRM 7-cyano-7-deazaguanine synthase OS=Succiniclasticum ruminis DSM 9236 OX=1123323 GN=queC PE=3 SV=1
MKALVLFSGGLDSSVCLGLAVKKYGADEVLALSIYYGQKHKKELEASEKIASFYGVKRITLDLGEIFRGADCSLLEGSAADIPHEEYSDQLAKTNGAPVSTYVPFRNGLFLSSAASVAIGNGCEVIYYGAHADDATGSAYPDTSVEFNKAIADAIYVGSGKALRVVAPFIGRSKADVVAAGLEIGVPFAMTWSCYEGHEKACGVCGTCRDRKRAFQENGLADPIAYENGKD

SEQ ID NO: 42704 - protein, 236 aa, Succinivibrio dextrinosolvens
  REGION 1..236: note = tr|A0A1T4VBF4|A0A1T4VBF4_9GAMM 7-cyano-7-deazaguanine synthase OS=Succinivibrio dextrinosolvens DSM 3072 OX=1123324 GN=queC PE=3 SV=1
MKKALVVFSGGQDSSTCLYYAVKNYDAVYTIGFKYGQRHEIELKCRQEFLEALKSFDKEAKDKLIEDKVVDMMALKTLTNSALTKESGEYVMDEKNSLPTSFVPGRNLIFLCYAASYAYSVGADTIISGVGQADYSGYPDCRESTLKAMETAINLGMESNIKLLSPLMHLTKGETFKLAYDLGGDDFVRMIVEKTHTCYEGSHDVLHAWGYGCGECPSCLLRKRGYEDYLKLRGKL

SEQ ID NO: 42705 - protein, 236 aa, unidentified
  source 1..236: note = Succinivibrionaceae bacterium
  REGION 1..236: note = tr|A0A348YMX2|A0A348YMX2_9GAMM 7-cyano-7-deazaguanine synthase OS=Succinivibrionaceae bacterium OX=2053620 GN=queC PE=3 SV=1
MNRALVVFSGGQDSCTCLGYALCKYDEVYTVGFSYGQRHRVELDCRKVFLSKLREEFPKWDAKLKNDNLIDISYLKDLTDSALTDETQKSIEQTENNLPSSFVPGRNLIFLANASAYAYTIGADTLITGVGEADYSGYPDCREKTMQAMQQALSLGLERDITIETPLMHLSKARTWELAEQAGGSRLVDLIVKESHTCYLGDRSIFHPWGFGCGQCPACILRQKGYEEYMLSRSRR

SEQ ID NO: 42706 - protein, 254 aa, Sulfitobacter brevis
  REGION 1..254: note = tr|A0A1I1UM85|A0A1I1UM85_9RHOB 7-cyano-7-deazaguanine synthase OS=Sulfitobacter brevis; OX = 74348 GN=queC PE=3 SV=1
MSLNTALSGRSLPGQQNKGYEMKTIVICSGGLDSVSLAHMVAQENQLTGLVSFDYGQRHRKELDYAALCAVRLNVPHDIIDLRSIGAVLSGSALTDDIDVPDGHYAEESMRVTVVPNRNAIMLSIAFGVAAARGDQAVATAVHGGDHFIYPDCRPAFTQSFEVMQKYALEGYAEVALYTPFVHRTKADIVTAGQEHDTPFDLTWSCYKGGTDHCGRCGTCVERREAFHLAGVADPTPYEDPDFWADAITAKVAS

SEQ ID NO: 42707 - protein, 223 aa, Sulfitobacter donghicola; identical to SEQ ID NO: 42558
  REGION 1..223: note = tr|A0A410XX71|A0A410XX71_9RHOB 7-cyano-7-deazaguanine synthase OS=Sulfitobacter donghicola OX=421000 GN=queC PE=3 SV=1

SEQ ID NO: 42708 - protein, 233 aa, Sulfitobacter guttiformis
  REGION 1..233: note = tr|A0A420DJJ4|A0A420DJJ4_9RHOB 7-cyano-7-deazaguanine synthase OS=Sulfitobacter guttiformis OX=74349 GN=queC PE=3 SV=1
MKTIVICSGGLDSVSLAHMVAQEQHLTRLVSFDYGQRHRKELDFAAMCAKRLDVPHDIIDLRGIGAALTGSALTDDIDVPDGHYEEESMRVTVVPNRNAIMLAVAFGVAAANDDQAVATAVHGGDHFIYPDCRPAFTEAFERMQKAALDGYADVSLYTPFVYRTKADIVTEGARHNTPFAETWSCYKGGKTHCGRCGTCVERREAFDLANINDPTIYADPDFWVAAIAKKGLG

SEQ ID NO: 42709 - protein, 233 aa, unidentified
  source 1..233: note = Sulfitobacter indolifex
  REGION 1..233: note = tr|A9E8J5|A9E8J5_9RHOB 7-cyano-7-deazaguanine synthase OS=Sulfitobacter indolifex HEL-45 OX=391624; GN = queC PE=3 SV=1
MKTLVICSGGLDSVSLAHITAVEHQLTRLVSFDYGQRHRKEVDFAEAAAKRLGVPFHLIDMRGIGAALSGSALTDDIDVPDGHYAEDTMKITVVPNRNAIMLSIGFGIAAAQGDEAVATAVHGGDHFIYPDCRPEFTRAFDAMQQAALDGYAQVRLHTPFVEQSKAEIVRQGAQHGTPFAETWSCYKGGEVHCGRCGTCVERREAFHLAEVSDPTVYADPDYWTEALATRGES

SEQ ID NO: 42710 - protein, 233 aa, Sulfitobacter litoralis
  REGION 1..233: note = tr|A0A1H0LHG5|A0A1H0LHG5_9RHOB 7-cyano-7-deazaguanine synthase OS=Sulfitobacter litoralis; OX = 335975 GN=queC PE=3 SV=1
MKTIVVCSGGLDSVSLAHMVSAQRKLTGLVSFDYGQRHRKELDYAALCATRLGVPHDIIDMRGIGAALTGSALTDDIAVPDGHYAEDTMRVTVVPNRNAIMLSVAYGIAAARGDQAVATAVHGGDHFIYPDCRPDFTQAFEFMQYMALDGYADVSLYTPFVHRTKADIVTEGQRHNTPFAETWSCYKGGAHHCGRCGTCVERREAFDLAGVTDPTQYEDPDFWAEAIKRSILA

SEQ ID NO: 42711 - protein, 233 aa, Sulfitobacter pontiacus
  REGION 1..233: note = tr|A0A1H2T769|A0A1H2T769_9RHOB 7-cyano-7-deazaguanine synthase OS=Sulfitobacter pontiacus; OX = 60137 GN=queC PE=3 SV=1
MKTIVICSGGLDSVSLAHMVAAKRKLTGLVSFDYGQRHRKELDYAALCAKRLDVPHDIIDMRGIGAALTGSALTDDVDVPDGHYAEETMRVTVVPNRNAIMLTVAYGIAAARGDQAVATAVHGGDHFIYPDCRPDFTQAFEFMQYMALDGYADVSLYTPFVHRSKADIVTEGQRHNTPFAETWSCYKGGVHHCGRCGTCVERREAFDLAGVADPTQYDDPDFWAEAVKRKILT

SEQ ID NO: 42712 - protein, 233 aa, unidentified
  source 1..233: note = Sulfitobacter pseudonitzschiae
  REGION 1..233: note = tr|A0A073J0Q9|A0A073J0Q9_9RHOB 7-cyano-7-deazaguanine synthase OS=Sulfitobacter pseudonitzschiae OX=1402135 GN=queC PE=3 SV=1
MKTIVICSGGLDSVSLAHMVAQQHELTRLVSFDYGQRHRKELDYAALCAQRLAVPHDIIDLRAIGAALTGSALTDDIDVPDGHYAEESMRITVVPNRNAIMLTIAFGVAAARGDDSVATAVHGGDHFIYPDCRPAFAEAFDAMQKQALDGYADVSLYTPFVHRTKADIVTEGYRFGTPFVDTWSCYKGGAHHCGRCGTCVERREAFDLAGVSDPTTYDDPDFWVQAVAQRGQG

SEQ ID NO: 42713 - protein, 233 aa, Sulfitobacter sp.
  REGION 1..233: note = tr|A0A085BV93|A0A085BV93_9RHOB 7-cyano-7-deazaguanine synthase OS=Sulfitobacter sp. CB2047 OX=1525218 GN=queC PE=3 SV=1
MKTIVICSGGLDSVSLAHMVAANRKLTGLVSFDYGQRHRKELDYAALCAKRLDVPHDIIDMRGIGAALTGSALTDDVDVPDGHYAEDTMRVTVVPNRNAIMLTVAYGIAAARGDQAVATAVHGGDHFIYPDCRPDFTQAFEFMQYMALDGYADVSLYTPFVHRSKAVIVTEGQRHNTPFAETWSCYKGGAHHCGRCGTCVERREAFDLAGVADPTHYDDPHFWAEAVKRKILT

SEQ ID NO: 42714 - protein, 235 aa, Sulfitobacter sp.; identical to SEQ ID NO: 41885
  REGION 1..235: note = tr|A0A2G2BYH5|A0A2G2BYH5_9RHOB 7-cyano-7-deazaguanine synthase OS=Sulfitobacter sp.; OX = 1903071 GN=queC PE=3 SV=1

SEQ ID NO: 42715 - protein, 229 aa, unidentified
  source 1..229: note = Sulfuricaulis limicola
  REGION 1..229: note = tr|A0A1B4XIA2|A0A1B4XIA2_9GAMM 7-cyano-7-deazaguanine synthase OS=Sulfuricaulis limicola; OX = 1620215 GN=queC PE=3 SV=1
MPADTDAGKKAVVLVSGGLDSATVLALARDAGARCHALTFDYGQRHRVELDAARRVARQLGAADHRVVRLDIGWMGGSALTDTRIAVPQESTPGIPVTYVPARNTIFLSIALGWAEVLDARDIYIGANAVDYSGYPDCRPEFIRAFESLANLATKAGVEGKGFHVHAPLMKMHKHEIIRSGARLGVDYALTLSCYDPDAAGLACGHCDACRLRAQGFAEAGIADPTRYR

SEQ ID NO: 42716 - protein, 222 aa, Sulfuricella denitrificans
  REGION 1..222: note = tr|S6ABE4|S6ABE4_SULDS 7-cyano-7-deazaguanine synthase OS=Sulfuricella denitrificans (strain DSM 22764 / NBRC 105220 / skB26) OX=1163617 GN=queC PE=3 SV=1
MLLSGGLDSATTLAIARSEGFACHCLSLDYGQRHGSELEAAQRVAAALGASEQRTIKLDLTAFGGSALTDENIAVPTAPSAGIPVTYVPARNTIMLSLSLAWAEVLGCRDIFIGANAVDYSGYPDCRPEYLEAFEKMANLATKSAVEGNAIRIRAPLVALSKAEIIRRGIELGVDYRLTVSCYQAGEDGSACGTCDSCRLRRQGFISAKIADPTRYQPETNS

SEQ ID NO: 42717 - protein, 227 aa, Sulfuricella sp.
  REGION 1..227: note = tr|A0A0E9MBV3|A0A0E9MBV3_9PROT 7-cyano-7-deazaguanine synthase OS=Sulfuricella sp. T08; OX = 1632857 GN=queC PE=3 SV=1
MNKAVVLLSGGLDSATTLAIARSEGFACYCLSLDYGQRHGSELEAAQRVAAALGASEQRTIKLDLAAFGGSALTDEKIAVPNAPSAGIPVTYVPARNTIMLSLALAWAEVLGSRDIFIGANAVDYSGYPDCRPEYLEAFEKMANLATKSAVEGNTMHIRAPLGSLSKAEIIRRGIELGVDYRLTVSCYQAGEDGSACGTCDSCRLRRQGFVSAEIADPTRYQPETNS

SEQ ID NO: 42718 - protein, 220 aa, Sulfuricurvum kujiense
  REGION 1..220: note = tr|A0A2D3WEF4|A0A2D3WEF4_9HELI 7-cyano-7-deazaguanine synthase OS=Sulfuricurvum kujiense; OX = 148813 GN=queC PE=3 SV=1
MKKALCIMSGGMDSTLVAYIMRSRGYEIVALHFNYGQRTVAKELSCFRAICDDLGVSEKYEIDLDFFKTIGASALTDHTIAVPTGGIEAGVPITYVPFRNGIFLSIATAIAEKEGCSVIAIGVVEEDSSGYPDCREAFIETFQNAANLGTKETTNITIEMPLVHLQKSQIVEESLRMGAPLHLTWSCYQSEEMACGVCDSCRLRLRGFERAGAVDPIAYV

SEQ ID NO: 42719 - protein, 221 aa, Sulfuricurvum kujiense
  REGION 1..221: note = tr|E4TYT9|E4TYT9_SULKY 7-cyano-7-deazaguanine synthase OS=Sulfuricurvum kujiense (strain ATCC BAA-921 / DSM 16994 / JCM 11577 / YK-1) OX=709032 GN=queC PE=3 SV=1
MMKKALCIMSGGMDSTLVAYIMRSRGYEIVALHFNYGQRTVAKELSCFREICKDLGVNEKYEIDLDFFKTIGASALTDHSIDVPTGGIEPGVPITYVPFRNGIFLSIATAIAEKEGCSAIAIGVVEEDSSGYPDCRESFIDAFTKAANLGTKESTNLSIEMPLVRLQKSQIVQEAIQLDVPLHLTWSCYSSEDKACGVCDSCRLRLRGFERAGAVDPIDYV

SEQ ID NO: 42720 - protein, 222 aa, Sulfuricurvum sp.
  REGION 1..222: note = tr|A0A4R4G8H9|A0A4R4G8H9_9HELI 7-cyano-7-deazaguanine synthase OS=Sulfuricurvum sp. IAE1; OX = 2546102 GN=queC PE=3 SV=1
MRKKALCIMSGGMDSTLAAYMMRDEGYGIVALHFNYGQRTVRKELEAFRSICADLGVEHTYEIDLDFFTAIGASALTDHTIEVPTGGLEAGVPVTYVPFRNGIFLSIATAIAEKEGCEAIAIGVVEEDSSGYPDCTGNFIDAFEKAANLGTKESTRISIKMPLVRLKKSQIVVEAAALNVPLHLTWSCYKDEDAACGVCDSCRLRLRGFEAAGMRDPIPYCQ

SEQ ID NO: 42721 - protein, 442 aa, Sulfuricurvum sp.
  REGION 1..442: note = tr|A0A0C2ZU39|A0A0C2ZU39_9HELI Uncharacterized protein OS=Sulfuricurvum sp. PC08-66 OX=1539066; GN = KU37_09255 PE=4 SV=1
MFKVEIEEVNRRDCLSVLRLNVNGEYESDLIINPYDCFDSFISRPTALSLDVLYFTSIVYTIDKIIQRTQTYDHWSRDIDVNIPVSNTDLWDSAKETLKEAVDFLTSDNWIFNFRELENISYFEREETLPVNANFENICLFSGGLDSLAGAINLIDEKNNVLLISHIDGHGSSSTLHSQLLSEIKDSYKLKNIRQSSFHVYTEDKLNHEATTRGRSILFHGIALFHAINLGINEIITPENGVISINLPLTPSRTCSNSTKTMHPYFIKKFEDALNTLGLQIKINNPYLLKTKGEMLVENRNTGLIQNLATKTLSCSHGGGHTPGWYRQSLNCGYCIPCAIRRASIHKFNNNLDRCSDYGHKLNSQEINLFIHEKRLDLLALAHFLNQELTKDEIKKEIKLMAKIDNVDDIADMLLRGYAEIKQYIHDKADSNIKGLFTCRLI

SEQ ID NO: 42722 - protein, 230 aa, unidentified
  source 1..230: note = Sulfuriferula multivorans
  REGION 1..230: note = tr|A0A401JFD5|A0A401JFD5_9PROT 7-cyano-7-deazaguanine synthase OS=Sulfuriferula multivorans OX=1559896 GN=queC PE=3 SV=1
MMDKTRRAVILLSGGLDSATVLAIARSSGFACHALSFDYGQRHSAELDAAARVAARQGAVEHRVFKLDLAMFGGSALTDSRIAVPEQASTGIPVTYVPARNTIMLSIALAWAEVLESRDIFIGVNAVDYSGYPDCRPEYIASFETMANLATKAGVEGKQLHVHTPLMQLGKAQIIRLGTELGVDYNATVSCYQADAAGRACGVCDSCRLRRQGFIEAGVADATRYVASPE

SEQ ID NO: 42723 - protein, 198 aa, unidentified
  source 1..198: note = Sulfuriferula multivorans
  REGION 1..198: note = tr|A0A401JDT1|A0A401JDT1_9PROT 7-cyano-7-deazaguanine synthase OS=Sulfuriferula multivorans OX=1559896 GN=SFMTTN_1538 PE=3 SV=1
MTELVLLSGGIDSVTLLHLKHSEGASLHALFIDYGQRAGREELRAASIHSNKLGVPLQRLDMGAVGDAFRAGQTQRLHVPLPHRNLVALALGMSYATQIGATCLHLALNRDDSDAYPSASPLFVQSFNNLARSLGDIAVHTPLAELNKVQVIELAIKLGINLRDTYSCLLGYAKPCGHCPQCLQRRAALLAANVEGVD

SEQ ID NO: 42724 - protein, 198 aa, unidentified
  source 1..198: note = Sulfuriferula plumbiphila
  REGION 1..198: note = tr|A0A512L3Q1|A0A512L3Q1_9PROT 7-cyano-7-deazaguanine synthase OS=Sulfuriferula plumbiphila OX=171865 GN=TPL01_02410 PE=3 SV=1
MTELVLLSGGIDSVTLLHLKHSEGAPLHALFIDYGQRAGREELRAASIHSNALGVPLQRLDMAAVGDAFRAGQTQRLHVPLPHRNLVALALGMSYATQIGATCLHLALNRDDAGAYPGASPLFVQRFSNMARSLGNIAVYTPLAELNKVQVIELAFKLGINLSDTYSCLLGYAKPCGHCPQCLQRQAALQAAGMDRMD

SEQ ID NO: 42725 - protein, 229 aa, unidentified
  source 1..229: note = Sulfuriferula plumbiphila
  REGION 1..229: note = tr|A0A512LAP9|A0A512LAP9_9PROT 7-cyano-7-deazaguanine synthase OS=Sulfuriferula plumbiphila OX=171865 GN=queC PE=3 SV=1
MSGTRRAVILLSGGLDSATVLAIARSSGFACHALSFDYGQRHRAELDAAARVAAQQGAAEHRVFNLDLAVFGGSALTDANIAVPEQASTGIPVTYVPARNTIMLSIALAWAEVLESRDIFIGVNAVDYSGYPDCRPEYIAAFEAMANLATRAGVEGKQLRIHTPLMQLSKAQIVGLGTGLGVDYTATVSCYQADATGRACGVCDACRLRRQGFVEAGVADATRYVASPG

SEQ ID NO: 42726 - protein, 198 aa, unidentified
  source 1..198: note = Sulfuriferula sp.
  REGION 1..198: note = tr|A0A1Y0GBA2|A0A1Y0GBA2_9PROT 7-cyano-7-deazaguanine synthase OS=Sulfuriferula sp. AH1; OX = 1985873 GN=CAP31_11080 PE=3 SV=1
MLLSGGIESSTLLHMRHGQDELHPVFIDYGQRAGQEEFRAAQQQCARLGLQLKKLDMAQTGHDFREGQNTKLHVPLPHRNLIALSLGLSYATQISAGWLMLALNLEDTLAYPSASTAFIAKFQDMANVLGSVEIATPLAALSKAQIIRQGMALGMDYTQTYSCLLGYPLHCGQCPQCLHRREAFRQAGEQEPADFYRA

SEQ ID NO: 42727 - protein, 227 aa, unidentified
  source 1..227: note = Sulfuriferula sp.
  REGION 1..227: note = tr|A0A1Y0G8C8|A0A1Y0G8C8_9PROT 7-cyano-7-deazaguanine synthase OS=Sulfuriferula sp. AH1; OX = 1985873 GN=queC PE=3 SV=1
MNEPKHAIVLLSGGLDSATVLAIAQRDGYICHALSFDYGQRHHAELAAAACMAASQGAAEHRTFRMDLAMFGGSALTDSNIAVPETPTTGIPSTYVPARNTIMLSIALAWAEVLNSRAIFIGVNAVDYSGYPDCRPEYIAAFERMANLATRAGVEGQDLHIHAPLMQLSKAEIIRLGTTLGVDYAATVSCYQADAEGRACGVCDSCRLRQQGFEQAGIPDPTRYRLV

SEQ ID NO: 42728 - protein, 226 aa, unidentified
  source 1..226: note = Sulfurifustis variabilis
  REGION 1..226: note = tr|A0A1C7AF43|A0A1C7AF43_9GAMM 7-cyano-7-deazaguanine synthase OS=Sulfurifustis variabilis OX=1675686 GN=queC PE=3 SV=1
MERAVVLLSGGLDSATTLALARREAASCHALTIDYGQRHRAELEAARRVAQSLGATEHRVARFDLSWIGGSALTDPAITVPTRPGEGIPVTYVPARNTVFLALALSWAEVLDARAIYIGVNAVDYSGYPDCRPAFIEAFNRVAEVATRAGVEGRGTAVRAPLIDLSKAEIIRVGSELGVDFGLTLSCYDPDEAGRACGVCEACRLRGQGFAAAGLADPTRYRGVTR

SEQ ID NO: 42729 - protein, 219 aa, Sulfurihydrogenibium azorense
  REGION 1..219: note = tr|C1DXP6|C1DXP6_SULAA 7-cyano-7-deazaguanine synthase OS=Sulfurihydrogenibium azorense (strain Az-Fu1 / DSM 15241 / OCM 825) OX=204536 GN=queC PE=3 SV=1
MIKEKNIIVLLSGGMDSATLLWLAKQNFEEVYAISFIYGQKHSIEIEYAKELAKIADVKQHFIVELPHLKQLGKSALTDPSLEVPSQDYTDQPPITTVPMRNLTFLSIAAAFADVYEIENIGIGIHSLDSPYPDCRAEFASAAEAAINASSVMVANKKNRIKIYTPFLGMSKVDIAKLGYKLGVPFEKTYSCYKGTNPPCGECATCRQREEALKSIKED

SEQ ID NO: 42730 - protein, 226 aa, Sulfurihydrogenibium sp.
  REGION 1..226: note = tr|A0A2J6WZN1|A0A2J6WZN1_9AQUI 7-cyano-7-deazaguanine synthase OS=Sulfurihydrogenibium sp. OX=2053621 GN=queC PE=3 SV=1
MESKRRPTVKEKNIIVLLSGGMDSATLLWLAKEKFEDIYAISFFYGQKHSIELEYAKELARMVNVKQHFIVEIPHLKQLGKNALTDDSLEIPSESYPDEPPITTVPMRNLTFLSIAAAFADVYEIENIGIGIHSLDSPYPDCRAEFASATEAAINSSSVMVAKKKNRIKIYTPFLGMSKVDIAKLGKQLGVPFEKTYSCYKGTNPPCGECATCIQREEALKSIGLR

SEQ ID NO: 42731 - protein, 222 aa, Sulfurihydrogenibium sp.
  REGION 1..222: note = sp|B2V5L9|QUEC_SULSY 7-cyano-7-deazaguanine synthase; OS = Sulfurihydrogenibium sp. (strain YO3AOP1) OX=436114; GN = queC PE=3 SV=1
MLKKENIIVLLSGGMDSAVLLWLSKTIFKDVYTISYSYGQKHSIELEYAKELSKIAGVKEHFIVEVPHLKQLKGSALTDENLEIPSENYPDEPPITTVPMRNLIFLSIAASFADVYEIENIGIGIHSLDSPYPDCRAEFASSAEAVINASSVMVAKKKNRIKIFTPFLGMSKTDIAKLGRELGVPFEKTYSCYKGTVPPCGECATCRQREEALRETFSDTTT

SEQ ID NO: 42732 - protein, 222 aa, Sulfurihydrogenibium yellowstonense
  REGION 1..222: note = tr|C4FIT2|C4FIT2_9AQUI 7-cyano-7-deazaguanine synthase OS=Sulfurihydrogenibium yellowstonense SS-5; OX = 432331 GN=queC PE=3 SV=1
MLKKENIIVLLSGGMDSAVLLWLSKTMFKDVYAISYSYGQKHSIELEYAKELSKIAGVKEHFIVEVPHLKQLKGNALTDENLEIPSENYPDEPPITTVPMRNLIFLSIAASFADVYEIENIGIGIHSLDSPYPDCRAEFASSAEAVINASSVMVAKKKNRIKIFTPFLGMGKTDIAKLGRELGVPFEKTYSCYKGTVPPCGECATCRQREDALREAFSDTTA

SEQ ID NO: 42733 - protein, 227 aa, Sulfurimonas autotrophica
  REGION 1..227: note = tr|E0USM3|E0USM3_SULAO 7-cyano-7-deazaguanine synthase OS=Sulfurimonas autotrophica (strain ATCC BAA-671 / DSM 16294 / JCM 11897 / OK10) OX=563040 GN=queC PE=3 SV=1
MKKENKTNKKAVCIMSGGMDSTLSAYMMQNEGYEIIAVHFNYDQRTQTKELECFENICASLHVKQKYILDLDFFKQLGASALTDKTIEVPTQGIEEGVPVTYVPFRNGIFLSMAAAIAEKESAQIISIGVVEEDSSGYPDCREEYIKAMQNAINLGTKEETNIEIKMPLVHLKKSQIVQEALKLNVPLELTWSCYKNEKKACGICDSCRLRLNGFETAGVTDPIPYE

SEQ ID NO: 42734 - protein, 224 aa, Sulfurimonas denitrificans
  REGION 1..224: note = sp|Q30RN3|QUEC_SULDN 7-cyano-7-deazaguanine synthase; OS = Sulfurimonas denitrificans (strain ATCC 33889 / DSM 1251) OX=326298 GN=queC PE=3 SV=1
MNLKNKKAICIMSGGMDSTLGAYMVKEMGYEIVALHFNYAQRTEAKELFCFKKICEALNVSNSYVLDLDFFSKIGASALTDKSIDIPINGLEEGVPITYVPFRNGIFLSIAAALAEKEEAVLIAIGVVQEDSSGYPDCKDSFITSMEQSINLGTKDETKIKIYMPLVHLSKSQIVEHALRLNVPLELTWSCYKDEEAACGVCDSCRLRLNGFRLANAKDPIEYM

SEQ ID NO: 42735 - protein, 224 aa, unidentified
  source 1..224: note = Sulfurimonas gotlandica
  REGION 1..224: note = tr|B6BJG5|B6BJG5_SULGG 7-cyano-7-deazaguanine synthase OS=Sulfurimonas gotlandica (strain DSM 19862 / JCM 16533 / GD1) OX=929558 GN=queC PE=3 SV=1
MNEQNKKALCVMSGGMDSTLSAYMMKNSGYEIIALHFNYNQRTQKKELECFHKICEDLDVKEKYILDLDFFAQIGASALTDKSIEVPIGGIEEGVPVTYVPFRNGIFLSMAAAVAEKEGANVISIGVVEEDSSGYPDCRESYINSMEQSINLGTKDETNIEIKMPLVHLKKSQIVQKSLELNVPLSLTWSCYKNEDKACGVCDSCRLRLNGFKLAGVSDPIDYE

SEQ ID NO: 42736 - protein, 224 aa, unidentified
  source 1..224: note = Sulfurimonas hongkongensis
  REGION 1..224: note = tr|T0L376|T0L376_9HELI 7-cyano-7-deazaguanine synthase OS=Sulfurimonas hongkongensis OX=1172190 GN=queC; PE = 3 SV=1
MKTKEKKALCIMSGGMDSTLSAYMMRDEGYEIIALHFNYSQLTQNKELECFDAICKDLGVKERYNLDLDFFSKIGASALIDKGIEVQTSGIEDGIPSTYVPFRNGIFLSIATAIAEKEGASTISIGVVEEDGSGYPDCTDTFIKSMQNSINLGTKDETALEIKMPLVHLSKSQIVQASLELKVPLELTWSCYKNETKACGVCDSCRLRLRGFKLAGISDPIAYE

SEQ ID NO: 42737 - protein, 225 aa, Sulfurimonas sp.
  REGION 1..225: note = tr|A0A2D3VX20|A0A2D3VX20_9HELI 7-cyano-7-deazaguanine synthase OS=Sulfurimonas sp. UBA12504 OX=2015903 GN=queC PE=3 SV=1
MNLQEKKKALCIMSGGMDSTLAAFMMQEAGYEILAVHFNYNQRTQAKELACFEAICKELEIETKYVLDLSFFKQLGASALTDTNIDVPLCGVEKGVPVTYVPFRNGIFLSMVAAIAEKEGASVISIGVVEEDSSGYPDCREAYIKSMQQSINLGTKDDTQIEIKMPLVHLKKSQIVQKAIELHVPLELTWSCYKNESKACGFCDSCRLRLNGFALANIQDPIEYE

SEQ ID NO: 42738 - protein, 226 aa, Sulfurimonas sp.
  REGION 1..226: note = tr|A0A2G1XWV2|A0A2G1XWV2_9HELI 7-cyano-7-deazaguanine synthase OS=Sulfurimonas sp.; OX = 2022749 GN=queC PE=3 SV=1
MNNIKSTKRAVCIMSGGMDSTLSAYMMKHDGYEIIAVHFNYGQRTQKKEQECFDLICKHLNVSEQYSLDLDFFKHLGASALTDTNIDVPVSGVEEGVPITYVPFRNGIFLSMAAAIAEKERAELISIGVVQEDSSGYPDCRETYIKAMQNAINLGTKDDTNIRIHMPLVHLLKSEIVKKSLEISAPLSLTWSCYKNDDKACGVCDSCRLRLNGFLKAGVTDPIVYE

SEQ ID NO: 42739 - protein, 202 aa, unidentified
  source 1..202: note = Sulfurirhabdus autotrophica
  REGION 1..202: note = tr|A0A4R3Y8I3|A0A4R3Y8I3_9PROT 7-cyano-7-deazaguanine synthase OS=Sulfurirhabdus autotrophica OX=1706046 GN=EDC63_104117 PE=3 SV=1
MPEIILLSGGIESSTLLYMNPTPSELYPVFIDYGQRAALQEGQAALAQCANLGIKLKKLNMSQVGHDFREDQSNKMHVPIPHRNLIALSLGLSYAAQLGANRVYIALNQEDTQAYPSASLAFLTQFQAMARTLGEIEIAAPLLNLSKASIILHGKSVGMDYTKTYSCLLGYTTHCGHCPQCKKRQVAFNEAGYPESTGFYHK

SEQ ID NO: 42740 - protein, 222 aa, unidentified
  source 1..222: note = Sulfurirhabdus autotrophica
  REGION 1..222: note = tr|A0A4R3XXK5|A0A4R3XXK5_9PROT 7-cyano-7-deazaguanine synthase OS=Sulfurirhabdus autotrophica OX=1706046 GN=queC PE=3 SV=1
MKKAVILLSGGLDSATALAIARHAGFDCYALSLDYGQRHRAELQAADSVAKALGATTHRTIKLDLTVFGGSALTDASISVPTIPGKGIPITYVPARNTIMLSLALAWAEVLGSRDIFIGVNAVDYSGYPDCRPEYISAYEKMANLATKAAIEGQSLKIHTPLIALSKADIIRQGIELKVDYRQTVSCYQADDAGAACGICDSCRLRRQGFVDAGINDPTHYR

SEQ ID NO: 42741 - protein, 226 aa, unidentified
  source 1..226: note = Sulfurisoma sediminicola
  REGION 1..226: note = tr|A0A497XKP8|A0A497XKP8_9PROT 7-cyano-7-deazaguanine synthase OS=Sulfurisoma sediminicola OX=1381557 GN=queC PE=3 SV=1
MPARPAVVLLSGGLDSATTLAIARRDGYACHCLSVDYGQRHRAELAAADRVAAALGAAAHRTIHLDMAQFGGSALTDDAIAVPTGGVQPGIPVTYVPARNTVMLALALAWAEVLGAQDIFVGVNAVDYSGYPDCRPEYIAAFERMANLATKAGVEGRALHVHAPLIDLSKAEIIRRGLALGIDYGLTVSCYQADATGQACGSCDSCRLRREGFAAAGVADPTRYAA

SEQ ID NO: 42742 - protein, 149 aa, Sulfuritalea hydrogenivorans
  REGION 1..149: note = tr|W0SM90|W0SM90_9PROT 7-cyano-7-deazaguanine synthase OS=Sulfuritalea hydrogenivorans sk43H OX=1223802; GN = SUTH_03125 PE=3 SV=1
MRSRLQGWQPGIPVTYVPARNTIMLALALAWAEVLGAQDIFVGVNAVDYSGYPDCRPEFIRAFETLANLATKAAVEGRSLQVHAPLIDMSKAQIIMQGGRLGIDYGLTVSCYQADAEGRACGVCDSCRLRSQGFSDAGLKDPTRYAGGN

SEQ ID NO: 42743 - protein, 235 aa, unidentified
  source 1..235: note = Sulfuritortus calidifontis
  REGION 1..235: note = tr|A0A4R3K0Y2|A0A4R3K0Y2_9PROT 7-cyano-7-deazaguanine synthase OS=Sulfuritortus calidifontis OX=1914471 GN=queC PE=3 SV=1
MSEAHVKRSGRSQQRAVVLLSGGLDSATTLAVARSEGCECFALSFDYGQRHGAELDAARAVAKQLGACEHRVLSLDLAQFGGSALTDRSLAVPEQASEGIPITYVPARNTVMLALALAWAEVLAAEAIYLGVNAVDYSGYPDCRPEYIEAFERMANLATKRAVEGQPLRIAAPLIHLSKAEIIRLGQRLGVDYGLTVSCYQADDRGRACGRCDSCRLRRQGFLDAGVTDPTRYQV

SEQ ID NO: 42744 - protein, 225 aa, Sulfurivirga caldicuralii
  REGION 1..225: note = tr|A0A1N6ER20|A0A1N6ER20_9GAMM 7-cyano-7-deazaguanine synthase OS=Sulfurivirga caldicuralii OX=364032 GN=queC PE=3 SV=1
MNRPAIVLLSGGLDSATVLAIARDQGYACHTLSFDYGQRHRAELDAAARISEALGAISHRVVRIDLGTIGGSALTDDSLSVPTDGVGESIPITYVPARNMTFLSFAVGLGEVLEAQDIFIGVNAVDYSGYPDCRPEFIAALEQAANLGTKAGVGGHPFKIHTPLIHLAKAEIIRTGLALGVDYGLTVSCYQADEQGRACGVCDSCRLRRKGFEEAGVADPTRYQN

SEQ ID NO: 42745 - protein, 222 aa, Sulfurospirillum barnesii
  REGION 1..222: note = tr|I3XZ85|I3XZ85_SULBS 7-cyano-7-deazaguanine synthase OS=Sulfurospirillum barnesii (strain ATCC 700032 / DSM 10660 / SES-3) OX=760154 GN=queC PE=3 SV=1
MRKALVVFSGGQDSTTCLGWAKNRFDEVETITFDYGQKHRVEIAQAQKIAHVLHVKNTLLSLDAFSQLNDSALIDGTQDIGAHHVTHTNLPASFVPNRNAIFFTLAHAFAQKQGIEHIIIGVNQTDYSGYPDCREPFVKALELALNLGSEANITFHYPLMHLTKAQTFELSRVEGVLDLVIDESHTCYNGVHTHKHAWGYGCGECPACVLRKIGWEAYTQGV

SEQ ID NO: 42746 - protein, 222 aa, Sulfurospirillum cavolei
  REGION 1..222: note = tr|A0A2D3WBN0|A0A2D3WBN0_9PROT 7-cyano-7-deazaguanine synthase OS=Sulfurospirillum cavolei OX=366522 GN=queC PE=3 SV=1
MKKALVVFSGGQDSTTCLGWAKNRFDYVETITFDYGQKHRVEIAQAQKIAEILHVKNTVLSLDAFSQLNDSALIDATQDISAHHKTHTNLPASFVPNRNAIFFTLAHAFAQKQDIEHLVIGVNQTDYSGYPDCREPFVKALELALNLGSEASITFHYPLMHLTKAETFALSHEEGVLDLVIDESHTCYNGVHTHKHAWGYGCGECPACVLRKQGFEAFCKGR

SEQ ID NO: 42747 - protein, 222 aa, Sulfurospirillum deleyianum
  REGION 1..222: note = tr|D1B472|D1B472_SULD5 7-cyano-7-deazaguanine synthase OS=Sulfurospirillum deleyianum (strain ATCC 51133 / DSM 6946 / 5175) OX=525898 GN=queC PE=3 SV=1
MSKALVVFSGGQDSTTCLGWAKNRFEYVESITFDYGQKHKVEIAQAQKIASLLHVKNTLLSLDAFSQLNDSALIDSTQDIGAHHRVHTNLPASFVPNRNAIFFTLAHAFAQKQGIEHIIIGVNQTDYSGYPDCREPFVKALELALNLGSEANITFHYPLMHLTKAETFLLSKEEGVLDLVLNESHTCYNGEHSEKHTWGYGCGECPACVLRKQGWEAYEKGI

SEQ ID NO: 42748 - protein, 226 aa, Sulfurospirillum halorespirans
  REGION 1..226: note = tr|A0A1D7TM97|A0A1D7TM97_9PROT 7-cyano-7-deazaguanine synthase OS=Sulfurospirillum halorespirans DSM 13726 OX=1193502 GN=queC PE=3 SV=1
MAKIASKALVVFSGGQDSTTCLGWAKNRFDFVESITFDYGQKHRVEIAQAEKIAKALHVKNTLLSLDAFSQLNDSALIDGTQDIGAHHKTHTNLPASFVPNRNAIFFTLAHAFAQKQGIEHIIIGVNQTDYSGYPDCREPFVKALELALNLGSEATITFHSPLMHLTKAETFALSDKEGVLGLVIDESHTCYNGDHSEKHDWGYGCGKCPACVLRKAGWEAYTQSI

SEQ ID NO: 42749 - protein, 226 aa, Sulfurospirillum multivorans
  REGION 1..226: note = tr|A0A5B9TUQ7|A0A5B9TUQ7_SULMU 7-cyano-7-deazaguanine synthase OS=Sulfurospirillum multivorans OX=66821 GN=queC PE=3 SV=1
MAKIASKALVVFSGGQDSTTCLGWAKNRFDSVESITFDYGQKHRVEIAQAEKIAKALHVKNTLLSLDAFSQLNDSALIDGTQDIGAHHKTHTNLPASFVPNRNAIFFTLAHAFAQKQGIKHIIIGVNQTDYSGYPDCREPFVKALELALNVGSEANITFHSPLMHLTKAETFALSDKEGVLGLVIDESHTCYNGDHSEKHDWGYGCGKCPACVLRKAGWEAYSESI

SEQ ID NO: 42750 - protein, 221 aa, Sulfurospirillum sp.
  REGION 1..221: note = tr|A0A432SRA2|A0A432SRA2_9PROT 7-cyano-7-deazaguanine synthase OS=Sulfurospirillum sp.; OX = 2053622 GN=queC PE=3 SV=1
MQKAVCIMSGGMDSTLAAYIAKKRDNYEIVALHFNYGQRTQKREEKAFSDISELLKCVKSYSLDLDFFSQIGGSALTDESIKIPTNGLQSGIPITYVPFRNGIFLSIAAAIAEKEGASAIYIGVVEEDSSGYPDCREDFIKKLQDAIDSGTKPETKIEIKTPLVHLKKEQIVQESIELDVPLEYTWSCYKNSDIACGVCDSCRLRLKGFEYAGQKDKIPYQ

SEQ ID NO: 42751 - protein, 222 aa, Sulfurospirillum sp.
  REGION 1..222: note = tr|A0A2D3WCA2|A0A2D3WCA2_9PROT 7-cyano-7-deazaguanine synthase OS=Sulfurospirillum sp. UBA12182 OX=2015905 GN=queC PE=3 SV=1
MSSALVVFSGGQDSTTCLGWAKNRFDRVETLTFDYGQKHRVEIYQAKKIATLLDVENFVLKFDAFSQLADSALIDGSLDISSAHSHKPNLPASFVPNRNAVFFTLAHAYAQKKGIDNIITGINQTDYSGYPDCRLEFIEALELALNLGSESNIKFHYPLIHLSKAQTFEMSEQEGVLELIIDESHTCYNGNHNTKNEWGYGCGECPACILRAKGWQEYNKKH

SEQ ID NO: 42752 - protein, 225 aa, unidentified
  source 1..225: note = Sulfurovum riftiae
  REGION 1..225: note = tr|A0A151CEF5|A0A151CEF5_9PROT 7-cyano-7-deazaguanine synthase OS=Sulfurovum riftiae; OX = 1630136 GN=queC PE=3 SV=1
MGKKAVCIISGGMDSALSAKIAQKEGYEIIALHFNYGQRTQYKELACFRKIAEELKAAETYEIDLDFFEQIGASALTDRSIDVPTGGVEEGVPVTYVPFRNGIFLSIAAALAEKHGAEALFIGVVEEDSSGYPDCRESYIEQMEKAINLGTKEETNITIRMPLVALQKSQIVQKALELGVPLADTWSCYQSEDLACGVCDSCRLRLRGFEIAGVQDPIPYRKDSN

SEQ ID NO: 42753 - protein, 222 aa, Sulfurovum sp.
  REGION 1..222: note = sp|A6Q9Q9|QUEC_SULNB 7-cyano-7-deazaguanine synthase; OS = Sulfurovum sp. (strain NBC37-1) OX=387093 GN=queC PE=3; SV = 1
MGKKAVCIISGGMDSALSAKIAQEEGYEIIALHFNYGQRTRNKELECFRKITQELNASESYEIDLDFFEQIGASALTDKSIDVPIGGLEEGVPVTYVPFRNGIFLSIAAAIAEKHGAEALFIGVVEEDSSGYPDCRESYIEQMQKAINLGTKDETNIEIKMPLVSLRKSQIVQKAIELGVPLEDTWSCYQAEDAACGVCDSCRLRLRGFEVAGVKDPIAYRK

SEQ ID NO: 42754 - protein, 220 aa, Sulfurovum sp.
  REGION 1..220: note = tr|I2K8A6|I2K8A6_9PROT 7-cyano-7-deazaguanine synthase OS=Sulfurovum sp. AR OX=1165841 GN=queC PE=3 SV=1
MKKAVCIISGGMDSALSAKIAQNEGYEIIALHFNYGQRTQDKELECFRKIASAVDASETYEIDLPFFEQIGASALTDQSIDVPTGGLEKGVPVTYVPFRNGIFLSIAAAVAEKHGAQALFIGVVEEDSSGYPDCRESYIKQMQKAINLGTKDETDLEIRMPLVDLKKSEIVQKSLELHVPLKDTWSCYKSEEKACGVCDSCRLRLKGFEEAGSVDPILYA

SEQ ID NO: 42755 - protein, 427 aa, unidentified
  source 1..427: note = Sunxiuqinia dokdonensis
  REGION 1..427: note = tr|A0A0L8VEY5|A0A0L8VEY5_9BACT Uncharacterized protein OS=Sunxiuqinia dokdonensis OX=1409788; GN = NC99_04280 PE=4 SV=1
MKIYCTPQKGSENNYNQDLKVVLFGKADNRAEGYIGEQIWQKVIAEKINPSSKAWDLLSIALSVISADYAGHRKKSHDGWTREFEMVVAVIDKDFWNGQAFLLSKLLGFLTSDRWHFTFVDGGFQPKAPKSSEFKVIENDCVVLLSGGLDSLIGIIDLVAQEHNPVAVSQLVPGDAEKQRDFAKIFNPNVPHIQFNHNKKFPDSETPSSQRARSIIFLAYGILIATCLKNYKERKTVTLYMCENGYISLNPPLTGMRIGSLSTRTTHPIYLLMFQELISNAGLNVTIENPYKDKTKGQMLINCKNQALIKQYAHKSTSCGRFKRHGHKHCGRCVPCLVRRAAFKAWREIDQTNYIYDDLSIDTPNYAQYDDVKSIAIAIKEVENNGLDKWLGAQLNSAILGDTSTYKKTIQIGVAELKKFLQGYNIV

SEQ ID NO: 42756 - protein, 223 aa, Sunxiuqinia elliptica
  REGION 1..223: note = tr|A0A1I2KG96|A0A1I2KG96_9BACT 7-cyano-7-deazaguanine synthase OS=Sunxiuqinia elliptica; OX = 655355 GN=queC PE=3 SV=1
MSKALVVFSGGQDSTTCLFWAKSKFDEVEAVAFDYGQKHRNELDVAAKIAKQAAVPLAIYSLNVLGQLSRNALTDSSLEVEAEKPADRPPNTLVEGRNMLFLTYAAILAKEKGIANLITGVGQADYSGYPDCRDEFIRSLNQTLNLSMDYHYQIHTPLMWKSKAEVWQLADELGVFDLVRFETLTCYNGVPGDGCGVCPACKLRKNGLDTYLKIRVTGDAKLP

SEQ ID NO: 42757 - protein, 223 aa, Sunxiuqinia elliptica
  REGION 1..223: note = tr|A0A4R6H7A4|A0A4R6H7A4_9BACT 7-cyano-7-deazaguanine synthase OS=Sunxiuqinia elliptica; OX = 655355 GN=queC PE=3 SV=1
MSKALVVFSGGQDSTTCLFWAKSKFDEVEAVAFDYGQKHRNELDVAAKIAKQAAVPLAIYPLNVLGQLSRNALTDSSLEVEAEKPADRPPNTLVEGRNMLFLTYAAILAKGKGISNLITGVGQADYSGYPDCRDEFIRSLNQTLNLSMDYQYQIHTPLMWKSKAEVWQLADELGVFDLVRVETLTCYNGVPGDGCGACPACKLRNNGLDTYLKIRATGDAKLP

SEQ ID NO: 42758 - protein, 231 aa, unidentified
  source 1..231: note = Superficieibacter electus
  REGION 1..231: note = tr|A0A2P5GSK3|A0A2P5GSK3_9ENTR 7-cyano-7-deazaguanine synthase OS=Superficieibacter electus OX=2022662 GN=queC PE=3 SV=1
MKRAVVVFSGGQDSTTCLIQALHQYDDVHCVTFDYGQRHRAEIDVARELALKLGARAHKVLDVTLLNELAISSLTRDSIPVPDYKPDADGIPNTFVPGRNILFLTLAAIYAYQVKAEAVITGVCETDFSGYPDCRDEFVKALNHAVSLGMAKDIRFETPLMWLDKAETWALADYWGKLDLVRNETLTCYNGIKGDGCGQCAACHLRANGLNHFLANVTSVRTAMQRKTGLA

SEQ ID NO: 42759 - protein, 252 aa, unidentified
  source 1..252: note = Sutterella megalosphaeroides
  REGION 1..252: note = tr|A0A2Z6I814|A0A2Z6I814_9BURK 7-cyano-7-deazaguanine synthase OS=Sutterella megalosphaeroides OX=2494234 GN=queC PE=3 SV=1
MTNLSQGTQRRPLGLGHHRSALILFSGGQDSTTCLGWALERFERVETLGVEYGQRHDVEMTCRRRVLEVVRTLKPEWNERLGEDHVLDLSVLGQVSDCALTREKAIEFEEDKVPNTFVPGRNLLFFTLAAALGYRRGIDVLVGGMCETDYSGYADCRDSTMKSLQVTLGLGLDRPVVIETPLMWKTKGETWAMAHEAGGDAFVDLILEESHTCYAGDHTHRHAWGYGCGECPACRLREHGWNEWLALKAEAE

SEQ ID NO: 42760 - protein, 245 aa, Sutterella parvirubra
  REGION 1..245: note = tr|H3KDN4|H3KDN4_9BURK 7-cyano-7-deazaguanine synthase OS=Sutterella parvirubra YIT 11816 OX=762967; GN = queC PE=3 SV=1
MESFMQELDHPAGRRGALVLFSGGQDSTTCLAWALEHFERVETLGVDYGQRHDVEMRCREDVLRAVRALNPKWDARLGEDHRLDMSVLGQISDCALTKERAIELEASGVPNTFVPARNLLFFTFASAIAYRRGLSVLVGGMCETDYSGYADCRDNTLKSLQVTLSLGLDAPMTVETPLMWLSKAETWALAQRLGGDAFVEIVRERTHTCYMGDREHHHDWGWGCGECPACRLRREGWEAWAASRK

SEQ ID NO: 42761 - protein, 245 aa, Sutterella sp.
  REGION 1..245: note = tr|A0A5B7ZK12|A0A5B7ZK12_9BURK 7-cyano-7-deazaguanine synthase OS=Sutterella sp. KGMB03119 OX=2584944 GN=queC PE=3 SV=1
MTEFSDFASAGRDMAALVLFSGGQDSTTCLGWALERFGRVETVGVDYGQRHQAELVCRGKVLEKMRAMKPLWAERLGEDHMLSLPVLGEVADCALTDERRIAFESSGLPNTFVPGRNLLFFTLAAAIAYRRGARVLVGGMCETDYSGYPDCRDNTLKSLQVTLALGLDAPIILETPLMRLTKAETWELAQRTGGDEFVKLVRDETHTCYMGDHEHHHAWGWGCGECPACRLRAKGWEEWSGSKRF

SEQ ID NO: 42762 - protein, 242 aa, Sutterella sp.
  REGION 1..242: note = tr|R7BVY4|R7BVY4_9BURK 7-cyano-7-deazaguanine synthase OS=Sutterella sp. CAG:397 OX=1262976 GN=queC PE=3; SV = 1
MAETAAGDGLRRALVLFSGGQDSTTCLAWALTVFDRVDTVGFDYGQRHKSELTCRKRIREKIQALNPRWQGKLGEDHILNLTELNRIADCALTRSEAIGEGADGLPNTFVPGRNLLFFNYAAILAWRLGIRTLVGGMCDTDYSGYPDCRDNTLKSLQVTLSLGLGRDFVIETPLMHLTKAQSWMLAENLGGKALVDLIRFETETCYEGDRTHRHDWGYGCGVCPACRLRAKGWEEFVRSCGK

SEQ ID NO: 42763 - protein, 252 aa, Sutterella wadsworthensis
  REGION 1..252: note = tr|E7H4X6|E7H4X6_9BURK 7-cyano-7-deazaguanine synthase OS=Sutterella wadsworthensis 3_1_45B OX=742821; GN = queC PE=3 SV=1
MTQFTEYASVGREMAALVLFSGGQDSTTCLGWALERFGRVETIGVDYGQRHQAELECRVRVREKMAQLKPQWGERLGDDHLLKLPVLGEIADCALTDERRIAFEASGLPNTFVPGRNLLFFTLAASLAYRRGLRVLVGGMCETDYSGYPDCRDNTLKSLQVTLDLGLDMPFIIETPLMRLSKAETWALAEHVGGDPFVELVRNDTHTCYMGDHQHRHVWGYGCGECPACKLRAQGWASWSEHARFADASTVV

SEQ ID NO: 42764 - protein, 252 aa, Sutterella wadsworthensis
  REGION 1..252: note = tr|R5PR56|R5PR56_9BURK 7-cyano-7-deazaguanine synthase OS=Sutterella wadsworthensis CAG:135 OX=1263111; GN = queC PE=3 SV=1
MTQFTEYASVGREMAALVLFSGGQDSTTCLGWALERFGRVETIGVDYGQRHQAELECRVRVREKMAQLKPQWGERLGDDHLLKLPVLGEIADCALTDERRIAFEASGLPNTFVPGRNLLFFTLAASLAYRRGLRVLVGGMCETDYSGYPDCRDNTLKSLQVTLDLGLDMPFIIETPLMRLSKAETWALAEHVGGDPFVELVRNETHTCYMGDHQHRHVWGYGCGECPACKLRAQGWASWSEHARFADASTAV

SEQ ID NO: 42765 - protein, 198 aa, unidentified
  source 1..198: note = Sutterellaceae bacterium
  REGION 1..198: note = tr|A0A3D4GBF1|A0A3D4GBF1_9BURK 7-cyano-7-deazaguanine synthase (Fragment); OS = Sutterellaceae bacterium OX=2026794 GN=DIU26_04705 PE=3; SV = 1
FEYGQRHCKELESAQKVADYYGVRHVVFNLTQIFSFSNCSLLSNSTEKPVHESYADQIAKNGEGKVSTYVPFRNGLMLSAGAALAQSLFPEEKCEIWIGAHADDAAGNAYADCSVGFNNAMDQAINIGTYGLVSLRAPLNRWNKAQVVAKGLELKVPYKLTWSCYDGGEKACGECGTCIDRKAAFEANGVKDPIEYFK

SEQ ID NO: 42766 - protein, 234 aa, unidentified
  source 1..234: note = Sutterellaceae bacterium
  REGION 1..234: note = tr|A0A2E2R5T4|A0A2E2R5T4_9BURK 7-cyano-7-deazaguanine synthase OS=Sutterellaceae bacterium OX=2026794 GN=queC PE=3 SV=1
MNKKALVLFSGGQDSTVCLAWALSKFEHVETIGFDYGQRHRIELECRLTVLDRVREQFPEWAYKLGEDRVIDLSWLGQISDCALTEEREIELNENGLPNTFVPGRNLVFFLISSAVAYRRGLSTLVGGMCQTDFSGYPDCREDTLKALQVATNLGMASTFRFETPLMWIDKTETFQLGEQLGGKKLLEIIVRDTHTCYTGDRSHEHDWGFGCGECPACDLRKRGWKNYISQQNQ

SEQ ID NO: 42767 - protein, 233 aa, Swaminathania salitolerans
  REGION 1..233: note = tr|A0A511BR03|A0A511BR03_9PROT 7-cyano-7-deazaguanine synthase OS=Swaminathania salitolerans OX=182838 GN=queC PE=3 SV=1
MLSDETALVLFSGGQDSATCLAWALSRFSRVETLGFAYGQRHAVELACRDRLRETMIEAMPEWAPRLGADHTLDLGILGEISETSLTREAEIRMSDSGLPTTFVPGRNLLFLTFAATLAVRRHARHIVTGVCETDYSGYPDCRDDTIKALQVALNLGMEERFVLHTPLMWLDKAQTWNLAATLGGAPLVRAINEESHSCYLGDRTHRHDWGYGCGTCPACELRARGWSEYIDA

SEQ ID NO: 42768 - protein, 233 aa, unidentified
  source 1..233: note = Swingsia samuiensis
  REGION 1..233: note = tr|A0A4Y6UG77|A0A4Y6UG77_9PROT 7-cyano-7-deazaguanine synthase OS=Swingsia samuiensis; OX = 1293412 GN=queC PE=3 SV=1
MSNTALVLFSGGQDSATCLAWALSRFEHVETVGFSYGQRHAIELECRSTLRSHMAEHSSTWEKRLGIDHTIDLASLGAVSETALTREAEIGFNENGLPNTFVPGRNLIFLTFAAALAYRRGAKHIITGVCETDYSGYPDCRDDTIKALQVALNLGMDKRFVLHTPLMWIDKAQTWELAQSIGGKPLVELINRESHSCYMGDRTHLHAWGYGCGTCPACQLRADGWQRFKERQA

SEQ ID NO: 42769 - protein, 260 aa, unidentified
  source 1..260: note = Swingsia sp.
  REGION 1..260: note = tr|A0A4Y6U8Q6|A0A4Y6U8Q6_9PROT 7-cyano-7-deazaguanine synthase OS=Swingsia sp. F3b2; OX = 2558361 GN=queC PE=3 SV=1
MTNHQDFPVPHTSRQLAPLSGSFSLPGGAALVLFSGGQDSATCLAWALSAFQHVETVGFSYGQRHAVEMDCRATLRRQIADLVPRGAERLGDDHVIDLPALGKLSETALTRDAEIKLGKNGLPNTFVPGRNLIFLTFAAALAFRRNARTIITGVCETDYSGYPDCRDDAIKAMQVALNIGMDQRFVLQAPLMWLDKARTWKLAELIGGPALVETIRRDSHSCYHGDRGEGSEHDWGYGCGHCPACELRAEGWHRYQASKS

SEQ ID NO: 42770 - protein, 231 aa, unidentified
  source 1..231: note = Synechococcales bacterium
  REGION 1..231: note = tr|A0A354B253|A0A354B253_9CYAN 7-cyano-7-deazaguanine synthase OS=Synechococcales bacterium UBA10510 OX=2055795 GN=queC PE=3 SV=1
MPADAPPLAIALLSGGLDSATAAALAIEAGYRVIGLSFNYGQRHLRELEAAAALAPGLGLVEHHVIEVNLAAWGGSALTDSAIAIPTSGVEASGIPNTYVPGRNTVFIALGLSLAEARGAEALVLGVNAVDYSGYPDCRPDYLAAFQTLADLASRAGREGRGARLWAPLVNWSKLEIVQQALRLGVPIAGTWSCYSGGQQPCGLCDSCRIRDGALIEAGRADLASQAQRGA

SEQ ID NO: 42771 - protein, 225 aa, unidentified
  source 1..225: note = Synechococcales bacterium
  REGION 1..225: note = tr|A0A358BX85|A0A358BX85_9CYAN 7-cyano-7-deazaguanine synthase OS=Synechococcales bacterium UBA8138 OX=2055796 GN=queC PE=3 SV=1
MHPAPPTAVALLSGGLDSATAAAIAIEAGYRLIGLSFNYGQRHQRELEAAALLARHFNFSEHHTINVNLAAWGGSSLTDLQQTIPSAGVLPGVIPNTYVPGRNTVFIAMALSLAEARGAERLVLGVNAVDYSGYPDCRPEYLTAFQKLADLASKSGLEGHGAQLWAPLVQWSKTEIVAEALRLQVPIADTWSCYAGGVKPCGVCDSCRIRDGALRDAGRPDLASR

SEQ ID NO: 42772 - protein, 231 aa, Synechococcus elongatus
  REGION 1..231: note = sp|Q31NK6|QUEC_SYNE7 7-cyano-7-deazaguanine synthase; OS = Synechococcus elongatus (strain PCC 7942) OX=1140; GN = queC PE=3 SV=1
MAKAVVLLSGGLDSATAAAQAIADGYEAIALSFRYGQRHVRELEAARSVAAALGINQHFFVDVNIAQWGGSSLTDAAEPLPGSGVVAGEIPSTYVPGRNTVFIALALSLAEAQQASAIYLGINAVDYSGYPDCRPDYLAAFQQLASLSSKVGVEGQAPQLVAPLIHDHKVDIVRRAVVLGVPIPATWSCYAGGAEACGRCDSCRIRDRALIEAGYPEWATAIGRSLVSLQP

SEQ ID NO: 42773 - protein, 225 aa, unidentified
  source 1..225: note = Synechococcus lacustris
  REGION 1..225: note = tr|A0A2P7EF62|A0A2P7EF62_9SYNE 7-cyano-7-deazaguanine synthase OS=Synechococcus lacustris; OX = 2116544 GN=queC PE=3 SV=1
MHPAPPTAVALLSGGLDSATAAAIAIEAGYRLIGLSFNYGQRHQRELAAAALLARHFNFSEHHTINVNLAAWGGSSLTDLQQTIPSAGVLPGVIPNTYVPGRNTVFIAMALSLAEARGAERLVLGVNAVDYSGYPDCRPEYLTAFQKLADLASKSGLEGHGAQLWAPLVQWSKTEIVAEALRLQVPIADTWSCYAGGVKPCGVCDSCRIRDAALRDAGRPDLASR

SEQ ID NO: 42774 - protein, 237 aa, Synechococcus lividus
  REGION 1..237: note = tr|A0A2D2PZ90|A0A2D2PZ90_SYNLI 7-cyano-7-deazaguanine synthase OS=Synechococcus lividus PCC 6715 OX=1917166 GN=queC PE=3 SV=1
MTTKKAVVLLSGGLDSSTVLFRAKALGYACYALSFNYGQRHQQELTSAIAIAAAAGVVQHHVIQFDLRLWGGSALTDQTIDLPCDRDLSTMSQEIPVTYVPARNTIFLSFALAYAEAIHAQSVHIGVNALDYSGYPDCRPDYIAAMAEVYRLGTKQGREGNPIEIICPLIDLHKTDIIRLGNEYGVPWEKTWSCYSDGGTHEPARACGRCDACRLRLAAFAALGLTDPLPYTPTHPA

SEQ ID NO: 42775 - protein, 226 aa, Synechococcus sp.
  REGION 1..226: note = sp|Q0I671|QUEC_SYNS3 7-cyano-7-deazaguanine synthase; OS = Synechococcus sp. (strain CC9311) OX=64471 GN=queC PE=3; SV = 2
MTDSTAIALLSGGLDSATAAALAIKSGFRVIGLSFDYGQRHRRELDAAVEIAKALNLAEHHTINVDLAMWGGSSLTDHAQTLPTSGVETSIIPNTYVPGRNTVFIAIGLSLAEARGADRLVLGVNAVDYSGYPDCRPDYLEAFQDLADLSSRAGREGHGPKLWAPLVEWSKQQIAEEALHLGIPIERTWSCYSGGDVPCGVCDSCRIRDEALLAAGRPDLCSPGRP

SEQ ID NO: 42776 - protein, 226 aa, Synechococcus sp.
  REGION 1..226: note = sp|Q3AGF3|QUEC_SYNSC 7-cyano-7-deazaguanine synthase; OS = Synechococcus sp. (strain CC9605) OX=110662 GN=queC; PE = 3 SV=1
MSQRTAIALLSGGLDSATAAALALEQGDRVIGLSFDYGQRHLRELDAAAAVAQQLGLAEHHCISVNLASWGGSALTDASISIPTDGVEEGRIPPTYVPGRNTVFISVGLSLAEARGAERLVLGVNAVDYSGYPDCRPDYLNAFQTLADLASKAGREGHGAQLWAPLVQWSKVRIVEEALRLGVPIETTWSCYSGGTHPCGVCDSCRIRDAALREAGRPDLCSSTAA

SEQ ID NO: 42777 - protein, 232 aa, Synechocystis sp.
  REGION 1..232: note = sp|Q55468|QUEC_SYNY3 7-cyano-7-deazaguanine synthase; OS = Synechocystis sp. (strain PCC 6803 / Kazusa) OX=1111708; GN = queC PE=3 SV=2
MTKTAVVLLSGGLDSATVAAIAKREGYRVIALSFNYGQRHDRELRAAADIVQALGIPEHFSINLDLAQWGGSSLTDRQQTLPQTGVEPDIIPSTYVPGRNTVFIALGLSLAEAKGAEAVFLGINAIDYSGYPDCRPEYLATYQQLAALSSKVGVEGRPIQLLAPLIELSKVDIVHKALELGVPIAQTWSCYAGGEEPCGRCDSCRLRDQALIEAGHPELASAKGRLWREKVD

SEQ ID NO: 42778 - protein, 235 aa, Synechocystis sp.
  REGION 1..235: note = tr|A0A068MSX2|A0A068MSX2_SYNY4 7-cyano-7-deazaguanine synthase OS=Synechocystis sp. (strain PCC 6714) OX=1147 GN=queC PE=3 SV=1
MMTKTAVVLLSGGLDSATVAAIAKEEGYQVIALSFNYGQRHDRELQAAQAIVQALAIEHHFTVDLDLAQWGGSSLTDRQQILPQGGVEPDIIPSTYVPGRNTVFIALGLSLAEAQGAEAVFLGINAIDYSGYPDCRPEYLAVYQQLAALSSKVGVEGRPIQLIAPLITLSKVDIVHKALELGVPIAETWSCYAGGEQPCGRCDSCRLRDQALIEAGHPELASVQGRHRREDVGQS

SEQ ID NO: 42779 - protein, 231 aa, unidentified
  source 1..231: note = Syntrophaceae bacterium
  REGION 1..231: note = tr|A0A1V4XAZ9|A0A1V4XAZ9_9DELT 7-cyano-7-deazaguanine synthase OS=Syntrophaceae bacterium PtaB.Bin038 OX=1811716 GN=queC PE=3 SV=1
MAAGSKAVILASGGIDSTTAMAVARSEGFELYSLSFDYGQRHAVELDAARKVSHALGARRHLVIRIDLGAIGGSALTADIAVPRGRSEGDMMSAIPVTYVPARNTIFLSYALAWAEVLEAADIFIGVNAVDYSGYPDCRPEYIRAFETMANLAIKAAVEGKLRIAVRTPLIRMTKAGIIRTGTGLGVDYGLTHSCYDPDSKGRACGDCDSCILRKKGFREAGIPDPTRYAR

SEQ ID NO: 42780 - protein, 237 aa, unidentified
  source 1..237: note = Syntrophaceae bacterium
  REGION 1..237: note = tr|A0A354SFR6|A0A354SFR6_9DELT 7-cyano-7-deazaguanine synthase OS=Syntrophaceae bacterium; OX = 2052184 GN=queC PE=3 SV=1
MKNEIDKLKKKAVVLLSGGIDSATTLAIARSMGFAVWALSFRYGQRHRVELEAATRVACVNSVAEHLTVDIDLRRIGGSALTSDLAVPKSRSAEDMGKDIPVTYVPARNTIFLSYALAWAEVIGVSDIFIGVNALDYSGYPDCRPEYIEAYERMANLATRAGVEGRQKLRIHTPLIHLSKAQIIRKGMELGVDYSLTHSCYDPGADGVACGQCDSCLLRLKGFREAGLADPGKYKRL

SEQ ID NO: 42781 - protein, 234 aa, Syntrophobacter fumaroxidans
  REGION 1..234: note = sp|A0LJR5|QUEC_SYNFM 7-cyano-7-deazaguanine synthase; OS = Syntrophobacter fumaroxidans (strain DSM 10017 / MPOB); OX = 335543 GN=queC PE=3 SV=1
MGQEHRRKAVVLFSGGIDSTTCLAVAKAEGFEAYALSFFYHQRHGVEVEAARRSAPALGAREHLVLELPLDRIGGSALTGHEEVPKDVPVEKMSDRIPATYVPARNTIFLSFALAWAEVLGAADIFIGVNALDYSGYPDCRPEYIAAFERMANLAIRETVEGRMRIKVHTPLIRLTKGEIIKRGLELGLDYSLTHSCYDPDARGLACGHCDSCILRKKGFMEAGIPDPTRYVRD

SEQ ID NO: 42782 - protein, 228 aa, Syntrophobacter sp.
  REGION 1..228: note = tr|A0A0S7XRY2|A0A0S7XRY2_9DELT 7-cyano-7-deazaguanine synthase OS=Syntrophobacter sp. DG_60 OX=1703361 GN=queC PE=3 SV=1
MKELAIVLVSGGLDSCVTAAVANKDYEPAFLHVNYGQRTEARELRAFKEIADFYNVSKRLIVSVDYLKEIGGSSLINKNLPVPDYKDERMGIPSTYVPFRNTHLIAIAVSWAEVISAKKIFIGAMEEDSSGYPDCREAYFEAYNRLIELGTRPETKIEIETPIIHFKKWEVVKLGAELGAPFHLTWSCYRSEDIACGRCESCILRIKAFKEAGIRDPIVITQYPVDFE

SEQ ID NO: 42783 - protein, 228 aa, Syntrophobacter sp.
  REGION 1..228: note = tr|A0A2U3KZK3|A0A2U3KZK3_9DELT 7-cyano-7-deazaguanine synthase OS=Syntrophobacter sp. SbD1 OX=2043167 GN=queC PE=3 SV=1
MKKAIVLVSGGVDSTTCLAIAKHEGYGAFALSFDYGQRHRAELEAARRVVKAFDVREHLILKVPLDAIGGSALTSEIEVPKDVALEEMQSRIPVTYVPARNTVFLSLALAWAETLGASDIFIGVNALDYSGYPDCRPEYIESFERMANLALKECVEGRIHMQIHTPLIKMTKAQIIKRGVELGVDFSMTHSCYDPDPFDRACGRCDSCILRRHGFDEAAIADPTKYAP

SEQ ID NO: 42784 - protein, 229 aa, unidentified
  source 1..229: note = Syntrophobacteraceae bacterium
  REGION 1..229: note = tr|A0A3D0H6A8|A0A3D0H6A8_9DELT 7-cyano-7-deazaguanine synthase OS=Syntrophobacteraceae bacterium OX=2052185 GN=queC PE=3 SV=1
MPKPRAVVLVSGGMDSCVAAAIAAREFEVAFLHLNYGQRTERRELRAFHEIAAHYGVTRCLAVSMEHLAAIGGSSLTDRSMDVTPADLHATGIPTSYVPFRNANLLAVAVSWAEALKAEAVFIGAVEEDSSGYPDCRRSFYEAYNTVIREGTKPDTHIRIVTPLIEMTKAEIVQQGVELMAPLHLTWSCYQREDVACGTCDSCALRLRGFQHVGVPDPIPYAVRPDYRF

SEQ ID NO: 42785 - protein, 232 aa, unidentified
  source 1..232: note = Syntrophobacteraceae bacterium
  REGION 1..232: note = tr|A0A3D0H8N7|A0A3D0H8N7_9DELT 7-cyano-7-deazaguanine synthase OS=Syntrophobacteraceae bacterium OX=2052185 GN=queC PE=3 SV=1
MSAIRKAVVLSSGGIDSTTAMAIARSDGYEIYSLTFSYGQRHAIELVASNKVADALGAREHFVIGIDLGRIGGSALTDDIAVPKDRTEAEIGEGIPVTYVPARNTIFLSYALAWAEVLRASDIFIGVNAIDYSGYPDCRPEYIEAFERMANLATKATVEGEMSIRIQTPLIHMTKAEIIRKGVQLGVDYSITHSCYDPEPSGKSCGECDSCLLRKKGFHEAGLHDPTEYLHQ

SEQ ID NO: 42786 - protein, 231 aa, unidentified
  source 1..231: note = Syntrophobacterales bacterium
  REGION 1..231: note = tr|A0A2M7BK70|A0A2M7BK70_9DELT 7-cyano-7-deazaguanine synthase OS=Syntrophobacterales bacterium CG03_land_8_20_14_0_80_58_14 OX=1974100 GN=queC; PE = 3 SV=1
MSGRKAVILSSGGIDSTTAMAIARAEGYALYSLTFNYGQRHACELEAARKVADFFRVKKHLVIDIDLRPIGGSALTDQIDVPKGRGVDDMAHEIPVTYVPARNTIFLSYALAWAEVLQAADIFIGVNAVDYSGYPDCRPEFIAAYGQLANLATKTAVEGKLRMHIRAPLISMKKAEIIRKGIELGVDYGLTHSCYDPSPAGKACGRCDSCILRRKGFEDAGVPNPTVYAAP

SEQ ID NO: 42787 - protein, 233 aa, unidentified
  source 1..233: note = Syntrophobacterales bacterium
  REGION 1..233: note = tr|A0A1G3UNB4|A0A1G3UNB4_9DELT 7-cyano-7-deazaguanine synthase OS=Syntrophobacterales bacterium GWC2_56_13 OX=1802287 GN=queC PE=3 SV=1
MSGKKAVVLTSGGIDSTTAMAIARAEGYEIYSLTFNYGQRHTRELEAARKVADFFRVKKHLVIDIDLRTIGGSALTDRIDVPKGRSIDDMAHEIPVTYVPARNTIFLSYALAWAEVLQAADILIGVNAVDYSGYPDCRPEFIAAFERLANLATKAAVEGKLRMHIRAPLISMKKAEIIRKGIELGVDYGLTHSCYDPSPEGKACGRCDSCILRRRGFEDAGVPDPTVYHDGSL

SEQ ID NO: 42788 - protein, 231 aa, Syntrophobotulus glycolicus
  REGION 1..231: note = tr|F0T106|F0T106_SYNGF 7-cyano-7-deazaguanine synthase OS=Syntrophobotulus glycolicus (strain DSM 8271 / FlGlyR) OX=645991 GN=queC PE=3 SV=1
MEKKRKAVVLLSGGLDSTICAVLACREFGAENVIALTLFYGQKHAREIKSAEAVCEHLGIPEHYTESLPDIFRGAGSTLVDPDKPNPEMTYEELSQAYGISPTYVPFRNANFLSVATTVALVKEADTIFYGAHAEDARNWAYPDCTPEFNGSMASAIYIGSYLKVRLVTPLQWLTKKDIVALGITVNAPFELTWSCYNGQEKACGVCSTCVGRLQAFQENNIRDPIEYEQR

SEQ ID NO: 42789 - protein, 44 aa, Syntrophomonas sp.
  REGION 1..44: note = tr|A0A3B8HVZ8|A0A3B8HVZ8_9FIRM Uncharacterized protein OS=Syntrophomonas sp. OX=2053627 GN=DCD98_01465; PE = 4 SV=1
MRQALLLDVNLDSLWSCYQDGDEPCGGCSSCITNQDAFRKVGIR

SEQ ID NO: 42790 - protein, 124 aa, Syntrophomonas sp.
  REGION 1..124: note = tr|A0A3B8HWS0|A0A3B8HWS0_9FIRM 7-cyano-7-deazaguanine synthase (Fragment); OS = Syntrophomonas sp. OX=2053627 GN=DCD98_01460 PE=3 SV=1
MKAVALLSGGLDSVVSMLLASKEVEIVLAITVDYGQRAAKQEIAASQRIAHDMGIPHKVICLPFMMELNSDLLKPDNSCIVNPWVPNRNGLLISLAACLAENLGAQMVICGFNREEAAIFPDNS

SEQ ID NO: 42791 - protein, 233 aa, Syntrophomonas zehnderi
  REGION 1..233: note = tr|A0A0E4GC57|A0A0E4GC57_9FIRM 7-cyano-7-deazaguanine synthase OS=Syntrophomonas zehnderi OL-4 OX=690567 GN=queC PE=3 SV=1
MSDKALVLLSGGLDSTTLLSLAINSLGSKNVSTLSILYGQKHDREVTAARAIADYYNCKHQVYTLPNLFQGYGSTLIDADKENPELSYQEISESYGVSPTYVPFRNGTLLSIATAQALIDGVNYIYYGTHSEDARGFAYPDCTPEFNGAMANAIYVGTYHKVRLLTPLQWLTKREVVELSQSLNTPIHLTYSCYSGREMHCGKCPTCVSRIQAFKQAGLIDPVPYEMPIDWEE

SEQ ID NO: 42792 - protein, 229 aa, unidentified
  source 1..229: note = Syntrophorhabdaceae bacterium
  REGION 1..229: note = tr|A0A1V5CCQ2|A0A1V5CCQ2_9DELT 7-cyano-7-deazaguanine synthase OS=Syntrophorhabdaceae bacterium PtaU1.Bin034 OX=1811715 GN=queC PE=3 SV=1
MVKRAVVLSSGGIDSTTAMAIAIRQGYEVYSLTFRYGQRHEIELRAAQKVSAVLGAKEHMVVDIDLGKIGGSALTSRALGVPKARSKAEMESGIPVTYVPARNTIFLSYALAWAEVLEASHVFIGVNVIDYSGYPDCRPEYIQAFEAMANLAIKATVEGRMRIAIETPLISMTKAEIIRRGVELGIDYAITHSCYDPSGDGRACGVCDSCILRKKGFLEAGIKDPTRYL

SEQ ID NO: 42793 - protein, 242 aa, Syntrophorhabdus aromaticivorans
  REGION 1..242: note = tr|A0A351U6U1|A0A351U6U1_9DELT 7-cyano-7-deazaguanine synthase OS=Syntrophorhabdus aromaticivorans OX=328301 GN=queC PE=3 SV=1
MEKCVVLTSGGLDSTTTLAIAKSLGFELYALTFDYGQRHRREINSAKKAAQCFAVREHRIIVIDLRSFGGSALTDDITMPVREKPGHIDGNPIPITYVPARNTIFLAYALAWAEVIKAHDIFIGVSALDYSGYPDCRPEYIGAFQKMADLATKEAVEGNPVRIRAPLISLSKADTIRRGIELGVDYSITHSCYNPTPSGLACGACDSCLLRRKGFLEAGIEDPATYARPIPTKLHPQGNRVS

SEQ ID NO: 42794 - protein, 227 aa, Syntrophorhabdus sp.
  REGION 1..227: note = tr|A0A1V5CGL5|A0A1V5CGL5_9DELT 7-cyano-7-deazaguanine synthase OS=Syntrophorhabdus sp. PtaU1.Bin002 OX=1811702 GN=queC PE=3 SV=1
MKKCVVLTSGGLDSTTTLAIAKDLGFELYALTFDYGQRHKHEINSAKKAAQYFAVKEHRIIVIDLRAFGGSALTDDIKVPVRGKPDHTSGDTIPVTYVPARNTIFLAYALAWAEVIRAHDIFIGVSALDYSGYPDCRPEYIEAFQKMANLATKEAVEGNPVNIRAPLLSLSKADTIRRGIELGVDYSITHSCYNPAPSGLACGACDSCLLRRKGFLEAGIEDPTTYA

SEQ ID NO: 42795 - protein, 469 aa, Syntrophorhabdus sp.
  REGION 1..469: note = tr|A0A1V5DMN2|A0A1V5DMN2_9DELT 7-cyano-7-deazaguanine synthase OS=Syntrophorhabdus sp. PtaU1.Bin153 OX=1811705 GN=queC_2 PE=4 SV=1
MNMVRYVGKTQCDDGAYRRAVDNLEGVLIDWVSTSPNATVSFELDGKAVAPELEGTLLDFTDLGIFIYLADEMVSRAKATDYWTRAIRCLVPVTEPAKWRENQLLLSNTLGLLSGDIWQFDWVPLLFPRSVSRHRQQLPHGFDTVCLFSGGTDSLLGAVQLLREGRKVILVGHQSEGQAASAQKELAEKLCSMFPGKICLVQCRVARSIRKIPEFNLAKKVERSHRPRSFLFLTLGIGIAVRCGIRDVFMPENGLMALNIPLQKSRTGALSTRTAHPSYMINFADLARRITGFDGHIRNPFLTQSKTDMLSGLDPVLSPLVLRSISCARPSRFNDKGVRHCGYCVPCIHRRFALTEAGIDSACHYAFDIFNDFRSTDVSKQQDLRAVVRFATNIANASVTQLQALILSHGYFPPTVGSLIGCSETKDYTPWTDMVQNWARDLLNKLAAVTSSSTRLSLGVPDSGQRIVR

SEQ ID NO: 42796 - protein, 217 aa, Syntrophothermus lipocalidus
  REGION 1..217: note = tr|D7CMQ2|D7CMQ2_SYNLT 7-cyano-7-deazaguanine synthase OS=Syntrophothermus lipocalidus (strain DSM 12680 / TGB-C1) OX=643648 GN=queC PE=3 SV=1
MMKAITLLSGGLDSTLCTVLALRDMEVILALTVDYGQKARTREVESAGRIAAFYNIPHRVVEAGFLRTFASGLTRAERSTRSSREVWVPNRNGLFINIAACYAEEMGAEAVLVGFNREEAVDFPDNSPDFVSAVNRSLSYSTRNQVRVISYTMEMDKTEMLREAIRLGIPLHYTWSCYEDGPSPCGVCASCRLLAKARENLDLRATDEHRPGTQLKP

SEQ ID NO: 42797 - protein, 231 aa, Syntrophus aciditrophicus
  REGION 1..231: note = sp|Q2LVL3|QUEC_SYNAS 7-cyano-7-deazaguanine synthase; OS = Syntrophus aciditrophicus (strain SB) OX=56780 GN=queC; PE = 3 SV=1
MSPKKKAVVLLSGGLDSATTMAIAKAENYELYALTFQYGQRHAVELEAARRIAAALGAKEHLFISIDLRIIGGSALTGPFEVPKKQEGEETSAEIPVTYVPARNTIFLSYALAWAEVLQISEIFIGVNAVDYSGYPDCRPEYITAFEAMANLAIKAAVEGTMRVKIRTPLIDLSKADIIRKGMALSVDYGLTHSCYDPLPDGKPCGQCDSCHLRRKGFREAGFDDPAFSET

SEQ ID NO: 42798 - protein, 296 aa, Syntrophus aciditrophicus
  REGION 1..296: note = tr|Q2LUY4|Q2LUY4_SYNAS GMP synthase (Glutamine-hydrolyzing) OS=Syntrophus aciditrophicus (strain SB) OX=56780 GN=SYN_00475 PE=4 SV=1
MQETGRGKGRQYSGNSGFSVQREMQMSRSQKYDILVNFLKSYGSCAVAFSGGVDSTFLLWAAREALGDSVTALTASAPYMPKEEICEAGRIAETIGVRHAVLEIPLNEEIRFNPDDRCFRCKRQLFSAMKAEADQRGIPSVLDGSNLDDLQDYRPGMKALKELKVPSPLLEQRWRKKEIRKIGREIGLPNWQKAPDACLLSRMPYGHEITLRELDRIEKAENYLRESGFRCVRVRSHGNLARIEVGREERRDFFRETILDDVSRALKALGYVFVALELEGYESGNMNRSLLKSASS

SEQ ID NO: 42799 - protein, 232 aa, Syntrophus gentianae
  REGION 1..232: note = tr|A0A1H7WB72|A0A1H7WB72_9DELT 7-cyano-7-deazaguanine synthase OS=Syntrophus gentianae; OX = 43775 GN=queC PE=3 SV=1
MNEQKKAVVLLSGGLDSATTMAIARAEGYELYALTFQYGQRHAIELEAARRLAAALGAKEHLIVSLDLSIIGGSALTGSLEVPKRDSLEEGEAEGIPVTYVPARNTIFLSYALAWAEVLEIAEIFIGVNAVDYSGYPDCRPEYIAAFETMANLATKACVEGKVRLKIRTPLILLSKADIIRKGMALGVDYGMTHTCYDPLPDGRACGQCDSCHLRLKGFREAGFEDPAFSGR

SEQ ID NO: 42800 - protein, 232 aa, Syntrophus sp.
  REGION 1..232: note = tr|A0A1V5DYB3|A0A1V5DYB3_9DELT 7-cyano-7-deazaguanine synthase OS=Syntrophus sp. PtaU1.Bin208 OX=1811713 GN=queC PE=3 SV=1
MNEEKKAVVLLSGGLDSATTMAIAKAEGYELYALTFQYGQRHAIELEAARRIAAAFDAREHLIVSLDLRIIGGSALTGSLEVPKRDVHEEGEDAGIPVTYVPARNTIFLSYALAWAEVLQIAEIFIGVNAVDYSGYPDCRPEYIAAFENMANLATKACVEGKMRLKIRTPLILLSKADIIRKGMALGVDYGMTHTCYDPLPDGRACGRCDSCHLRLKGFREAGFEDPAFSGR

SEQ ID NO: 42801 - protein, 232 aa, Syntrophus sp.
  REGION 1..232: note = tr|A0A1V4Y0X6|A0A1V4Y0X6_9DELT 7-cyano-7-deazaguanine synthase OS=Syntrophus sp. PtaB.Bin138 OX=1811711 GN=queC PE=3 SV=1
MNSDRRAVILLSGGLDSTTTMAIAKAEGYELYALTFQYGQRHAIELEAARRIANALGAKEHLIVPLDLSIIGGSALTGHLEVPKRDSPEEGEGVEIPVTYVPARNTIFLSYALAWAEVLQTGEIFIGVNAVDYSGYPDCRPEYIAAFETMANLATKACTEGGMRLKIRAPLILLSKADIIRKGMALGVDYGMTHTCYDPLPDGRACGRCDSCHLRRKGFREAGYEDPAFSEK

SEQ ID NO: 42802 - protein, 222 aa, unidentified
  source 1..222: note = Tahibacter aquaticus
  REGION 1..222: note = tr|A0A4R6Z9R2|A0A4R6Z9R2_9GAMM 7-cyano-7-deazaguanine synthase OS=Tahibacter aquaticus; OX = 520092 GN=queC PE=3 SV=1
MSKPAVVLVSGGMDSAVVLAIAREQGFSCHALSVAYGQRHVSELDASDRVCALLGAAAHKTVTVDLRSIGGSALTADIAVPEQGGAGIPITYVPARNTIMLSIALGWAEVLGSSDIFCGVNAVDYSGYPDCRPAFIDSFQQLANLATKAGVEGAGIRVHAPLMRMSKADIARQGQRLGVDFAVTVSCYQADEKGRACAHCDACRLRAEGFRDAGMIDPTRYR

SEQ ID NO: 42803 - protein, 465 aa, unidentified
  source 1..465: note = Tamaricihabitans halophyticus
  REGION 1..465: note = tr|A0A4R2RAD1|A0A4R2RAD1_9PSEU 7-cyano-7-deazaguanine synthase in queuosine biosynthesis; OS = Tamaricihabitans halophyticus OX=1262583; GN = EV191_101606 PE=4 SV=1
MPGGVFRFDFAERQTENPRTGLTPLSENDFKSTTDRLESTVQLASGITPRWAEDLLRIARVVYLVDKRAPRSSSPDRWTRDITLSIQVIDPDLWTDAILALINRTLQVMSGDVWRIEVRGGATSIDSKYRLLEVGQISELTLFSGGLDSGSYAAERVANGARGLLLIAHDHADSASTQQTLANAIDQDRRVTRLAQVRDEPKRAAGVRLESSTRTRGFLFVATAIYVASGYGLPEVAIPENGLVAVNPPLSPDRIGSNSTRSTHPWVLERLNEVLRTIGGDIVIRNPYLLLTKGEVCTRARDAGVSPQVIASTVSCGQAPQTRKDFANCGYCYPCLVRRAGLQAAYDQDPTIYQRDLTQLKSKRQRQHLDDVARWLSRSFNVRDLIADMPTPTQPSPRALLPVIKRSQAELRDLVLEHSDRNVPGQRCAHMPGRAPTEPLATEATGPGPARTWDPPASQIDRTAQ

SEQ ID NO: 42804 - protein, 225 aa, unidentified
  source 1..225: note = Tamilnaduibacter salinus
  REGION 1..225: note = tr|A0A2A2I0B5|A0A2A2I0B5_9ALTE 7-cyano-7-deazaguanine synthase OS=Tamilnaduibacter salinus OX=1484056 GN=queC PE=3 SV=1
MSQSVVVIYSGGMDSFTLLHRARRDGYRVHAISFDYGQRHVRELTAARAVCEREGIPHRTVDLAGLGGLLSGSALTDDTPVPEGHYEEDTMKATVVPNRNMILLSLATGYAVTVGADRVWFGAHGGDHAIYPDCRPEFVEKMDAACRVANYEPVQVEAPYLALDKTEILSEGLAMGLDYSQTWTCYNGREAACGRCGSCVERLEAFAHHGVSDPLPYETRHVPEA

SEQ ID NO: 42805 - protein, 228 aa, Tannerella forsythia
  REGION 1..228: note = tr|A0A0E4FPD7|A0A0E4FPD7_TANFO 7-cyano-7-deazaguanine synthase OS=Tannerella forsythia KS16 OX=1307833 GN=queC PE=3 SV=1
MKDEIALVVFSGGQDSTTCLYWAKKHFKEVRALTFLYGQKHRAEVDVAREITRQASVECEVMDVSFVGGLGRNALTDPTLTMDKEKPADSVPNTFVPGRNLFFLSIAAVYASEHAIRHLVTGVSQTDFSGYPDCRDAFVKSLNVTLNLAMDKSFVIHTPLMWLDKAGVWELADELGVFDLIRRETLTCYNGIVGDGCGECPACQLRREGLEKYHREKNKESFSFQQPC

SEQ ID NO: 42806 - protein, 229 aa, Tannerella forsythia
  REGION 1..229: note = tr|A0A1D3UXE9|A0A1D3UXE9_TANFO 7-cyano-7-deazaguanine synthase OS=Tannerella forsythia; OX = 28112 GN=queC PE=3 SV=1
MMKDEIALVVFSGGQDSTTCLYWAKKHFKEVRALTFLYGQKHRAEVDVAREITRQASVECEVMDVSFVGGLGRNALTDPTLTMDKEKPADSVPNTFVPGRNLFFLSIAAVYASEHAIRHLVTGVSQTDFSGYPDCRDAFVKSLNVTLNLAMDKSFVIHTPLMWLDKAGVWELADELGVFDLIRRETLTCYNGIVGDGCGECPACQLRREGLEKYHREKNKESFSFQQPC

SEQ ID NO: 42807 - protein, 221 aa, Tannerella sp.
  REGION 1..221: note = tr|W2C9G9|W2C9G9_9BACT 7-cyano-7-deazaguanine synthase OS=Tannerella sp. oral taxon BU063 isolate Cell 5; OX = 1410950 GN=queC PE=3 SV=1
MKTGTRHDAALVVFSGGQDSTTCLFWAKEHFAEVRALTFLYGQKHREEVNVAQRIARTADVAWDVLDASFIASLGTSALTDTCILMDSEKPAEGPPNTFVPGRNLFFLSMAAVYAAERGIRHLVTGVSETDFSGYPDCRDTFVRSLNVTLNLAMDAQFVIHTPLMWLDKADVWALSDRLGVFDLVRRETLTCYNGVLGDGCGHCPACRLRHEGLERYLARR

SEQ ID NO: 42808 - protein, 220 aa, Tannerella sp.
  REGION 1..220: note = tr|A0A396MYI3|A0A396MYI3_9BACT 7-cyano-7-deazaguanine synthase OS=Tannerella sp. AF04-6; OX = 2293248 GN=queC PE=3 SV=1
MKQKETALVCFSGGQDSTTCLFWALSHFESVEAVCFIYGQKHVKEVDVARKIAAEAGVPFEVLDVSLIGQLTHNSLTDSSMVMDKEKPEDSYPNTFVPGRNMVFLTFAAIKAFQKGIRHLVTGVSQADFSGYPDCRDTFVRSLNVSLNLAMDTHFEIHTPLMWRDKEAVWRLSDELGVFDLVRNETLTCYNGILADGCGECPACKLRKHGLDLYLKHRNG

SEQ ID NO: 42809 - protein, 197 aa, Tanticharoenia sakaeratensis
  REGION 1..197: note = tr|A0A0D6MLU4|A0A0D6MLU4_9PROT 7-cyano-7-deazaguanine synthase OS=Tanticharoenia sakaeratensis NBRC 103193 OX=1231623 GN=Tasa_020_004 PE=3; SV = 1
MRAILLSGGMDSIALGYWKRPEVAITVDYGQRAAEAEMRAAARVSDELGIRHELVRIDCSALGSGDMAGVPALDAAPVPEWWPYRNQMLITFAAMRGIAIGVNELMLGSIASDASHADGRPEFYAMMDKILVGQEGGMRVVAPAIGMTTAELVRASGVPRSLLSWAHSCHFGNLACGACRGCVKHYQVAHEIYGDAY

SEQ ID NO: 42810 - protein, 239 aa, Tanticharoenia sakaeratensis
  REGION 1..239: note = tr|A0A0D6MJ33|A0A0D6MJ33_9PROT 7-cyano-7-deazaguanine synthase OS=Tanticharoenia sakaeratensis NBRC 103193 OX=1231623 GN=queC PE=3 SV=1
MLSSDTALVLFSGGQDSATCLAWALARHAHVETIGFDYGQRNRIELDVRDTVRTRMGALDADWSERLGADHVLDLGILGQISDTAMTRDVTIAMQANGLPNTFVPGRNLLFLTFAAALAYRRGARHIVTGVCETDYSGYPDCRDDTIKAMQVALNLGMDTRFVLQTPLMWRDKAQTWTLAQETGGAALVELIRRETHTCYEGERTHLHDWGYGCGTCPACALRAEGWKRFRAQSGIAAS

SEQ ID NO: 42811 - protein, 238 aa, unidentified
  source 1..238: note = Tardiphaga robiniae
  REGION 1..238: note = tr|A0A161QRG2|A0A161QRG2_9BRAD 7-cyano-7-deazaguanine synthase OS=Tardiphaga robiniae; OX = 943830 GN=queC PE=3 SV=1
MSDTFPDQTALVLFSGGQDSATCLAWALARFNRVEMLGFSYGQRHAIELDSRDKLLAGVKALNPGWAAKLGDSHTLDIPTLSAISDTALTRDVAIEMGADGLPNTFVPGRNLVFLTFAAALAYRRGITHIIGGMCETDYSGYPDCRDDTIKALQQALNLGMAKNFTLHTPLMWRDKAATWALAHELGGQGLVDLIREHSHTCYLGERGALHDWGYGCGKCPACELRAKGWRAFAATAV

SEQ ID NO: 42812 - protein, 238 aa, unidentified
  source 1..238: note = Tardiphaga sp.
  REGION 1..238: note = tr|A0A2U0U1U4|A0A2U0U1U4_9BRAD 7-cyano-7-deazaguanine synthase OS=Tardiphaga sp. OV697; OX = 2135487 GN=queC PE=3 SV=1
MTETFPNETALVLFSGGQDSATCLAWALARFRRVEMLGFAYGQRHAIELDSRDKLLAGVKALNADWAAKLGDSHTLDIPTLSDISETALTRDVAIEMGDDGLPNTFVPGRNLVFLTFAAALAYRRGITHIIGGMCETDYSGYPDCRDDTIKALQQALNLGMARNFTLHTPLMWRDKAATWALADELGGQGLVDLIREHSHTCYLGERGALHEWGYGCGKCPACELRAKGWRAFAATAV

SEQ ID NO: 42813 - protein, 238 aa, unidentified
  source 1..238: note = Tardiphaga sp.
  REGION 1..238: note = tr|A0A5A7W1E6|A0A5A7W1E6_9BRAD 7-cyano-7-deazaguanine synthase OS=Tardiphaga sp. P9-11; OX = 2024614 GN=queC PE=3 SV=1
MSDTVQDQTALVLFSGGQDSATCLAWALARFKRVEMLGFAYGQRHAIELDSRDKLLAGVKALNANWAAKLGDSHTLDIPTLSAISDTALTRDVAIEMGADGLPNTFVPGRNLVFLTFAAALAYRRGITHIIGGMCETDYSGYPDCRDDTIKALQQALNLGMAKNFTLHTPLMWRDKAATWALAHELGGQGLIDLIREHSHTCYLGERGALHDWGYGCGKCPACELRAKGWRAFAATAV

SEQ ID NO: 42814 - protein, 223 aa, Tatlockia micdadei
  REGION 1..223: note = tr|A0A098GAM4|A0A098GAM4_TATMI 7-cyano-7-deazaguanine synthase OS=Tatlockia micdadei; OX = 451 GN=queC PE=3 SV=1
MKKAVVLLSGGLDSTTCLAIAQEKGFACYALSFAYGQRHSAELAAAYRVAKHFSVAEHRIIDLDIGQLGGSALTDKSIQVPDYSGSPEIPVTYVPARNTVFLSYALGFAEVIGARDIFIGVSSVDYSHYPDCRPEYIAAFQTLANLATKAGVEGDSFSLHAPLQHLSKAETILVGSKLGVDYALTVSCYQATESGKACGRCDSCRFRKQGFEAAQLPDPTFYV

SEQ ID NO: 42815 - protein, 231 aa, Tatumella citrea
  REGION 1..231: note = tr|A0A1Y0LI37|A0A1Y0LI37_TATCI 7-cyano-7-deazaguanine synthase OS=Tatumella citrea; OX = 53336 GN=queC PE=3 SV=1
MKIAVVVFSGGQDSTTCLIQALNQYDEVHCVTFDYGQRHRQEIEVARDLCQQLGARAHKVLDVTLLNELAISSLTRDNIPVPAYDPDGNGLPSTFVPGRNILFLTLASIYAYQVNAEAVITGVCETDFSGYPDCRDDFVKALNTAVQLGMARDVRFETPLMWLNKAETWALADYWQQLPLIRHSTLTCYNGIQGDGCGECAACHLRAKGLAEYQQAPQAVMDAMKSKTGLR

SEQ ID NO: 42816 - protein, 231 aa, Tatumella morbirosei
  REGION 1..231: note = tr|A0A095TEU7|A0A095TEU7_9GAMM 7-cyano-7-deazaguanine synthase OS=Tatumella morbirosei; OX = 642227 GN=queC PE=3 SV=1
MKSAVVVFSGGQDSTTCLIQALNQYDEVHCVTFDYGQRHRQEIEVARKLSQQLGARAHKVLDVTLLNELAISSLTRDNIPVPAYDPDGNGLPSTFVPGRNILFLTLASIYAYQVNAEAVITGVCETDFSGYPDCRDDFVKALNTAVQLGMARDVRFETPLMWLNKAETWALADYWQQLPLIRNSTLTCYNGVQGDGCGECAACHLRAKGLAEYQQSPKAIMNAMKSKTGLS

SEQ ID NO: 42817 - protein, 231 aa, Tatumella ptyseos
  REGION 1..231: note = tr|A0A085JAR6|A0A085JAR6_9GAMM 7-cyano-7-deazaguanine synthase OS=Tatumella ptyseos ATCC 33301 OX=1005995 GN=queC PE=3 SV=1
MKSAVVVFSGGQDSTTCLIQALNQYDEVHCVTFDYGQRHRQEIDVARQLSQQLGACAHKVLDVTLLNELAISSLTRDNIPVPAYSPDSNGLPSTFVPGRNILFLTLASIYAYQVDAEAVITGVCETDFSGYPDCRNDFVKALNHAVELGMARNVRFETPLMWLNKAETWALADYWKQLPLVRTATLTCYNGIQGDGCGECAACHLRARGLEDYQQNAHAVMDAMKQKTGLA

SEQ ID NO: 42818 - protein, 231 aa, Tatumella ptyseos; identical to SEQ ID NO: 42817
  REGION 1..231: note = tr|A0A2X5PAP9|A0A2X5PAP9_9GAMM 7-cyano-7-deazaguanine synthase OS=Tatumella ptyseos; OX = 82987 GN=queC PE=3 SV=1

SEQ ID NO: 42819 - protein, 231 aa, Tatumella sp.
  REGION 1..231: note = tr|A0A2G8BSI7|A0A2G8BSI7_9GAMM 7-cyano-7-deazaguanine synthase OS=Tatumella sp. OPLPL6; OX = 1928657 GN=queC PE=3 SV=1
MKKAVVVFSGGQDSTTCLVQAIQHYDEVHCITFDYGQRHQQEIDIAKQLTQRLGVAAHKVMDVTLLNELAISSLTRDNIPVPGYQPNATELPSTFVPGRNILFLTLASIYAYQVEAEAVITGVCETDFSGYPDCRDEFVKALNQAVVLGMAKDVRFETPLMWLNKAETWALADYLGQLPLIKDHTLTCYNGIAGSGCGECAACHLRAKGLEQYLNAPDETMRALKSKNHLS

SEQ ID NO: 42820 - protein, 222 aa, Taylorella asinigenitalis
  REGION 1..222: note = tr|G4QDN0|G4QDN0_TAYAM 7-cyano-7-deazaguanine synthase OS=Taylorella asinigenitalis (strain MCE3); OX = 1008459 GN=queC PE=3 SV=1
MENKALVIFSGGQDSTTCLLQAIEKYGVSNVETITFLYGQRHDIELQKAREIVTELGVKQTILDLSVIKGITSNALMEEGAEIGQNEDGLPNTFVDGRNALFILYACIYAKSQGIRNIVIGVCETDFSGYPDCRDIFVKSMNVSMNLAMNFDFVIHTPLMWLTKAQTWELADKLGYLEFVRNRTHTCYEGVEGGCGKCPSCILRNRGLEEYLASKDESSKNV

SEQ ID NO: 42821 - protein, 222 aa, Taylorella asinigenitalis
  REGION 1..222: note = tr|I7ILK8|I7ILK8_9BURK 7-cyano-7-deazaguanine synthase OS=Taylorella asinigenitalis 14/45 OX=1091495; GN = queC PE=3 SV=1
MENKALVIFSGGQDSTTCLLQAIEKYGVSNVETITFLYGQRHDIELQKAREIVVELGVKQTILDLSVIKGITSNALMEEGAEIGQNEDGLPNTFVDGRNALFILYACIYAKSQGICNIVIGVCETDFSGYPDCRDIFVKSMNVSMNLAMNFDFVIHTPLMWLTKAQTWELADKLGYLEFVRNRTHTCYEGVEGGCGKCPSCILRNRGLEEYLASKDESSKNV

SEQ ID NO: 42822 - protein, 222 aa, Taylorella equigenitalis
  REGION 1..222: note = tr|I7JKP3|I7JKP3_9BURK 7-cyano-7-deazaguanine synthase OS=Taylorella equigenitalis 14/56 OX=1091497; GN = queC PE=3 SV=1
MSEKALVVFSGGQDSTTCLLQAIENFGVGNVKAITFIYGQRHEIELKKAREIAIDLGIEQTILDLSVMKSITTNALMQKGAEIKTDESGLPNTFVDGRNALFLLYSCIYAKSQGIKNIVIGVCETDFSGYPDCRDIFVKSMNVSMNLAMDYDFVIHTPLMWLTKAQTWELADKLGRLDYVRTRTHTCYEGVEGGCGNCPSCVLRNRGLEEYLNSKNESSKNV

SEQ ID NO: 42823 - protein, 230 aa, Telmatospirillum siberiense
  REGION 1..230: note = tr|A0A2N3PQT2|A0A2N3PQT2_9PROT 7-cyano-7-deazaguanine synthase OS=Telmatospirillum siberiense OX=382514 GN=queC PE=3 SV=1
MSQKPKAVVLLSGGLDSATCLAIARDRGFAPLAISFRYGQRHLHELAAAARLAKALGAQRHMVADIDLRAFGGSALTADIAVPKDRAEGEMSSGIPITYVPARNTIFLSFALALAEVEQAQDIYIGVNAVDYSGYPDCRPDFIAAFEKMANLATKAAVGDGRRLTVHTPLITLSKAEIIKTGLKLGVDYGMTTSCYDPTPEGLACGHCDACKLRLKGFAEAGLTDPAPYA

SEQ ID NO: 42824 - protein, 199 aa, Tenacibaculum sp.
  REGION 1..199: note = tr|A0A2G1BVH8|A0A2G1BVH8_9FLAO 7-cyano-7-deazaguanine synthase OS=Tenacibaculum sp. 4G03; OX = 2045443 GN=CSC81_06270 PE=3 SV=1
MANVKKAVLLSGGIDSICLTYGIMPDIAYTIDYGQTVSKRELYVSKYICEKLDIEHKIIKIDCRSLGSGTLANSENLKLSPSDEWWPFRNQLLITFAAMQAIKDEVKELYLSSVKSDGFHRDGTKEFYKLINNLVSYQEGQIKVICPTLDYYSHELALKYKVPINLLSIAHSCHISNFACGKCSGCIKQLKVRYELKIA

SEQ ID NO: 42825 - protein, 257 aa, unidentified
  source 1..257: note = Tengunoibacter tsumagoiensis
  REGION 1..257: note = tr|A0A402AAC1|A0A402AAC1_9CHLR 7-cyano-7-deazaguanine synthase OS=Tengunoibacter tsumagoiensis OX=2014871 GN=queC PE=3 SV=1
MSKSQSRNHAVLIVSGGMDSCVLSYYYAAAGFDLHLLSFNYGQKHLKELTYAKRYVTHLRERFGQGPRAIQVSYDIIDLPIARLLTNSDSALINADLEMPKGHYTDDSMKATVVPYRNPNMLLQAATVAWNEHASVVAFAAHQGDYSQYPDCREVFVDSFNAMLAAAMNSEEIKVESPFMRFTKAQIAALGSSLSVPFELTWSCYEGGNNGLGDQHCGSCGTCVERYEAFKLAGIPDPTVYANNPERFLAIPGQSNL

SEQ ID NO: 42826 - protein, 455 aa, unidentified
  source 1..455: note = Tengunoibacter tsumagoiensis
  REGION 1..455: note = tr|A0A402A7I3|A0A402A7I3_9CHLR Uncharacterized protein OS=Tengunoibacter tsumagoiensis OX=2014871; GN = KTT_49730 PE=4 SV=1
MKSDFDYTYEYQSIHDELKKGHVLRVDHWTGEARNLNIALWDRDLLLRTTADEVSSLIADLSDLAVAVYVADHLSERRKKRTTRLLINLPIRSVELRERSTFKQELRDLLYWFTEDLWSFQFSTYRTNGRQSELHKRLISDYPKSSRRVALWSGGLDALAGLYLQLVQEPETDYTLVSTGSSLMMGGKQKKVFQQMNEIFPGRLKLIQLPIRLGKKEVKTEQGNRTRGFVFLLLGALCALQEMQHTLYIHENGIGAINLPFRDCEVGLDHSRSVHPLTLARMGTFLEKLLGHPFSFENPFLGTTKAEMCQRLLREHPEIVFSTMSCDHWHREIPLQCGYCSSCLLRRQAIAVSGIEDTLSYRITAAKDRKRQKTDGVHLRAMLAQVDTLRDIRDTKEGDIWGALIAKYPVLDDIVRQDERAEKQQQVKNQLLHLYQTYVKEWDQVSPLIQEDMHL

SEQ ID NO: 42827 - protein, 219 aa, Tepidibacter formicigenes
  REGION 1..219: note = tr|A0A1M6NVM0|A0A1M6NVM0_9FIRM 7-cyano-7-deazaguanine synthase OS=Tepidibacter formicigenes DSM 15518 OX=1123349 GN=queC PE=3 SV=1
MNKEKAVVVFSGGQDSTTCLFWAKKKFKEVIAVSFDYNQKHKFELECAKDICKKYNVEHHILDLGLLNQLAPNSLTRVDIEVDKETPKDSLPNSFVDGRNMLFLTFVGVFAKQRGINNIITGVSQSDFSGYPDCRDVFIKSLNVTLNLAMDYQFEIHTPLMWINKAQTWELADELEVLDIIKNETLTCYNGIIGDGCGECPACKLRMNGYIEYMKSKEK

SEQ ID NO: 42828 - protein, 219 aa, Tepidibacter thalassicus
  REGION 1..219: note = tr|A0A1M5QNH1|A0A1M5QNH1_9FIRM 7-cyano-7-deazaguanine synthase OS=Tepidibacter thalassicus DSM 15285 OX=1123350 GN=queC PE=3 SV=1
MNKEKAVVVFSGGQDSTTCLFWAKKRFKEVIAVSFDYNQKHKLELECAKDICKKYNVEHHILDLGLLNQLAPNSLTRVDIKVDKEAPKEGLPNSFVDGRNMLFLTFVAVFAKQRGINNIITGVSQSDFSGYPDCRDVFIKSLNVTLNLAMDYQFEIHTPLMWIDKAETWKLADDLGVLDIIKKETLTCYNGIKGDGCGECPACKLRMNGYIEYMKSKNE

SEQ ID NO: 42829 - protein, 249 aa, unidentified
  source 1..249: note = Tepidicaulis marinus
  REGION 1..249: note = tr|A0A081B8Y4|A0A081B8Y4_9RHIZ 7-cyano-7-deazaguanine synthase OS=Tepidicaulis marinus; OX = 1333998 GN=queC PE=3 SV=1
MTSKASPTESPAKDGAKRALVLFSGGQDSTVCLAWALQRFEAVETVGFSYGQAHSVEMTCREKVRAEIARHFPGWASRLGPDHVLDLAELGRISETALTSDMEIEMGENGLPNTFVPGRNLLFLTYAAALGYRRGAQALVGGMCETDYSGYPDCRAATMKAMESALSLGMDKAYTIETPLMWLDKAATWALAEKLGGETLIEIIREQTHTCYRGERTHRHEWGYGCNDCPACALRRQGYEAWMKRQAHV

SEQ ID NO: 42830 - protein, 704 aa, Tepidicella xavieri
  REGION 1..704: note = tr|A0A4R6U7W9|A0A4R6U7W9_9BURK 7-cyano-7-deazaguanine synthase in queuosine biosynthesis; OS = Tepidicella xavieri OX=360241 GN=DFR43_11051 PE=4 SV=1
MQDKRYILCGNVSAKGISEDPARDLRLRLSGRAGFGNITLRIEDVHTKMFRGVPPLFHDLLEIATYVYSADQAVRRGADDVDTFGNGWRRDLHFVVPVRNPDFWNRRDVREALCSTLGFLSDDQYQFDFVRLDQDHQFQEYLEFNDTQQMYGMPEQVVMFSGGLDSLAGAIDEVVNQRRRVVLVTHKSTSKLNKRHRVLEEMLAAKSGDNVPHRITVRVHKTKGLNHEYTQRSRSFLYVSIGATIARMLGLKSVRFYENGVISLNLPVCAQVVGGRATRTTHPRVMKGFQDIITLVAGEPFIVENPYIWKTKADVVKVITNAGCHDLIKHSMTCTHTWEMSNQHTHCGGCSQCIDRRFAVLAAKADQHDPVEHYKVDVFTQSRKKDEDKIMAAAYLERANQVKNLTGVADFISSYPDVGRVLKYLNTSAGQAAQRVFDLYKRHAEEVTGAVDELGRRYFTQIRERSLPGDCLLRTVYESASVNSIPAVVSVEKQPENFFRKRGAVWEVRFQGRNTICLLNVDKGAEYINLLLAFPERELSVYEIACGSAANAVDLPTNSGVAPEEIEDGFQVVTGAPLTDAGDVADRRALREWQQRARELLGEIGEARDSGDHARVEEIEEEMAFLTKALEGGKGLGGRQRKAGDKRKNVRDAFRNAVDRAIKQIEKYDKPLAEHLKASIKHGNEVVYRPGMPITWEVRPIVNT

SEQ ID NO: 42831 - protein, 227 aa, unidentified
  source 1..227: note = Tepidiphilus thermophilus
  REGION 1..227: note = tr|A0A0K6IMZ1|A0A0K6IMZ1_9PROT 7-cyano-7-deazaguanine synthase OS=Tepidiphilus thermophilus OX=876478 GN=queC PE=3 SV=1
MKDVSSRNAVVLLSGGLDSSTVLAIARAEGYRPYALSVAYGQRHDAELAAAARVARALGAVEHRVARVDLGVFGGSALTDEAIAVPETPTEGIPVTYVPARNTVLLSVALAWAEVLGARDLFIGVNAVDYSGYPDCRPEFIAAFEALANVATKAGVEGARFRVHAPLMHLSKAEIIRRGLELGVDYALTVSCYQADEEGRACGRCDACRLRAQGFAAAGVPDPTRYR

SEQ ID NO: 42832 - protein, 224 aa, unidentified
  source 1..224: note = Terasakiispira papahanaumokuakeensis
  REGION 1..224: note = tr|A0A1E2V6J4|A0A1E2V6J4_9GAMM 7-cyano-7-deazaguanine synthase OS=Terasakiispira papahanaumokuakeensis OX=197479 GN=queC PE=3 SV=1
MSTQPAPARAVVIYSGGMDSFTVLHQALAEGYDVYPVSFHYGQRHAKELECARAVCESLKLKHQVIDLRSITPLIDNSALTGDIEVPQGDYAPDNLATTVVPNRNMIMLSLAVGYAVNIEAGICFYGAHGGDHVIYPDCRPEFVEAMNSVSQIANLQPVKIHAPFLLDDKASILRRGLDLGLDYSQTWTCYQGEAKACGQCSACRERLGAFAACHITDPIAYQA

SEQ ID NO: 42833 - protein, 237 aa, Teredinibacter sp.
  REGION 1..237: note = tr|A0A509DWW6|A0A509DWW6_9GAMM 7-cyano-7-deazaguanine synthase OS=Teredinibacter sp. ISS155 OX=2584524 GN=queC PE=3 SV=1
MANTSDDNTMTKPKAVVLTSGGLDSTTVIAIAQSQGYECYSLSFDYGQRHRAELNAAQKVAESMQVTEHKVVNLDLRTIGGSALTDDQISVPDAASEASTDIPVTYVPARNTVFLSIALGWAEVLGANAIFIGVNAVDYSGYPDCRPQFIEAFQQMANLATKAGVEGAGLEIHTPLIHMTKAEIIQMGISLGVDYAKTVSCYSANSAGEACGKCDSCSLRAKGFADAGVKDPTHYSV

SEQ ID NO: 42834 - protein, 224 aa, Teredinibacter turnerae
  REGION 1..224: note = tr|C5BQS5|C5BQS5_TERTT 7-cyano-7-deazaguanine synthase OS=Teredinibacter turnerae (strain ATCC 39867 / T7901) OX=377629 GN=queC PE=3 SV=1
MSKKAVVLVSGGLDSATVLAMAKDQGYECFTLSFDYGQRHRAELQAAERVAQAMGAAQHKVVSLDLRTIGGSALTDDSISVPEGETSGIPVTYVPARNTVFLSIALGWAEVVGAQAIFIGVNAVDYSGYPDCRPEYIKAYQAMADLATKAGVEGRGVAIKTPLIELSKADIICHGHALHVDYALTVSCYQADDDGRACGKCDSCRLRRRGFLDAGVEDSTRYAG

SEQ ID NO: 42835 - protein, 232 aa, Terrabacter aerolatus
  REGION 1..232: note = tr|A0A512D5E4|A0A512D5E4_9MICO 7-cyano-7-deazaguanine synthase OS=Terrabacter aerolatus; OX = 422442 GN=queC PE=3 SV=1
MGRKAVVLLSGGLDSTTVLAVAKDQGFEPYAISFRYGQRHVVELEAARRVAQAAGVERHVVCDIDLRIFGGSALTADVDVPKHQSAEELSEDDIPITYVPARNTVFLSLALAYAEVVGATDIFIGVNALDYSGYPDCRPEYIVSYERMANLATRAGVEGNELKIHTPLISLTKAETVELGTRLRVDYSLTLSCYDPDDQGRACGHCDSCLLRLRGFADAGLVDPVIYQEATA

SEQ ID NO: 42836 - protein, 219 aa, Terribacillus aidingensis
  REGION 1..219: note = tr|A0A285PAK2|A0A285PAK2_9BACI 7-cyano-7-deazaguanine synthase OS=Terribacillus aidingensis OX=586416 GN=queC PE=3 SV=1
MKKEKAIVVFSGGQDSTTCLFWAMQQYEEVEAVTFNYNQRHSLEIEVAEQIAKEQGIKHHVLDMSLLNQLAPNALTRDDIEIEEQEGELPSTFVPGRNLVFLSFAAILAHQVGAKHLVTGVCETDFSGYPDCRDVFVKSLNVSLNLSMDKDFVIHTPLMWLDKAETWELADQLGQLDYVKENTLTCYNGVIAEGCGECPACKLRQNGLDQYEAKKAAQV

SEQ ID NO: 42837 - protein, 219 aa, Terribacillus goriensis
  REGION 1..219: note = tr|A0A075LGP9|A0A075LGP9_9BACI 7-cyano-7-deazaguanine synthase OS=Terribacillus goriensis; OX = 386490 GN=queC PE=3 SV=1
MKKDKAIVVFSGGQDSTTCLFWAMEQFEEVEAVTFNYNQRHSLEIEVAEQIAKEQGIRHHVLDMSLLNQLAPNALTRDDIEIEQQEGELPSTFVPGRNLVFLSFAAILAHQVGAKHLVTGVCETDFSGYPDCRDIFVKSLNVSLNLSMDKDFVIHTPLMWLDKAETWEMADQLGQLDYVKEKTLTCYNGIVAEGCGECPACKLRQNGLDQYEAKKAAGV

SEQ ID NO: 42838 - protein, 219 aa, Terribacillus halophilus
  REGION 1..219: note = tr|A0A1G6RTU9|A0A1G6RTU9_9BACI 7-cyano-7-deazaguanine synthase OS=Terribacillus halophilus OX=361279 GN=queC PE=3 SV=1
MKKGKAIVVFSGGQDSTTCLFWAMEQFEEVEAVTFNYNQRHSLEIEVAEQIAKEQGIRHHVLDMSLLNQLAPNALTRDDIEIEQEEGELPSTFVPGRNLVFLSFAAILAHQVGAKHLVTGVCETDFSGYPDCRDIFVKSLNVSLNLSMDKDFVIHTPLMWLDKAETWEMADQLGQLEYVKEKTLTCYNGIVAQGCGDCPACKLRQNGLDQYEAKKAAKV

SEQ ID NO: 42839 - protein, 219 aa, Terribacillus saccharophilus
  REGION 1..219: note = tr|A0A268HDQ9|A0A268HDQ9_9BACI 7-cyano-7-deazaguanine synthase OS=Terribacillus saccharophilus OX=361277 GN=queC PE=3 SV=1
MKKGKAIVVFSGGQDSTTCLFWAMEQFEEVEAVTFNYNQRHSLEIEVAEQIAKEQGIRHHVLDMSLLNQLAPNALTRDDIEIEQQEGELPSTFVPGRNLVFLSFAAILAHQVGAKHLVTGVCETDFSGYPDCRDIFVKSLNVSLNLSMDKDFVIHTPLMWLDKAETWELADQLGQLNYVKEKTLTCYNGIVAEGCGECPACKLRQNGLDQYEAKKAAQV

SEQ ID NO: 42840 - protein, 219 aa, Terribacillus saccharophilus
  REGION 1..219: note = tr|A0A268A814|A0A268A814_9BACI 7-cyano-7-deazaguanine synthase OS=Terribacillus saccharophilus OX=361277 GN=queC PE=3 SV=1
MKKGKAIVVFSGGQDSTTCLFWAMEQFEEVEAVTFNYNQRHSLEIEVAEQIAKEQGIRHHVLDMSLLNQLAPNALTRDDIEIEQQEGELPSTFVPGRNLVFLSFAAILAHQVGAKHLVTGVCETDFSGYPDCRDIFVKSLNVSLNLSMDKDFVIHTPLMWLDKAETWEMADQLGKLDYVKEKTLTCYNGIVAEGCGECPACKLRQNGLDQYEAKKAEHV

SEQ ID NO: 42841 - protein, 219 aa, Terribacillus sp.
  REGION 1..219: note = tr|A0A268BMP3|A0A268BMP3_9BACI 7-cyano-7-deazaguanine synthase OS=Terribacillus sp. 7520-G OX=2025389 GN=queC PE=3 SV=1
MKKGKAIVVFSGGQDSTTCLFWAMEQFEEVEAVTFNYNQRHSLEIDVAEQIAKEQGIRHHVLDMSLLNQLAPNALTRDDIEIEQQEGELPSTFVPGRNLVFLSFAAILAHQVGAKHLVTGVCETDFSGYPDCRDIFVKSLNVSLNLSMDKEFVIHTPLMWLDKAETWELADQLGQLDYVKEKTLTCYNGIIADGCGECPACKLRKNGLDQYEAKKAERA

SEQ ID NO: 42842 - protein, 231 aa, unidentified
  source 1..231: note = Terriglobus albidus
  REGION 1..231: note = tr|A0A5B9E915|A0A5B9E915_9BACT 7-cyano-7-deazaguanine synthase OS=Terriglobus albidus; OX = 1592106 GN=queC PE=3 SV=1
MATTSNRPRAVVSLSGGMDSVVCAALATRDFDAYAVHFSYGQRTEARELLSARQAAELLGFKDFLHLKIDLFRKIGGSALTDDSIAVPDAPEEEASIGQQVPVTYVPFRNAHFLSAAVSWAEVLGAKTVFIGAVEQDSSGYPDCRPVYYEAFNQLIQTGTKEGDIRIVTPLIHLKKSEIVRLGVELGAPFHVSWSCYSGQDAACGTCESCVLRLRAFREAGAADPIPYAAR

SEQ ID NO: 42843 - protein, 232 aa, Terriglobus roseus
  REGION 1..232: note = tr|A0A1H4PV54|A0A1H4PV54_9BACT 7-cyano-7-deazaguanine synthase OS=Terriglobus roseus; OX = 392734 GN=queC PE=3 SV=1
MSSQIKPREKAVVCLSGGMDSTVCAALAARDYDAYALHFSYGQRTEARELLSARGVAEALGFKQFLPLRMDLFRQIGGSALTDASIAVPDAPAEESAIGDAIPVTYVPFRNAHFLSAAVSWAEVIGAKVILIGAVEQDSSGYPDCRPAYYDAFNALIRQGTAVGDIRVETPLIHMRKREIVALGVELGAPLHVSWSCYSGEDFACGVCESCVLRLRAFREAGTTDPIPYAQS

SEQ ID NO: 42844 - protein, 232 aa, Terriglobus roseus
  REGION 1..232: note = tr|I3ZLQ1|I3ZLQ1_TERRK 7-cyano-7-deazaguanine synthase OS=Terriglobus roseus (strain DSM 18391 / NRRL B-41598 / KBS 63) OX=926566 GN=queC PE=3 SV=1
MSSQANPRDKAVVCLSGGMDSTVCATLAARDYDAYALHFSYGQRTEARELRSARGVAEALRFKQFLPLRMDLFRQIGGSALTDTSIAVPDAPAEDSTIGDAIPVTYVPFRNAHFLSAAVSWAEVIGAKVILIGAVEQDSSGYPDCRPAYYDAFNALIRQGTAVGDIRVETPLIQMRKRDIVALGVELGAPLHVSWSCYSGEEFACGVCESCVLRLRAFREAGTTDPIPYAQT

SEQ ID NO: 42845 - protein, 236 aa, Terriglobus saanensis
  REGION 1..236: note = tr|E8UYV5|E8UYV5_TERSS 7-cyano-7-deazaguanine synthase OS=Terriglobus saanensis (strain ATCC BAA-1853 / DSM 23119 / SP1PR4) OX=401053 GN=queC PE=3 SV=1
MTATTSSPTEDSVRERAVICLSGGMDSTVCATLASRDFDVYALHFSYGQRTEARELASARAVAEYIGAKEFLPLRMDLFRQIGGSALTDTSIAVPNAPEDEATIGHEVPVTYVPFRNAHFLSAAVSWAEVLGAPTVSIGAVEQDSSGYPDCRPAYYDAFNALIQQGTKEGNIRVITPLIHLKKAEIVRLGVELHAPLHVSWSCYSGEEKACGVCESCSLRLRAFKEAGEKDPIPYV

SEQ ID NO: 42846 - protein, 223 aa, unidentified
  source 1..223: note = Testudinibacter aquarius
  REGION 1..223: note = tr|A0A4R3YEB3|A0A4R3YEB3_9PAST 7-cyano-7-deazaguanine synthase OS=Testudinibacter aquarius OX=1524974 GN=queC PE=3 SV=1
MQNNTKKALVIFSGGQDSTTCLLQAIHHYGKENVEAVTFQYGQRHAIELEKAQWIANDLGVKQTLIDTSVIKAITTNALMDQSAVISQNADEMPNTFVDGRNALFLLYAAIYAKGQGIHDIITGVCETDFSGYPDCRDVFVKSMNVTLNLAMDYNFNIQTPLMYLDKKQTWALADQLGGLDYVRQHTHTCYLGVEGGCHECPSCKLREKGLNEYLAEKEVRNV

SEQ ID NO: 42847 - protein, 222 aa, Thalassobacillus cyri
  REGION 1..222: note = tr|A0A1H4GWD0|A0A1H4GWD0_9BACI 7-cyano-7-deazaguanine synthase OS=Thalassobacillus cyri; OX = 571932 GN=queC PE=3 SV=1
MENNKAVVVFSGGQDSTTCLFWALERFDEVEAVTFHYNQRHEEEVEVAKAITDRLNVNHRVLDMSLLSQLSPNALTHKEMDVEEGKDGSLPSTFVPGRNLLFLSFAGIVAQQTGSKHIITGVCETDFSGYPDCRDVFIKSLNVTLNLSMDESFVIHTPLMWLDKAETWQLADELKAFEFVRDHTLTCYHGVIGSGCGECPACKLRNQGLRKYLQQCEGADIR

SEQ ID NO: 42848 - protein, 220 aa, unidentified
  source 1..220: note = Thalassobium sp.
  REGION 1..220: note = tr|A0A2G2PUL7|A0A2G2PUL7_9RHOB 7-cyano-7-deazaguanine synthase OS=Thalassobium sp.; OX = 2030825 GN=queC PE=3 SV=1
MAEKAVVIYSGGMDSFTILNKAKAEGYELYALTFDYGQKHRKEIAFATRVCEELGINHRIIDITAINQLLQSSSLTSDIEIPEGHYEAANMKSTVVPNRNMILLSLAIGYAVDIGASKVFYGAHSGDHAIYPDCRPDFVHAMNKVAKLANYEPVDIVTPYLNSDKTEILADGLKMGLDYGKSWTCYNGREKACGKCGSCVERLEAFAHNHATDPLAYENS

SEQ ID NO: 42849 - protein, 220 aa, unidentified
  source 1..220: note = Thalassobium sp.
  REGION 1..220: note = tr|A0A2G2AGX1|A0A2G2AGX1_9RHOB 7-cyano-7-deazaguanine synthase OS=Thalassobium sp.; OX = 2030825 GN=queC PE=3 SV=1
MSEKAVVIYSGGMDSFTILNKAKQEGYELYALTFDYGQKHKKEIQYAISVCQELKVPHRIIDITAINQLLQSSSLTSDIEIPEGHYEAANMKSTVVPNRNMILLSLAIGYAVDIGAPKVFYGAHSGDHAIYPDCRPDFVHAMNRVAKLANYEPVDIVTPYLNGDKTEILKDGLAMGLDYGKTWTCYNGREKACGKCGSCVERLEAFTLNNATDPLPYESV

SEQ ID NO: 42850 - protein, 230 aa, unidentified
  source 1..230: note = Thalassobius activus
  REGION 1..230: note = tr|A0A0P1J9J9|A0A0P1J9J9_9RHOB 7-cyano-7-deazaguanine synthase OS=Thalassobius activus; OX = 1715691 GN=queC PE=3 SV=1
MKTLVICSGGLDSVTLAYKVAQERELVGLISFDYGQRHKKETDFAAKAGKALGVPHDLIDMRAIGGFLSGSALTDDLDVPDGHYAEDNMKVTVVPNRNAIMLAVAFGVAAAKGAQSVGTAVHGGDHFIYPDCRPGFINAFQSMQDAALEGYADVQLYTPFVNISKADIVTEGARAEVPFEDTWSCYKGGALHCGRCGTCVERLEAFHLAGVEDPTEYEDRDYWKTVVGSV

SEQ ID NO: 42851 - protein, 225 aa, Thalassobius mediterraneus
  REGION 1..225: note = tr|A0A0P1GM26|A0A0P1GM26_9RHOB Uncharacterized protein OS=Thalassobius mediterraneus OX=340021; GN = TM5383_00597 PE=4 SV=1
MTRCHFYLDPSEVPDVTSAQELHVHLYGGFAPKPGSAAIGKQVADLFHRFGVQPSTRVVDLISIALAETAADRFVLRSNSETNWSREIIVRLPLAWPEPWRKVEAELAATLNFLSGDVWSFEFERGGKEPPIKSELNSYKRSFGLQKGDCVALFSGGLDSTIHAIQALAEGRKPTLVSHGYRGDQEVQNDIASRLPKQLEHLSVNIWTTSSRTSEDSMRARSFCS

SEQ ID NO: 42852 - protein, 446 aa, Thalassobius sp.
  REGION 1..446: note = tr|A0A2E9G6G1|A0A2E9G6G1_9RHOB Uncharacterized protein OS=Thalassobius sp. OX=1979401 GN=CMO01_19195 PE=4; SV = 1
MIAFNIIFRDGAEDKFTVSESTHEKNIFIPAEDAHQSDKTLSENIYRIFEQKKLTPSDEALELLNAAVSVYTADQLVSRDTYGFDNWSRYFKLYLPVVDHEKWQTALEDLQNALNFLTGDYWEIFLRKRSAKEKNDNAHVVKTVSKVSLLSGGLDSFIGVTDLLAEGNDIAVVGHHKSQGYENSAQESLIQTLRKEYSDKHIEEFLFNAQPVQKHNKYGKESSSRARSILFIGLGIAVASAYGNEIPLYIPENGLISLNIPLTSSRIGSSSTRTTHPHFLNTLGKVLKTIGVGNEIINPYQFLTKGEMIKNSKNRALIEKYYNETVSCAHPNAVHINIARKNDEKHCGYCTPCIIRRAALKHANLDRDDHYVFKINQTQPPYTDDIGRDYRAFQMALSRLKNNKPNLSFHVLRSGPLPNKKIDLSKYIGIYDRGMKEVDNFLNAQS

SEQ ID NO: 42853 - protein, 233 aa, Thalassococcus halodurans
  REGION 1..233: note = tr|A0A1H5TKW2|A0A1H5TKW2_9RHOB 7-cyano-7-deazaguanine synthase OS=Thalassococcus halodurans OX=373675 GN=queC PE=3 SV=1
MKTLVICSGGLDSVSLAHITAETRELTRLVSFNYGQRHLKELEFAAEAAERLGVPHTVIDLRPVGAALTGSALTDEIDVPDGHYAEETMKITVVPNRNAIMLTVAYGIAAANGDQAVATAVHGGDHFIYPDCRPDFVEAFDKMQRFALDGYADVSLWTPFVHRTKADIVSDGAKHNTPFDRTWSCYKGGEHHCGRCGTCVERREAFDLAGVTDPTVYEDPDFWRQAVANAEAK

SEQ ID NO: 42854 - protein, 220 aa, Thalassolituus oleivorans; identical to SEQ ID NO: 42849
  REGION 1..220: note = tr|M5E5V4|M5E5V4_9GAMM 7-cyano-7-deazaguanine synthase OS=Thalassolituus oleivorans MIL-1 OX=1298593; GN = queC PE=3 SV=1

SEQ ID NO: 42855 - protein, 220 aa, Thalassolituus oleivorans
  REGION 1..220: note = tr|W8FW94|W8FW94_9GAMM 7-cyano-7-deazaguanine synthase OS=Thalassolituus oleivorans R6-15 OX=1208320; GN = queC PE=3 SV=1
MSEKAVVIYSGGMDSFTILNKAKQEGYELYALTFDYGQKHKKEIQYAISVCQELKVPHRIIDITAINQLLQSSSLTSDIEIPEGHYEAANMKSTVVPNRNMILLSLAIGYAVDIGASKVFYGAHSGDHAIYPDCRPDFVHAMNRVAKLANYEPVDIVTPYLNGDKTEILKDGLAMGLDYGKTWTCYNGREKACGKCGSCVERLEAFTLNNATDPLPYESV

SEQ ID NO: 42856 - protein, 220 aa, Thalassolituus sp.
  REGION 1..220: note = tr|A0A558NRR0|A0A558NRR0_9GAMM 7-cyano-7-deazaguanine synthase OS=Thalassolituus sp. C2-1; OX = 2597518 GN=queC PE=3 SV=1
MAEKAVVIYSGGMDSFTILNKAKAEGYELYALTFDYGQKHRKEIAFATRVCEELGINHRIIDITAINQLLQSSSLTSDIEIPEGHYEAANMKSTVVPNRNMILLSLAIGYAVDIGASKVFYGAHSGDHAIYPDCRPDFVHAMNKVAKLANYEPVDIVTPYLNSDKTEILADGLKMGLNYGKSWTCYNGREKACGKCGSCVERLEAFAHNHATDPLAYENS

SEQ ID NO: 42857 - protein, 219 aa, Thalassomonas actiniarum
  REGION 1..219: note = tr|A0A0D8CW81|A0A0D8CW81_9GAMM 7-cyano-7-deazaguanine synthase OS=Thalassomonas actiniarum OX=485447 GN=queC PE=3 SV=1
MTEKVVVIYSGGMDSFTVLNRALKDGKEVYALSFDYGQRHVKELECASEVCKKLNVPHKIIDISAINELLAGSSLTDNIEIPEGHYEEDSMKSTVVPNRNMILLSLAVGYAVSVKASQVYYGAHSGDHAIYPDCRPEFVMKMNDVCQIANYEPVEIFSPYLKVSKTDILTDGIAMGLDYSQTWTCYNGREKACGKCGACQERLEAFADNKVSDPIAYEA

SEQ ID NO: 42858 - protein, 218 aa, Thalassomonas sp.
  REGION 1..218: note = tr|A0A553FJV2|A0A553FJV2_9GAMM 7-cyano-7-deazaguanine synthase OS=Thalassomonas sp. M1454; OX = 2594477 GN=queC PE=3 SV=1
MAEKVVVIYSGGMDSFTVLNRAVKDGKQVYALSFDYGQKHVKELEFAANVCKELNIPHKIVDISAINQLIGGSSLTDDIDIPEGHYEEESMKSTVVPNRNMILLSMAVGYAVSVNANQVYYGAHSGDHAIYPDCRPEFVKKMNDVCQIANYEPVDIYSPYLKDSKIDILTDGIKMGLDYSKSWTCYNGREKACGKCGACQERLEAFEKNGITDPLPYE

SEQ ID NO: 42859 - protein, 219 aa, Thalassomonas viridans
  REGION 1..219: note = tr|A0A0D8CRB8|A0A0D8CRB8_9GAMM 7-cyano-7-deazaguanine synthase OS=Thalassomonas viridans; OX = 137584 GN=queC PE=3 SV=1
MTEKVVVIYSGGMDSFTVLNRALKDGKEVYALSFDYGQRHVKELECASEVCKQLNVPHKIIDISAINELLAGSSLTDDIEIPEGHYEEESMKSTVVPNRNMILLSLAVGYAVSVGAAQVYYGAHSGDHAIYPDCRPEFVMKMNDVCQIANYEPVEIFSPYLEVSKTAILTDGIAMGLDYSKTWTCYNGREKACGKCGACQERLEAFADNNATDPLAYED

SEQ ID NO: 42860 - protein, 243 aa, unidentified
  source 1..243: note = Thalassospira lohafexi
  REGION 1..243: note = tr|A0A2N3L681|A0A2N3L681_9PROT 7-cyano-7-deazaguanine synthase OS=Thalassospira lohafexi; OX = 744227 GN=queC PE=3 SV=1
MKTIVVCSGGLDSVTLAYKVAAEHKLHSLISFDYGQRHKKELDYAARTARDLGVKHHIVDLTSVGALLGGSSLTSDDIDVPDGHYAQETMRITVVPNRNAIMLAVAFGAAASAGADAVATAVHGGDHFIYPDCRPDFISAFGTMQNHALDGVKDVSLYTPFVHVSKADIALEAGRLGVPIDLTWSCYKGHDTHCGRCGTCVERREALELACVKDPTVYEDRDYWKQAHAEHVARKFARQNAPG

SEQ ID NO: 42861 - protein, 243 aa, Thalassospira lucentensis
  REGION 1..243: note = tr|A0A358HMP6|A0A358HMP6_9PROT 7-cyano-7-deazaguanine synthase OS=Thalassospira lucentensis OX=168935 GN=queC PE=3 SV=1
MKTIVVCSGGLDSVTLAYKVAAEHKLHSLISFDYGQRHKKELDYAARTARDLGVKHHIVDLTSVGALLGGSSLTSDDIDVPDGHYAQETMRITVVPNRNAIMLAVAFGAAASAGADAVATAVHGGDHFIYPDCRPDFINAFGAMQNHALEGVKDVSLYTPFVHVSKADIALEAGRLGVPIDLTWSCYKGHDTHCGRCGTCVERREALELACVKDPTVYEDRDYWKQAHAEHVARKFASQNAPG

SEQ ID NO: 42862 - protein, 247 aa, Thalassospira lucentensis
  REGION 1..247: note = tr|A0A154L2N4|A0A154L2N4_9PROT 7-cyano-7-deazaguanine synthase OS=Thalassospira lucentensis OX=168935 GN=queC PE=3 SV=1
MKTIVVCSGGLDSVTLAHKVAAEHKLHSLISFDYGQRHKKELDYAARAARDLGVKHHIVDLTPVGALLTGSSLTSDDIDVPDGHYAEETMRITVVPNRNAIMLAVAFGAAASAGADAVAAAVHGGDHFIYPDCRPDFIKSFQTMQNHALEGVRDVSLYTPFLRGSKADIAAEAARLGVPIDRTWSCYKGGETHCGRCGTCVERREALELARVPDPTVYVDRDYWKQARAEHMARSLGTEAEVQPSGD

SEQ ID NO: 42863 - protein, 243 aa, unidentified
  source 1..243: note = Thalassospira marina
  REGION 1..243: note = tr|A0A2N3KRT1|A0A2N3KRT1_9PROT 7-cyano-7-deazaguanine synthase OS=Thalassospira marina; OX = 2048283 GN=queC PE=3 SV=1
MKTIVVCSGGLDSVTLAHKVAREYSLHGLISFDYGQRHKKELDFAADAARDLGVRHHIVDLTPVGKLLTGSSLTSDDVDVPDGHYAEETMRITVVPNRNAIMMSVAFGAAASAGADAVAAAMHGGDHFIYPDCRPDFVNAFQKMQNHALEGVANIRLYTPFINSTKADIAAEAGRLGVPIERTWSCYKGEDVHCGRCGTCVERREALELARVPDPTVYIDREYWKQARAEHAMRKMAEKTAQD

SEQ ID NO: 42864 - protein, 239 aa, unidentified
  source 1..239: note = Thalassospira mesophila
  REGION 1..239: note = tr|A0A1Y2L3F3|A0A1Y2L3F3_9PROT 7-cyano-7-deazaguanine synthase OS=Thalassospira mesophila; OX = 1293891 GN=queC PE=3 SV=1
MKTIVVCSGGLDSVTLAHKVAREHSLYALISFDYGQRHKKEIDFAADAAKDLGVRHHIVDLKPVGALLTGSSLTSDDVAVPDGHYAEETMRITVVPNRNAIMLSVAFGAAASAGADTVAAAMHGGDHFIYPDCRPDFINAFQKMQNHALEGVAQIRLYTPFINATKADIAAEAGRLGVPIERTWSCYKGEEVHCGRCGTCVERREALELARVPDPTVYIDREYWKQARAEHAMRKMAEG

SEQ ID NO: 42865 - protein, 241 aa, unidentified
  source 1..241: note = Thalassospira permensis
  REGION 1..241: note = tr|A0A074J752|A0A074J752_9PROT 7-cyano-7-deazaguanine synthase OS=Thalassospira permensis NBRC 106175 OX=1353532 GN=queC PE=3 SV=1
MKTIVVCSGGLDSVTLAHKVAAEHNLHSLISFDYGQRHKKELDYAARAARDLGVKHHIVDLTPVGALLTGSSLTSDDIDVPDGHYAEETMRITVVPNRNAIMLAVAFGAAASAGADAVAAAVHGGDHFIYPDCRPDFIKSFQTMQNHALEGVRDVSLYTPFLHGSKADIAAEAGRLGVPIDRTWSCYKGGETHCGRCGTCVERREALELARVPDPTVYVDRDYWKQARAEHMARSLGASGN

SEQ ID NO: 42866 - protein, 250 aa, unidentified
  source 1..250: note = Thalassospira povalilytica
  REGION 1..250: note = tr|A0A2N3KDU8|A0A2N3KDU8_9PROT 7-cyano-7-deazaguanine synthase OS=Thalassospira povalilytica OX=732237 GN=queC PE=3 SV=1
MKTIVVCSGGLDSVTLAYKVAAEHNLHSLISFDYGQRHKKELDFAARTARDLGVKHHIVDLTPVGALLTGSSLTSDDIDVPDGHYAEETMRVTVVPNRNAIMLAVAFGAAASAGADAVAAAVHGGDHFIYPDCRPDFIKSFQAMQDHALEGVRDVTLYTPFVNVSKADIALEAGRLGVPVDLTWSCYKGGETHCGRCGTCVERREALELAGVKDPTVYVDREYWKQARADHRARQLAAHETASASNNAAE

SEQ ID NO: 42867 - protein, 243 aa, Thalassospira profundimaris
  REGION 1..243: note = tr|A0A367XDQ2|A0A367XDQ2_9PROT 7-cyano-7-deazaguanine synthase OS=Thalassospira profundimaris OX=502049 GN=queC PE=3 SV=1
MKTIVVCSGGLDSVTLAHKVAREHSLQGLISFDYGQRHKKELDYAAETARDLGVPHNIVDLKPVGRLLTGSSLTSDDVAVPDGHYAEETMRITVVPNRNAIMMTVAFGAAASAGADAVAAAMHGGDHFIYPDCRPDFVHAFQAMQDHALEGVAHIRLYTPFIHASKADIAAEAGRLGVPVDRTWSCYKGGDVHCGRCGTCVERREALELARVLDPTVYTDREYWKQARAEHAKRKFAERSTHG

SEQ ID NO: 42868 - protein, 592 aa, Thalassospira profundimaris
  REGION 1..592: note = tr|K2KUE3|K2KUE3_9PROT Uncharacterized protein; OS = Thalassospira profundimaris WP0211 OX=1177928; GN = TH2_05443 PE=4 SV=1
MDVQGSNQDVTLKIEDISRAMVSNIPDVLLDLLEVAAYIYCADRRCSRGGDTLDDYGHDWRRDLRFTIPLREPDRWESPAVKEALRDALGFLSDDAYSFSFVRAENPVAPKELYFTGLTEGTFEPDEVALFSGGVDSFAGAVHDLVANDMNLALIGHFSATKVVNVQKELISGLQQNGLDGRFFYTSVEVKNKGVRSVDESQRTRSFLFACLGLVVARLFGKDRLTFYENGVVSLNLPIAKDIMGARATRTTHPQVLDGFTTFFSELLDHEIGIRTPLQWMTKREVVETLSGSGFEGMLGDTVSCTRTFVRTVDHPHCGVCSQCIDRRFAVLAAGMEESDPEQGYTVDLLTGDRSAKEQDVRMAVDYVKCFQKLTACPKNRFLVEYPEITSALRYFSGLSTAEACDRIYDLLQRHARDVLDVLDAATTRHKGELVRGELPAGSLLSMCFSRSKIEVSPPSGYDSQVKDFMDRLQRPVCEFAVDETAKRVLFKGDFSLEGTNYDLVAALLDNHRTGKRNGSDIAYIPAPNLAQVLGIADASLRQQVGRLRKLVTERLGVDLGVPLGTDDFIENKERAGYRLSPALREVSPGDL

SEQ ID NO: 42869 - protein, 247 aa, Thalassospira sp.
  REGION 1..247: note = tr|A0A419W2G4|A0A419W2G4_9PROT 7-cyano-7-deazaguanine synthase OS=Thalassospira sp. DSM 26710 OX=2035225 GN=queC PE=3 SV=1
MKTIVVCSGGLDSVTLAYKVATEHKLHSLISFDYGQRHKKELDFAARAARNLGVKHHIVDLTLVGALLTGSSLTSDDIDVPDGHYAEETMRITVVPNRNAIMLAVAFGAAASAGADAVAAAVHGGDHFIYPDCRPDFIKSFQTMQDHALEGVKDVKLYTPFVNVSKADIALEAGRLGVPVDLTWSCYKGGETHCGRCGTCVERREALELARVKDPTVYVDRDYWKQARADHMARKFGPLPTTDCAAK

SEQ ID NO: 42870 - protein, 243 aa, Thalassospira sp.
  REGION 1..243: note = tr|A0A1Q4US70|A0A1Q4US70_9PROT 7-cyano-7-deazaguanine synthase OS=Thalassospira sp. TSL5-1 OX=1544451 GN=queC PE=3 SV=1
MKTIVVCSGGLDSVTLAHKVAREHSLQGLISFDYGQRHKKELDYAADTARDLGVPHNIVDLKPVGRLLTGSSLTSDDVAVPDGHYAEETMRITVVPNRNAIMMTVAFGAAASAGADAVAAAMHGGDHFIYPDCRPDFVNAFQSMQDHALEGVAQIRLYTPFIHTSKADIAAEAGRLGVPIDRTWSCYKGGDVHCGRCGTCVERREALELARVPDPTVYTDREYWKQARAEHAKRKYAEHSSQN

SEQ ID NO: 42871 - protein, 241 aa, Thalassospira xiamenensis
  REGION 1..241: note = tr|A0A0B4XW00|A0A0B4XW00_9PROT 7-cyano-7-deazaguanine synthase OS=Thalassospira xiamenensis M-5 = DSM 17429 OX=1123366 GN=queC PE=3 SV=1
MKTIVVCSGGLDSVTLAHKVAAEHKLHSLISFDYGQRHKKELDYAARAARDLGVKHHIVDLTPVGALLTGSSLTSDDIDVPDGHYAEETMRITVVPNRNAIMLAVAFGAAASAGADAVAAAVHGGDHFIYPDCRPDFIKSFQTMQNHALEGVRDVSLYTPFLHGSKADIAAEAGRLGVPIDRTWSCYKGGETHCGRCGTCVERREALELARVPDPTVYVDRDYWKQARAEHMARSLGDSGN

SEQ ID NO: 42872 - protein, 461 aa, Thalassospira xiamenensis
  REGION 1..461: note = tr|A0A0B4Y0H8|A0A0B4Y0H8_9PROT Uncharacterized protein OS=Thalassospira xiamenensis M-5 = DSM 17429; OX = 1123366 GN=TH3_14170 PE=4 SV=1
MKNTFLNKPRSDLSLCVVEQSQSVKRAYPKGAEIAEVGKHIKFDPDILSTFDYKGWQSLHHDLLVVSAAVEFADRRWKRPRGWSRKFNITVPVLDLAAWQRKEVIESLLSALRHLTADIWSFNFVQWRGPAPIGARQGVLAFTKTKTFTIAYSDGLDSRAVSALSGDKLGLRVRIAKSRNRLKKGDQPFDQIPFKVQGFRGLESSFRSRGFQFSAITAIAAHMSELSRVVVPESGQGALGPVLLPLHNIHPDYRNHPTFFRKMERFVRALLGYQVKYDQPRIWYTKGQTLGAFLELPAKKQEDLTDTRSCWQTRRIVNTNGGRKQCGLCAACLLRRLSMHTAGITEAADAYVISDLKCSDVNESLAVIPQQRDRDIMIEYGSVGARHLQHLAEMADLPDDELRIHASELAAALGEPREDTMKNLRMLLVNHAEEWRAFLTAQEEKSFLKSWMDGGRYGRSK

SEQ ID NO: 42873 - protein, 254 aa, Thalassospira xianhensis
  REGION 1..254: note = tr|A0A367UCH0|A0A367UCH0_9PROT 7-cyano-7-deazaguanine synthase OS=Thalassospira xianhensis MCCC 1A02616 OX=1177929 GN=queC PE=3 SV=1
MKTIVVCSGGLDSVTLAYKVAAEHKLHSLISFDYGQRHKKELDYAARAARDLGVKHHIVDLTPVGALLTGSSLTSDDIDVPDGHYAEETMRITVVPNRNAIMLAVAFGAAASARADAVAAAVHGGDHFIYPDCRPDFIKSFQTMQNHALEGVRDVSLYTPFLHGSKADIAAEAGRLGVPIDRTWSCYKGGETHCGRCGTCVERREALELARVPDPTVYVDRDYWKQARAEHMARSLGASPIPPAQAGAHTTSGD

SEQ ID NO: 42874 - protein, 219 aa, unidentified
  source 1..219: note = Thalassotalea agarivorans
  REGION 1..219: note = tr|A0A1I0EN73|A0A1I0EN73_THASX 7-cyano-7-deazaguanine synthase OS=Thalassotalea agarivorans OX=349064 GN=queC PE=3 SV=1
MTEKVVVIYSGGMDSFTVLNRALKDGKHVYALSFDYGQKHVKELECAAKVCESLNVPHKIIDITAINQLLAGSSLTDDIDIPEGHYEDDNMKSTVVPNRNMILLSLAVGYAVSVEASQVYYGAHSGDHAIYPDCRPEFVEKMNDVCQIANYEPVEIYSPYLHVSKIDILTDGLNMGLDYSDTWTCYNGREKACGKCGACQERLEAFEKNNAVDPIAYEG

SEQ ID NO: 42875 - protein, 221 aa, unidentified
  source 1..221: note = Thalassotalea euphylliae
  REGION 1..221: note = tr|A0A3E0UF23|A0A3E0UF23_9GAMM 7-cyano-7-deazaguanine synthase OS=Thalassotalea euphylliae OX=1655234 GN=queC PE=3 SV=1
MTEKVVVIYSGGMDSYTVLNRAIKDGMEVYPLTFDYGQRHVKEIDCAAAVCKSLNVPHKVIDISAINQLLAGSSLTDDIEIPEGHYEEESMKSTVVPNRNMILLSLAVGYAVSVGASKVYYGAHSGDHAIYPDCRPEFVEKMNDVCQIANYEAVEIYSPYLSVSKTAILTDGIAMGLDYSQTWTCYNGREHACGKCGACQERLEAFRDNNATDPLTYEVTA

SEQ ID NO: 42876 - protein, 221 aa, unidentified
  source 1..221: note = Thalassotalea euphylliae
  REGION 1..221: note = tr|A0A3E0TXS6|A0A3E0TXS6_9GAMM 7-cyano-7-deazaguanine synthase OS=Thalassotalea euphylliae OX=1655234 GN=queC PE=3 SV=1
MTEKVVVIYSGGMDSYTVLNRAIKDGMQVYPLTFDYGQRHVKEIDCAAAVCKSLNVPHKVIDISAINQLLAGSSLTDDIEIPEGHYEEESMKSTVVPNRNMILLSLAVGYAVSVGASKVYYGAHSGDHAIYPDCRPEFVEKMNDVCQIANYEAVEIYSPYLSVSKTAILTDGIAMGLDYSQTWTCYNGREHACGKCGACQERLEAFRDNNATDPLTYEVTA

SEQ ID NO: 42877 - protein, 230 aa, unidentified
  source 1..230: note = Thalassotalea sp.
  REGION 1..230: note = tr|A0A099L664|A0A099L664_9GAMM 7-cyano-7-deazaguanine synthase OS=Thalassotalea sp. ND16A; OX = 1535422 GN=queC PE=3 SV=1
MAENMAENATNTDNNKVVVIYSGGMDSFTVLNRAIKDGKQVYALTFDYGQKHVKEIEYAANVCKELNIPHKVIDISAINQLLGGSSLTDDIDIPEGHYEEESMKSTVVPNRNMILLSLAVGYAVSREASQVYYGAHSGDHAIYPDCRPEFVLKMNDVCQIANYQPVEIYSPYLTDSKIDILTDGISMELDYSKSWTCYNGREKACGQCGACQERLEAFRENDLVDPLEYE

SEQ ID NO: 42878 - protein, 221 aa, unidentified
  source 1..221: note = Thalassotalea sp.
  REGION 1..221: note = tr|A0A1Q6CJH8|A0A1Q6CJH8_9GAMM 7-cyano-7-deazaguanine synthase OS=Thalassotalea sp. PP2-459 OX=1742724 GN=queC PE=3 SV=1
MSNKVVVIYSGGMDSFTVLNKAVHDGKQVFALSFDYGQRHVKELDCAASVCATLGIKHKIIDISAINQLLAGSSLTDDIEIPEGHYEEESMKSTVVPNRNMILLSMAVGYAVSVGASQVYYGAHSGDHAIYPDCRPEFVQKMNDVCQIANYEAVEIYSPYLTVTKTDILTDGLSMGLDYSQTWTCYNGREKACGKCGACQERLEAFSENKTTDPLPYEISA

SEQ ID NO: 42879 - protein, 233 aa, Thauera aminoaromatica
  REGION 1..233: note = tr|N6Y1L9|N6Y1L9_9RHOO 7-cyano-7-deazaguanine synthase OS=Thauera aminoaromatica S2 OX=1234381 GN=queC; PE = 3 SV=1
MTSLHTPPRAVVLLSGGLDSATCLAIARDMGFETYALSVAYGQRHAAELAASKRVAQALGAREHRTASVELGQFGGSALTDPGIAVPLDQDNTGIPVTYVPARNTVMLSIAVAWAEVLGANDIFVGVNAVDYSGYPDCRPVFIEAFEHMARLATKVGVEGAQLRIHAPLIELSKADIIRRGTALGVDYGLTVTCYQADDDGRACGRCEACRLRAAGFKAAGVPDPTPYQPRSA

SEQ ID NO: 42880 - protein, 233 aa, Thauera aminoaromatica
  REGION 1..233: note = tr|A0A5C7S9F6|A0A5C7S9F6_9RHOO 7-cyano-7-deazaguanine synthase OS=Thauera aminoaromatica; OX = 164330 GN=queC PE=3 SV=1
MTSLHTPPRAVVLLSGGLDSATCLAIARDMGFETYALSVAYGQRHAAELAASKRVAQALGAREHRTASVELGQFGGSALTDPGIAVPLDQDNTGIPVTYVPARNTVMLSIALAWAEVLGANDIFVGVNAVDYSGYPDCRPVFIEAFEHMARLATKVGVEGAQLHIHAPLIELSKADIIRRGTALGVDYGLTVTCYQADDDGLACGRCEACRLRAAGFKAAGVPDPTPYQPRSA

SEQ ID NO: 42881 - protein, 233 aa, Thauera aromatica
  REGION 1..233: note = tr|A0A2R4BRD3|A0A2R4BRD3_THAAR 7-cyano-7-deazaguanine synthase OS=Thauera aromatica K172; OX = 44139 GN=queC PE=3 SV=1
MNTPPRAVVLLSGGLDSATCLAIARDQGFETYALSVAYGQRHAAELTASKRVADALGAKEHRLARVNLGQFGGSALTDPAIAVPEDEGAVGESAIPVTYVPARNTVMLSIALAWAEVLGASDIFVGVNAVDYSGYPDCRPEFIAAFEAMANLATRAAVEGARLRIHAPLIALSKADIIRRGSALGVDYGLTVTCYQADDAGRACGRCEACRLRAAGFTAAAIDDPTPYQPPLA

SEQ ID NO: 42882 - protein, 234 aa, Thauera chlorobenzoica
  REGION 1..234: note = tr|A0A1H5WP98|A0A1H5WP98_9RHOO 7-cyano-7-deazaguanine synthase OS=Thauera chlorobenzoica; OX = 96773 GN=queC PE=3 SV=1
MNTPPRAVVLLSGGLDSATCLAIARDQGFETYALSVAYGQRHAAELTASKRVADALGAREHRLARVNLGQFGGSALTDPAIAVPEDEGGHEGESAIPVTYVPARNTVMLSIALAWAEVLGASDIFVGVNAVDYSGYPDCRPEFIAAFETMANLATRAGVEGARLRIHAPLIALSKADIIRRGTALGVDYGLTVTCYQADDAGRACGRCEACRLRAAGFAAAAIDDPTPYQPHLG

SEQ ID NO: 42883 - protein, 230 aa, unidentified
  source 1..230: note = Thauera humireducens
  REGION 1..230: note = tr|A0A127K989|A0A127K989_9RHOO 7-cyano-7-deazaguanine synthase OS=Thauera humireducens; OX = 1134435 GN=queC PE=3 SV=1
MNHAKRAVVLLSGGLDSATCLAIARDMGFETYALSVAYGQRHAAELTASARVAQALGAKEHRLARVNLGQFGGSALTDPGIAVPENEDNGGIPVTYVPARNTVMLSIAMAWAEVLGAQDIFVGVNAVDYSGYPDCRPEFIQAFETMANLATKAGVEGARLHIHAPLIELSKADIIRRGVALGVDYGITVTCYQADDDGRACGRCEACRLRAAGFEAAGIPDPTPYQLRTD

SEQ ID NO: 42884 - protein, 234 aa, Thauera linaloolentis
  REGION 1..234: note = tr|N6Z5G2|N6Z5G2_9RHOO 7-cyano-7-deazaguanine synthase OS=Thauera linaloolentis 47Lol = DSM 12138; OX = 1123367 GN=queC PE=3 SV=1
MTPAKRAVVLLSGGLDSATCLAIARDMGFETYALSVAYGQRHAAELTASLRVAQALGAKEHRLARINLGQFGGSALTDPAIDIPEALPGDDERPCIPVTYVPARNTVMLSIAMAWAEVLGANDIFIGVNAVDYSGYPDCRPAFIQAFEAMANLATKAGIEGAQLRIHAPLIESSKADIIRRGIGLGVDYGITVTCYQADDAGRACGRCEACRLRAMGFAAADVPDPTPYQLRND

SEQ ID NO: 42885 - protein, 233 aa, Thauera phenylacetica
  REGION 1..233: note = tr|N6YLD7|N6YLD7_9RHOO 7-cyano-7-deazaguanine synthase OS=Thauera phenylacetica B4P OX=1234382 GN=queC; PE = 3 SV=1
MTRLNTPPRAVVLLSGGLDSATCLAIARDMGFETYALSVAYGQRHAAELAASKRVAQVLGAREHRTASVELGQFGGSALTDPGIAVPLDQDNAGIPVTYVPARNTVMLSIALAWAEVLGANDIFVGVNAVDYSGYPDCRPAFIEAFERMARLATKVGVEGAQLRIHAPLIELSKADIIRRGVALGVDYGLTVTCYQADDDGRACGRCEACRLRAAGFAAAGVADPTPYQAPST

SEQ ID NO: 42886 - protein, 185 aa, Thauera phenylacetica
  REGION 1..185: note = tr|N6YTH5|N6YTH5_9RHOO 7-cyano-7-deazaguanine synthase OS=Thauera phenylacetica B4P OX=1234382; GN = C667_08283 PE=3 SV=1
MERSRHATVLMSGGIDSAACAAFLIDQGLEVSAVFVDHGQAAADFERSAVRSLAIALEIQVQELALTGAAPFGCGELVGRNAFLVFSAILATRARSSRIALGLHAGTPYYDCSPAFVDTINRSVAEYTDNAVRVVAPFIEWTKREVYDYFIHAGLPIEMTYSCEYGGAPTCGRCASCQDRKALQC

SEQ ID NO: 42887 - protein, 230 aa, unidentified
  source 1..230: note = Thauera propionica
  REGION 1..230: note = tr|A0A235F1H4|A0A235F1H4_9RHOO 7-cyano-7-deazaguanine synthase OS=Thauera propionica; OX = 2019431 GN=queC PE=3 SV=1
MNQAKRAVVLLSGGLDSATCLAIARDMGFETYALSVAYGQRHAAELTASARVAQALGAKEHRLARVNLGQFGGSALTDPGIAVPEDEDNSGIPVTYVPARNTVMLSIAMAWAEVLGAQDIFVGVNAVDYSGYPDCRPEFIRAFETMANLATKAGVEGARLHIHAPLIQLSKAEIIRRGVALGVDYGITVTCYQADDDGRACGRCEACRLRAAGFEAAGVPDPTPYQLRTD

SEQ ID NO: 42888 - protein, 226 aa, Thauera sp.
  REGION 1..226: note = tr|A0A290ZUM4|A0A290ZUM4_9RHOO 7-cyano-7-deazaguanine synthase OS=Thauera sp. K11; OX = 2005884 GN=queC PE=3 SV=1
MSQAKRAVVLLSGGLDSATCLAIARDMGFEAYALSVAYGQRHAAELAASRRVAAALGATAHRTASVDLGQFGGSALTDASIAVPEDGAGDGIPVTYVPARNTVMLSIALAWAEVLGAHDIFVGVNAVDYSGYPDCRPAFIEAFENMANLGTKIGVEGARIRIHAPLITLSKADIIRRGLALGVDYGLTVTCYQADERGRACGRCEACRLRAAGFAAAGVPDPTPYK

SEQ ID NO: 42889 - protein, 230 aa, Thauera sp.
  REGION 1..230: note = tr|A0A351A524|A0A351A524_9RHOO 7-cyano-7-deazaguanine synthase OS=Thauera sp. OX=1905334; GN = queC PE=3 SV=1
MTSTARAVVLLSGGLDSATCLAIARDMGFETYALSVAYGQRHAAELTASKRVAEALGAREHRLARVNLGQFGGSALTDPGIAVPVDEENTGIPVTYVPARNTVMLSIALAWAEVLGANDIFVGVNAVDYSGYPDCRPEFIQAFETMANLATKVGVEGARLRIHAPLIELTKADIIRRGIALGVDYGLTVTCYQADDGGRACGRCEACRLRAAGFEAAGVPDPTPYQAHAH

SEQ ID NO: 42890 - protein, 230 aa, Thauera terpenica
  REGION 1..230: note = tr|S9ZRF0|S9ZRF0_9RHOO 7-cyano-7-deazaguanine synthase OS=Thauera terpenica 58Eu OX=1348657 GN=queC PE=3; SV = 1
MTPAKRAVVLLSGGLDSATCLAIAREMGFETYALSIAYGQRHAAELTASLRVAQALGAREHRLARVNLGEFGGSALTDAAIAVPENEGNTGIPVTYVPARNTVMLSIALAWAEVLGANDIFVGVNAVDYSGYPDCRPEFIQAFETMANLATKVGVEGARLRIHAPLIKLSKGEIIRRGIELGVDYGLTVTCYQADDAGRACGCCEACRLRVAGFTAAAVPDPTPYVQRSV

SEQ ID NO: 42891 - protein, 233 aa, Thermanaeromonas toyohensis
  REGION 1..233: note = tr|A0A1W1VF95|A0A1W1VF95_9THEO 7-cyano-7-deazaguanine synthase OS=Thermanaeromonas toyohensis ToBE OX=698762 GN=queC PE=3 SV=1
MKDKVIVVLSGGLDSTTCMAIAHAEGQDIFPLTFVYGQKHTVELEAARKVAEYYGVAERHKIINLEGLLFGSSLTDKDKDIPTGRTLEEIGEGIPSTYVPARNIVFLALALAQAEPLGARAIYLGVNALDFSGYPDCRPEFIAAFQEVINRGTAAGVEGRGIRLETPLINLTKAEIIKKGLELGAPYHLTYSCYQGTVPSCGVCDACILRLKGFREAGAIDPIPYRQFSALCR

SEQ ID NO: 42892 - protein, 297 aa, Thermanaeromonas toyohensis
  REGION 1..297: note = tr|A0A1W1W3H9|A0A1W1W3H9_9THEO Uncharacterized protein OS=Thermanaeromonas toyohensis ToBE OX=698762; GN = SAMN00808754_3321 PE=4 SV=1
MVAVLAGGKNSQVFKPGEAMLDPQLNQKLERLKSILSELGSVVVAYSGGVDSTLLLRVAKETAQRVLAVTATSPTYPQSELEQAQKIAQSLEVEHLIIESQEMENPQFCANPADRCYYCKSELFSKLRSVAAEQGFKAVVDGSNAEDLGDFRPGMRAAREYGIRSPLLEAGLTKGEIRELSRYYGLPTWDKPAMACLSSRIPYGEPITPEKVKQIEAGEAFLHSLGLKEVRLRHHGPIARLEVHPAAFPLLITEGVRERIITFLKNLGFIYVTLDLEGYRSGSMNELLPPQGEGVGQ

SEQ ID NO: 42893 - protein, 225 aa, Thermincola ferriacetica
  REGION 1..225: note = tr|A0A0L6W485|A0A0L6W485_9FIRM 7-cyano-7-deazaguanine synthase OS=Thermincola ferriacetica OX=281456 GN=queC PE=3 SV=1
MEKAVVLLSGGLDSTVCMSVAQKQGYGLYPISFLYGQRHSREIECAKKVAEYYQVKKHLIITTNMDSIGGSALTANIDVPEGDENRSEIPVTYVPARNLIFLSYALGYAEVIGAEKIFIGVNAVDYSGYPDCRSEFIERFQQLADYSTKAATQDKREIKIEAPLLNLTKAEIVKLGVANKAPLELTTSCYRGGEKACGRCDSCLLRLKGFKEAGLKDPISYEELL

SEQ ID NO: 42894 - protein, 225 aa, unidentified
  source 1..225: note = Thermincola potens
  REGION 1..225: note = tr|D5XDG5|D5XDG5_THEPJ 7-cyano-7-deazaguanine synthase OS=Thermincola potens (strain JR) OX=635013; GN = queC PE=3 SV=1
MEKAVVLLSGGLDSTVCMSVAQKQGYELYPISFLYGQRHSREIECAKKVAEYYQVKKHLIITTNMDSIGGSALTANIDVPEGDENRSEIPVTYVPARNLIFLSYALGYAEVIGAEKIFIGVNAVDYSGYPDCRPEFIERFQQLADYSTKAATQDKREIKIEAPLLNLTKAEIVKLGVANKAPLELTTSCYRGGEKACGRCDSCLLRLKGFKEAGLKDPIPYEGLL

SEQ ID NO: 42895 - protein, 233 aa, Thermoactinomyces sp.
  REGION 1..233: note = tr|A0A1K1W9T7|A0A1K1W9T7_9BACL 7-cyano-7-deazaguanine synthase OS=Thermoactinomyces sp. DSM 45891 OX=1761907 GN=queC PE=3 SV=1
MKKKAVIVLSGGLDSSTCMGIAEHQGYELYPITFFYNQLHQREVEQAKCVAAHYGVSQSHKIVDLSYLGQLGGSALTDSSIQVPTTGIDEDEIPATYVPARNLIFLSLATAYAEVIGAKKIFVGVSAVDYSGYPDCRPEFIQSMSETINLATKLGVSSDAEDRLSIEAPLIHLNKGETVKWGLELGVPYHLTTSCYQGSEEACGVCDSCLLRLRGFTENDAKDPIPYAPQVLR

SEQ ID NO: 42896 - protein, 233 aa, Thermoactinomyces sp.
  REGION 1..233: note = tr|A0A1H3KD75|A0A1H3KD75_9BACL 7-cyano-7-deazaguanine synthase OS=Thermoactinomyces sp. DSM 45892 OX=1882753 GN=queC PE=3 SV=1
MKKKAVVVLSGGLDSTTCMGIAEHQGYELYPITFFYNQLHQREVEQAKCVAAHYGVGQNHKIVDLSYLGQLGGSALTDPSIQVPTTGVDEDEIPATYVPARNLIFLSMATAYAEVIGAKKIFVGVSAVDYSGYPDCRPEFIQSMSETINLATKLGVTSDADDRLSIEAPLMHLNKGETVKWGLELGVPYHLTTSCYQGSEEACGVCDSCLLRLKGFTENDAKDPIPYAQQVLR

SEQ ID NO: 42897 - protein, 229 aa, Thermoactinomyces vulgaris; identical to SEQ ID NO: 39052
  REGION 1..229: note = tr|A0A0N1K2S2|A0A0N1K2S2_THEVU 7-cyano-7-deazaguanine synthase OS=Thermoactinomyces vulgaris OX=2026 GN=queC PE=3 SV=1

SEQ ID NO: 42898 - protein, 227 aa, unidentified
  source 1..227: note = Thermoanaerobaculum aquaticum
  REGION 1..227: note = tr|A0A062XYJ6|A0A062XYJ6_9BACT 7-cyano-7-deazaguanine synthase OS=Thermoanaerobaculum aquaticum OX=1312852 GN=queC PE=3 SV=1
MSGDKAVVLLSGGMDSATAAAWARARWPWVGALSVDYGQRHAFELQAARRVAESLKLSEHRVIKVDLRAFGGSALTDELAVPKNRENIGEGIPVTYVPARNTVLLALLLAYAETRGARHLVMGANVLDYSGYPDCRPDFLRAFQRVANLGTKAGREGAGFEVHAPLLHLTKAGIVCLGYQLGLAFELTFSCYDPPEEGIHCGACDACRLRRQGFAEANLPDPTRYAT

SEQ ID NO: 42899 - protein, 231 aa, Thermobifida halotolerans
  REGION 1..231: note = tr|A0A399FX44|A0A399FX44_9ACTN 7-cyano-7-deazaguanine synthase OS=Thermobifida halotolerans OX=483545 GN=queC PE=3 SV=1
MERPAIVLLSGGLDSTTVLAIAREQGFTPYTLSFRYGQRHSLELEAAKRVAQAMGAARHVITDIDLRVFGGSALTDEISVPKHGSVEELDAAAVPVTYVPARNTIFLSFALAYAEVVGAQDIFMGVNAVDYSGYPDCRPEYIAAYEKMANLATRAAIEGEGRITVHTPLITLSKADIIREGVRLGVDYSLTFSCYDPDEQGRSCRRCDTCLLRLKGFTEAGFIDPIPYQAG

SEQ ID NO: 42900 - protein, 225 aa, Thermobrachium celere
  REGION 1..225: note = tr|R7RV44|R7RV44_9CLOT 7-cyano-7-deazaguanine synthase OS=Thermobrachium celere DSM 8682 OX=941824; GN = queC PE=3 SV=1
MKKAVVLLSGGLDSTTALYLAKSQGFEVYAISFDYGQRHDKELQCAKNVAEAAGVKEHIIVKTNMDAWGGSALTDKNIDVPEGDVNRTDIPITYVPARNMIFLAFAASYAEKIGAQDIFIGVSEVDYSGYVDCRQEFLDAMEQAINKGTVCGVEGRKIKINAPFINMTKAEEIKLGMELGVDYSLTWSCYKGEDKACGVCDSCLLRLKAFKEAGFEDPIEYKEEK

SEQ ID NO: 42901 - protein, 214 aa, Thermocrinis albus
  REGION 1..214: note = tr|D3SL05|D3SL05_THEAH 7-cyano-7-deazaguanine synthase OS=Thermocrinis albus (strain DSM 14484 / JCM 11386 / HI 11/12) OX=638303 GN=queC PE=3 SV=1
MRRILVLLSGGMDSAVLLWLAKREFEEVYAISFDYGQRHSVELKYAKILAQLAGVKEHILVEVPSYRYIKGSALIDTRVEVPTGEYPTHAPPITTVPMRNLVFLAIASSFADALEIDHVGIGVHALDTPYPDCRPEFITAAEAAINAASVQTATKKTRVHVFAPFLGMTKRQIALLGKELGVPFEKTYSCYRGTEPPCGECPTCIQREEALRDL

SEQ ID NO: 42902 - protein, 196 aa, Thermocrinis albus
  REGION 1..196: note = tr|D3SL76|D3SL76_THEAH 7-cyano-7-deazaguanine synthase OS=Thermocrinis albus (strain DSM 14484 / JCM 11386 / HI 11/12) OX=638303 GN=Thal_0873 PE=3 SV=1
MKKVVVLFSGGVESSTLLYLKLKEGVCVYPVYVREGMSWEHAELFWAKKVWHHFKESYTNLMPLCVCRGNGVPPRKGELFIPLRNLRLAASVATYALRRKAYEINIGSLGAYPFPDNNLPYLKEVEKLLSVGSGQDIKLEAPLFGMDKRRIVELYGPHVPLHLTFSCIKPIRKGNKFFHCGKCVKCLEREEALSRL

SEQ ID NO: 42903 - protein, 201 aa, Thermocrinis minervae
  REGION 1..201: note = tr|A0A1M6Q6A9|A0A1M6Q6A9_9AQUI 7-cyano-7-deazaguanine synthase OS=Thermocrinis minervae; OX = 381751 GN=SAMN05444391_0095 PE=3 SV=1
MNVDKVGVLFSGGVESTTLLYMYLRKGFLVYPFYVKSGMLWENLELENAANLWVYTKRLYRNLMAIKIVPYKQSNFLKVPTSEEELFIPARNLSIIVAVAPFLRMKGIKTLAIGSLGAYPFPDNSLDYLKKVQELLSIGMAFSVNIEAPLFGMDKRYIVKSYKDIVPYYLTLSCANPRRIKGKITPCGRCIKCLERFQAFD

SEQ ID NO: 42904 - protein, 216 aa, Thermocrinis minervae
  REGION 1..216: note = tr|A0A1M6SMG3|A0A1M6SMG3_9AQUI 7-cyano-7-deazaguanine synthase OS=Thermocrinis minervae; OX = 381751 GN=queC PE=3 SV=1
MKRILVLLSGGMDSAVLLWLCKKDFQEVYAVSFDYGQRHRVELKYALELGRIAGVKEHFVVEVPVYRSLKGVSALTDASLDVPKGDYPKDEPPITTVPMRNLVFLALASAIADAYEIDYIGIGVHSLDSPYPDCRPEFITSAEACITSASTYSSKTKRRMHVYAPFLGMTKREVALLGKELGVPFEKTYSCYLGTEPPCGECPTCLQREEALKGVL

SEQ ID NO: 42905 - protein, 213 aa, Thermocrinis ruber
  REGION 1..213: note = tr|W0DCY1|W0DCY1_9AQUI 7-cyano-7-deazaguanine synthase OS=Thermocrinis ruber OX=75906 GN=queC PE=3 SV=1
MKSIIVLFSGGLDSTTLLWLAKKEFDRVIAISFDYGQRHKVELKHAKELAKLAGVEHLIVDVPSLKGITTSALLEGGPEVPSEDYSNAPPITTVPMRNLIFLAIAGAYADALGIDTVGIAVHSLDTPYPDCRPEFITSAQSALTAGSILTATKKVPMKIYAPFLGMTKREIALLGKELGVPFEKTYSCYRGTEPPCGECATCKQREEALKGLL

SEQ ID NO: 42906 - protein, 206 aa, Thermocrinis ruber
  REGION 1..206: note = tr|W0DF90|W0DF90_9AQUI 7-cyano-7-deazaguanine synthase OS=Thermocrinis ruber OX=75906 GN=THERU_03630; PE = 3 SV=1
MKKSVVLFSGGVESTCVLYLKLLEGQVVYPVYVKCGMPWERLEYVKATELWQETKRKFSKLMPIKVLPLKTYHKKYKAIETEEELFIPLRNLTLLTAVAGYALSKRAESVSIGSLGLYPFPDNNLAYLKEVERLITEGSKQRLKVEVPLFGMEKGEVVKRFSKWVPLHRTFSCVNPVLRNGKILHCGICIKCKEREEAFKEAQIPL

SEQ ID NO: 42907 - protein, 226 aa, unidentified
  source 1..226: note = Thermodesulfatator autotrophicus
  REGION 1..226: note = tr|A0A177E592|A0A177E592_9BACT 7-cyano-7-deazaguanine synthase OS=Thermodesulfatator autotrophicus OX=1795632 GN=queC PE=3 SV=1
MPRPIAVCLVSGGLDSCVAAACAAKNYELAFLHVKYGQRTEARELRAFNKIADFYKVKYRLITSVPALKDIGGSALTDEKLKVPEGSVSTDGIPITYVPFRNAHFLAIAVSWGEVLGAKRIFIGASQVDFSGYPDCRASFFEAFNQVIKEGTRPETDIRIETPLINLSKAEIVKLGIKLGAPLHLTWSCYQREDMACGRCESCLLRLKGFKEAGLEDPIPYVRENI

SEQ ID NO: 42908 - protein, 226 aa, Thermodesulfatator indicus
  REGION 1..226: note = tr|F8ADT8|F8ADT8_THEID 7-cyano-7-deazaguanine synthase OS=Thermodesulfatator indicus (strain DSM 15286 / JCM 11887 / CIR29812) OX=667014 GN=queC PE=3 SV=1
MTKPIAICLLSGGLDSCVAAACAAREHELAFLHVNYGQRTEARELRAFNEIADFYQVKYRLVTSVPALKDIGGSALTDENLAVPEGSVSSQGIPITYVPFRNAHFLAIAVSWGEVIGARRIFIGASQVDFSGYPDCRASFFEAFNQVIKEGTRPETDIRIETPLINLSKAEIVKLGKELGAPLHLTWSCYQREDKACGRCESCLLRLKGFKEAGLKDPIPYVEETL

SEQ ID NO: 42909 - protein, 217 aa, unidentified
  source 1..217: note = Thermodesulfitimonas autotrophica
  REGION 1..217: note = tr|A0A3N5AXL3|A0A3N5AXL3_9THEO 7-cyano-7-deazaguanine synthase OS=Thermodesulfitimonas autotrophica OX=1894989 GN=queC PE=3 SV=1
MKSVVLLSGGLDSAVCLGYAVRDGQVVLALTFDYGQLAARREIEAAAALAAHYGVTHQVVALPFLSAITTTGLVTGEDIPEPEVARLDDQEEATARAARVWVPNRNGIFLNIAAAFAEHLGAAAVVAGFNREEAAAFPDNSAAFVAAATEALRYSTRGRVRVVSYTQQLTKVEIVELGRRLGVPLELVWSCYRGGETMCGRCESCQRFLRAVAAAKV

SEQ ID NO: 42910 - protein, 235 aa, unidentified
  source 1..235: note = Thermodesulfobacteria bacterium
  REGION 1..235: note = tr|A0A496QJ44|A0A496QJ44_9BACT 7-cyano-7-deazaguanine synthase OS=Thermodesulfobacteria bacterium OX=2202153 GN=queC PE=3 SV=1
MTFSSDDKQHKLPLAVCLVSGGLDSCVAAAIAIRNCRPAFLHVNYGQLTEERELLAFDAIADHYGVKDRLKVDMSYLKSIGGSALTDPAIPVPEESLGESGIPVTYVPFRNTHLLAVAVSWAEVLGAGYIYIGATEVDSSGYPDCRKSYFDACQLLIKEGTLPETKIEIITPLIDYNKGMVVKEGLALKAPLRLTWSCYQNQDVACGKCDSCLLRIKGFAAAGVSDPIRYANVTV

SEQ ID NO: 42911 - protein, 224 aa, unidentified
  source 1..224: note = Thermodesulfobacteriales bacterium
  REGION 1..224: note = tr|A0A524JT44|A0A524JT44_9BACT 7-cyano-7-deazaguanine synthase; OS = Thermodesulfobacteriales bacterium OX=2528040 GN=queC; PE = 3 SV=1
MKTKAVIIASGGIDSSTLLYKMVKDGFQVYVLTFIYGQKHLKEIEYAKVIAQRLEVDHRVVDLSAMKGLLSGSALTDANVEVPNVPETADHYETLKSTIVPNRNAIFLSIAIGYAVSLEANHVYFGAHFSDRGVYPDCRKEFVEAFQYSERLANDNPDLVLDAPFVNIDKSEIVKLGAELGVPFKDTWTCYKGGEKHCGVCSSCRERKRAFAQSGVPDPTEYEQ

SEQ ID NO: 42912 - protein, 229 aa, Thermodesulfobacterium commune
  REGION 1..229: note = tr|A0A101FIQ1|A0A101FIQ1_9BACT 7-cyano-7-deazaguanine synthase OS=Thermodesulfobacterium commune OX=1741 GN=queC PE=3 SV=1
MSLEITEQKKKKLAVILLSAGMDSAVCASVAAQDHALAFLHFQYGQKAAKKELECFYRLVDHFKPQKYLVVELSFFKIIGGSSLTSEEMKIPQPSNTQEIPSTYVPFRNGVFLSLAVAWAEVIGAEKIFIGVNEIDFSGYPDCRKEFIQAFNQAANLGTKPETKIMIETPLIHLSKKEIVELGRKLNTPFHLTWSCYRETEKACGGCDSCQIRLKAFKEAGIEDPIEYA

SEQ ID NO: 42913 - protein, 229 aa, Thermodesulfobacterium commune
  REGION 1..229: note = tr|A0A075WSR1|A0A075WSR1_9BACT 7-cyano-7-deazaguanine synthase OS=Thermodesulfobacterium commune DSM 2178 OX=289377 GN=queC PE=3 SV=1
MSLNNHKNRKADLALVLLSAGMDSAVCASVAAQEHALAFLHFQYGQKAAKKELECFYRLVDHFKPQKYLVVELTFFKIIGGSSLTSEEIEISESLNTQEIPSTYVPFRNGVFLSLAVAWAEVIGAEKIFIGVNEIDFSGYPDCRKEFIQAFNQAANLGTKPETKIMIETPLIHLSKKEIVELGIKLNTPFHLTWSCYRETEKACGRCDSCQIRLKAFKEAGIEDPIEYA

SEQ ID NO: 42914 - protein, 222 aa, unidentified
  source 1..222: note = Thermodesulfobacterium geofontis
  REGION 1..222: note = tr|F8C3V8|F8C3V8_THEGP 7-cyano-7-deazaguanine synthase OS=Thermodesulfobacterium geofontis (strain OPF15) OX=795359 GN=queC PE=3 SV=1
MKNELAIVLLSGGMDSTVCASIASQNYRLAFLHFQYGQKAQKKELECFYKLIEFFKPEKFQIVYLPFFKDFGGSSLISEELEIPEKQEKGIPSTYVPFRNGIFLSIATAWAEVIGAKKIFIGVNEVDFSGYPDCRKIFIEKFNQAINVGTKPETQIEIETPIINLTKKEIVELGIKLNTPFHLTWSCYRGGEKACGKCDSCNLRLKAFKEAGIKDPILYENV

SEQ ID NO: 42915 - protein, 210 aa, unidentified
  source 1..210: note = Thermodesulfobacterium geofontis
  REGION 1..210: note = tr|A0A2N7PMX1|A0A2N7PMX1_9BACT 7-cyano-7-deazaguanine synthase OS=Thermodesulfobacterium geofontis OX=1295609 GN=queC PE=3 SV=1
MDSAVCASIASQTNRLAFLHFQYGQKAYKKELECFKNLVEFFKPEKAEIVNLPFFKNWGGSSLISNSLEIPETEVGEIPSTYVPFRNGIFLSIATAWAEIIGATKIFIGVNQIDFSGYPDCRSEFIEAFNKAISIGTKPETKIKIETPIINLTKKEIVKLGIKLGTPFHLTWSCYKETEIACGKCASCKLRLKAFKEAGIPDPLPYAHQF

SEQ ID NO: 42916 - protein, 216 aa, unidentified
  source 1..216: note = Thermodesulfobium acidiphilum
  REGION 1..216: note = tr|A0A2R4W289|A0A2R4W289_9FIRM 7-cyano-7-deazaguanine synthase OS=Thermodesulfobium acidiphilum OX=1794699 GN=queC PE=3 SV=1
MNIVHIFSGGLDSTTLLYYLLNEGHKVKTISFFYGQKHNKELECSKNIAKKLNIENKLIDLSALKNVFGKSSLTSEIDVPEGHYNDINMKSTVVPNRNMIFLSIAISYAISSNFDAVSIGVHAGDHAIYPDCRPVFINRMKEVAKVSDYNEIDILTPFLDFKKCEIVKIGLELKVPYEMTWTCYRGEEKPCLKCGACTERLEAFKLNNVKDPLLLI

SEQ ID NO: 42917 - protein, 216 aa, Thermodesulfobium narugense
  REGION 1..216: note = tr|A0A2J6XC23|A0A2J6XC23_9FIRM 7-cyano-7-deazaguanine synthase OS=Thermodesulfobium narugense OX=184064 GN=queC PE=3 SV=1
MNIVHIFSGGLDSTTLLYYLLNEGHKVKTISFFYGQKHNKELECSKNIAKKLNIENKLIDLSALKNVFGKSSLTSEIDVPEGHYNDINMKSTVVPNRNMIFLSIAISYAISSNFDAVSIGVHAGDHAIYPDCRPVFINRMKEVAKVSDYNEIDILTPFLNFKKCEIVKIGLELKVPYEMTWTCYRGEEKPCLKCGACTERLEAFKLNNVKDPLLLI

SEQ ID NO: 42918 - protein, 216 aa, Thermodesulfobium narugense
  REGION 1..216: note = tr|M1E8W1|M1E8W1_9FIRM 7-cyano-7-deazaguanine synthase OS=Thermodesulfobium narugense DSM 14796; OX = 747365 GN=queC PE=3 SV=1
MNIVHIFSGGLDSTTLLYYLLNQGHKVKTISFFYGQKHKKELECSKNIARKLNIENKLIDLSALKDIFGKSSLTSDMDIPEGHYNDTNMKSTVVPNRNMIFLSIAISYAISSNFDAVSIGVHAGDHAIYPDCRPVFINKMKDVAKVSDYSEIGILAPFLDLKKYEIVKIGLELKVPYEMTWTCYKGEEKPCLKCGSCTERLEAFELNNVKDPLVFI

SEQ ID NO: 42919 - protein, 234 aa, Thermodesulforhabdus norvegica
  REGION 1..234: note = tr|A0A1I4SMJ8|A0A1I4SMJ8_9DELT 7-cyano-7-deazaguanine synthase OS=Thermodesulforhabdus norvegica OX=39841 GN=queC PE=3 SV=1
MNRSRAVVLLSGGIDSTTTLAVAKHQGYELYALTFRYGQRHEKEIQSARRLARVFGVKKHLILEIPLHLIGASALTDDIPVPKDVPQDKIGRNVPITYVPGRNTIFLACAVAWGETVGAYDIFIGANALDYSGYPDCRPEFIEAFEKVANLGTRAGSEEGQRFRIHAPLISLSKKEIILKGISLGVDYALTHSCYDPDPQGRACGRCESCILRRKGFKEAGIPDPTIYAEEQQK

SEQ ID NO: 42920 - protein, 221 aa, Thermodesulfovibrio aggregans
  REGION 1..221: note = tr|A0A2J6WGI8|A0A2J6WGI8_9BACT 7-cyano-7-deazaguanine synthase OS=Thermodesulfovibrio aggregans OX=86166 GN=queC PE=3 SV=1
MKAVVLLSGGIDSSTTLAIAKNEGFECYAISFDYAQRHRIELDFAKKVAKHIGVKEHLIISFDLRKIGGSALTSEIDVPAGTQEGIPVTYVPARNTIFLSFALAWAEVLNAPFIFIGANVVDYSGYPDCRPEYLQAFERMANLATKISVEGKLQFKIHAPLLYLTKAEIIKKGIELGLDYSLTWSCYDPQGDPPKPCLKCPSCLFRLKAFEEAGIKDPLLK

SEQ ID NO: 42921 - protein, 221 aa, Thermodesulfovibrio aggregans
  REGION 1..221: note = tr|A0A0U9HQP5|A0A0U9HQP5_9BACT 7-cyano-7-deazaguanine synthase OS=Thermodesulfovibrio aggregans OX=86166 GN=queC PE=3 SV=1
MKAIVLLSGGIDSSTTLAIAKHEGFDCFALSFAYGQRHKIELEAARKVANHIGVKEHLIISFDLRKIGGSALTSEIDVPSGTPEGIPVTYVPARNTIFLSFALAWAEVIEAPYIFIGANIVDYSGYPDCRPEYLQAFERMANLATKVAVEGKLQFKIQAPLLYLTKGEIIKKGFELGVDYSLTWSCYNPQGEPPKPCLKCPSCLYRLKGFEEAGIKDPLLR

SEQ ID NO: 42922 - protein, 222 aa, Thermodesulfovibrio sp.
  REGION 1..222: note = tr|A0A1C3FI55|A0A1C3FI55_9BACT 7-cyano-7-deazaguanine synthase OS=Thermodesulfovibrio sp. N1 OX=1871110 GN=queC PE=3 SV=1
MKKAVVLLSGGIDSSTTLALAKNEGFECYAISFDYKQRHSIELEFAKKVAKHVGVKEHLIVSFDLRKIGGSALTSKIEIPKDTQEGIPVTYVPARNTIFLSFALAWAEVLQTPYIFIGANVVDYSGYPDCRPEYLSAFEYMANLATKASVEGTIKFKIQAPLLYLTKTEIIKKGIELGLDYSLTWSCYYPQGEPPKPCLKCPSCIYRLKGFEEAGIKDPLLK

SEQ ID NO: 42923 - protein, 262 aa, Thermodesulfovibrio sp.
  REGION 1..262: note = tr|A0A1G3Y1P8|A0A1G3Y1P8_9BACT 7-cyano-7-deazaguanine synthase OS=Thermodesulfovibrio sp. RBG_19FT_COMBO_42_12 OX=1802373 GN=queC PE=3 SV=1
MNKKAVILLSGGIDSSTTFAIAKSEGYELYALSFDYNQQHKRELESARLVASTLKTLKHLIIKFDLREVGGSALTSEMKVPKTGENLPPHPPSAIPVTYVPARNTIFLSFAIAWAEVLEAENIFIGANVIDYSGYPDCRPEYLKAFEDMANLATKASVEGRLRFRIKAPLVSMKKSEIIKKGVELGLDYSLTWSCYDPQPAISGVESSKFKVQSYKEENSKLHLELDSPPGSKLVPCGRCDSCVFRAKGFQEAGIEDPLLKL

SEQ ID NO: 42924 - protein, 224 aa, Thermodesulfovibrio yellowstonii
  REGION 1..224: note = tr|B5YI03|B5YI03_THEYD 7-cyano-7-deazaguanine synthase OS=Thermodesulfovibrio yellowstonii (strain ATCC 51303 / DSM 11347 / YP87) OX=289376 GN=queC PE=3 SV=1
MKKAVILLSGGIDSSTTLIIAKSEGFECYALSFDYGQRHKIEIEAAKKVAKHIGVKEHLIVSFDLRKIGGSALTSKMEIPKEEIEGIPITYVPARNTIFLSFGLAWAEVLQCPNIFIGANIVDYSGYPDCRPEYLQAFERMANLATKISVEGTLKFKINAPLLYLTKSEIIKKGIELGLDYSLTWSCYDPQGDPENPSPCLKCPSCIYRLKGFKEAGIIDPLVK

SEQ ID NO: 42925 - protein, 229 aa, Thermoflavimicrobium dichotomicum
  REGION 1..229: note = tr|A0A1I3RQX7|A0A1I3RQX7_9BACL 7-cyano-7-deazaguanine synthase OS=Thermoflavimicrobium dichotomicum OX=46223 GN=queC PE=3 SV=1
MKEKAVIVLSGGLDSTTCMGIAKQRGYDLYPITFFYNQRHNREVEQAKKIAEYYEVGHQHKVVNVSFLGEIGGSALTDQAIHVPTDGVKDEIPSTYVPARNLIFLSLATAYAEVIGAKVIYTGVTAVDYSGYPDCRPEFIQSMTETINLATKLGVTSEEKLRIETPLIHLSKAEIIRIGLDLQVPYELTTSCYLGEEEACGECDSCRLRLKGFEENNAKDPIRYRTAAS

SEQ ID NO: 42926 - protein, 227 aa, Thermoflavimicrobium sp.
  REGION 1..227: note = tr|A0A364K151|A0A364K151_9BACL 7-cyano-7-deazaguanine synthase OS=Thermoflavimicrobium sp. FBKL4.011 OX=2137476 GN=queC PE=3 SV=1
MKEKAVIVLSGGLDSTTCMGIAKQKGYDLYPITFFYNQRHNREVEQAKKVAEYYGVEHHHKIVNVSFLGDIGGSALTDQAMDVPTTSIAEEIPSTYVPARNLIFLSLATAYAEVIGAQAIYTGVTAVDYSGYPDCRPEFIQSMTDTINLATKMGVTGEDRLRIKTPLIHLSKAEIIRIGLDLQVPYELTTSCYLGEEEACGVCDSCRLRLKGFAENGAQDPIRYQSC

SEQ ID NO: 42927 - protein, 247 aa, unidentified
  source 1..247: note = Thermoflexus hugenholtzii
  REGION 1..247: note = tr|A0A2A9HE94|A0A2A9HE94_9CHLR 7-cyano-7-deazaguanine synthase OS=Thermoflexus hugenholtzii OX=1495650 GN=queC PE=3 SV=1
MANERARLGVVLLSGGLDSTTVAAHAVREGGEVRALSIAYGQRHARELAAARAVAEALGIPLVEADAAFYARLAAHSALTSSAFAVPADRPGEAMAAEVPITYVPLRNTFFVTLAAAALESWLLDRIEGGGADPKGLEGVIYVGANAIDYSGYPDCRPEFYRAMEEVIRLGSKVGSAYGVPVRIAAPIIRMSKAEIVRYGLELGAPLGLTWSCYLGGERPCGSCDACRLRAAGFAAAGARDPALEAG

SEQ ID NO: 42928 - protein, 226 aa, unidentified
  source 1..226: note = Thermogemmatispora argillosa
  REGION 1..226: note = tr|A0A455T693|A0A455T693_9CHLR 7-cyano-7-deazaguanine synthase OS=Thermogemmatispora argillosa OX=2045280 GN=queC PE=3 SV=1
MSSRPKAIAIVSGGLDSVTLAHLLHAQGYQLHILSFDYGQRHRKELLFAERCARRLEAAFSLLDLRQLGQHFKGSALTDESVAVPDGHYAAANMAITVVPNRNAIMLAIAYGIAVAEEAEVVAFAAHAGDHFIYPDCRPAFIEAFGAMERLAVEGHGHPRLHLEAPFAHLKKEQIVSLGAALGVPFAETWSCYKGGEKHCGTCGTCHERKEAFQLAGVPDPTEYLQ

SEQ ID NO: 42929 - protein, 225 aa, unidentified
  source 1..225: note = Thermogemmatispora aurantia
  REGION 1..225: note = tr|A0A5J4JX08|A0A5J4JX08_9CHLR 7-cyano-7-deazaguanine synthase OS=Thermogemmatispora aurantia OX=2045279 GN=queC PE=4 SV=1
MARPKAIAVVSGGLDSVTLAHLLHAQGYQLHLLSFDYGQRHRKELFFAERCAQRLEAAFSLLDLRQLGQHFKGSALTDESVAVPDGHYAAANMAITVVPNRNAIMLAIAYGIAVAEEAEVVAFAAHAGDHFIYPDCRPAFIEAFGAMERLAVEGHGHPRLHLEAPFAHLKKEQIVSLGAALGVPFVETWSCYKGGEKHCGTCGTCNERKEAFQLAGIPDPTDYLQ

SEQ ID NO: 42930 - protein, 225 aa, unidentified
  source 1..225: note = Thermogemmatispora tikiterensis
  REGION 1..225: note = tr|A0A328VFA0|A0A328VFA0_9CHLR 7-cyano-7-deazaguanine synthase OS=Thermogemmatispora tikiterensis OX=1825093 GN=queC PE=3 SV=1
MSRPKAIAVVSGGLDSVTLAHLLHAQGYQLHLLSFDYGQRHRKELFFAERCAQRLEAAFSLLDLRQLGQHFKGSALTDESVAVPDGHYAAANMAITVVPNRNAIMLAIAYGIAVAEEAEVVAFAAHAGDHFIYPDCRPAFIEAFGAMERLAVEGHGHPRLHLEAPFAHLKKEQIVCLGAALGVPFVETWSCYKGGEKHCGTCGTCNERKEAFQLAGVPDPTDYLQ

SEQ ID NO: 42931 - protein, 234 aa, unidentified
  source 1..234: note = Thermogutta terrifontis
  REGION 1..234: note = tr|A0A286RLJ9|A0A286RLJ9_9PLAN 7-cyano-7-deazaguanine synthase OS=Thermogutta terrifontis; OX = 1331910 GN=THTE_4239 PE=3 SV=1
MHGTKLNQNDSSVAVLLSGGLDSSLMLAKLVEDGRCVAPLYVRSGLFWEQAELAAVRRILAWFADRVRPLAILELPVRDIYGDHWSLTGEQIPDADSPDEAVFLPGRNLLLLVKAGLWCRQQGVPFLALGILDTNPFADASEEFLRTVETALNLYGDPPLQIIRPLQGVSKTEWMKWGQRWPLHETFSCIAPMDGLHCGGCNKCAERRRAFREAGIPDLTRYASDLDGKSVSPA

SEQ ID NO: 42932 - protein, 233 aa, unidentified
  source 1..233: note = Thermogutta terrifontis
  REGION 1..233: note = tr|A0A286RM67|A0A286RM67_9PLAN 7-cyano-7-deazaguanine synthase OS=Thermogutta terrifontis; OX = 1331910 GN=queC PE=3 SV=1
MASQASRGAVVLLSGGMDSSTTAAIARHEGFRLFALTIDYGQRHRLELESARKVAQFLNAAEHIVLRVDLTCFGRSALTDTIAVPKDRPVTAGHGEIPVTYVPARNTVFLALALAYAESRGLADIFIGANAVDYSGYPDCRPEFIEAFEHLANLGTKAGVEGRTRFRIHAPLLQMTKAQIIRRGIELGLDYGLTHTCYDPTPDGLACGRCDACQLRKKGFAEAGLQDPIAYVC

SEQ ID NO: 42933 - protein, 212 aa, Thermohydrogenium kirishiense
  REGION 1..212: note = tr|A0A4R4A571|A0A4R4A571_9FIRM 7-cyano-7-deazaguanine synthase OS=Thermohydrogenium kirishiense OX=937254 GN=EDC21_12325 PE=3 SV=1
MEDNKVVLLYSGGIDSTVLLYRLVESKYDVYPFFINYGQNSVKGEITAIYKILDEYLKKKLFILNVPEIRNIGKGSLVGEYPKNLGSIEEWYQSEFFPNRNMILISIGAAYCYKIGASKLAIGVVGISYKDTTKIFLSGIERLLNNSLKNIKIIAPFAELPREEVVKESVRLNVPIELTFSCNSSGERHCLLCTSCYEREKALQLRQKLIIR

SEQ ID NO: 42934 - protein, 221 aa, unidentified
  source 1..221: note = Thermolongibacillus altinsuensis
  REGION 1..221: note = tr|A0A4R1QLR9|A0A4R1QLR9_9BACI 7-cyano-7-deazaguanine synthase OS=Thermolongibacillus altinsuensis OX=575256 GN=queC PE=3 SV=1
MKNEKAVVVFSGGQDSTTCLFWALKHFAEVEAVTFNYNQRHKLEIEVASSIARELNINHTILDLSLLNQLAPNALTRKDIAIEHKEGELPSTFVDGRNLLFLSFAAVFAKQRGARHLVTGVCETDFSGYPDCRDIFIKSLNVTLNLAMDYQFVIHTPLMWLNKAETWKLADELGAFSFIREKTLTCYNGIIADGCGECPACHLRRRGLEQYLAEKEGVEKK

SEQ ID NO: 42935 - protein, 226 aa, Thermomicrobium roseum
  REGION 1..226: note = tr|B9L187|B9L187_THERP 7-cyano-7-deazaguanine synthase OS=Thermomicrobium roseum (strain ATCC 27502 / DSM 5159 / P-2) OX=309801 GN=queC PE=3 SV=1
MEPRKRSQRAVVLLSGGLDSTTLAYLLDAYGFVLYGLSFRYGQRHERELEAARAIAEKLRFAEHRVVTIDLAQWGGSSLVGSGEIPRQPTSGIPSTYVPVRNLVFLAIAHAYAEAIDADAVAIAVSQVDYSGYPDCRGEFLAAYQQAADLASRRFVETGRRIPVLAPFLDVPKSAIVRLGLRLGVDYAETWSCYRGGERPCQECDSCRLRAQAFAEAGVPDPLLQR

SEQ ID NO: 42936 - protein, 236 aa, Thermomonas haemolytica
  REGION 1..236: note = tr|A0A4R3N6P8|A0A4R3N6P8_9GAMM 7-cyano-7-deazaguanine synthase OS=Thermomonas haemolytica; OX = 141949 GN=queC PE=3 SV=1
MIESSKPAVVLVSGGMDSAVVLAIAREAGFAPYALSVRYGQRHTSELDAAARVASALGAVAHKTVHVDLRSIGGSALTDDIAVPTDADGHVIGQGIPSTYVPARNTIMLSVALGWAEVLGSTDLFCGVNAVDYSGYPDCRPEFIAGFEALANLATKAGVEGSRFRVHAPLMRMSKADIAREGLRLGVDFAQTVSCYQADAEGRACGQCDACRLRAQGFADAGLPDPTRYVPGAGIG

SEQ ID NO: 42937 - protein, 247 aa, Thermomonas hydrothermalis
  REGION 1..247: note = tr|A0A1M4WBD3|A0A1M4WBD3_9GAMM 7-cyano-7-deazaguanine synthase OS=Thermomonas hydrothermalis OX=213588 GN=queC PE=3 SV=1
MPPATDTIFLPMLTPTKPAVVLVSGGMDSAVVLAIAREAGFAPHALSVRYGQRHTSELDAAARVARALGAVAHKTVHVDLRSIGGSALTDDIAVPTDADGHVIGQGIPSTYVPARNTIMLSVALGWAEVLGATDLFCGVNAVDYSGYPDCRPAFITAFEALANLATKAGVEGQKFRVHAPLLHLSKAEIVREGLRLGVDFAQTVSCYQADPEGRACGHCDACRLRAQGFADAGVADPTRYVNGARIG

SEQ ID NO: 42938 - protein, 235 aa, Thermomonas sp.
  REGION 1..235: note = tr|A0A5B7ZPB2|A0A5B7ZPB2_9GAMM 7-cyano-7-deazaguanine synthase OS=Thermomonas sp. SY21; OX = 2202149 GN=queC PE=3 SV=1
MSASRKPAVVLVSGGMDSAVVLAIAREAGFDVHALSVRYGQRHTSELDAADRVSNALGAVAHKTVHVDLRSIGGSALTDDIAVPTDDDGHEIGVGIPSTYVPARNTIMLSLALGWAEVLGSTDLFCGVNAVDYSGYPDCRPEFIAGFEALANLATKAGVEGSRFRVHAPLMRMSKADIVREGLRLGVDFSQTVSCYQADADGRACGHCDACRLRAQGFAEAGVADPTRYVAGVIG

SEQ ID NO: 42939 - protein, 223 aa, unidentified
  source 1..223: note = Thermophagus xiamenensis
  REGION 1..223: note = tr|A0A1I2EZR0|A0A1I2EZR0_9BACT 7-cyano-7-deazaguanine synthase OS=Thermophagus xiamenensis OX=385682 GN=queC PE=3 SV=1
MKKAVVLLSGGLDSSVALYLAKSQGFKLYALSFDYGQQHERELQAARAVAQSARVEEHQVVNMKLDLWGGSSLTDKSIEIKDGDVNRKDIPDTYVPARNMVFLSVAASYAEAIGAQDIFIGVSQVDYSGYVDCREEFIEAMEKAINKGTVMGAEKNQPIRIHAPFVYKTKADEIRLGRQLNVPFELTWSCYRGGEKPCGKCDSCLLRAKAFAEAGVEDKALNQ

SEQ ID NO: 42940 - protein, 223 aa, Thermosinus carboxydivorans
  REGION 1..223: note = tr|A1HNF2|A1HNF2_9FIRM 7-cyano-7-deazaguanine synthase OS=Thermosinus carboxydivorans Nor1 OX=401526; GN = queC PE=3 SV=1
MFGLNKENALVVFSGGQDSTTCLFWAMKHFQEVEAVTFDYGQRHRAEIECAQKIAAEQGIAHTILDLSLLNQLAPSALTRADIEVKAGENGGLPTTFVPGRNLLFLSFAAVLARQKNIRHIVTGVCETDFSGYPDCRDAFIKSLNVTIQLAMDYQFVIHTPLMWLNKAETWELADQLGVLDYIRSNTLTCYHGVIGDGCGQCPACRLRVAGLNAYLAKRGRMK

SEQ ID NO: 42941 - protein, 248 aa, Thermosporothrix hazakensis
  REGION 1..248: note = tr|A0A326U693|A0A326U693_9CHLR 7-cyano-7-deazaguanine synthase OS=Thermosporothrix hazakensis OX=644383 GN=queC PE=3 SV=1
MSDAMKNTRRAVLIVSGGMDSCVLSYYYAAAGFNLHLLSFDYGQRHLKELDYAKRYIEHLRQRYSSGPQALEILHETIELPIARLSPNSTSALLNADVEMPHGHYSDDNMKITVVPYRNPNMLLQAATVAWNEGASVIAYAAHAGDHSQYPDCRPAFVEAFNTMLARSMDDNTVTVEVPFMRFTKAQIARLGASLGVPFEQTWSCYEGGEQHCGLCGTCVERREAFLLAGVPDPTVYEREPDPSVYER

SEQ ID NO: 42942 - protein, 248 aa, Thermosporothrix sp.; identical to SEQ ID NO: 42941
  REGION 1..248: note = tr|A0A455SG52|A0A455SG52_9CHLR 7-cyano-7-deazaguanine synthase OS=Thermosporothrix sp. COM3 OX=2490863 GN=queC PE=3 SV=1

SEQ ID NO: 42943 - protein, 242 aa, Thermosulfidibacter takaii
  REGION 1..242: note = tr|A0A0S3QUH6|A0A0S3QUH6_THET7 7-cyano-7-deazaguanine synthase OS=Thermosulfidibacter takaii (strain DSM 17441 / JCM 13301 / NBRC 103674 / ABI70S6) OX=1298851 GN=que C PE=3 SV=1
MKKALVIFSGGLDSTTCLYWAKAHFDEVYTVTFNYGQTHRIEVAFAQKIAEKVGVKEHKTFHLDLTQIGGSALTDPSIEIPDRDEDEILANNIPVTYVPFRNGIFLSIAAAFAETKGIQHIVGGWNAVDFSGYPDCRPEFVKAMEQAINTGTKMAAEGKPFSIHSPLINLTKSQIIALGLSYGADYSYSLSCYRGQEVPCFRCDSCKLRMKGWKGVGIIDHLVERLIREGKLKDLPEAYKNR

SEQ ID NO: 42944 - protein, 225 aa, unidentified
  source 1..225: note = Thermosulfurimonas dismutans
  REGION 1..225: note = tr|A0A179D4V0|A0A179D4V0_9BACT 7-cyano-7-deazaguanine synthase OS=Thermosulfurimonas dismutans OX=999894 GN=queC PE=3 SV=1
MKRPLAVVLVSGGLDSCVTAAVAAQEHDVAFLHVKYGQRTESREEKAFFDLCEHFRPKFRLVTEVPALKAIGGSALTDTKLSVPEEEPDPERIPITYVPFRNAHFLCVAVSWAEVIGAEKIFIGANQVDFSGYPDCRRSFFDAFERTIEEGTRPETHIRIETPLINLTKPEIVRLGVQLGAPFHLTWSCYQNEKVACGRCESCRLRLKAFSEAGLEDPIPYEESL

SEQ ID NO: 42945 - protein, 233 aa, unidentified
  source 1..233: note = Thermosynechococcus elongatus
  REGION 1..233: note = sp|Q8DI59|QUEC_THEEB 7-cyano-7-deazaguanine synthase; OS = Thermosynechococcus elongatus (strain BP-1) OX=197221; GN = queC PE=3 SV=1
MVTTQKAVVLLSGGLDSSTVLFRAKALGYACYALSFDYGQRHRRELEAAIAIATSAGVVEHQILPLNLRLWGGSALTDLSIDLPRDRDLATMSQEIPVTYVPARNTIFLSVALAYAEALEARSVHIGVNALDYSGYPDCRPDYIAAMQEVYRLGTKQGREGQPIEIVTPLIDLHKTDIIRLGHGYGVPWEKTWSCYSDGQQACGRCDACRLRLAAFAELGLVDPLPYAVHPPL

SEQ ID NO: 42946 - protein, 233 aa, unidentified
  source 1..233: note = Thermosynechococcus elongatus
  REGION 1..233: note = tr|A0A3B7MCG1|A0A3B7MCG1_9CYAN 7-cyano-7-deazaguanine synthase OS=Thermosynechococcus elongatus PKUAC-SCTE542 OX=2016101 GN=queC PE=3 SV=1
MMTTQKAVVLLSGGLDSSTVLFRAKALGYACYALSFDYGQRHRRELEAAIAIASVAGVIQHQIVPLNLRLWGGSALTDSTLDLPRDRDLATMGQEIPITYVPARNTIFLSVALAYAEALGAQTVHIGVNALDYSGYPDCRPDYIAAMQEVYRLGTKQGREGQPIEIVTPLIELHKKDIIRLGNEYGVPWEKTWSCYSDGEQACGRCDACRLRLAAFAELGLEDPLPYAVHPPL

SEQ ID NO: 42947 - protein, 233 aa, unidentified
  source 1..233: note = Thermosynechococcus sp.
  REGION 1..233: note = tr|A0A5C2M6Q3|A0A5C2M6Q3_9CYAN 7-cyano-7-deazaguanine synthase OS=Thermosynechococcus sp. CL-1 OX=2583530 GN=queC PE=3 SV=1
MMTTPKAVVLLSGGLDSSTVLFRAKALGYACYALSFDYGQRHRRELEAAIAIASAAGVIQHQILSLNLQLWGGSALTDLTIDLPRDRDLATMSQEIPITYVPARNTIFLSVALAYAEALGAQTVHIGVNALDYSGYPDCRPDYIAAMQEVYRLGTKQGREGQPIEIVTPLIELHKKDIIRLGNEYGVPWEKTWSCYSDDQQACGRCDACRLRLAAFAELGLGDPLPYAVHPPL

SEQ ID NO: 42948 - protein, 233 aa, unidentified
  source 1..233: note = Thermosynechococcus sp.
  REGION 1..233: note = tr|V5V6A4|V5V6A4_9CYAN 7-cyano-7-deazaguanine synthase OS=Thermosynechococcus sp. NK55a OX=1394889; GN = queC PE=3 SV=1
MTTTQKAVVLLSGGLDSSTVLFRAKALGYACYALSFDYGQRHRRELEAAIAIATAAGVVEHQILPLNLRLWGGSALTDLSIDLPRDRDLATMSQEIPVTYVPARNTIFLSVALAYAEALGAQTVHIGVNALDYSGYPDCRPDYIAAMQEVYRLGTKQGREGQPIEIVTPLIELHKKDIIRLGHGYGVPWEKTWSCYSNGEQACGCCDACRLRLAAFAELGLVDPLPYAVHPPL

SEQ ID NO: 42949 - protein, 208 aa, Thermosyntropha lipolytica
  REGION 1..208: note = tr|A0A1M5PD96|A0A1M5PD96_9FIRM 7-cyano-7-deazaguanine synthase OS=Thermosyntropha lipolytica DSM 11003 OX=1123382 GN=SAMN02745221_01438 PE=3; SV = 1
MKAIALLSGGLDSVVSMLLASKEVKVELAITIDYGQRARENEIKAARNICRIYNVKHEVVELPFMHKIQSDLIKKESLPITNPWVPNRNGLFINLAACYAESMKAGLVICGFNREEAFNFPDNSEEYVRALNNALYYSTTNHVKVKSFVQDMDKIDIIRTAAELGLDFRYIWSCYGGGEKPCLRCSSCLRNMEAFAKAGIKYNEDFIC

SEQ ID NO: 42950 - protein, 233 aa, Thermotalea metallivorans
  REGION 1..233: note = tr|A0A140LAA5|A0A140LAA5_9CLOT 7-cyano-7-deazaguanine synthase OS=Thermotalea metallivorans OX=520762 GN=queC PE=3 SV=1
MYKALVLVSGGLDSTVLTAKIVKKYGAETVAALNIYYGQKHAKEQEYASFQANSYGIKMIHADLSKVFQWSKDCPLLEGSENEIPEKSYAEQLQEHGGKGIVKTYVPFRNGLFLSYAAAVAIQIGASKIFYGAHSDDAAGNAYPDCSSAFIGSMAKSIFEGTGGLVKLEAPFWNLTKKEIVKIGLELGVDFAHTWSCYRGESLPCRVCATCIDREKAFEANGMVDPLVKGESL

SEQ ID NO: 42951 - protein, 235 aa, Thermovibrio ammonificans
  REGION 1..235: note = tr|E8T5D4|E8T5D4_THEA1 7-cyano-7-deazaguanine synthase OS=Thermovibrio ammonificans (strain DSM 15698 / JCM 12110 / HB-1) OX=648996 GN=queC PE=3 SV=1
MNGAVVIFSGGLDSTTALYWAKRHFEKVYAITFYYGQRHSLEVEFAKITAEKANVDEHLIFPVDLSRIGASALTDRSIEVPETSSVEEIKERGIPVTYVPFRNGIFISIAAAYAEAKGCTNLVGGWNAVDYSGYPDCRPQFLKAMEEALNLGTKAGAEGKRWHIHAPLINLTKGQIIKLGLELGADYSYSLSCYRGDEVPCMKCDSCILRAKGWEEVGEEDHLIKRLKEEGKILE

SEQ ID NO: 42952 - protein, 235 aa, Thermovibrio guaymasensis
  REGION 1..235: note = tr|A0A420W784|A0A420W784_9BACT 7-cyano-7-deazaguanine synthase OS=Thermovibrio guaymasensis OX=240167 GN=queC PE=3 SV=1
MERAVVIFSGGLDSTTALYWAKREFKEVYAITFVYGQRHSIEVEMAKVTAKNAGVKEHLIYEVDLSKIGSSALTDFSIEVPQPRSVEEIKERGVPVTYVPFRNGIFISIAAAYAESKGTTHLVGGWNVVDYSGYPDCRPEFLEAMERALDLGTKLGAEGNKWHIHAPLINLTKAEIIKLGLELGADYSYSVSCYRGGEVPCGKCDSCLLRAKGWAEVGQEDHLIKRLKEEGKIVE

SEQ ID NO: 42953 - protein, 235 aa, Thermovibrio sp.
  REGION 1..235: note = tr|A0A432UDR4|A0A432UDR4_9BACT 7-cyano-7-deazaguanine synthase OS=Thermovibrio sp.; OX = 2231115 GN=queC PE=3 SV=1
MSSAVVIFSGGLDSTTALYWAKRKFKKVYAITFYYGQRHSIEVEMARKTAERAGVEEHVLFEVDLSKFGASALTDKCIEVPETTSVDEIRERGIPVTYVPFRNGVFISIAASYAESRGTANLVGGWNAVDYSGYPDCRPEFLSAMEEALNRGTKLGSEGKEWRIHAPLINLTKGQIIELGLSLGADYSYSISCYRGGEVPCMRCDSCILRAKGWAEVGEEDHLIKRLKEEGKILE

SEQ ID NO: 42954 - protein, 235 aa, Thermovibrio sp.
  REGION 1..235: note = tr|A0A432UMB5|A0A432UMB5_9BACT 7-cyano-7-deazaguanine synthase OS=Thermovibrio sp.; OX = 2231115 GN=queC PE=3 SV=1
MDSAVVIFSGGLDSTTALYWAKRKFKRVYAITFYYGQRHSIEVEMAKRTAERAKVDEHLLFEVDLSKFGGSALTDKNLEVPETKSVEEIEERGIPITYVPFRNGVFISIAASYAESRGTTNIVGGWNIVDYSGYPDCRPEFLSAMEEALNRGTKLGSEGKDWKIHAPLIKLTKGEIIKLGLSLGADYSYSISCYRGEEIPCMRCDSCILRAKGWAEVGEEDHLIKRLKEEGKILE

SEQ ID NO: 42955 - protein, 206 aa, Thermus arciformis
  REGION 1..206: note = tr|A0A1G7L9P8|A0A1G7L9P8_9DEIN 7-cyano-7-deazaguanine synthase OS=Thermus arciformis; OX = 482827 GN=SAMN04488243_1612 PE=3 SV=1
MKRLVMLSGGVDSSVLLYKLKKQDRLEGLLAVYLDLGTPPAEREWRAAEKVASRLGVPVYRNRVPHFELGDRLFSPPELAFPGREQIRAGWTDPCTMTPITGSLAAKMGVEEVYLGVIKDDFASHPKLEAYLALVGEFLEFNQVQLKMPLAGLTKQQVVALGLELGVPLEETWSCVASGEAPCGVCAPCIAREEAFALADAKALVR

SEQ ID NO: 42956 - protein, 206 aa, Thermus scotoductus
  REGION 1..206: note = tr|E8PLB5|E8PLB5_THESS 7-cyano-7-deazaguanine synthase OS=Thermus scotoductus (strain ATCC 700910 / SA-01) OX=743525 GN=queC PE=3 SV=1
MKRLVMLSGGLDSSVLLYKLKKQDGLEGLAAVYLDLGTPPTQKEWRAAEKVASRLGVAIYRNRVPHFELGDRLFSPPELAFPGRESIQAGWTDPCTMTPITGSLAAKMGVEEVYLGVIKDDFASHPRLEAYLALVKKFLEFNQVRLKMPLSGLTKQEVVALGHELGVPLEETWSCVASGEAPCGACNPCIAREEAFALADAKALAR

SEQ ID NO: 42957 - protein, 206 aa, Thermus scotoductus; identical to SEQ ID NO: 42956
  REGION 1..206: note = tr|A0A348XNC0|A0A348XNC0_THESC 7-cyano-7-deazaguanine synthase OS=Thermus scotoductus; OX = 37636 GN=CSW40_02640 PE=3 SV=1

SEQ ID NO: 42958 - protein, 173 aa, Thermus sp.
  REGION 1..173: note = tr|W2U162|W2U162_9DEIN 7-cyano-7-deazaguanine synthase OS=Thermus sp. NMX2.A1 OX=570924 GN=TNMX_10905; PE = 3 SV=1
MDLGTPPTQKEWRAAEKVASRLGVAIYRNRVPHFELGDRLFSPPELAFPGRESIQAGWTDPCTMTPITGSLAAKMGVEEVYLGVIKDDFASHPRLEAYLALVKKFLEFNQVQLKMPLSGLTKQEVVALGHELGVPLEETWSCVASGEAPCGACNPCIAREEAFALADAKALAR

SEQ ID NO: 42959 - protein, 232 aa, Thioalbus denitrificans
  REGION 1..232: note = tr|A0A369C364|A0A369C364_9GAMM 7-cyano-7-deazaguanine synthase OS=Thioalbus denitrificans; OX = 547122 GN=queC PE=3 SV=1
MNTTVKQAVVLTSGGLDSTTCLAIARDQGYRCHTLAFDYGQKHKAELDAGIRISRALGAGDHKIIRIDLASIGGSALTDPKIAVPDHPTRGIPVTYVPARNTVFLSLALGWAEVLGACDIFIGVNAVDYSGYPDCRPAFIEAFQDLANLATKAGVEGERFRIHAPLLHLSKADIIRTGVRLGLDYGMTVSCYSADEEGRACGVCDACRLRREGFREAEIPDPTRYRPGSPFA

SEQ ID NO: 42960 - protein, 220 aa, Thioalbus denitrificans
  REGION 1..220: note = tr|A0A369CB68|A0A369CB68_9GAMM 7-cyano-7-deazaguanine synthase OS=Thioalbus denitrificans; OX = 547122 GN=DFQ59_105189 PE=3 SV=1
MAGPVAVLVSGGIDSAALAVELAGTHPVVHPLYLRHGLQWEETELAHLRRFLAAAERPALRPVSVLELPVADLYGRHWSLSDGAVPDHSTPDEAVYLPGRNLLFLAKAGVWCERHGVSAIALAPLKGNPFSDNSPEFYAAMERVLELALGFRLEILRPYAALTKAEVIRRSSRLPLELTFSCMDPRQGRHCGRCNKCAERHRAFREAGVEDRTEYAAPPR

SEQ ID NO: 42961 - protein, 224 aa, Thioalkalivibrio denitrificans
  REGION 1..224: note = tr|A0A1V3NKV5|A0A1V3NKV5_9GAMM 7-cyano-7-deazaguanine synthase OS=Thioalkalivibrio denitrificans OX=108003 GN=queC PE=3 SV=1
MNNAIVLLSGGMDSATVLAMAREQGYVCHALSFRYGQRHGVELEAAARLAEALGAVEHRIVDLDLSLFGGSALTDERIEVPREPTKGIPATYVPARNTVFLSIALAWAEVLPAQHIFIGVNAVDYSGYPDCRPAFIEAFQRLANLATRAGVEGRAFTIHAPLLDMSKAEIIRRGLDLGVDFSATVSCYAADEQGRACGVCDACRLRAAGFAQAGVADATRYRGG

SEQ ID NO: 42962 - protein, 221 aa, Thioalkalivibrio denitrificans
  REGION 1..221: note = tr|A0A1V3NUW3|A0A1V3NUW3_9GAMM 7-cyano-7-deazaguanine synthase OS=Thioalkalivibrio denitrificans OX=108003 GN=B1C78_01795 PE=3 SV=1
MGPSLSISSPRQTAGSVLLLSGGIDSATLLAMEVSRGPVTPLVVDYGQRGAQREAAASQRLCAAHDLKPVHLDLAAVGERFREGLNRRAHVPLPHRNLVILSLAISYAGRDGSSRVALALNREDLTAYASASSSFLERFRTLANTLQPGLEIATPLIDRDKAGVIRLGHELGVDFAVTWSCLLGYETHCGSCPQCRQRREAFRAAELPDPTRYRHNPGTGT

SEQ ID NO: 42963 - protein, 213 aa, Thioalkalivibrio halophilus
  REGION 1..213: note = tr|A0A1V2ZY86|A0A1V2ZY86_9GAMM 7-cyano-7-deazaguanine synthase OS=Thioalkalivibrio halophilus OX=252474 GN=B1A74_08040 PE=3 SV=1
MNPEPDLLLLSGGVESAALLRRWCAENRPVIATWADYGQRNAARERAAVLALAEAEGVRLETVETGALREAFTRRADWVGHVPLPQRNLLILALAVNLAQHHGAGRILLALNREDAGHGPGSGAAFLQGFGSLAARLVPGLSVAAPLQELGKADIIRRGAQDGVPWRLTWSCLLGQERHCGRCPQCHARQAAFAAADVPDPTDYRQPPGPQTP

SEQ ID NO: 42964 - protein, 228 aa, Thioalkalivibrio halophilus
  REGION 1..228: note = tr|A0A1V3A0V8|A0A1V3A0V8_9GAMM 7-cyano-7-deazaguanine synthase OS=Thioalkalivibrio halophilus OX=252474 GN=queC PE=3 SV=1
MATGVNERSVVLLSGGLDSATCLALAQEQGLECHALSVDYGQRHATELQAARRVAAAAGVADHRVVHVDLAAIGGSALTDSAIEVPEAGGEGIPVTYVPARNTVFLSLALGFAETLGAHRLVVGANAVDYSGYPDCRPAFIEAFQSLARVATATGVEGAPWSVEAPLMHLSKAQIIREGARLGVDYSLTVSCYRADADGRACGTCDSCRLRADGFAAAGIPDPTRYAG

SEQ ID NO: 42965 - protein, 242 aa, Thioalkalivibrio nitratireducens
  REGION 1..242: note = tr|L0E2Z3|L0E2Z3_THIND 7-cyano-7-deazaguanine synthase OS=Thioalkalivibrio nitratireducens (strain DSM 14787 / UNIQEM 213 / ALEN2) OX=1255043 GN=queC [H] PE=3; SV = 1
MSPAADRFPGDAAEPGRAAVVLLSGGLDSATCLALARAAGYACHALSVDYGQRHRAELKAARRVAASLGAVSHRVIRIDLGAIGGSALTDPSIPVPEAPTQGIPATYVPARNTTLLSLSLGLAEALELREIFIGVNAVDYSGYPDCRPEFIAAFEDLANLATRAGVEGRRFRIRAPLLTMTKAEIIGVGTACRLDYSLTVSCYQADADGRACGVCDSCRIRRAGFDAAGLPDPTRYRTDAPA

SEQ ID NO: 42966 - protein, 243 aa, Thioalkalivibrio paradoxus
  REGION 1..243: note = tr|W0DGB8|W0DGB8_9GAMM 7-cyano-7-deazaguanine synthase OS=Thioalkalivibrio paradoxus ARh 1 OX=713585; GN = queC PE=3 SV=1
MSRATDRTGQGGGTEGGRAAVVLLSGGLDSATCLALARAAGYRCHALSVDYGQRHRAELEAAGRVAAALGAASHRVIRIDLGAIGGSALTDSSIPVPETPTEGIPVTYVPARNTTLLALSLALTEALDLDEIFIGVNAVDYSGYPDCRPEFIAAFENLANLATRAGAEGRRFRIRAPLLTMTKAEIIGVGTACRLDYSLTVSCYQADAEGRACGVCDSCRIRRAGFEAAGVPDPTRYRPDAPA

SEQ ID NO: 42967 - protein, 217 aa, Thioalkalivibrio sp.
  REGION 1..217: note = tr|D3SE85|D3SE85_THISK 7-cyano-7-deazaguanine synthase OS=Thioalkalivibrio sp. (strain K90mix) OX=396595; GN = TK90_2422 PE=3 SV=1
MHATDKYTGESPPDLLLLSGGIESSALLAQRHAQGRPLRALWVDYGQRNAERERAAIRALGADYGVDPVEMDLRALRQAFAKRSEWVAHVPLPQRNLLVLALAINLAEHQGAGRILLALNREDQGHGPGSRPSFIGRLAALADELVPGLAIEAPLIAQSKADIIYTTDPLGIDWSRTWSCLLAQSLHCGRCPQCQARRAAFASAGVPDPTDYREPPR

SEQ ID NO: 42968 - protein, 213 aa, Thioalkalivibrio sp.
  REGION 1..213: note = tr|A0A318VTQ4|A0A318VTQ4_9GAMM 7-cyano-7-deazaguanine synthase OS=Thioalkalivibrio sp. ALE21 OX=1158175 GN=D893_00643 PE=3 SV=1
MNPEPDLLLLSGGVESAALLRRWCAENRPVIATWADYGQRNAARERAAVLALAEAEGVRLKTVETGALREAFTRRADWVGHVPLPQRNLLILALAVNLAQHHGAGRILLALNREDAGHGPGSRAAFLQDFGSLAARLVPGLSVAAPLQELGKADIIRRGGQDGVPWRLTWSCLLGQERHCGRCPQCHARQAAFAAADVPDPTDYRQPPGPQTP

SEQ ID NO: 42969 - protein, 229 aa, unidentified
  source 1..229: note = Thioalkalivibrio sulfidiphilus
  REGION 1..229: note = tr|B8GUI5|B8GUI5_THISH 7-cyano-7-deazaguanine synthase OS=Thioalkalivibrio sulfidiphilus (strain HL-EbGR7) OX=396588 GN=queC PE=3 SV=1
MSSAQRNAVVLLSGGMDSATVLAIAREQGYVCHALSFRYGQRHRAELDAAARVAKSQGAVRHQVVDLDLSLFGGSALTDSRIDLPETPSEGIPVTYVPARNTVFLSVALAWAEVLPARDIFIGVNAVDYSGYPDCRPAFIEAFERLANLATRAGVEGRQLSIHAPLQYLSKADIIRRGTELGVDFAETVTCYGADAKGLACGVCDACRLRAQGFADAGLPDVTRYRRKV

SEQ ID NO: 42970 - protein, 213 aa, unidentified
  source 1..213: note = Thioalkalivibrio sulfidiphilus
  REGION 1..213: note = tr|B8GP80|B8GP80_THISH 7-cyano-7-deazaguanine synthase OS=Thioalkalivibrio sulfidiphilus (strain HL-EbGR7) OX=396588 GN=Tgr7_2927 PE=3 SV=1
MPISSPSGVNGSLLLLSGGIESATLLALESRQRPVTPLVVDYGQRGALRERDAARAQCESHGLTPVELDLSATGGTFRDGLLKRPHVPLPHRNLVILSLAVSYAARGGIDRVVLALNRDDLAAYPSASPGFLEHFRALIHDLQPGLEITTPLIDRDKAGVIRLGVSLGVDFARTWSCLLGYETHCGACPQCLHRRAAFRAAGIADPTRYRHDS

SEQ ID NO: 42971 - protein, 228 aa, Thioalkalivibrio versutus
  REGION 1..228: note = tr|A0A0G3G3G4|A0A0G3G3G4_9GAMM 7-cyano-7-deazaguanine synthase OS=Thioalkalivibrio versutus OX=106634 GN=queC PE=3 SV=1
MSERAEKAVVLLSGGLDSATCLAMARAEGLDCYALSIDYGQRHHTELDAARRVAAAQGVADHRVVAVDLSAIGGSALTDAAIAVPTAPTEGIPVTYVPARNTVFLALALGFAETLDARLLYVGANAVDYSGYPDCRPAFIEAFRDLARVATRSGVEGTPWEVRAPLMHWSKAEIIQAGVRLGVDYSQTVSCYQADAAGRACGRCDSCRIRREGFAAAGVPDPTRYVPD

SEQ ID NO: 42972 - protein, 204 aa, Thioalkalivibrio versutus
  REGION 1..204: note = tr|A0A1V3BPP7|A0A1V3BPP7_9GAMM 7-cyano-7-deazaguanine synthase OS=Thioalkalivibrio versutus OX=106634 GN=B0684_10315 PE=3 SV=1
  VARIANT 18..19: note = Xaa can be any naturally occurring amino acid
MESARPESPDLLLLSGGXXAAGRLLRAVWVDYGQRNAAREWTAVEHLSAVYGCAPIALDLQSLRTAFTRRNDWVGHVPLPQRNLLVLALAVNLAEHHGAARILLALNREDQGHGPGSQPGFVQQVSELAAGLVPGLQVEAPLIDRSKAEIIAATDPLGIDWRHTWSCLLAQSRQCGRCPQCQARRAAFAAAGIPDPTDYREAPR

SEQ ID NO: 42973 - protein, 240 aa, Thiobaca trueperi
  REGION 1..240: note = tr|A0A4R3MZG0|A0A4R3MZG0_9GAMM 7-cyano-7-deazaguanine synthase OS=Thiobaca trueperi; OX = 127458 GN=queC PE=3 SV=1
MRKKTAGTMTKAVVLLSGGLDSTTTLAIAKAEGFTPYALSFRYGQRHAVELESAVRVAQAMGVAEHVIADIDLRRFGGSALTADLPVPKARSLDEMGAGIPVTYVPARNTVFLSFALAWAEVLGASDLFIGVNALDYSGYPDCRPEYLAAYERMANLATAAGVEGRQQLRIHAPLMQLTKAGIIRWGLALGVDYALTSSCYDPGAAGRPCGQCDSCLLRARGFAEAGVADPLLARFAEAV

SEQ ID NO: 42974 - protein, 226 aa, Thiobacillus denitrificans
  REGION 1..226: note = tr|A0A119CV83|A0A119CV83_THIDE 7-cyano-7-deazaguanine synthase OS=Thiobacillus denitrificans OX=36861 GN=queC PE=3 SV=1
MKSAVILLSGGLDSATVLAIAREAGYACHALSLDYGQRHNAELAAAARVAASLGAVEHRVLKLGLSDIGGSALTDASIAVPESPTEGIPVTYVPARNTVMLALALAWAEVLGSRDIFIGVNAIDYSGYPDCRPEFIAAFEQMANLATRAGVEGARLRVHAPLQHLSKAQIIQRGLALGVDYAQTVSCYQADADGLACGRCDACRLRREGFRAAGIPDPTRYGQQAE

SEQ ID NO: 42975 - protein, 224 aa, Thiobacillus denitrificans
  REGION 1..224: note = sp|Q3SGT8|QUEC_THIDA 7-cyano-7-deazaguanine synthase; OS = Thiobacillus denitrificans (strain ATCC 25259); OX = 292415 GN=queC PE=3 SV=1
MKPCAIVLLSGGLDSATALAMAREAGFACHALSLDYGQRHTAELAAAARLAAQLGAVEHRVIRLGLGDFGGSALTDASIAVPESPVAGIPVTYVPARNTVMLALALAWAEVLGARDIFIGVNAVDYSGYPDCRPEFIEAFERMANLATKAGVEGAQLRIHAPLQHLSKAEIIHRGTALGVDYAQTVSCYQADAEGRACGRCDACRLRREGFLAAGLADPTRYAR

SEQ ID NO: 42976 - protein, 222 aa, Thiobacillus sp.
  REGION 1..222: note = tr|A0A1Q4EMX0|A0A1Q4EMX0_9PROT 7-cyano-7-deazaguanine synthase OS=Thiobacillus sp. 0-1251; OX = 1895858 GN=queC PE=3 SV=1
MKPAVILLSGGLDSATVLAIAREAGYACHALSLDYGQRHTAELAAAARVARSLGAVEHRVMRLGLGDIGGSALTDASIAVPESPTDGIPVTYVPARNTVMLALALAWAEVLGARDIFIGVNAVDYSGYPDCRPEFIEAFERMANLATKSGVEGARLRIHAPLQALSKADIIRRGAALGVDYAQTVSCYQADAEGLACGRCDACRLRREGFLAAGIPDPTRYA

SEQ ID NO: 42977 - protein, 226 aa, Thiobacillus sp.
  REGION 1..226: note = tr|A0A1E4NVM4|A0A1E4NVM4_9PROT 7-cyano-7-deazaguanine synthase OS=Thiobacillus sp. SCN 63-57 OX=1660145 GN=queC PE=3 SV=1
MKPAVILLSGGLDSATVLAIAREAGYACHALSLDYGQRHTAELVAAARVARSLGAVEHRVMRLGLGDIGGSALTDASIAVPESPTDGIPVTYVPARNTVMLALALAWAEVLGARDLFIGVNAVDYSGYPDCRPEFIEAFERMANLATKSGVEGARLRIHAPLQTLSKADIIRQGTALGVDYAQTVSCYQADAEGLACGRCDACRLRRDGFLAAGIPDPTRYVQEAG

SEQ ID NO: 42978 - protein, 233 aa, Thiocapsa marina
  REGION 1..233: note = tr|F9UIC8|F9UIC8_9GAMM 7-cyano-7-deazaguanine synthase OS=Thiocapsa marina 5811 OX=768671 GN=queC PE=3; SV = 1
MKPAVVLLSGGLDSATAAAIATSEGFAVHALSFRYGQRHGIELESAARVAEALGVVEHAIVEIDLRRFGGSALTADIAVPKGRRAGTIGEGIPVTYVPARNTVFLSFALAWAETLGSEDIFIGVNVQDYSGYPDCRPAFIEAFERMANLATAAGVEGRQRLEIHAPLMQMTKAEIIARGLSLGVDYGLTSSCYDPGTDGRPCGLCDSCVLRAKGFADAGFPDPLSLRFGHLAP

SEQ ID NO: 42979 - protein, 233 aa, Thiocapsa rosea
  REGION 1..233: note = tr|A0A495VE99|A0A495VE99_9GAMM 7-cyano-7-deazaguanine synthase OS=Thiocapsa rosea; OX = 69360 GN=queC PE=3 SV=1
MKPAVVLLSGGLDSATASAIATSEGFAVHALSFRYGQRHGVELESAARVADALGVVEHAVVEIDLRRFGGSALTADIPVPKGRSAGAIGEGIPVTYVPARNTVFLSFALAWAETLGSEDIFIGVNVQDYSGYPDCRPAFIEAFEQMANLATAAGVEGRQSLKIHAPLMQMTKAEIIARGLSLGVDYGLTSSCYDPGTDGRPCGLCDSCLLRAKGFADAGYPDPLSLRFGLPVP

SEQ ID NO: 42980 - protein, 233 aa, Thiocapsa roseopersicina
  REGION 1..233: note = tr|A0A1H2SV43|A0A1H2SV43_THIRO 7-cyano-7-deazaguanine synthase OS=Thiocapsa roseopersicina OX=1058 GN=queC PE=3 SV=1
MKPAVVLLSGGLDSATASAIAKSEGFAVHSLSFRYGQRHGIELESAARVAEALGVVEHAIVEIDLRRFGGSALTADIPVPKGRSAGAIGEGIPVTYVPARNTVFLSFALAWAETLGSEDIFIGVNVQDYSGYPDCRPAFIEAFEHMANLATAAGVEGRQRLKIHAPLMQMTKAEIIARGLSLGVDYGLTSSCYDPGTDGRACGLCDSCLLRAKGFADVGCPDPLLVRFGLAVP

SEQ ID NO: 42981 - protein, 233 aa, Thiocapsa sp.
  REGION 1..233: note = tr|A0A0U5IEA7|A0A0U5IEA7_9GAMM 7-cyano-7-deazaguanine synthase OS=Thiocapsa sp. KS1; OX = 610332 GN=queC PE=3 SV=1
MKPAVVLLSGGLDSATASAIAKSQGFAVHALSFRYGQRHGIELESAARVAAALGVAEHAIVEIDLRRFGGSALTADIPVPKGRSTDAIGDGIPVTYVPARNTVFLSFALAWAETLGSEDIFIGVNVQDYSGYPDCRPAFIDAFERMANLATAAGVEGRQRLKIHAPLMQMTKAEIIARGLSLGVDYGLTSSCYDPGTDGRPCGLCDSCLLRAKGFADAGCPDPLLVRFGLAVP

SEQ ID NO: 42982 - protein, 233 aa, unidentified
  source 1..233: note = Thioclava atlantica
  REGION 1..233: note = tr|A0A085TSC9|A0A085TSC9_9RHOB 7-cyano-7-deazaguanine synthase OS=Thioclava atlantica; OX = 1317124 GN=queC PE=3 SV=1
MKTIVICSGGLDSVSLAHKVAAEDTLTRLVSFDYGQRHRKELDFAARAAERLGVPHDIIDMRPIGAALTGSALTDDIDVPDGHYAEETMRITVVPNRNAIMLAIAFGVAAANGDDAVATAVHGGDHFIYPDCRPAFTEAFDAMQKAALDGYADVRLSTPFVHRSKADIVTEGAKYGTPFAETWSCYKGGAHHCGRCGTCVERREAFDLAGVPDPTVYDDPDYWRAAIAAREGR

SEQ ID NO: 42983 - protein, 233 aa, unidentified
  source 1..233: note = Thioclava dalianensis
  REGION 1..233: note = tr|A0A074TGB8|A0A074TGB8_9RHOB 7-cyano-7-deazaguanine synthase OS=Thioclava dalianensis; OX = 1185766 GN=queC PE=3 SV=1
MKTIVICSGGLDSVSLAHMVAQERELTRLISFDYGQRHRKELDYAALCAQRLGVPHDVIDLRAIGAALSGSALTDDIDVPDGHYAEESMRITVVPNRNAIMLTIAFGVAAARGDAAVATAVHGGDHFIYPDCRPAFTEQFEAMQKAALDGYADVSLYTPFVHRTKADIVTEGARHNTPFARTWSCYKGGTHHCGRCGTCVERREAFHLAGIPDPTTYEDLTFWAEAIARKERA

SEQ ID NO: 42984 - protein, 233 aa, unidentified
  source 1..233: note = Thioclava electrotropha
  REGION 1..233: note = tr|A0A1W9XV42|A0A1W9XV42_9RHOB 7-cyano-7-deazaguanine synthase OS=Thioclava electrotropha; OX = 1549850 GN=queC PE=3 SV=1
MKTLVICSGGLDSVSLAHIVAAEGNLTRLVSFDYGQRHRKELDYAAAAARRLGVPHHLIDMRPIGAALTGSALTDDIDVPDGHYAEETMRITVVPNRNAIMLAIGFGVAAANGDEAVATAVHGGDHFIYPDCRPAFTEAFDAMQRMALDGYADVRLETPFVHRSKADIVAEGAKHGTPFAETWSCYKGGEVHCGRCGTCVERREAFHLAGVADPTAYADPDFWAKAVAEKEAR

SEQ ID NO: 42985 - protein, 233 aa, Thioclava sp.
  REGION 1..233: note = tr|A0A4V3ETC0|A0A4V3ETC0_9RHOB 7-cyano-7-deazaguanine synthase OS=Thioclava sp. ES.032; OX = 1798206 GN=queC PE=3 SV=1
MKTLVICSGGLDSVSLAHIVAAENHLTRLVSFDYGQRHRKELDYAAAAARRLGVPHHLIDMRPIGAALTGSALTDDIDVPDGHYAEETMRITVVPNRNAIMLAIGFGVAAANGDEAVATAVHGGDHFIYPDCRPAFTEAFDAMQRMALDGYADVRLETPFVHRSKADIVAEGAKHGTPFAETWSCYKGGEVHCGRCGTCVERREAFHLAGVADPTAYADPDFWAKAVAEKEAR

SEQ ID NO: 42986 - protein, 233 aa, Thioclava sp.; identical to SEQ ID NO: 42984
  REGION 1..233: note = tr|A0A1T2A6P0|A0A1T2A6P0_9RHOB 7-cyano-7-deazaguanine synthase OS=Thioclava sp. F28-4; OX = 1915315 GN=queC PE=3 SV=1

SEQ ID NO: 42987 - protein, 233 aa, Thiocystis violascens
  REGION 1..233: note = tr|I3Y5B1|I3Y5B1_THIV6 7-cyano-7-deazaguanine synthase OS=Thiocystis violascens (strain ATCC 17096 / DSM 198 / 6111) OX=765911 GN=queC PE=3 SV=1
MTNAVVLLSGGLDSTTTLAIARAEGFVPYALSFRYGQRHAIELDAATRVAKSMGVAEHVIADIDLRRFGGSALTADLAVPKGRDLAGMGEGIPITYVPARNTVFLSFALAWAEVLGASDLFIGVNALDYSGYPDCRPEYIEAFERMANLATAAAVEGRQRLKIHAPLIELTKAGIIRKGIELGVDYALTSSCYDPGEAGRPCGECDSCLLRAKGFAEAGFADPLLRRVPIDER

SEQ ID NO: 42988 - protein, 236 aa, Thioflavicoccus mobilis
  REGION 1..236: note = tr|L0GY25|L0GY25_9GAMM 7-cyano-7-deazaguanine synthase OS=Thioflavicoccus mobilis 8321 OX=765912 GN=queC; PE = 3 SV=1
MSDAPVTRAVVLLSGGLDSTTTLAVAQADGVEPCALSFRYGQRHVVELRAAARVAEALGVAEHLVMDIDLRRIGGSALTADIAVPKGREPAEIADGIPVTYVPARNTIFLSLALAWAETLGTGLIYLGVNALDYSGYPDCRPEFIAAFAEMANLATAAGVSGRHRVEIRTPLIELSKAEIIRLGTRLGVDYALTSSCYDPGVDDRPCGQCDSCLLRAKGFAEAGLADPLAARFGAG

SEQ ID NO: 42989 - protein, 229 aa, unidentified
  source 1..229: note = Thioflexothrix psekupsii
  REGION 1..229: note = tr|A0A251X5K0|A0A251X5K0_9GAMM 7-cyano-7-deazaguanine synthase OS=Thioflexothrix psekupsii OX=1570016 GN=queC PE=3 SV=1
MNSSILRKKAVILLSGGLDSATILAMAQQQDYDCYTLSFNYGQRHCAEIAAAQRIAEHFAVCDHKVIHLNLDCIGGSALTDAGIAVPITGLTSEIPVTYVPARNTVFLALALGWAEVLGARDIFIGVNAMDYSGYPDCRPAFIRQFEQLANVATKAGVMGESFHIHAPLLHWHKHEIIRHGVQLGVNYALTVSCYQANEQGEACGQCDACRLRRDGFAQAQVVDPTRYV

SEQ ID NO: 42990 - protein, 228 aa, unidentified
  source 1..228: note = Thiogranum longum
  REGION 1..228: note = tr|A0A4V6NDA6|A0A4V6NDA6_9GAMM 7-cyano-7-deazaguanine synthase OS=Thiogranum longum; OX = 1537524 GN=queC PE=3 SV=1
MSQAAERKAVVLLSGGLDSATTLALAREQGFACYALSLDYGQRHRAELKAAQRVANAIGVVEHKIIPLDLGAFGGSALTDAKIEVPEQSAEGIPVTYVPARNTVFLSLALGWAEVLGAWDLFIGVNAVDYSGYPDCRPEYIEAFQRLCRLATRAGVEGGNFTVRAPLIKMSKAEIIRTGVGLGLDYGLTISCYAADNAGRACGKCDSCRLRAAGFAVAGIDDPTDYRS

SEQ ID NO: 42991 - protein, 229 aa, Thiohalobacter thiocyanaticus
  REGION 1..229: note = tr|A0A426QHD8|A0A426QHD8_9GAMM 7-cyano-7-deazaguanine synthase OS=Thiohalobacter thiocyanaticus OX=585455 GN=queC PE=3 SV=1
MVQSETAGKAVVLLSGGLDSATVLAIARAQGYDCHALSLDYGQRHSAELAAAVRIVHAQGITDHQVVRLDLSRFGGSALTDPDIPVPEAPAAGIPSTYVPARNTVFLSLALGWAEVLGARDLFIGVNAVDYSGYPDCRPEYIQAFERLANLATRAGVEGGHFRIRAPLLEWSKARIIQEGMRLGVDYSLTVSCYAADEQGRACGRCDSCRLRAAGFAAAGVPDPTRYRN

SEQ ID NO: 42992 - protein, 229 aa, Thiohalobacter thiocyanaticus
  REGION 1..229: note = tr|A0A1Z4VPH6|A0A1Z4VPH6_9GAMM 7-cyano-7-deazaguanine synthase OS=Thiohalobacter thiocyanaticus OX=585455 GN=queC PE=3 SV=1
MVQSGTDSKAVVLLSGGLDSATVLAIARAQGYACHALSLDYGQRHAAELAAAVRIVQAQGVAEHRVVRLDLSQFGGSALTDPDIPVPETAAAGIPSTYVPARNTVFLSLALGWAEVLGARDLFIGVNAVDYSGYPDCRPEYIAAFERLANLATRAGVEGDRFHVRAPLLEWSKARIIQEGLHLGVDYSLTVSCYAADAQGRACGRCDSCRLRAAGFAAAGVPDPTRYRT

SEQ ID NO: 42993 - protein, 227 aa, Thiohalomonas denitrificans
  REGION 1..227: note = tr|A0A1G5PKQ6|A0A1G5PKQ6_9GAMM 7-cyano-7-deazaguanine synthase OS=Thiohalomonas denitrificans OX=415747 GN=queC PE=3 SV=1
MNSLPKKAVALLSGGLDSATSLAMARDQGFECYALSFDYGQRHRIELEASRRVGQSLGVREHRIFTLDLRQFGGSALTDDRIEVPQGPSEGIPVTYVPARNTIFLSLALGWAEVLGALDLFIGVNAVDYSGYPDCRPEFIDAFQKTANLATRAGAEGQCFSIHAPLVSMTKAEIIATGHRLGVDYGLTLSCYNPDFGGNACGICDSCRLRAAGFHEAGVPDPTPYKT

SEQ ID NO: 42994 - protein, 224 aa, Thiohalophilus thiocyanatoxydans
  REGION 1..224: note = tr|A0A4R8ILK9|A0A4R8ILK9_9GAMM 7-cyano-7-deazaguanine synthase OS=Thiohalophilus thiocyanatoxydans OX=381308 GN=queC PE=3 SV=1
MKKAVVLVSGGLDSATTLALAREQGYACYAISFDYGQRHKCELDAAQQVARSLGVVEHKLMQLNMNDLGGSALTDESLDVPEEGVGEGIPVTYVPARNTVFLSLALGWAEVLEAEAIFIGVNAVDYSGYPDCRPEYIAAYQRLADLATRRGVEGRPIRVEAPLIHLSKAAIIREGARLGVDYGLTTSCYAPDAQCRACGRCDACRLRRAGFKTAGIPDPTPYQL

SEQ ID NO: 42995 - protein, 216 aa, Thiohalorhabdus denitrificans
  REGION 1..216: note = tr|A0A0P9CMK3|A0A0P9CMK3_9GAMM 7-cyano-7-deazaguanine synthase OS=Thiohalorhabdus denitrificans OX=381306 GN=SAMN05661077_0513 PE=3 SV=1
MAVELGARGTGGCVVLASGGIESTTLLHRLARQGEGISPVFFHYGQRPSDREYRAARAQCLELGLNLEVLDIAGVTPVFQKGQERQYHIPLPHRNLVALSLGLSLAEKRGADRLLIGTTGDDADLAASASRPFLDAFRGMAGLLGPVSVEAPFQEMGKDEVVLEGLRLGVDFGRTYSCLLGRREPCGSCPQCRKRRSAFDRAGVPEPPPTLDAGEA

SEQ ID NO: 42996 - protein, 231 aa, Thiohalorhabdus denitrificans
  REGION 1..231: note = tr|A0A0P9GMC2|A0A0P9GMC2_9GAMM 7-cyano-7-deazaguanine synthase OS=Thiohalorhabdus denitrificans OX=381306 GN=queC PE=3 SV=1
MPTLVVCSGGLDSVTLAEQVAAEGDLAGLVTFDYGQRHRKELEFARRAAERLGVGHDVVDLAALGRHLSGSALTDAVDVPEGHYAADNMAVTVVPNRNPILFTIAFGIANARGWDRVAAAVHGGDHFVYPDCRPEFVDAFAEMERRALAGMGEVAFHTPYVERSKADIVAAGAGLGVPFAETWSCYQGGEVHCGRCGTCVERREAFHLAGVADPTAYADPDYWRHAVREKA

SEQ ID NO: 42997 - protein, 230 aa, Thiohalospira halophila
  REGION 1..230: note = tr|A0A1I1QYA0|A0A1I1QYA0_9GAMM 7-cyano-7-deazaguanine synthase OS=Thiohalospira halophila DSM 15071 OX=1123397 GN=queC PE=3 SV=1
MSQSGTDQRAVVLLSGGLDSATTLAMARAEGFDCHTLAFDYGQRHRGELAASAAVAEQLRAAEHRVMNLDLGAIGGSALTDRAIEIPSETGAGIPVTYVPARNTIFLSMALGWAEVLGAWDIFIGANAVDYSGYPDCRPEYIAAFEQMANRALRATVEGEGYLRIRAPLMDMSKAQIIAAGHDRGVDYALTTSCYNPDEAGRACGVCDSCRLRAAGFAEAGVPDPTPYQD

SEQ ID NO: 42998 - protein, 227 aa, unidentified
  source 1..227: note = Thiolapillus brandeum
  REGION 1..227: note = tr|W0TQP9|W0TQP9_9GAMM 7-cyano-7-deazaguanine synthase OS=Thiolapillus brandeum OX=1076588 GN=queC PE=3; SV = 1
MIDKQKKAVVLLSGGLDSATVLAIARDRGYACHALSFDYGQRHNAELLASRRIAHTLGAVEHKVLSLDLGSIGGSALTDMAIDVPEESAEGIPVTYVPARNTVFLSLALGWAEVLGAGDIFIGVNAVDYSGYPDCRPEFIAAFENLANLATKAGVEEGGFHIQAPLIQMSKAEIIRTGMSLGLDYALTVSCYQADNQGRACGQCDSCRLRAQGFAQAGVSDPTCYHS

SEQ ID NO: 42999 - protein, 228 aa, unidentified
  source 1..228: note = Thiomicrospira aerophila
  REGION 1..228: note = tr|W0DVY4|W0DVY4_9GAMM 7-cyano-7-deazaguanine synthase OS=Thiomicrospira aerophila AL3 OX=717772 GN=queC; PE = 3 SV=1
MSMADQTAVILLSGGLDSVTLLALARSEGYQCHTLSFAYGQRHTAELAAAANLSTQYGAKSHRVVPIDLGSIGGSALTDHSLSVPVDGVTDQIPITYVPARNTIFLAYALAVCEVLEAQALFVGVNAVDYSGYPDCRPEFIAAFQTLANLATKAGVEGHGVEVKTPLIALSKAEIIKLGVGLGVDYSQTVSCYSADEQGRACGLCDSCRLRKQGFAQAGLVDPTRYQA

SEQ ID NO: 43000 - protein, 224 aa, unidentified
  source 1..224: note = Thiomicrospira cyclica
  REGION 1..224: note = tr|F6D8D0|F6D8D0_THICA 7-cyano-7-deazaguanine synthase OS=Thiomicrospira cyclica (strain DSM 14477 / JCM 11371 / ALM1) OX=717773 GN=queC PE=3 SV=1
MKQAVILLSGGLDSVTLLALAKQEGYDCHTLSFAYGQRHTAELLAAAQLSAHYGAKSHRVVQIDLASIGGSALTDHSLVVPVDGVEDHIPITYVPARNTIFLAYALGVCEVLEAQALFVGVNAVDYSGYPDCRPEFIAAFQTLANLATKAGVEGRGVEVKTPLIAMSKAEIIQLGVRLGVDYSQTVSCYSADEQGRACGLCDSCRLRKQGFEQAGLVDPTRYQV

SEQ ID NO: 43001 - protein, 227 aa, Thiomicrospira sp.; identical to SEQ ID NO: 38789
  REGION 1..227: note = tr|A0A3Q9I3Z6|A0A3Q9I3Z6_9GAMM 7-cyano-7-deazaguanine synthase OS=Thiomicrospira sp. S5; OX = 1803865 GN=queC PE=3 SV=1

SEQ ID NO: 43002 - protein, 227 aa, Thiomicrospira sp.
  REGION 1..227: note = tr|A0A0X3TGU6|A0A0X3TGU6_9GAMM 7-cyano-7-deazaguanine synthase OS=Thiomicrospira sp. XS5; OX = 1775636 GN=queC PE=3 SV=1
MKKAIVLLSGGLDSATVLAIAQAEGYECHTMSFDYGQRHRAELLAAERVSKTFGAKTHRLMSMNMRAIGGSALTDDAIDVPTTGVEENQIPVTYVPARNTIFLSYALGLAEVVDADDIFIGVNAVDYSGYPDCRPEFIQAFEVMANLATKAGVEGHKMHIRTPLIDLTKSQIIQEGIRLGVDYSQTVSCYQADESGAACGVCDSCRLRKQGFEAAGVEDPTIYVGRG

SEQ ID NO: 43003 - protein, 232 aa, Thiomonas bhubaneswarensis
  REGION 1..232: note = tr|A0A0K6HPT8|A0A0K6HPT8_9BURK 7-cyano-7-deazaguanine synthase OS=Thiomonas bhubaneswarensis OX=339866 GN=queC PE=3 SV=1
MNPAHTTAAPAAVVLLSGGLDSATVLALAREQGLRCYALSLDYGQRHRAELDAARRVAAALGAAGHEIVRLDLSRFGGSALTDHALDVPTDGGHDGIPITYVPARNTVMLSLALSWAEVLGAQHLFYGANAVDYSGYPDCRPEYVAAFERMANLATKAAIEGRPIRVQAPIIALRKAEIIRTGLRLGVDYAMTVSCYQADSQGRACGRCDACRIRAQGFTEAGVPDPTPYQP

SEQ ID NO: 43004 - protein, 235 aa, Thiomonas delicata
  REGION 1..235: note = tr|A0A238D474|A0A238D474_THIDL 7-cyano-7-deazaguanine synthase OS=Thiomonas delicata; OX = 364030 GN=queC PE=3 SV=1
MGVPTAQGMAPKAVVLLSGGLDSATVLAQAREQGYACHALSLHYGQRHSAELDAARRVAAALGAVRHEVIQLDLARFGGSALTDTTLDVPVTGPQNGIPVTYVPARNTVMLALALSWAEALGARDLFYGANAVDYSGYPDCRPEFVAAFERLANLATKAGVEGQPMRVHAPIIHLSKAQIIREGLRLGVDYALTVSCYQADARGRACGRCDSCRIRAAGFAEAGVVDPTQYKTAD

SEQ ID NO: 43005 - protein, 227 aa, Thiomonas sp.
  REGION 1..227: note = tr|A0A259Q5H1|A0A259Q5H1_9BURK 7-cyano-7-deazaguanine synthase OS=Thiomonas sp. 14-66-4; OX = 1970450 GN=queC PE=3 SV=1
MAPKAVVLLSGGLDSATVLAQAREQGYACHALSLHYGQRHSAELDAARRVAAALEAVRHEVIQLDLARFGGSALTDTTLDVPVTGPQNGIPVTYVPARNTVMLALALSWAEALGARDLFYGANAVDYSGYPDCRPEFVAAFERLANLATKAGVEGQPMRVHAPIIHLSKAQIIREGLRLGVDYALTVSCYQADARGRACGRCDSCRIRAAGFAEAGVADPTQYKTAD

SEQ ID NO: 43006 - protein, 217 aa, Thiomonas sp.
  REGION 1..217: note = tr|A0A257PXM9|A0A257PXM9_9BURK 7-cyano-7-deazaguanine synthase OS=Thiomonas sp. 20-64-5; OX = 1970453 GN=queC PE=3 SV=1
MDSATVLALAREQGFRCYALSLDYGQRHRSELHAARQVASALGAARHEIIRLDLSQFGGSALTDHTLAVPMAGAQIGIPLTYVPARNTVMLALAMSWAETLDAQNIFYGANAVDYSGYPDCRPEYVAAFERMANLATRAAVEGRPTQIHAPIIALSKGDIIRTGLRLGVDFAMTVSCYQADDAGRACGRCDACRIRAQGFIDAGVPDSTRYQQPYGI

SEQ ID NO: 43007 - protein, 233 aa, Thioploca ingrica
  REGION 1..233: note = tr|A0A090BUG4|A0A090BUG4_9GAMM 7-cyano-7-deazaguanine synthase OS=Thioploca ingrica; OX = 40754 GN=queC PE=3 SV=1
MIAPANPNKAVILVSGGLDSATTLAIAKSQGYACYALSFDYGQRHRVELQAARQITNQLGVIEHKFIQLNLDNIGGSALTDMRIEVPITGITHQIPITYVPARNTIFLALALGWAEVLSAYDLFMGVNAVDYSGYPDCRPEFIMAFEKMANLATKAGVEGHPFKIHTPLINLKKTQIIQAGLRLGIDYSLTISCYQANSTGYACGVCDACRLRAEGFRVLGIADPTRYLTQSL

SEQ ID NO: 43008 - protein, 222 aa, unidentified
  source 1..222: note = Thiopseudomonas denitrificans
  REGION 1..222: note = tr|A0A4V3D5H7|A0A4V3D5H7_9GAMM 7-cyano-7-deazaguanine synthase OS=Thiopseudomonas denitrificans OX=1501432 GN=queC PE=3 SV=1
MNTLLICSGGLDSVTLAHRLHAHGQLAALLCFDYGQRHKKEIDAARLCAQRLDVPFILLDISSIGRQLSGSALTGDVDVPHGFYSQDNMQLTVVPNRNAIMLTIAFGVAAARKLEAVAIAVHGGDHFVYADCRPEFIDAMAGMQRLALADQHQVSLLAPYVEADKTAIARDAARYDVPIADTWSCYEGGELHCGRCATCLERIEALALAGVNDPTRYAHGEG

SEQ ID NO: 43009 - protein, 232 aa, unidentified
  source 1..232: note = Thiorhodococcus drewsii
  REGION 1..232: note = tr|G2DXJ3|G2DXJ3_9GAMM 7-cyano-7-deazaguanine synthase OS=Thiorhodococcus drewsii AZ1 OX=765913 GN=queC; PE = 3 SV=1
MKRAVILLSGGLDSTTALAIAKSEGYVPYALSFRYGQRHAVELDSAGRVAESMGVAEHVIADIDLRRFGGSALTDDVDVPKGRETNAMSDGIPVTYVPARNTVFLSFALAWAEVLGASDIFVGVNALDYSGYPDCRPEYIDAFERLANLATASGVEGRQRFHVHAPLIELSKAEIIRRGVRLGVDYGLTSSCYDPGEDGRPCGFCDSCLLRAKGFAEAGLRDPLLVRFEKEA

SEQ ID NO: 43010 - protein, 230 aa, Thiorhodospira sibirica
  REGION 1..230: note = tr|G4E221|G4E221_9GAMM 7-cyano-7-deazaguanine synthase OS=Thiorhodospira sibirica ATCC 700588 OX=765914; GN = queC PE=3 SV=1
MSASPKAIVLLSGGLDSATVLALAKRQGFAVYALSFRYGQRHQIELAAAAKLAKAHQVVEHVSLEIDLRIFGGSALTADIAVPKDRAEVSGGSAIPVTYVPARNTIFLSFALAWAEVLEAADIFIGVNALDYSGYPDCRPAFIHAYQAMANLATRAGVENADPLRIHTPLIHMSKAEIIRLGHSLGVDYGLTCSCYDPSPEGQPCGHCDACLLRAKGFAEAGMADPLCGG

SEQ ID NO: 43011 - protein, 231 aa, Thiorhodovibrio sp.
  REGION 1..231: note = tr|H8Z4H2|H8Z4H2_9GAMM 7-cyano-7-deazaguanine synthase OS=Thiorhodovibrio sp. 970 OX=631362 GN=queC PE=3; SV = 1
MTDTSRPAVVLLSGGLDSATVLAIAKDQGFAPHALSFRYGQRHLIELQAAARVAEALGAAEHRVVAVDLAGFGGSALTAKMDVPKHRDVGEIGLGIPTTYVPARNTVFLSLALAWAEVLGATDIFIGVNALDYSGYPDCRPEYIVAFERMANLATRAGVEGRERLRLHTPLIEMTKAQIIRCGLALGVDYGLTLSCYDPSPEGKSCGGCDACLLRAKGFAEAGVDDPVDGN

SEQ ID NO: 43012 - protein, 232 aa, Thiothrix caldifontis
  REGION 1..232: note = tr|A0A1H4ETE0|A0A1H4ETE0_9GAMM 7-cyano-7-deazaguanine synthase OS=Thiothrix caldifontis; OX = 525918 GN=queC PE=3 SV=1
MNKAVILLSGGLDSTTVLAIAKAQGYEPYALSFRYGQRHSIELTSAQRVAAAMQVKEHVIADINLRAFGGSALTADIDVPKGRDTAAMEAAIPITYVPARNTIFLSFALGWAEVLQANHIFVGVNALDYSGYPDCRPEFISAFETMANLATKSGVEGNKLTIHAPLIEMSKADIIIKGMELGVDYSLTSSCYDPSDGGKPCGQCDSCLLRAKGFVEAGVADPLLLRYAQRSA

SEQ ID NO: 43013 - protein, 107 aa, Thiothrix lacustris
  REGION 1..107: note = tr|A0A1Y1Q931|A0A1Y1Q931_9GAMM 7-cyano-7-deazaguanine synthase (Fragment) OS=Thiothrix lacustris OX=525917 GN=BWK73_48960 PE=3 SV=1
MKKAVVLLSGGMDSATVLAMATAQGYACYSLSFRYGQRHTAELQAALEQAQRQGAVRHEIIDLDLSRFGGSALTDDRIEVPTSPTQGIPVTYVPARNTVFLSIALGW

SEQ ID NO: 43014 - protein, 230 aa, Thiothrix lacustris
  REGION 1..230: note = tr|A0A1Y1Q750|A0A1Y1Q750_9GAMM 7-cyano-7-deazaguanine synthase OS=Thiothrix lacustris; OX = 525917 GN=queC PE=3 SV=1
MKKAVILLSGGLDSTTVLAIARAQGFEPYALSFRYGQRHSVELASAQRVAAAMQVKEHVIADINLRAFGGSALTADIDVPKGRDTAAMETDIPITYVPARNTIFLSFALGWAEVLHANHIFVGVNALDYSGYPDCRPEFISAFETLANLATKSGVEGNKLTIHAPLIEMSKADIIRKGLELGVDYGLTSSCYDPGDDGKPCGQCDSCLLRAKGFAEAGVADPLLLHYDQA

SEQ ID NO: 43015 - protein, 225 aa, Thiothrix sp.
  REGION 1..225: note = tr|A0A432UUW5|A0A432UUW5_9GAMM 7-cyano-7-deazaguanine synthase OS=Thiothrix sp. OX=1032; GN = queC PE=3 SV=1
MVKKAIVLLSGGMDSATTLAIATQKGHECYALSFRYGQRHDAELQAAEHLASHFNAKLQRVIDIDLSGIMDSALTNTDITIPEQPGTGIPATYVPARNTVFLSIALAWAEVIEAQDIFIGVNAVDYSGYPDCRPEYINAFQKMANLATKAAVEGNEVRINTPLIHLSKAEIIKIGMDLGLDFAWTVSCYQADQQGLACGKCDACRLRRSGFESAGITDNTRYINS

SEQ ID NO: 43016 - protein, 226 aa, unidentified
  source 1..226: note = Thiotrichaceae bacterium
  REGION 1..226: note = tr|A0A2A5G750|A0A2A5G750_9GAMM 7-cyano-7-deazaguanine synthase OS=Thiotrichaceae bacterium OX=2030882 GN=queC PE=3 SV=1
MSNPASKAIVLLSGGLDSATVLAIANQSFDCHAISFNYAQRSLSEINAAKQIAKHYSVSHQIFQIDKGVMVGSALTDKSMDVPEFDDEEQGIPVTYVPARNTLFLSYALAIAEVKGSQDIFIGVNAVDFSGYPDCRPEYIRSYEIMANLATKAGVEGNTLKIHVPLIDKSKAEIIQIGSDLDVDYAATVSCYQANEQGEACGVCDSCQLRRKGFEALGIADPTRYI

SEQ ID NO: 43017 - protein, 457 aa, unidentified
  source 1..457: note = Thiotrichaceae bacterium
  REGION 1..457: note = tr|A0A1Y1Q379|A0A1Y1Q379_9GAMM 7-cyano-7-deazaguanine synthase OS=Thiotrichaceae bacterium IS1 OX=1934244 GN=BWK78_06165 PE=3 SV=1
MKTHIWVITESQLDGSVPEKGDVVCVIGKDLKIGYENLQQKCGEELSSIEIDFLSVAGAVAFADRKIRRKTHQWARQLTIHISVYCPEQWGRSQNKLVECLNFLTGDYWKFEFIKREDNLQQGFQQTLLKDIKGQTVVIPYSGGMDSYADLNLVKHDEPDVKPFLVTIEFKKTLETRKSAFHTSHSLDGSDNRAYVPITFSELDHPEISFRSRTFVFFSVAAIVAKLIGSKRILIPESGQGALGTALITLGDEPTFQATVPTFTEKLRNFLTTLWNDALAFEHPYLWNTKAEVLHRLIEINKADDLLETCSCSRQIARNKGLSGAPQHCGVCSNCLLRRVALVMSGFTDYHEKEEYVWKNLDAEDLELATSFSDLETTRNDYEIAIRAVLNHQQLADLSTQSENFKDLVFQLSRSLGESEDLVTTRLENLLNRHCQEWENFLSLLAPNSWIIKIARR

SEQ ID NO: 43018 - protein, 235 aa, unidentified
  source 1..235: note = Thiotrichales bacterium
  REGION 1..235: note = tr|A0A259KAZ9|A0A259KAZ9_9GAMM 7-cyano-7-deazaguanine synthase OS=Thiotrichales bacterium 34-46-19 OX=1970605 GN=queC PE=3 SV=1
MQLNNEPRLAVVLLSGGLDSATTLAWAIAQGYECHTISFNYGQRHAAELLAAERLSRRLGALTHRVVTIDLAQMGGSALTDASIPVPETESSGIPLTYVPARNTVFLSYSLALAEVLTARHIFIGVNAVDYSGYPDCRPEFIEAFEKMANLATKAGVEGQSVKIHAPLQFLSKAEIIQTGMRLGVDFSQTVSCYQADDEGKACGVCDACRLRHEGFVQAGVADPTHYTAAKNVTK

SEQ ID NO: 43019 - protein, 242 aa, unidentified
  source 1..242: note = Thiotrichales bacterium
  REGION 1..242: note = tr|A0A2E2BCP6|A0A2E2BCP6_9GAMM 7-cyano-7-deazaguanine synthase OS=Thiotrichales bacterium; OX = 2026796 GN=queC PE=3 SV=1
MGGHLKPTGHRSALVLFSGGQDSTICLAWALANFDLVSTISFSYGQRHQVELDCCEKIIEKIKKIVPQWSKKLSERHLINLDFIPAISNSALTSEMEIEMTNSGLPNTFVPGRNIFFLSAAASLAYRSGILNLVGGMCETDYSGYPDCREEFIDSLETSIGLGMDMKFKIHTPLMFLNKAQSWLVAENLGGSELIDAIVEETHSCYRGVRESRYEWGYGCNKCPACELRKVGYGQYKTGVAI

SEQ ID NO: 43020 - protein, 224 aa, unidentified
  source 1..224: note = Bathymodiolus puteoserpentis
  REGION 1..224: note = tr|A0A483ALD9|A0A483ALD9_9BACT 7-cyano-7-deazaguanine synthase OS=thiotrophic endosymbiont of Bathymodiolus puteoserpentis (Logatchev); OX = 343240 GN=queC PE=3 SV=1
MSKAVILLSGGLDSTTTLAIAKSQGLDCYALSFDYGQKQKSELNSAKQVAELFSAIEHRTMSISLNDIGGSALTDSAIEVPKFKPSDEIPVTYVPARNTIFLSYAMAWAEVLDCQDIFIGVNALDYSGYPDCRKEYIKSFEIMANLATKQGVEGKKLTIHTPLIDLHKAQIIQKGLSLGVDYSLTTTCYQADNNGDACGFCDACEYRKLGFKKVGIPDPTRYQR

SEQ ID NO: 43021 - protein, 229 aa, Thiovulum sp.
  REGION 1..229: note = tr|J0L4G6|J0L4G6_9HELI 7-cyano-7-deazaguanine synthase OS=Thiovulum sp. ES OX=1177931 GN=queC PE=3 SV=1
MRATGIDKQKVVVIMSGGMDSSLTAYKMREFGYDVVAVHFSYGQRTEERERQSFHKISDSLPAINKYSFELPFFKDIGIGTTSLIDSGMELNITGVEEKIIPNSYVPYRNGIMLSIATAVAEKEGAIGIAIGVVEEDSSGYPDCREDFINSFEKTINLGTKKGGFRVFRPLVNLKKMEIVKEAIKLKVPLENTWSCYQDEDEPCGVCDSCRLRKRGFDFADEVDPLVES

SEQ ID NO: 43022 - protein, 257 aa, unidentified
  source 1..257: note = Tibeticola sediminis
  REGION 1..257: note = tr|A0A3N4VJC1|A0A3N4VJC1_9BURK 7-cyano-7-deazaguanine synthase OS=Tibeticola sediminis; OX = 1917811 GN=queC PE=3 SV=1
MTSKHGFQSALVLFSGGQDSTTCLAQALEQFERVETVGFDYGQRHRVELEARQTVLAALRERFPAWAAKLGEDHLIDLAVLGEISDCALTRDTAFAFEASGLPNSFVPGRNLIFLTLAAALAYRRGAQALVTGVCETDFSGYPDCRDDTMKAMQVALSLGLDRRLRIDTPLMWLDKAETWALAHRLGAAHEARLGRDAAAGGAALVELIVEHTHTCYRGERSARHDWGYGCGECPACVLRARGWQAWRAGCGRSAGV

SEQ ID NO: 43023 - protein, 231 aa, Tistlia consotensis
  REGION 1..231: note = tr|A0A1Y6CNQ3|A0A1Y6CNQ3_9PROT 7-cyano-7-deazaguanine synthase OS=Tistlia consotensis USBA 355 OX=560819 GN=queC PE=3 SV=1
MSDGALVLFSGGQDSTTCLAWALERFERVETLGFDYGQRHRVELDCRAALRAGLAALDPRWAGRLGEDHTVDLAALGALSETGLTRTVAIEMGEGGLPNTFVPGRNLIFLCFAAALAYRRGLKRIVGGMCETDYSGYPDCRDDTIKALQVALNLGMERRFVLETPLMWLDKAATWRLADSLGGAALVELIVRNSHTCYRGERGQLHDWGHGCGSCPACELRARGFAAWRAG

SEQ ID NO: 43024 - protein, 247 aa, Tistrella mobilis
  REGION 1..247: note = tr|A0A3B9IMG0|A0A3B9IMG0_9PROT 7-cyano-7-deazaguanine synthase OS=Tistrella mobilis; OX = 171437 GN=queC PE=3 SV=1
MTGSPRNAGALVLFSGGQDSATCLAWALDRFERVETLGFDYGQRHRVELDCRSTLRERMAALDPRWAARLGPDHTLDLGVLGAMSETSLTREVAIGLRDDGLPDTFVPGRNLVFLTFAAALGFRRGLDHVVGGMCETDYSGYPDCRDDTIKALQVALNLGMAKQFVLHTPLMWLDKAETWALAQRLGGTALVDLIVAESHTCYLGMRGELHDWGHGCGSCPACRLRADGHARYREALTLDGRMPAAG

SEQ ID NO: 43025 - protein, 247 aa, Tistrella mobilis
  REGION 1..247: note = tr|I3TXT5|I3TXT5_TISMK 7-cyano-7-deazaguanine synthase OS=Tistrella mobilis (strain KA081020-065); OX = 1110502 GN=queC PE=3 SV=1
MTGSPRNAGALVLFSGGQDSATCLAWALDRFDRVETLGFDYGQRHRVELDCRGTLRERMAALDPRWAARLGPDHTLDLGVLGAMSETSLTREVEIGLREDGLPDTFVPGRNLLFLTFAAALGFRRGLDHVVGGMCETDYSGYPDCRDDTIKALQVALNLGMAKQFVLHTPLMWLDKAETWALAQRLGGAALVDLIVAESHTCYLGTRGELHDWGHGCGSCPACRLRAHGHARYREALTLDGRMPAAG

SEQ ID NO: 43026 - protein, 247 aa, Tistrella sp.
  REGION 1..247: note = tr|A0A2D8QA37|A0A2D8QA37_9PROT 7-cyano-7-deazaguanine synthase OS=Tistrella sp.; OX = 2024861 GN=queC PE=3 SV=1
MTGSLRNAGALVLFSGGQDSATCLAWALDRFERVETLGFDYGQRHRVELDCRGTLRERMAALDPRWAARLGPDHTLDLGVLGAMSETSLTREVEIGLREDGLPDTFVPGRNLLFLTFAAALGFRRGLDHVVGGMCETDYSGYPDCRDDTIKALQVALNLGMAKQFVLHTPLMWLDKAETWALAQRLGGAALVDLIVAESHTCYLGTRGELHDWGHGCGNCPACRLRAHGHARYREVLTLDGRMPAAG

SEQ ID NO: 43027 - protein, 247 aa, Tistrella sp.; identical to SEQ ID NO: 43024
  REGION 1..247: note = tr|A0A2E3EIG2|A0A2E3EIG2_9PROT 7-cyano-7-deazaguanine synthase OS=Tistrella sp.; OX = 2024861 GN=queC PE=3 SV=1

SEQ ID NO: 43028 - protein, 232 aa, Tolumonas auensis
  REGION 1..232: note = tr|C4LCL2|C4LCL2_TOLAT 7-cyano-7-deazaguanine synthase OS=Tolumonas auensis (strain DSM 9187 / TA4); OX = 595494 GN=queC PE=3 SV=1
MSQTKRKAVVVFSGGQDSTTCLLYAVQQYDEVHAITFDYGQRHVQEIEVARQIAADLGLAAHKVLDVGLLNELAVSALTRDAIPVSNDLQENGLPNTFVPGRNILFLTLAAIYAYQVGADTVITGVCETDFSGYPDCRDEFVKALNHAVKLGMERDVKFETPLMWLNKAETWALADKIGRLDYVRQQTLTCYNGVIGDGCGECPACKLRAKGLHDYQQAPDAVMAALNSKLS

SEQ ID NO: 43029 - protein, 227 aa, unidentified
  source 1..227: note = Tolypothrix bouteillei
  REGION 1..227: note = tr|A0A0C1R3E4|A0A0C1R3E4_9CYAN 7-cyano-7-deazaguanine synthase OS=Tolypothrix bouteillei VB521301 OX=1479485 GN=queC PE=3 SV=1
MKAVILLSGGLDSSTVLYQAMADGCECYALSFDYRQRHQRELQSASAIATRVGAVQHQVVKFDLSQWGGSALTDNSINLPQERSLGEMSQNIPITYVPARNTIFLSFALAWAETLAAERVYIGVNALDYSGYPDCRPDYIQAMEEVFCLGTKQGRLGNPIKIIAPLSELKKTEIIQLGNQLGVPWELTWSCYAGREAACGVCDSCLLRLAAFKELGLVDPLKYEQRR

SEQ ID NO: 43030 - protein, 225 aa, unidentified
  source 1..225: note = Tolypothrix campylonemoides
  REGION 1..225: note = tr|A0A0C2L374|A0A0C2L374_9CYAN 7-cyano-7-deazaguanine synthase OS=Tolypothrix campylonemoides VB511288 OX=1245935 GN=queC PE=3 SV=1
MKAVILLSGGLDSSTVLYQAQADGCECYTICFDYQQRHRRELTSALAIAHKADVVDHQVVRFDLRQWGGSALTDDAIDLPQKRDLEEMSQTIPVTYVPARNTIFLSFALGYAETIAAQRIYIGVNALDYSGYPDCRPDYIQAMQEVFRLGTKQGRSGELISIVTPLIDLKKTEIIQLGNKLGVPWELTWSCYAGGDVACGVCDACRLRLAAFAELGLKDPLAYAV

SEQ ID NO: 43031 - protein, 249 aa, Tolypothrix sp.; identical to SEQ ID NO: 38338
  REGION 1..249: note = tr|A0A0D6KVA9|A0A0D6KVA9_9CYAN 7-cyano-7-deazaguanine synthase OS=Tolypothrix sp. PCC 7601 OX=1188 GN=queC PE=3 SV=1

SEQ ID NO: 43032 - protein, 233 aa, Tolypothrix sp.
  REGION 1..233: note = tr|A0A218QMB0|A0A218QMB0_9CYAN 7-cyano-7-deazaguanine synthase OS=Tolypothrix sp. NIES-4075 OX=2005459 GN=queC PE=3 SV=1
MTKKALVVLSGGQDSTTCAAVACQEFDEVHAITFNYQQRHLIELESAIAIAKALGLASHEIIDLGPVLKGTSPLVSDNSLGEYNSPEELPTGVEPTFIPGRNILFLTIASNRAACLNTKDIFIGVCQADFAGYWDCRQSFIDAMSVALSEGIYGNRDAFTTHTPLMDLTKAESVKLALDVLKERFESVMELTHTCYAGVKGGCGKCHACILRDRGFKEAGAEDPIWKFRKVVV

SEQ ID NO: 43033 - protein, 224 aa, Tolypothrix tenuis; identical to SEQ ID NO: 36132
  REGION 1..224: note = tr|A0A1Z4MUX8|A0A1Z4MUX8_9CYAN 7-cyano-7-deazaguanine synthase OS=Tolypothrix tenuis PCC 7101 OX=231146 GN=queC PE=3 SV=1

SEQ ID NO: 43034 - protein, 231 aa, Trabulsiella guamensis
  REGION 1..231: note = tr|A0A085AEJ0|A0A085AEJ0_9ENTR 7-cyano-7-deazaguanine synthase OS=Trabulsiella guamensis ATCC 49490 OX=1005994 GN=queC PE=3 SV=1
MKRAVVVFSGGQDSTTCLVQALHQYDEVHCVTFDYGQRHRAEIDVARDLALKLGARAHKVLDTTLLNELAVSSLTRDSIPVPDYEPDADGIPNTFVPGRNILFLTLAAIYAYQVKAEAVITGVCETDFSGYPDCRDEFVKALNHAVNLGMAKEIRFETPLMWIDKAETWALADYWGKLDLVRSETLTCYNGIKGDGCGHCAACNLRANGLNHYLSDKPGVMAAMKAKTGLK

SEQ ID NO: 43035 - protein, 231 aa, Trabulsiella odontotermitis
  REGION 1..231: note = tr|A0A0L0H1F5|A0A0L0H1F5_9ENTR 7-cyano-7-deazaguanine synthase OS=Trabulsiella odontotermitis OX=379893 GN=queC PE=3 SV=1
MKRAVVVFSGGQDSTTCLVQALHQYDEVHCVTFDYGQRHRAEIDVARDLALKLGARAHKVLDTTLLNELAVSSLTRDSIPVPDYEPDADGIPNTFVPGRNILFLTLAAIYAYQVKAEAVITGVCETDFSGYPDCRDEFVRALNHAVNLGMAKDIRFETPLMWIDKAETWALADYWGKLDLVRSETLTCYNGIKGDGCGHCAACNLRANGLQHYLSDKPAVMAAMKAKTGLK

SEQ ID NO: 43036 - protein, 231 aa, Tranquillimonas sp.
  REGION 1..231: note = tr|A0A438ALJ4|A0A438ALJ4_9RHOB 7-cyano-7-deazaguanine synthase OS=Tranquillimonas sp. M0103 OX=2486419 GN=queC PE=3 SV=1
MKTLVICSGGLDSVSLAHILAARSHLTRLVCFDYGQRHRKELEFAAAAADRLNVPLHRIDMRGIGAALTGSALTDAVDVPDGHYAEETMRVTVVPNRNAIMLSIGFGIAAANGDAAVATAVHGGDHFIYPDCRPGFTQAFDAMQQAALEGYANVRLHTPFVHRTKADIVTEGAAHGTPFALTWSCYKGGAVHCGRCGTCVERREAFDLAGVPDPTDYADPGFWRTAVAEAR

SEQ ID NO: 43037 - protein, 251 aa, Treponema maltophilum
  REGION 1..251: note = tr|S3K0C4|S3K0C4_TREMA TIGR00268 family protein; OS = Treponema maltophilum ATCC 51939 OX=1125699; GN = HMPREF9194_01282 PE=4 SV=1
MQKAEALKDFFKTHPKAAIAFSGGTDSAYLLAAAMRSGADVRPYYIKTAFQPQFELEDALRLTKELGVKPEIIAADILNEADVTLNRADRCYRCKRFLFSLLKERAVKDGYHLILDGTNASDDADDRPGMKALRELNIQSPLRLCGITKDEVRLLSKREGLFTWNKSAYACLATRVPCGTIIKAETLALVERAETELAKLGFSDFRIRIRGDAALLQVSEAQMEKVLQKKEDIRALLANGFPSVMLDLKAR

SEQ ID NO: 43038 - protein, 222 aa, Trichococcus collinsii
  REGION 1..222: note = tr|A0A143Z427|A0A143Z427_9LACT 7-cyano-7-deazaguanine synthase OS=Trichococcus collinsii; OX = 157076 GN=queC PE=3 SV=1
MENVNGTTQKQVLVVFSGGQDSTTCLIQAIQKYGAANAVALSFSYGQRHDIELERAAWIAKDLGVEHHTLDASVMGKVTTNALMDESQTIKEADAEDYPNTFVDGRNALFLLLAGIFAKSKGIRTIILGVCETDFSGYPDCRDVFVKSMNVTLNLAMDYNFNVETPLMYLTKAQTWELADKLGCLAYIEEHTHTCYMGVPGGCGECPSCKLRNAGLAEYLNK

SEQ ID NO: 43039 - protein, 222 aa, Trichococcus flocculiformis
  REGION 1..222: note = tr|A0A143YNB6|A0A143YNB6_9LACT 7-cyano-7-deazaguanine synthase OS=Trichococcus flocculiformis OX=82803 GN=queC PE=3 SV=1
MENVNGTTQKQALVIFSGGQDSTTCLIQAIQKYGAANTVALSFSYGQRHGIELERAAWIANDLGVEHHILDASVMGKVTTNALMDESQTIKEADAEDYPNTFVDGRNALFLLLAGIFAKSKGIRNIILGVCETDFSGYPDCRDVFVKSMNVTLNLAMDYNFNVETPLMYLTKAQTWELADQLGCLAYIEEHTHTCYMGVPGGCGECPSCKLRNAGLAEYLNK

SEQ ID NO: 43040 - protein, 222 aa, unidentified
  source 1..222: note = Trichococcus ilyis
  REGION 1..222: note = tr|A0A143Z5Z8|A0A143Z5Z8_9LACT 7-cyano-7-deazaguanine synthase OS=Trichococcus ilyis; OX = 640938 GN=queC PE=3 SV=1
MENKNETTQKQALVIFSGGQDSTTCLIQAIQKYGAANTVALSFSYGQRHNIELERAAWIANDLGVEHHILDATVMGKVTTNALMDETQTIEEADAEDYPNTFVDGRNALFLLLAGIFAKSKGIRTIILGVCETDFSGYPDCRDVFVKSMNVALNLAMDYNFNVETPLMYLTKAQTWELADQLGCLAYIEEHTHTCYMGVPGGCGECPSCKLRNAGLAEYLSK

SEQ ID NO: 43041 - protein, 219 aa, Trichococcus palustris
  REGION 1..219: note = tr|A0A143YL76|A0A143YL76_9LACT 7-cyano-7-deazaguanine synthase OS=Trichococcus palustris; OX = 140314 GN=queC PE=3 SV=1
MTKQALIIFSGGQDSTTCLIQAIQKYGAANVVALSFTYGQRHEIELEKAAWIANDLGVEHHILDATVMSKVTTNALMDDSQTIEEADAEDYPNTFVDGRNALFLLLAGIFAKSKDIKTIILGVCETDFSGYPDCRDVFVKSMNVTMNLAMDYNFNVETPLMYLTKAETWRLADQMGYLDYIQEHTHTCYLGVPGGCGECPSCKLRNSGLEEYLNSKAGI

SEQ ID NO: 43042 - protein, 222 aa, Trichococcus pasteurii
  REGION 1..222: note = tr|A0A1W1IE57|A0A1W1IE57_9LACT 7-cyano-7-deazaguanine synthase OS=Trichococcus pasteurii; OX = 43064 GN=queC PE=3 SV=1
MENVNGTTQKQALVIFSGGQDSTTCLIQAIQKYGAANTVALSFSYGQRHGIELERAAWIAKDLGVEHHILDAQVMGKVTTNALMDESQTIKEADAEDYPNTFVDGRNALFLLLAGIFAKSKGIRTIILGVCETDFSGYPDCRDVFVKSMNVTLNLAMDYNFNVETPLMYLTKAQTWELADQLGCLAYIEEHTHTCYMGVPGGCGECPSCKLRNAGLTEYLNK

SEQ ID NO: 43043 - protein, 222 aa, Trichococcus patagoniensis
  REGION 1..222: note = tr|A0A2T5IB97|A0A2T5IB97_9LACT 7-cyano-7-deazaguanine synthase OS=Trichococcus patagoniensis OX=382641 GN=queC PE=3 SV=1
MENKNETTPKQALVIFSGGQDSTTCLIQAIQKYGAANVVALSFSYGQRHGIELERAAWIAKDLGGEHHILDATVMGKVTTNALMDESQTIEEADAEDYPNTFVDGRNALFLLLAGIFAKSKGIRTIILGVCETDFSGYPDCRDVFVKSMNVTLNLAMDYNFNVETPLMYLTKAQTWELADQLGCLAYIEEHTHTCYMGVPGGCGECPSCKLRNAGLAEYLKK

SEQ ID NO: 43044 - protein, 222 aa, Trichococcus sp.
  REGION 1..222: note = tr|A0A5C5ECJ5|A0A5C5ECJ5_9LACT 7-cyano-7-deazaguanine synthase OS=Trichococcus sp. SKBG; OX = 2585775 GN=queC PE=3 SV=1
MENVNGTTQKQALVIFSGGQDSTTCLIQAIQKYGAANTVALSFSYGQRHGIELERAAWIANDLGVEHHILDASVMGKVTTNALMDESQTIKEADAEDYPNTFVDGRNALFLLLAGIFAKSKGIRIIILGVCETDFSGYPDCRDVFVKSMNVTLNLAMDYNFNVETPLMYLTKAQTWELADQLGCLAYIEEHTHTCYMGVPGGCGECPSCKLRNAGLAEYLNK

SEQ ID NO: 43045 - protein, 222 aa, Trichococcus sp.
  REGION 1..222: note = tr|A0A143Z3X3|A0A143Z3X3_9LACT 7-cyano-7-deazaguanine synthase OS=Trichococcus sp. ES5; OX = 872292 GN=queC PE=3 SV=1
MENVNGTTQKQALVIFSGGQDSTTCLIQSLQKYGAANTVALSFSYGQRHGIELERAAWIAKDLGVEHHILDAQVMGKVTTNALMDESQTIKEADAEDYPNTFVDGRNALFLLLAGIFAKSKDIRNIILGVCETDFSGYPDCRDVFVKSMNVTLNLAMDYNFNVETPLMYLTKAQTWELADQLGCLAYIEEHTRTCYMGVPGGCGECPSCKLRNAGLAEYLNK

SEQ ID NO: 43046 - protein, 222 aa, unidentified
  source 1..222: note = Trichodesmium erythraeum
  REGION 1..222: note = sp|Q114E1|QUEC_TRIEI 7-cyano-7-deazaguanine synthase; OS = Trichodesmium erythraeum (strain IMS101) OX=203124; GN = queC PE=3 SV=1
MKAVILLSGGLDSSTVLYQAKADGCECYAISFDYQQRHLRELDSAKKIADTVGVIEHHIVSFDLRSWGGSALTDSQIDLPSDRDLEEMSQNIPITYVPARNTIFLSFALAYAEVVNASRVYIGVNALDYSGYPDCRPDYILAMQEVFRLGTRQGREGEAIAIVAPLIEMKKTEIIQLGNSLGVPWEKTWSCYAGGEKPCGICDSCKLRLTAFQELGLTDPLM

SEQ ID NO: 43047 - protein, 229 aa, unidentified; identical to SEQ ID NO: 40185
  source 1..229: note = Trichormus variabilis
  REGION 1..229: note = tr|A0A1Z4KP32|A0A1Z4KP32_ANAVA 7-cyano-7-deazaguanine synthase OS=Trichormus variabilis NIES-23 OX=1973479 GN=queC PE=3 SV=1

SEQ ID NO: 43048 - protein, 227 aa, unidentified
  source 1..227: note = Trichormus variabilis
  REGION 1..227: note = sp|Q3MAK6|QUEC_TRIV2 7-cyano-7-deazaguanine synthase; OS = Trichormus variabilis (strain ATCC 29413 / PCC 7937); OX = 240292 GN=queC PE=3 SV=1
MKAVILLSGGLDSSTILYQAKADGCECYSISFDYQQRHRRELHSAFLVAQTAGIVQHQVVNFDLRLWGGSALTDDKIDLPQERSVDAMSQNIPVTYVPARNTIFLSFALAYAEAIAAERVYIGVNALDYSGYPDCRPDYIEAMQEVFRLGTKQGREGQPINIVAPLINLKKTAIIQLGNQLGVPWNLTWSCYNGGDVACGVCDSCRLRLAAFAELGLEDPLPYLKGV

SEQ ID NO: 43049 - protein, 241 aa, unidentified
  source 1..241: note = Trinickia caryophylli
  REGION 1..241: note = tr|A0A1X7FAP4|A0A1X7FAP4_TRICW 7-cyano-7-deazaguanine synthase OS=Trinickia caryophylli; OX = 28094 GN=queC PE=3 SV=1
MSQRDAKNGALVLFSGGQDSATCLAWALERYDTVETLGFDYGQRHRVELECREGVRTQLASAFPRWAGRLGDDHVVDLSVLGAISETAMTREIEIETAAGGLPNTFVPGRNLMFMTIAAAIAYRRGLRALVGGMCETDFSGYPDCRDDTMKALQVTLNLGMASRFVVATPLMWLDKADTWRLAEQLGGEALVELIRVETHTCYVGERSELHEWGFGCGECPACRLRKRGYEAYRAGGNVAV

SEQ ID NO: 43050 - protein, 243 aa, unidentified
  source 1..243: note = Trinickia soli
  REGION 1..243: note = tr|A0A2N7VLH9|A0A2N7VLH9_9BURK 7-cyano-7-deazaguanine synthase OS=Trinickia soli; OX = 380675 GN=queC PE=3 SV=1
MIRTDAKRGALVLFSGGQDSTTCLAWALDRYETVETLGFDYGQRHRVELECREGVRQAMLRTFPAWAGRLGDDHMIDLSVLGSISDTAMTREIQIEASANGLPNTFVPGRNLMFMTIAAAIAYRRGLSALVGGMCETDFSGYPDCRDDTMKALQVALNLGMDSRFVVETPLMWLDKADTWRLARELGGDALVELIRVETHTCYVGERAELHDWGFGCGDCPACRLRKRGYAAFLAGEKVTQPA

SEQ ID NO: 43051 - protein, 243 aa, unidentified
  source 1..243: note = Trinickia sp.
  REGION 1..243: note = tr|A0A4U1HT45|A0A4U1HT45_9BURK 7-cyano-7-deazaguanine synthase OS=Trinickia sp. 7GSK02; OX = 2571161 GN=queC PE=3 SV=1
MTRTDAKNSALVLFSGGQDSATCLAWALDRYETVETLGFDYGQRHRVELECREGFRSAIARTFPAWGARLGDDHMIDLSVLGSISDTAMTREIQIEATANGLPNTFVPGRNLMFMTIAAAIAYRRGLRVLVGGMCETDFSGYPDCRDDTMKALQVALNLGMDSRFVLETPLMWLDKADTWRLAQELGGDALVELVRVETHTCYVGERAELHDWGFGCGECPACRLRKRGYEAFLAGEKVTEPV

SEQ ID NO: 43052 - protein, 243 aa, unidentified
  source 1..243: note = Trinickia symbiotica
  REGION 1..243: note = tr|A0A2N7X859|A0A2N7X859_9BURK 7-cyano-7-deazaguanine synthase OS=Trinickia symbiotica; OX = 863227 GN=queC PE=3 SV=1
MIERDATTGALVLFSGGQDSATCLAWALDRYETVETIGFDYGQRHRVELECREGIRERLARDFPAWAGRLGDDHLIDLSVLGSISDTAMTREIEIETAASGLPNTFVPGRNLMFMTIAAAVAYRRGLRVLVGGMCETDFSGYPDCRDDTMKALQVTLNLGMASRQIIETPLMWLDKADTWRLADSIGGQALVELIRVETHTCYVGERAELHDWGFGCGECPACRLRKRGYEAYLTGEKVTQPA

SEQ ID NO: 43053 - protein, 243 aa, unidentified
  source 1..243: note = Trinickia symbiotica
  REGION 1..243: note = tr|A0A2T3XYX8|A0A2T3XYX8_9BURK 7-cyano-7-deazaguanine synthase OS=Trinickia symbiotica; OX = 863227 GN=queC PE=3 SV=1
MIERDAKTGALVLFSGGQDSATCLAWALDRYETVETIGFDYGQRHRVELECREGIRERLARDFPAWAGRLGDDHLIDLSVLGSISDTAMTREIEIETAASGLPNTFVPGRNLMFMTIAAAVGYRRGLRVLIGGMCETDFSGYPDCRDDTMKALQVTLNLGMASRLIIETPLMWLDKADTWRLADTIGGQALVELIRVETHTCYVGERAELHDWGFGCGECPACRLRKRGYEAYLIGEKVTQPA

SEQ ID NO: 43054 - protein, 240 aa, unidentified
  source 1..240: note = Tropicibacter phthalicicus
  REGION 1..240: note = tr|A0A238JEY8|A0A238JEY8_9RHOB 7-cyano-7-deazaguanine synthase OS=Tropicibacter phthalicicus OX=1037362 GN=queC PE=3 SV=1
MKTLVICSGGLDSVSLAHIIAAQGELSRLVSFDYDQRHKKEVEFAAAAARRLHVPHHIVDIRSIGASLTGSALTDDIDVPDGHYAEDTMKVTVVPNRNAIMLSIAYGIAAAKGDTGVATAVHGGDHFIYPDCRPAFTEAFDTMQCAALDGYADVSLVTPFVHKTKADIVTEGVAANTPFADTWSCYKGGTHHCGRCGTCVERREAFHLAGITDPTQYEDPDFWRAATGTATGTDSHQETA

SEQ ID NO: 43055 - protein, 234 aa, unidentified
  source 1..234: note = Tumebacillus algifaecis
  REGION 1..234: note = tr|A0A223D4E1|A0A223D4E1_9BACL 7-cyano-7-deazaguanine synthase OS=Tumebacillus algifaecis; OX = 1214604 GN=queC PE=3 SV=1
MSKKAVIILSGGLDSTTCMAAAKAEGYELYPLSFHYGQKAAIELESAKQVAAYYGVQDRHFIADLKGLIRGSALTDADKEIPTHRTGEESDIPVTYVPARNIIFLSIALSYSEAIGAEAMYIGVNALDYSGYPDCRADFIAAFQEVINKGTAAGVSGHPIAIKTPLQMLSKAGIVQLGTELGAPLHLSHSCYFGTDPSCGVCESCTLRIRGFQEAGVPDPIPYAVEIDWKTPVK

SEQ ID NO: 43056 - protein, 232 aa, unidentified
  source 1..232: note = Tumebacillus avium
  REGION 1..232: note = tr|A0A1Y0ING2|A0A1Y0ING2_9BACL 7-cyano-7-deazaguanine synthase OS=Tumebacillus avium; OX = 1903704 GN=queC PE=3 SV=1
MSKKAVIILSGGLDSTTCMAAAKAAGYELYPLSFHYGQKAAIELESAKKVAEFYGVSDRHFIADLKGLIRGSALTDADKEIPKHRTGEETDIPVTYVPARNIIFLSIALSYSEAIGAEAMYIGVNALDYSGYPDCRADFIAAFQEVINKGTAAGVTGHPIKIETPLQMLSKAGIVKLGTELGAPLHLSHSCYFGTDPSCGECESCTLRIRGFKEAGVKDPIPYAVDVDWDAK

SEQ ID NO: 43057 - protein, 237 aa, unidentified
  source 1..237: note = Tumebacillus flagellatus
  REGION 1..237: note = tr|A0A074LJ05|A0A074LJ05_9BACL 7-cyano-7-deazaguanine synthase OS=Tumebacillus flagellatus OX=1157490 GN=queC PE=3 SV=1
MTQAAKKAVIILSGGLDSTTCMAVAKNEGYELYPLSFFYGQKAAIELESAKKVSEFYGVADRHFIADLNGIIRGSALTDADKEIPVHRDENEMEKEIPATYVPARNIIFLSIALSYAEAIGAEAMYIGVNALDYSGYPDCRHEFIEAFQEVINKGTAAGAHGAGILIKTPLQFLSKAGIVKLGAELGAPLQFSHSCYFGTDPSCGVCDSCLLRIKGFQEAGVPDPIPYAVEIDWNTK

SEQ ID NO: 43058 - protein, 236 aa, Tumebacillus permanentifrigoris
  REGION 1..236: note = tr|A0A316DT91|A0A316DT91_9BACL 7-cyano-7-deazaguanine synthase OS=Tumebacillus permanentifrigoris OX=378543 GN=queC PE=3 SV=1
MTTAKKAVIILSGGLDSTTCMAVAKQEGYDLYPLSFFYGQKAAIELDSAKKVSDFYGVADRHFIADLNGMIRGSALTDADKAIPTNRDEATMEQEIPATYVPARNIIFLSIALSYAESIGAEAMYIGVNALDYSGYPDCRHEFIEAFQQVINVGTAAGAHGAGIQIKTPLQFLSKAGIVQLGSELGAPLQFSHSCYFGTDPSCGVCDSCLLRIKGFQEAGVPDPIPYAVPIDWNVK

SEQ ID NO: 43059 - protein, 232 aa, Tumebacillus sp.
  REGION 1..232: note = tr|A0A4R2R1Y8|A0A4R2R1Y8_9BACL 7-cyano-7-deazaguanine synthase OS=Tumebacillus sp. BK434; OX = 2512169 GN=queC PE=3 SV=1
MSKKAVIILSGGLDSTTCMAAAKDAGYELYPLSFHYGQKAAIELESAKKVAEYYGVSDRHFIADLKGLIRGSALTDADKEIPKHRTGEETDIPVTYVPARNIIFLSIALSYSEAIGAEAMYIGVNALDYSGYPDCRADFIAAFQDVINKGTAAGVSGHPIQIETPLQMLSKAGIVQLGTELGAPLHLSHSCYFGTDPSCGECESCTLRIRGFKEAGVKDPIPYAVEIDWEAK

SEQ ID NO: 43060 - protein, 219 aa, Turicibacter sanguinis
  REGION 1..219: note = tr|A0A173SNU3|A0A173SNU3_9FIRM 7-cyano-7-deazaguanine synthase OS=Turicibacter sanguinis; OX = 154288 GN=queC PE=3 SV=1
MKQDKAVLVFSGGQDSTTCLYWALETFKEVIAVTFDYGQRHHLELECAKAICQELGVEHHVLDMSLLNQLAPNALTRDEIKIELGEEGQLPSTFVPGRNLLFLSFAGVLAKVKGAKHIITGVCETDFSGYPDCRDVFIKSLNVTLNLSMDDDFVIHTPLMWLNKAQTWELADKLGKFEYIREKTLTCYNGIIGDGCGECPACVLRRRGLESYLTTKGEI

SEQ ID NO: 43061 - protein, 219 aa, Turicibacter sanguinis; identical to SEQ ID NO: 43060
  REGION 1..219: note = tr|D4W840|D4W840_9FIRM 7-cyano-7-deazaguanine synthase OS=Turicibacter sanguinis PC909 OX=702450 GN=queC; PE = 3 SV=1

SEQ ID NO: 43062 - protein, 219 aa, Turicibacter sp.
  REGION 1..219: note = tr|A0A109RMG4|A0A109RMG4_9FIRM 7-cyano-7-deazaguanine synthase OS=Turicibacter sp. H121; OX = 1712675 GN=queC PE=3 SV=1
MNQKAVVVFSGGQDSTTCLFWAMKQFEEVIAVTFDYNQRHLAELDCAKRICEEFEIEHHLLDMSLLNQLAPNALTRQDIDIKTGENGGLPSTFVEGRNLLFLSFAGVLAKVKGAKHIITGVCETDFSGYPDCRDMFIKSLNVTLNLSMDYDFVIHTPLMWLDKAQTWELADQLGKFEYVREHTLTCYRGIKGNGCGTCPACELRQRGLETYLARKGEGK

SEQ ID NO: 43063 - protein, 231 aa, unidentified
  source 1..231: note = Turicimonas muris
  REGION 1..231: note = tr|A0A227KA95|A0A227KA95_9BURK 7-cyano-7-deazaguanine synthase OS=Turicimonas muris; OX = 1796652 GN=queC PE=3 SV=1
MKALVLSSGGADSTVCVALAVEKLGRENVATVSFEYGQKHDRELICAQKIADFYSLKHFVLSLENILKFSDCSLLKNSTQAIEHKSYADQIAEKGEGKVSTYVPFRNGLMLSSAAALAQSIYPEEDCEIWIGAHADDAAGQAYADCSSEFTQAMNQAISIGTYGLVKLAAPLVKFNKARVIKEGLRLKVPFELTWSCYEGHEKACGKCGTCIDRLNAFEENGVKDPIPYEE

SEQ ID NO: 43064 - protein, 237 aa, Turneriella parva
  REGION 1..237: note = tr|I4BC22|I4BC22_TURPD 7-cyano-7-deazaguanine synthase OS=Turneriella parva (strain ATCC BAA-1111 / DSM 21527 / NCTC 11395 / H) OX=869212 GN=queC PE=3 SV=1
MAPRAVVLLSGGLDSATCMYLAREHGFEVEAISFNYQQRHSVELTAAQRLAATCGANHTIIDVNLRAIGASALTSDIAVPKGGTHLQGEAVIPSTYVPVRNLVFLSLAYALAEAKDCSAIFTGVNAIDYSGYPDCRPDFIASFAQTAALASKSGREGRAPEILTPLIAMTKSDIATEALRLAVPIHLTWSCYDPQTAGDMLKPCEQCDACLLRAQGFAALALQLSKEVIFGSPVKVA

SEQ ID NO: 43065 - protein, 224 aa, unidentified
  source 1..224: note = Tychonema bourrellyi
  REGION 1..224: note = tr|A0A2G4F4G9|A0A2G4F4G9_9CYAN 7-cyano-7-deazaguanine synthase OS=Tychonema bourrellyi FEM_GT703 OX=2040638 GN=queC PE=3 SV=1
MKAVILLSGGLDSSTVLYQAKADGCECYSISFDYQQRHRRELESARAIALSAHVKAHQIVNFDLTLWGGSALTDNEIDLPIDRTLTEMSQNIPITYVPARNTIFLSFALAYAETLGAQRIYIGVNALDYSGYPDCRLDYIQAMQEVFRLGTKQGREGDAINIVTPLIELKKTEIIQLGNKLGVPWEQTWSCYAGGENACGVCDSCRLRLAAFEELGLQDPVSYA

SEQ ID NO: 43066 - protein, 226 aa, unidentified
  source 1..226: note = Tyzzerella sp.
  REGION 1..226: note = tr|A0A1Y4UDQ5|A0A1Y4UDQ5_9FIRM 7-cyano-7-deazaguanine synthase OS=Tyzzerella sp. An114; OX = 1965545 GN=queC PE=3 SV=1
MKVLVLSSGGIDSTTALGMAVNKYGKENVISLSVSYGQKHNKELIAANEVAKYYGVEQLFLDLAKIFEYSNCSLLQQSTEEIPEESYSEQIKKTEGKTPVSTYVPFRNGLFLSAAASIALSKECSVIYYGVHSDDAAGSAYPDCSPVFNKAMNDAIWEGSGKQLHIEAPFVNKNKADIVKIGLELGVPYHLTWSCYEGNDKPCGKCGTCIDRAAAFAKNNAVDPAL

SEQ ID NO: 43067 - protein, 226 aa, Uliginosibacterium sp.
  REGION 1..226: note = tr|A0A2N4XUK2|A0A2N4XUK2_9RHOO 7-cyano-7-deazaguanine synthase OS=Uliginosibacterium sp. TH139 OX=2067453 GN=queC PE=3 SV=1
MSAPRAVVLLSGGLDSATCLAIARAEGFETYALSVAYGQRHAAELAAAERVAAALGAKEHRVGHVDLGQFGGSALTDASIEVPTSGVEAGGIPVTYVPARNTVMLSLALGWAEVLKANAIFVGVNAVDYSGYPDCRPEFIAAFEKMANLATKTGVEGLKLSIHAPLISLSKAQIVQRGSALGVDYGMTVSCYKADDEGRACGQCDACRLRRAGFEAAGLLDPTRYA

SEQ ID NO: 43068 - protein, 219 aa, Umboniibacter marinipuniceus
  REGION 1..219: note = tr|A0A3M0AEQ7|A0A3M0AEQ7_9GAMM 7-cyano-7-deazaguanine synthase OS=Umboniibacter marinipuniceus OX=569599 GN=queC PE=3 SV=1
MKVVVIYSGGMDSFTVLHRAIKTGHEVLAVSFNYGQRHNKELDYARRVCAEAGVVHDVVDITAMQSLMSNSSLMANSAEDIPEGHYAAENMKSTVVPNRNMILISLAIGYAVNEGASEVWYGAHSGDHTIYPDCRPEFVEAMQAVSLLANFEPVKVVAPYLYDDKIVILRDGLDMGLDYGQTWTCYNGREKACGKCGSCVERLEAFTLNNAQDPLEYEA

SEQ ID NO: 43069 - protein, 221 aa, unidentified; identical to SEQ ID NO: 36445
  source 1..221: note = Unknown
  REGION 1..221: note = tr|H5SFX4|H5SFX4_9BACT 7-cyano-7-deazaguanine synthase OS=uncultured Acidobacteria bacterium OX=171953; GN = HGMM_F22D11C37 PE=3 SV=1

SEQ ID NO: 43070 - protein, 232 aa, unidentified
  source 1..232: note = Alphaproteobacteria bacterium
  REGION 1..232: note = tr|A0A212KJS9|A0A212KJS9_9PROT 7-cyano-7-deazaguanine synthase OS=uncultured Alphaproteobacteria bacterium OX=91750 GN=queC PE=3 SV=1
MNEGALVLFSGGQDSATCLAWALERFARVETVGFDYRQRHSVELDVRRRFLPELRALFPQWGDRLGEDTLLDAGALAAIGHTAMIETIAIEMGENGLPNTFVPGRNILFLTLAAAVAYRRGLKHIVTGVCETDYSGYPDCRDDTIKAVQVALNLGMESRFVVHTPLMWIDKAGTWALAMELGGRALVDLINRGTHSCYVGDHDTRNDWGYGCGECPACRLRADGWRRWLDGV

SEQ ID NO: 43071 - protein, 203 aa, unidentified
  source 1..203: note = Aquificae bacterium
  REGION 1..203: note = tr|H5SBW3|H5SBW3_9BACT 7-cyano-7-deazaguanine synthase OS=uncultured Aquificae bacterium OX=453415; GN = queC PE=3 SV=1
MDSATLLWLSKREFDKVYAISFDYGQRHKVEIKYAKDLAKMAQVEEHFIVDVPHYSVLKGSALLDKEISVPKGEYPQEEPPITTVPMRNLTFISIAASFADTLEIDHIGIGVHALDSPYPDCRPEFITSAEAAVNASSIFVAKTKKRIHIYAPFLGMSKRDIALIGRDLGVPFEKTYSCYVGTEPPCGECAACIQRKQALSFL

SEQ ID NO: 43072 - protein, 227 aa, Avibacterium sp.
  REGION 1..227: note = tr|A0A486XGI5|A0A486XGI5_9PAST 7-cyano-7-deazaguanine synthase OS=uncultured Avibacterium sp. OX=1936169 GN=queC PE=3 SV=1
MTTFKNHNRKAVVIFSGGQDSTTCLIQAIADYGVENVETVTFHYGQRHAIELEKAKWIAQDLGVKQTFIDTSVIKAITSNALMNENAEIKQEKDGLPNTFVDGRNALFLLYTAIYAKGQGISDIITGVCETDFSGYPDCRDVFIKSMNVTLNLAMDYNFNLRTPLMYLTKAQTWALADSLGALDYVRNHTHTCYQGVEGGCGECPSCVLRNKGLDEYLQQKSAVQNV

SEQ ID NO: 43073 - protein, 671 aa, unidentified
  source 1..671: note = Unknown
  REGION 1..671: note = tr|A0A090KF75|A0A090KF75_9BACT Uncultured bacterium genome assembly Metasoil_fosmids_resub OS=uncultured bacterium OX=77133 PE=4 SV=1
MAPERVILCGSPDETAGPVADPDPVRLRAWGPDPNVHLTIEDLRQGIWREIPDAFEDLIDLAAYVYAADQAVGRGGAAADDLGAGWRRDLTFRVAVRRPDLWRSKPVHDALVSTLSFLSEDEYRFEFVPMTEHPDLGNRIAFDGTAFDGVVEEVVMFSGGLDSLAGAVREAVLDRRKVLLVNHRSTEKRTPRHYDLVRLLRHRAGDAAPLHVAVRVNKVEKLSREYTQRARSFLFAALGATFAHMIGLDRFRFYENGVVSLNLPISPQVVGARASRTTHPRVLRGFESLLTALAGRPFVVENPFLWHTKTDVVRLIGDAGCGELIGHSTSCGHTWVTTREQPHCGDCSQCIDRRFAVLAAGLEAHDPAGGYGVDLLAGERPEGQSRVLLAAYLETANHVGEMSELEFFGRFGEAGRVLRHLGGNPDETARRVYGLYRRHADQVNGVVTAAIAANADAIRRRSLPATCLVRLVSDGGSAADEQTGPTEPAADYLFRRRGQAWVVRFAGGPEKILLPSKGAAYLHQLLSRPDTAITPADLACQVARRRREFALGDAGEQADPESLAAYRARAQDLREELDRAREDNDPGAVARIESELEALRAEIRRAAGRGGRIRKAADDRERVRKAVGAAIHRAIGEIREFDSALAEHLKQRVKCGLSPRYTGDQGIRWET

SEQ ID NO: 43074 - protein, 153 aa, unidentified
  source 1..153: note = Unknown
  REGION 1..153: note = tr|A0A059WXF6|A0A059WXF6_9BACT 7-cyano-7-deazaguanine synthase (Fragment) OS=uncultured bacterium OX=77133 PE=3 SV=1
PDHVIDIGSFGAIGNTALTSDAEIVMLDSGLPSTFVPGRNLVFFTYAAALGYRRGLTTLIGGMCETDFSGYPDCRDATLRALEQAIRLGTEIPFAIETPLMWRTKCPRGCLGDGGSCRAAGSRRPQGRPAASAPRARDRPPPTDREGCRRWQR

SEQ ID NO: 43075 - protein, 219 aa, Bacteroides sp.
  REGION 1..219: note = tr|A0A1C5U083|A0A1C5U083_9BACE 7-cyano-7-deazaguanine synthase OS=uncultured Bacteroides sp. OX=162156 GN=queC PE=3 SV=1
MNREAALVVFSGGQDSTTCLFWAKRNFKKVYALSFLYGQKHQKEVEFAREIARKAEVEFDVMDVSFVGQLGHNSLTDTTMVMDQEKPADSVPNTFVPGRNLFFLSIAAVYARERGINHLVTGVSQTDFSGYPDCRDSFIKSLNVTLNLAMDEQFVIHTPLMWIDKAETWALADELGVLELIRNETLTCYNGVQGDGCGHCPACKLRREGLEKYLKSKNQ

SEQ ID NO: 43076 - protein, 220 aa, Bacteroides sp.
  REGION 1..220: note = tr|A0A1C5R5K0|A0A1C5R5K0_9BACE 7-cyano-7-deazaguanine synthase OS=uncultured Bacteroides sp. OX=162156 GN=queC PE=3 SV=1
MNQNEALVVFSGGQDSTTCLFWAKKHFKKVHALSFLYGQKHEKEVELARKIAEKAGVDFDVMDVSFIGHLGKNSLTDTSIHMDEVKPKDSFPNTFVPGRNLFFLSIAAVYARERGIFHLVTGVSQTDFSGYPDCRDSFIKSLNVTLNLAMDEQFVIHTPLMWIDKAQTWALADELGVLDLVRNETLTCYNGIPGDGCGHCPACKLRREGLEKYLASKENK

SEQ ID NO: 43077 - protein, 217 aa, unidentified
  source 1..217: note = Bacteroidetes bacterium
  REGION 1..217: note = tr|H5SMQ4|H5SMQ4_9BACT 7-cyano-7-deazaguanine synthase OS=uncultured Bacteroidetes bacterium OX=152509; GN = queC PE=3 SV=1
MAIVLLSGGQDSTTALLWAQHTLKEPIHALSFAYGQRHGVELQAAARIARKLGVPHEVLEIGSLWASLGVSTALTHETPIVEKPESLPTTFVPGRNLLFLTVAAIWGYPRGEHKLLLGVSQVDYSGYPDCREPFLRAAQEALSRALDGPVEVMAPFLFWDKAQLWRYADDLGYREFIVEETHTCYLGERSVRHAWGYGCGECPACRLRKAGFDQAFG

SEQ ID NO: 43078 - protein, 227 aa, Blautia sp.
  REGION 1..227: note = tr|A0A3S5BJ12|A0A3S5BJ12_9FIRM 7-cyano-7-deazaguanine synthase OS=uncultured Blautia sp.; OX = 765821 GN=queC PE=3 SV=1
MKALVLASGGVDSTTCLGLAVNKYGKENVIALTVAYGQKHTKEIEAARKTAEYYEVEHLYLDLEPIFRYSDCSLLKHSDREIPHESYAEQLKETDGSPVSTYVPFRNGLFLSSAASIALSKNCSVIYYGAHADDAAGNAYPDCSSAFHNAINEAIYQGSGGQLKVEAPFVSCTKSEVVKTGLELNVPYELTWSCYEGGEKPCGVCGTCIDRAEAFRLNGVKDPALDR

SEQ ID NO: 43079 - protein, 227 aa, Blautia sp.; identical to SEQ ID NO: 36676
  REGION 1..227: note = tr|A0A1C5TU66|A0A1C5TU66_9FIRM 7-cyano-7-deazaguanine synthase OS=uncultured Blautia sp.; OX = 765821 GN=queC PE=3 SV=1

SEQ ID NO: 43080 - protein, 228 aa, Butyricicoccus sp.
  REGION 1..228: note = tr|A0A1C6GCL1|A0A1C6GCL1_9CLOT 7-cyano-7-deazaguanine synthase OS=uncultured Butyricicoccus sp. OX=1193532 GN=queC PE=3 SV=1
MSEKAMVLCSGGVDSTTCLALAIEKHGKENVCALSIYYGQKHVKEIQAAKAVLEYYGIEGTSLDLTPVFAYSDCSLLSHSTEDIPEESYAEQLAQRGGKPVTTYVPFRNGLFLSAAASVALSKHCSVIYYGAHHDDAAGNAYPDCSEEFVNAMNHSIVLGSGGDVRIEAPFVRWNKAQIVAEGLRLQVPYQLTWSCYEGGDKPCGKCGTCLDRIRAFEANGVTDPAMR

SEQ ID NO: 43081 - protein, 254 aa, Citrobacter sp.
  REGION 1..254: note = tr|A0A212IER0|A0A212IER0_9ENTR 7-cyano-7-deazaguanine synthase OS=uncultured Citrobacter sp. OX=200446 GN=queC PE=3 SV=1
MKKLVGDTPRRYHKGFVILSGKAMKRAVVVFSGGQDSTTCLAQALHQYDEVHCVTFDYGQRHRAEIDVARDLALKLGARAHKVLDVTLLSELAVSSLTRDNIPVPDYEPDANGIPNTFVPGRNILFLTLAAIYAYQVQAEAVITGVCETDFSGYPDCRDEFVKALNHAVSLGMAKDIRFETPLMWIDKAETWALADYWGKLDLVREETLTCYNGIKGDGCGHCAACNLRANGLNHYLADKPGVMAAMKQKTGLK

SEQ ID NO: 43082 - protein, 224 aa, Clostridium sp.
  REGION 1..224: note = tr|A0A1C6FL06|A0A1C6FL06_9CLOT 7-cyano-7-deazaguanine synthase OS=uncultured Clostridium sp. OX=59620 GN=queC PE=3 SV=1
MNNNSNNNAVVVFSGGQDSTTCLFWALERFDKVIAVTFNYNQKHKLEIECAQNIAKELGVEHHILDMDLLNQLAPNALTRDDIKIEEGKDGELPSTFVEGRNMVFLTFAAILAKTKNARHIVTGVCETDFSGYPDCRDVFVKSLNVTANLAMDYDFVMHTPLMWLDKAQTWELADKYGKLEYVREKTLTCYNGIIGDGCGECPSCKLRQHGLETYLKQKEELNK

SEQ ID NO: 43083 - protein, 223 aa, Clostridium sp.
  REGION 1..223: note = tr|A0A1C5UBW0|A0A1C5UBW0_9CLOT 7-cyano-7-deazaguanine synthase OS=uncultured Clostridium sp. OX=59620 GN=queC PE=3 SV=1
MKNRKALVVLSGGQDSTTCLFWAIDKFGKENVSAIGFDYGQRHKLELECADKICKKVGIPYEIVPTPIINQLSANSLTREDIPVEETKPEGTPPNTFVEGRNLLFLSYAAIYAKTHGITDLVTGVCETDFSGYPDCRDIFVKSLNVTVNLAMDYNFVIHTPLMWLNKAETWKMADDLGVLDTIYNETLTCYNGVLGEGCGHCPSCTLRRRGYEQYMEMKKCTK

SEQ ID NO: 43084 - protein, 226 aa, Coprococcus sp.
  REGION 1..226: note = tr|A0A1C5RZ23|A0A1C5RZ23_9FIRM 7-cyano-7-deazaguanine synthase OS=uncultured Coprococcus sp. OX=458253 GN=queC PE=3 SV=1
MQNLKNRDEAVVVFSGGQDSTTCLLWALKKYKKVYAVSFDYGQKHIKELECAKKIAEKFGVEHHILDMSLLNQLAPNSLTRSEMKVDENAPEVGTPNTFVDGRNMVFLTFVAIYAKQKGVSDIITGVSQSDFSGYPDCRDIFIKSLNTTLNLAMDYEFDIITPLMWIDKMETWKLADELGGLDVIRDMTLTCYNGIPGEGCGHCPSCKLRKKGYDLYMEYKKNHNA

SEQ ID NO: 43085 - protein, 232 aa, unidentified
  source 1..232: note = Unknown
  REGION 1..232: note = tr|A0A212KEJ8|A0A212KEJ8_9DELT 7-cyano-7-deazaguanine synthase OS=uncultured delta proteobacterium OX=34034 GN=queC PE=3 SV=1
MTRAFISFSGGIDSTTLLAHMLAEGYQVTPVFFAYGSKHGAAEEAAARNVCRHYGVTCPVVDLTGIFDLACSDSALMARMPDREIPSGDQGYREPGSLDATVVPGRNTLFASVLLAFAEAEALRTGQQAVIAMGIHAGDHTLYPDCREPFFTALGNAFDLGTEKRVKTVAPFVRMDKSAIVKRGLELGAPYHLSWSCYKGGTKACGVCGTCRERLKAFADAGIADPIEYEAR

SEQ ID NO: 43086 - protein, 231 aa, unidentified
  source 1..231: note = Desulfobacteraceae bacterium
  REGION 1..231: note = tr|A0A484HM93|A0A484HM93_9DELT 7-cyano-7-deazaguanine synthase OS=uncultured Desulfobacteraceae bacterium OX=218296 GN=queC PE=3 SV=1
MSKTKKAAVVLLSGGLDSTTVMAMAREMGFERYALSFDYGQRHALELDAAREAASDFGARDHLVLRVDLDKIGGSALTGPMAVPKGAAPDGEPEAIPVTYVPARNTVFLSLALAWAETLGAFDIFIGVNAIDYSGYPDCRPEYIEAFERMANLATKACVEGRGRVRVQTPLIQMTKAQIVQKGLALGVDFSKTHSCYDPSPGGLACGECDSCVLRKQGFEKAGLTDPALLR

SEQ ID NO: 43087 - protein, 230 aa, Desulfobacterium sp.
  REGION 1..230: note = tr|E1YHE3|E1YHE3_9DELT 7-cyano-7-deazaguanine synthase OS=uncultured Desulfobacterium sp. OX=201089; GN = queC PE=3 SV=1
MQKKAIVLLSGGLDSTTVMAIAKHEGFDLYSMSFFYGQRHSHELNAAKKVSEVFNVKKHLVINIDLNKIGGSALTADIKVPKARSLNSINKGIPVTYVPARNTIFLAHALAWAEVIKSFDIFIGVNAIDFSGYPDCRPEFISAFEYMANLATKAGVEGKMRLKIRTPLINMTKAQIIKKGIELGVDYSLTHSCYDPGPDGSACSLCDSCFLRKKGFEEAGLKDPAKYCTQ

SEQ ID NO: 43088 - protein, 240 aa, Desulfobacterium sp.
  REGION 1..240: note = tr|A0A445MUD4|A0A445MUD4_9DELT 7-cyano-7-deazaguanine synthase OS=uncultured Desulfobacterium sp. OX=201089 GN=queC PE=3 SV=1
MPKIKKAVILLSGGLDSTTALAIAKSEGYELYCLSFRYGQRHTCELASARRVAEAFGAKGHLVIEVDLRPVGGSALTDNIEVPKGRSESDMQKNIPATYVPARNTIFLSYAVAWAEVLGASDIFIGVNVIDYSGYPDCRPQFIEAFERMANLATKAGTEGGVQLKIRTPLISMTKAEIIKKGLELGVDYGMTHSCYDPSPQGTPCGRCDSCLIRKKGFAEAGVPDPLEINASSLNSTTLF

SEQ ID NO: 43089 - protein, 260 aa, Desulfovibrio sp.
  REGION 1..260: note = tr|A0A212KZ02|A0A212KZ02_9DELT 7-cyano-7-deazaguanine synthase OS=uncultured Desulfovibrio sp. OX=167968 GN=queC PE=3 SV=1
MSERLGQDAAAHGPLADQTALVIFSGGQDSATCLAWALERFGHVRTLGFDYGQRHSVELACRQNLRQGMAALNPQWGQRLGPDCLLDIDLFRQLANTALTSSAPIEEHGPDGLPTTFVPGRNLIFILHAAAWAYGLDIRHMVLGVCQSDYSGYPDCRDDSIKAMQVALNTGMGANYVLHTPLMWRSKKDAWTLARSLGGSALVDLIVEESHTCYAGQRGKRHPWGYGCGQCPACRLRAAGYAEYVAACQTESEKPCPKNS

SEQ ID NO: 43090 - protein, 252 aa, Desulfovibrio sp.
  REGION 1..252: note = tr|A0A212KJM4|A0A212KJM4_9DELT 7-cyano-7-deazaguanine synthase OS=uncultured Desulfovibrio sp. OX=167968 GN=queC PE=3 SV=1
MNTTSPLLEQQALVIFSGGQDSATCLAWALSRFKRVLTLGFDYGQRHSVELDCRKRVREGIAALNPQWAQRMGPDALLNLDIFRQLADTALTSDAPIEEHCANGLPNTFVPGRNLIFILHAAAWAYAKEIRHMVLGVCQSDYSGYPDCRDDSIKAMQVAINSGMDANFTLHTPLMWRSKKDAWMLARSLGGDALVNLIVEESHTCYMGQRGQRYPWGYGCGDCPACRLRAAGYAAYAEAQAACAQNPLEEQA

SEQ ID NO: 43091 - protein, 218 aa, Dysgonomonas sp.
  REGION 1..218: note = tr|A0A212JKC5|A0A212JKC5_9BACT 7-cyano-7-deazaguanine synthase OS=uncultured Dysgonomonas sp. OX=206096 GN=queC PE=3 SV=1
MNKKESALVLFSGGQDSTTCLYWALENFSSVRTLCFTYGQRHSKEVEVARSIAEKANVPFQLLDASIISQLSVNSLTSDIVMDQEKPADSYPNTFVPGRNLLFLTFAAVIARSHGIRHIVTGVSEADYSGYPDCRDTFILSANASINLAMDEHFQIHTPLMWRDKTAVWQLADELGVFDIIRTQTLTCYNGIIADGCGHCPSCKLRKQGLDNYLKTKL

SEQ ID NO: 43092 - protein, 218 aa, Dysgonomonas sp.
  REGION 1..218: note = tr|A0A212JVB3|A0A212JVB3_9BACT 7-cyano-7-deazaguanine synthase OS=uncultured Dysgonomonas sp. OX=206096 GN=queC PE=3 SV=1
MNKKEPALVLFSGGQDSTTCLYWAIKNFSSVRTLCFTYGQRHSKEVEVAQSIAGHAGVPFQLLDASIISQLSVNSLTSDIVMDQEKPTDSYPNTFVPGRNLLFLTFAAVIARSHGIRHIVTGVSEADYSGYPDCRDTFILSANASINLAMDEHFQIHTPLMWRDKTAVWQLADQLGVFDVVRTQTLTCYNGIIADGCGHCPACKLRKQGLENYLKIKE

SEQ ID NO: 43093 - protein, 227 aa, Eubacterium sp.
  REGION 1..227: note = tr|A0A1C6FMD8|A0A1C6FMD8_9FIRM 7-cyano-7-deazaguanine synthase OS=uncultured Eubacterium sp. OX=165185 GN=queC PE=3 SV=1
MKVLVLFSGGVDSTTCLGLAIDKYGKNNVIALSMAYGQKHDKEIEAANKIANYYGVEHIYLDLAKIFEYSDCSLLKHSDEEIPKEEYSKQLEKTNGSPVSTYVPFRNGLFLSSAASIAISKECKVIYYGAHSDDAAGNAYPDCSDAFNNAMNEAIYLGSGKQVRIEAPFVNMNKAEVVKTGLDLKVPYELTWSCYEGGDRPCGLCGTCIDRARAFEANDVKDPAITV

SEQ ID NO: 43094 - protein, 221 aa, Eubacterium sp.; identical to SEQ ID NO: 35955
  REGION 1..221: note = tr|A0A1C5WPC6|A0A1C5WPC6_9FIRM 7-cyano-7-deazaguanine synthase OS=uncultured Eubacterium sp. OX=165185 GN=queC PE=3 SV=1

SEQ ID NO: 43095 - protein, 224 aa, unidentified; identical to SEQ ID NO: 36610
  source 1..224: note = Gammaproteobacteria bacterium
  REGION 1..224: note = tr|A0A5E5Q1X4|A0A5E5Q1X4_9GAMM 7-cyano-7-deazaguanine synthase OS=uncultured Gammaproteobacteria bacterium OX=86473 GN=queC PE=3 SV=1

SEQ ID NO: 43096 - protein, 224 aa, unidentified; identical to SEQ ID NO: 36438
  source 1..224: note = Gammaproteobacteria bacterium
  REGION 1..224: note = tr|A0A5E5QIM9|A0A5E5QIM9_9GAMM 7-cyano-7-deazaguanine synthase OS=uncultured Gammaproteobacteria bacterium OX=86473 GN=queC PE=3 SV=1

SEQ ID NO: 43097 - protein, 247 aa, Lachnospira sp.
  REGION 1..247: note = tr|A0A1C6J135|A0A1C6J135_9FIRM ATP-utilizing enzymes of the PP-loop superfamily OS=uncultured Lachnospira sp.; OX = 446043 GN=SAMEA3545430_02531 PE=4 SV=1
MDLNEFFKEHNKVALAFSGGVDSSYLLYAAIKSGAQVRAYYVNAAFQPQFELDDAMRLAKQLNADMKVLTADVLSNETVVKNPSDRCYHCKNVIFNMILAEAKKDGFTVLMDGTNASDAEDDRPGMRALRELCVYSPLRISGLTKTEIRRRSKEAGLFTWNKPAYACLATRIPTNERITAEKLEKTEEAENYLFSLGFTDFRVRYLNDSAKIQMPAAQMTKLLEMREEILIELKKYYKEVLLDLQAR

SEQ ID NO: 43098 - protein, 229 aa, Megasphaera sp.
  REGION 1..229: note = tr|A0A1C5NTY7|A0A1C5NTY7_9FIRM 7-cyano-7-deazaguanine synthase OS=uncultured Megasphaera sp. OX=165188 GN=queC PE=3 SV=1
MKCIVLLSGGVDSTTCLAMAVERYGAGEVMALTAYYGQKHAKEIQAARQVAAHYGVAHKETNLSQAFALSDSSLLQGRGKEICHESYAEQLKEMGGEGTVDTYVPFRNGLFLSYAAAIAVSVGAETIYYGAHADDAAGRAYPDCTPEFEQAMATAIYEGSGRTCCLEAPLLSWNKAGVVKEGLRLGAPYELTWSCYEGGDKPCGVCATCIDRAKAFAANGVADPALTAK

SEQ ID NO: 43099 - protein, 224 aa, Prochlorococcus marinus
  REGION 1..224: note = tr|Q1PJG0|Q1PJG0_PROMR 7-cyano-7-deazaguanine synthase OS=uncultured Prochlorococcus marinus clone HOT0M-3E5 OX=379388 GN=queC PE=3 SV=1
MALKNKSIVVLLSGGLDSSTVTGIAKKSEAKIFGLSFDYGQRHKKELNSASIIAKHFDIEEFKIIKLDLSLWGGSSLTDTQKNIPIEGVQTNQIPNTYVPGRNTIFISVALSYAEAIDADFIGLGVNALDYSGYPDCRPDYIKKFQELADLANKRGRENNPIKLWTPLLDLNKEEIIKLAFDNHVPLDKTWSCYSGNSKPCGKCDSCRIRNAAYEKWLNNNNKK

SEQ ID NO: 43100 - protein, 226 aa, Roseburia sp.
  REGION 1..226: note = tr|A0A1C5VYU2|A0A1C5VYU2_9FIRM 7-cyano-7-deazaguanine synthase OS=uncultured Roseburia sp. OX=512314 GN=queC PE=3 SV=1
MRALVLFSGGVDSTTCLALAVEKYGKENVTALSVSYGQKHVKEIEASKKIAEYYEVEHLYLDLGEIFEYSDCSLLSHSEREIPEESYAEQIEKSGGKPVSTYVPFRNGLFLSSAASIALSRNCSVIYYGAHSDDAAGSAYPDCSEAFNRAMGEAIYLGSGKQVAIEAPFVNVSKAQIVKTGLALKVPYELTWSCYEGAEHPCGVCGTCLDRARAFEENGISDPAGI

SEQ ID NO: 43101 - protein, 226 aa, Ruminococcus sp.
  REGION 1..226: note = tr|A0A1C6ACN0|A0A1C6ACN0_9FIRM 7-cyano-7-deazaguanine synthase OS=uncultured Ruminococcus sp. OX=165186 GN=queC PE=3 SV=1
MSSEKALVLSSGGVDSTTLLAMACHRYGKENVVALSIYYGQKHKKEMEASDDVAKYYGVEHIKLDLSTIFRYSDCSLLANSDVEIPHESYADQLKKTDGSPVSTYVPFRNGLFLSTAASVALSKGCTLLMYGAHADDAAGNAYPDCSMAFVEAMNTAIYEGSGKQLRIEAPFAGMNKAAVVAEGKKLGVPYEMTWSCYEGGDEPCKVCGTCRDRRAAFLANGIDLY

SEQ ID NO: 43102 - protein, 229 aa, Ruminococcus sp.; identical to SEQ ID NO: 43098
  REGION 1..229: note = tr|A0A1C5ZYT9|A0A1C5ZYT9_9FIRM 7-cyano-7-deazaguanine synthase OS=uncultured Ruminococcus sp. OX=165186 GN=queC PE=3 SV=1

SEQ ID NO: 43103 - protein, 240 aa, Sphingopyxis sp.
  REGION 1..240: note = tr|A0A1Y5PT98|A0A1Y5PT98_9SPHN 7-cyano-7-deazaguanine synthase OS=uncultured Sphingopyxis sp. OX=310581 GN=queC PE=3 SV=1
MSEAYLAPMQQVSGKSVIVLLSGGLDSMVCAGLAREAGARIVALTIDYNQRHRVELESAARIAGHVGAAEHIVLPLDLRRFGGSALTADIDVPKDGVPAVEGGDDVPITYVPARNLIFLSLTLGLAEARQAQDIVIGVNALDYSGYPDCRPEFIQGFEKLAALATRDGDKGVEFRIHAPLQHMTKADIAAEAARLGMDAGMSWSCYDPTPEGLHCGLCDSCRLRSKGFADAGLADPTRYA

SEQ ID NO: 43104 - protein, 228 aa, Sporomusa sp.; identical to SEQ ID NO: 42467
  REGION 1..228: note = tr|A0A212LSW0|A0A212LSW0_9FIRM 7-cyano-7-deazaguanine synthase OS=uncultured Sporomusa sp. OX=307249 GN=queC PE=3 SV=1

SEQ ID NO: 43105 - protein, 226 aa, Stenotrophomonas sp.
  REGION 1..226: note = tr|A0A1Y5PZW6|A0A1Y5PZW6_9GAMM 7-cyano-7-deazaguanine synthase OS=uncultured Stenotrophomonas sp. OX=165438 GN=queC PE=3 SV=1
MKKAVVLLSGGMDSAAVVAMAREQGFDVHALSVRYGQRHTSELDAAARVAQAMGVTRHKVVDVDLRSIGGSALTDDIDVPVRTDEERGGDGIPVTYVPARNTIMLSLALGWAEVLGANDIFCGVNAVDYSGYPDCRPEFIAAFQTLANLATKAGVEGAGIRIHAPLQHLSKAQIASEGQRLGVDFALTISCYRADAQGRACGHCDACRLRADGFATAGLPDPTHYA

SEQ ID NO: 43106 - protein, 226 aa, unidentified
  source 1..226: note = Unknown
  REGION 1..226: note = tr|A0A482ZW06|A0A482ZW06_9GAMM 7-cyano-7-deazaguanine synthase OS=uncultured SUP05 cluster bacterium OX=655186 GN=queC PE=3 SV=1
MSNKKAVILLSGGLDSTTTLAIAKSQDFECYALSFDYGQKQKSELNSAQKIAKLFPVIEHRTMCISLNDIGGSALTDNAIAVPKFKQSDEIPITYVPARNTIFLSYAMAWAEVLECQNIFIGVNALDYSGYPDCRGEYINAFETMANLATKQGVEGKKLTIHTPLINLHKAEIIQKGIELGVDYSLTTTCYQADEEGAACGICDACEYRKMGFEKANIADPTKYQK

SEQ ID NO: 43107 - protein, 226 aa, unidentified
  source 1..226: note = Unknown
  REGION 1..226: note = tr|A0A482ZL94|A0A482ZL94_9GAMM 7-cyano-7-deazaguanine synthase OS=uncultured SUP05 cluster bacterium OX=655186 GN=queC PE=3 SV=1
MSNKKAVILLSGGLDSTTTLAIAKSQGFDCYALSFDYGQKQKSELDSAKQIADLFSVIEHRTMTIFLNDIGGSALTDNAIAVPKFKPSDEIPITYVPARNTIFLSYAMAWAEVLACQNIFIGVNALDYSGYPDCRGEYISAFETMANLATKQAVEGRKLTIHTPLINLHKAEIIQKGLGLGVDYSLTTTCYQADKEGAACGICDACEYRKLGFKEAGIADPTKYQK

SEQ ID NO: 43108 - protein, 225 aa, Thiohalocapsa sp.; identical to SEQ ID NO: 37402
  REGION 1..225: note = tr|V4J3H3|V4J3H3_9GAMM 7-cyano-7-deazaguanine synthase OS=uncultured Thiohalocapsa sp. PB-PSB1; OX = 1385625 GN=queC PE=3 SV=1

SEQ ID NO: 43109 - protein, 235 aa, Undibacterium parvum
  REGION 1..235: note = tr|A0A3Q9BR86|A0A3Q9BR86_9BURK 7-cyano-7-deazaguanine synthase OS=Undibacterium parvum; OX = 401471 GN=queC PE=3 SV=1
MNTCNDRALVLFSGGQDSTTCLAWALAHYQHVETIGFDYGQRHAIELTMRPSLLAKMRGFSDDWHAKLGEDHMLDLGLISQLSHTAMTEEIEITMQENGLPNTFVPGRNLMFMLVAATLAYRRGLNVLVGGMCETDFSGYPDCRDDSMKALQVALNLGMATRLKLETPLMWINKAQTWKLAEQLGGSNLVDLIRSDTHTCYLGERGTLHPWGHGCGTCPACALRARGYQEYAGTL

SEQ ID NO: 43110 - protein, 240 aa, Undibacterium pigrum
  REGION 1..240: note = tr|A0A318JDZ0|A0A318JDZ0_9BURK 7-cyano-7-deazaguanine synthase OS=Undibacterium pigrum; OX = 401470 GN=queC PE=3 SV=1
MNNLTTKDRALVLFSGGQDSATCLAWALSRYAHVETIGFDYGQRHAIELSVRPTLIEKMRQFSPEWQSRLGEDHMIDLSLISQLSHTAMTEDIAIEMQENGLPNTFVPGRNLMFMMTAATLAYRRGLNVLVGGMCETDFSGYPDCRDDTMKALQVALNLGMNTRLKLETPLMWINKAQTWQLAEQLGGIALVDLIREDTHTCYLGQRGAMHPWGHGCGTCPACALRARGYEYYRNGNFDL

SEQ ID NO: 43111 - protein, 235 aa, Undibacterium sp.
  REGION 1..235: note = tr|A0A431T924|A0A431T924_9BURK 7-cyano-7-deazaguanine synthase OS=Undibacterium sp. S11R28 OX=2495591 GN=queC PE=3 SV=1
MTRSNDSALVLFSGGQDSTTCLAWALARYQRVETIGYDYGQRHSIELSMRPSLLEKMRGFSSDWKDRLGEDHMIDLGLISQLSHTAMTEDIEITMQENGLPNTFVPGRNLMFMMVAATLAYRRGINVLVGGMCETDFSGYPDCRDDSMKALQVALNLGMATRLKLETPLMWINKAETWQLAERLGGTKLVDLIRADTHTCYLGERGTLHDWGHGCGTCPACALRARGYQEYAAGL

SEQ ID NO: 43112 - protein, 222 aa, Ureibacillus terrenus
  REGION 1..222: note = tr|A0A540UX15|A0A540UX15_9BACL 7-cyano-7-deazaguanine synthase OS=Ureibacillus terrenus; OX = 118246 GN=queC PE=3 SV=1
MKNEKAIVIFSGGQDSTTCLFWAKERFGEVEAVTFDYGQRHRLEIECAKEIAGETGVRHHILDMSLLNQLAPNALTREDIQVEEGKDGGLPNTFVPGRNLLFLSFAGVLARQVGAKHIVTGVCQTDFSGYPDCRDIFIKSLNVTLNLAMDDTFVIHTPLMWLTKAQTWELADRLGVLEFVRNKTLTCYNGIIADGCGECPACKLRRKGLEEYLRSRKGTSHV

SEQ ID NO: 43113 - protein, 226 aa, Ureibacillus thermophilus
  REGION 1..226: note = tr|A0A4P6UXK7|A0A4P6UXK7_9BACL 7-cyano-7-deazaguanine synthase OS=Ureibacillus thermophilus OX=367743 GN=queC PE=3 SV=1
MILKEEKAIVVFSGGQDSTTCLFWAKEQFKEVEAVTFDYGQRHRLEIECAKEIAKEVGVKHHILDMSLLNQLAPNALTRDDIEVEEGKDGELPSTFVPGRNLLFLSFAGVLASQVGAKHIVTGVCETDFSGYPDCRDVFIKSLNVTMNLAMDDTFVIHTPLMWLTKAQTWELADQLGVLDFVRNNTLTCYNGIIADGCGECPACKLRKRGLDEYLRSRKGASHVRF

SEQ ID NO: 43114 - protein, 218 aa, Uruburuella suis
  REGION 1..218: note = tr|A0A4R2MGW3|A0A4R2MGW3_9NEIS 7-cyano-7-deazaguanine synthase OS=Uruburuella suis; OX = 252130 GN=queC PE=3 SV=1
MPQQKALVIFSGGQDSTTCLIQAIQTYGRENVEAVTFQYGQRHAVELEKARWIAADLGVPQTVLDLSLMQQITHNALMDDKAEIRTADSGPPNTFVDGRNALFLLYAAIYAKSRDIVHIITGVCETDFSGYPDCRDVFVKSMNVTLNLAMDYAFQIHTPLMYLTKAQTWALADNLGALDYVRTHTHTCYMGVAGGCGQCPSCVLRERGLAEYLAQKGA

SEQ ID NO: 43115 - protein, 219 aa, unidentified
  source 1..219: note = Vampirococcus sp.
  REGION 1..219: note = tr|A0A410P2U2|A0A410P2U2_9BACT 7-cyano-7-deazaguanine synthase OS=Vampirococcus sp. LiM; OX = 1930593 GN=queC PE=3 SV=1
MKKAVVLLSGGLDSATALYLAKARGYDVHALVFRYGQRHGKEVRRALAIARRLDCPAQVLGIRLPWRGSALLDRSKPLPQGGKTTHGIPLTYVPARNTIFLSFALSFAESIGARRIFIGANALDYSGYPDCRPRYYRAWQGLARLATKSGVEGAPIRIETPLLHMKKSQIIRLGTKLGVPYQLTWSCYRGAARPCGRCDSCLLRAKGFKEAGMKDPALS

SEQ ID NO: 43116 - protein, 237 aa, unidentified
  source 1..237: note = Variibacter gotjawalensis
  REGION 1..237: note = tr|A0A0S3PY38|A0A0S3PY38_9BRAD 7-cyano-7-deazaguanine synthase OS=Variibacter gotjawalensis OX=1333996 GN=queC_2 PE=3 SV=1
MEDSALVLFSGGQDSTVCLAWALERYTHVETIGFSYGQRHAIELDVRPGLRERMAAHSPVWNKRLGDDHVIPLDVLGKISDTALTRDVAIEMSDNGLPNTFVPGRNLVFLNFAAALAYRRGLKHLVGGMCETDYSGYPDCRNDTMKAVQTALSLGMDRPFVIETPLMWLDKTETWQLAETLGGQPLIDLIVADTHTCYLGERGRLHDWGHGCGECPACQLRAQGFARWREKKAEASK

SEQ ID NO: 43117 - protein, 453 aa, unidentified
  source 1..453: note = Variibacter gotjawalensis
  REGION 1..453: note = tr|A0A0S3PU35|A0A0S3PU35_9BRAD 7-cyano-7-deazaguanine synthase OS=Variibacter gotjawalensis OX=1333996 GN=queC_1 PE=4 SV=1
MNVRAFQPRVPETAIDVVEPGGQPRNGRAGFDLGRDFRFSTAGLQSYAFARWDPVIHDALILAAAVEYADRTTRRPALGWTRKIELRVPVHEPDRWSALSVTDALHEALQFLTGDIWMIEFAQRNGKALAPSQEDLQLPVKTEAVIAYSDGMDSRMVAGIMTAALGERLVRVRVGSKAGGRPAKGKREPFTRVPYSVSATGEPTARNRGFKFALISGIAAYLAEADRIIIPESGQGVFGPALVTAAHAYPDFRNHPLFTSRMEKFLNALLRRPVKFAFPRLWNTKGETLREFTTLPDSDTWRDTKTCWRGAQWSALNGKLLQCGICAACMLRRMSIHAASLRESGEGYICRDLGAPTLEASLQHDFKRMSPAFREYAIAGTLHLDHLADMADEVNRAVVARHAVLTSATLEIAPVNAEERLLRMLQRHAAEWGSFIKDTGARSFLRQWTRIEQ

SEQ ID NO: 43118 - protein, 234 aa, Variovorax boronicumulans
  REGION 1..234: note = tr|A0A250DEB7|A0A250DEB7_9BURK 7-cyano-7-deazaguanine synthase OS=Variovorax boronicumulans OX=436515 GN=queC PE=3 SV=1
MPLHTTALVLFSGGQDSATCLAEALSKYQRVETLGFDYGQRHRVELDVRGTVLAKMRERFPEWAPRLGEDHVLTLAALAQLGGSSLTEEVAFAMQADGLPNTFVPGRNLLFLTLAGALAYRRGLQVIVTGVCETDFSGYPDCRDDTMKAMQLALSLGLERRLVIETPLMWIDKAETWALAHRLGGQPLVDLIVEETHTCYLGDREHRQAWGYGCGECPACDLRKKGWERYVAAA

SEQ ID NO: 43119 - protein, 234 aa, Variovorax boronicumulans
  REGION 1..234: note = tr|A0A1E7U732|A0A1E7U732_9BURK 7-cyano-7-deazaguanine synthase OS=Variovorax boronicumulans OX=436515 GN=queC PE=3 SV=1
MPLHTTALVLFSGGQDSATCLAEALSKYQRVETLGFDYGQRHRVELDVRGTVLAKIRERFPEWAPRLGEDHVLTLAALAQLGGSSLTEEVAFAMQADGLPNTFVPGRNLLFLTLAGALAYRRGLQVIVTGVCETDFSGYPDCRDDTMKAMQLALSLGLERRLVIETPLMWIDKAETWALAHRLGGQPLVDLIVEETHTCYLGDREHRQAWGYGCGECPACDLRKKGWERYVAAA

SEQ ID NO: 43120 - protein, 244 aa, unidentified
  source 1..244: note = Variovorax gossypii
  REGION 1..244: note = tr|A0A431TPN3|A0A431TPN3_9BURK 7-cyano-7-deazaguanine synthase OS=Variovorax gossypii; OX = 1679495 GN=queC PE=3 SV=1
MPLHTTALVLFSGGQDSTTCLADALSKYQRVETLGFDYGQRHRVELDVRGNILAKMRERFPDWAPRLGEDHVLTLAALAQLGGSSLTEEVAFAMQADGLPNTFVPGRNLLFLTLAGALAYRRGLQVIVTGVCETDFSGYPDCRDDTMKAMQLALSLGLERRLVIETPLMWIDKAETWSLAHRLGGEPLVDLIVEETHTCYLGDRVHRQAWGYGCGECPACDLRKKGWERYAAALPAGAATTSTR

SEQ ID NO: 43121 - protein, 245 aa, unidentified
  source 1..245: note = Variovorax guangxiensis
  REGION 1..245: note = tr|A0A3S0ZJI0|A0A3S0ZJI0_9BURK 7-cyano-7-deazaguanine synthase OS=Variovorax guangxiensis; OX = 1775474 GN=queC PE=3 SV=1
MPLHTTALVLFSGGQDSTTCLADALSKYERVETLGFDYGQRHRVELDVRGTILAKMRERFPDWAPRLGEDHVLTLAALAQLGGSSLTEEVAFAMQADGLPNTFVPGRNLLFLTLAGALAYRRGLQVIVTGVCETDFSGYPDCRDDTMKAMQLALSLGLERRLVIETPLMWIDKAETWQLAHRLGGRPLVDLIVDETHTCYLGDRVHRQDWGYGCGECPACELRRKGWERYVAAAVPADEGTTSTR

SEQ ID NO: 43122 - protein, 235 aa, unidentified
  source 1..235: note = Variovorax guangxiensis
  REGION 1..235: note = tr|A0A502DW23|A0A502DW23_9BURK 7-cyano-7-deazaguanine synthase OS=Variovorax guangxiensis; OX = 1775474 GN=queC PE=3 SV=1
MPMHATALVLFSGGQDSTTCLADALSRYERVETLGFEYGQRHRIEMDVRHTVRARLRERFPAWAPRLGDDHVLNVDSLSQIGGSSLTDEVAFAMQADGLPNTFVPGRNLLFLTLAGALAYRRGLQVIVTGVCETDYSGYPDCRDDTMKAMQLALSLGLDRRLVIETPLMWIDKAQTWAMAHRLGGDALVDLIVEETHTCYQGDRTQRHAWGYGCGACPACELRAAGWSRYVDATV

SEQ ID NO: 43123 - protein, 197 aa, Variovorax paradoxus
  REGION 1..197: note = tr|A0A2W5K5W9|A0A2W5K5W9_VARPD 7-cyano-7-deazaguanine synthase OS=Variovorax paradoxus; OX = 34073 GN=DI587_11025 PE=3 SV=1
MRELLLLSGGVDSAALAAWRRPALALTIDYGQRSAAAEIHASQQICAALDLPNETLTASVKHLGSGVMAGQQSSPHSENEEFWPFRNQYLITLAAMVAIQRGLDAVVIGTVATDGRHRDGSAEFLQALGATLHLQEGGIALLAPAKNMTSAQLVRLSKIDHAVLGWSHSCHAASLACGDCPGCNKHSQVMGELGIPR

SEQ ID NO: 43124 - protein, 242 aa, Variovorax paradoxus
  REGION 1..242: note = tr|A0A0P9FZE2|A0A0P9FZE2_VARPD 7-cyano-7-deazaguanine synthase OS=Variovorax paradoxus; OX = 34073 GN=queC PE=3 SV=1
MPLHTTALVLFSGGQDSTTCLADALSKYQRVETLGFDYGQRHRVELDVRAGILASLRERFPDWAPRLGQDHVLTLAALAQLGGSSLTEEVAFEMQADGLPNTFVPGRNLLFLTLAGALAYRRGLQVIVTGVCETDFSGYPDCRDDTMKAMQLALSLGLERRLVIDTPLMWIDKAETWQLAHRLGGQPLVDLIVEETHTCYLGDRTHRQAWGYGCGECPACELRAKGWDRYVADAGAAEASSR

SEQ ID NO: 43125 - protein, 198 aa, Variovorax sp.
  REGION 1..198: note = tr|A0A1H7VMN7|A0A1H7VMN7_9BURK 7-cyano-7-deazaguanine synthase OS=Variovorax sp. YR750; OX = 1884384 GN=SAMN05518845_11691 PE=3 SV=1
MKTALLLSGGMDSLSIAWWKRPDIAITIDYGQLAAEAELRASKAVCAVLDIEHHILRVDCRMLGSGDMAGGEADPHAPASDWWPYRNQLLATLAAMKAISLGVTQLWLGTVKSDGSHRDGTQEFVGALDRLLSLQEGCMRVEAPAIELSTAELVKLSGAPLDQLAWAHSCHKANVACAQCRGCNKYFEVLKELQRDVA

SEQ ID NO: 43126 - protein, 237 aa, Variovorax sp.
  REGION 1..237: note = tr|A0A3P3ECT2|A0A3P3ECT2_9BURK 7-cyano-7-deazaguanine synthase OS=Variovorax sp. T529; OX = 2491343 GN=queC PE=3 SV=1
MPLHTTALVLFSGGQDSTTCLADALSRYQRVETLGFDYGQRHRVELDVRGTILAKMRERFPDWAPRLGEDHVLTLAALAQLGGSSLTEEVAFEMQADGLPNTFVPGRNLLFLTLAGALAYRRGLQVIVTGVCETDFSGYPDCRDDTMKAMQLALSLGLERRLVIETPLMWIDKAETWQMAHRLGGEPLVDLIVEETHTCYLGDREHRQAWGYGCGECPACDLRKKGWERYASRPQEA

SEQ ID NO: 43127 - protein, 235 aa, unidentified
  source 1..235: note = Varunaivibrio sulfuroxidans
  REGION 1..235: note = tr|A0A4R3JGL4|A0A4R3JGL4_9PROT 7-cyano-7-deazaguanine synthase OS=Varunaivibrio sulfuroxidans OX=1773489 GN=queC PE=3 SV=1
MFEKDARALVLFSGGQDSTTCLAWALDAFAHVETVGFDYGQRHDIELSCRTTVIQHLRARFPAWAEKLGADRVLDLPVLGDVADSTLTREGEIALDASGLPNTFVPGRNLLFFTLAGALGFRRGARHLVGGMCETDYSGYPDCRDDTLKALQVALGLGMDTRCVIHTPLMWIDKGETWRMAHRLGGDALVELIVEDTHTCYRGDRTARHPWGYGCAACPACDLRRAGWDAYVKGN

SEQ ID NO: 43128 - protein, 229 aa, Veillonella atypica
  REGION 1..229: note = tr|A0A133S7C0|A0A133S7C0_9FIRM 7-cyano-7-deazaguanine synthase OS=Veillonella atypica; OX = 39777 GN=queC PE=3 SV=1
MAQKQKAVVLFSGGVDSTTCLALAIERFGKENVVPLSIQYGQKHSKELEAAANVLAYYGIEGKTMDVTKLFAFSNSSLLKQSTEDVPTGSYKEQQDEHGEGPVSTYVPFRNGLFLSAAASLALSLDCGYIYYGAHADDAAGNAYPDCTETFYTSMGNAIFEGSGQECSLEAPFINCNKADVVREGLRLGVPYQLTWSCYEGGDHPCGHCGTCIDRQEAFRANGIEDPSY

SEQ ID NO: 43129 - protein, 229 aa, Veillonella atypica
  REGION 1..229: note = tr|A0A380N6V2|A0A380N6V2_9FIRM 7-cyano-7-deazaguanine synthase OS=Veillonella atypica; OX = 39777 GN=queC PE=3 SV=1
MAQKQKAVVLFSGGVDSTTCLALAIERFGKENVVPLSIQYGQKHSKELEAAANVLAYYGIEGKTMDVTKLFAFSNSSLLTQSTEAVPTGSYKEQQDEHGEGPVSTYVPFRNGLFLSAAASLALSLDCGYIYYGAHADDAAGNAYPDCTETFYKSMGDAIFEGSGKECSLEAPFINSNKADVVREGLRLGVPYQLTWSCYEGGDRPCGHCGTCIDRQEAFRANGIEDPSY

SEQ ID NO: 43130 - protein, 230 aa, Veillonella criceti
  REGION 1..230: note = tr|A0A380NLW6|A0A380NLW6_9FIRM 7-cyano-7-deazaguanine synthase OS=Veillonella criceti; OX = 103891 GN=queC PE=3 SV=1
MKAIVLSSGGVDSTTCLALAVDQLGRENVAAVSIFYGQKHDKELQCARKIADYYEVPHYELDLSQILKYSNCSLLQGSTEDIIHKSYAEQIEEQGEGMVNTYVPFRNGLMLSAVASLGMSVFPDDTVQIYLGAHADDAAGNAYADCSEAFVNTMAKAISLGTYDKVQVVAPFATNNKAQLVKVGLDLNVPYELTWSCYEGGDVPCGTCGTCIDRIKAFELNGAVDPLLEG

SEQ ID NO: 43131 - protein, 238 aa, Veillonella denticariosi
  REGION 1..238: note = tr|A0A2S7ZA70|A0A2S7ZA70_9FIRM 7-cyano-7-deazaguanine synthase OS=Veillonella denticariosi JCM 15641 OX=1298594 GN=queC PE=3 SV=1
MKGEIMAQKQRAVVLFSGGVDSTTCLALAIERFGKDNVVPLSIRYGQKHGKELEAAAAVLAHYGIEGKTMDVTKLFAFSNSSLLMQSDEAVPQGSYKEQQDREGDGPVSTYVPFRNGLFLSAAASLALSLDCGYIYYGAHSDDAAGNAYPDCTEQFYKSMGDAIFEGSGQACSLEAPFINVNKADVVKEGLRLHVPYELTWSCYEGGAVPCGHCGTCIDRAEAFRANGVEDPAIHFAK

SEQ ID NO: 43132 - protein, 29 aa, Veillonella dispar
  REGION 1..29: note = tr|A0A3D2WTR6|A0A3D2WTR6_9FIRM 7-cyano-7-deazaguanine synthase QueC (Fragment); OS = Veillonella dispar OX=39778 GN=DHW37_06640 PE=4 SV=1
MAQKQKAVVLFSGGVDSTTCLALAIERFG

SEQ ID NO: 43133 - protein, 234 aa, Veillonella dispar
  REGION 1..234: note = tr|C4FN65|C4FN65_9FIRM 7-cyano-7-deazaguanine synthase OS=Veillonella dispar ATCC 17748 OX=546273; GN = queC PE=3 SV=1
MKGDLMAQKQKAVVLFSGGVDSTTCLALAIERFGKDNVVPLSIQYGQKHSKELEAAASILAYYGIEGKTMDVTKLFAFSNCSLLTQSTEAIPQGSYKEQQETEGEGTVSTYVPFRNGLFLSAAASLALSLDCGYIYYGAHSDDAAGNAYPDCTEHFYKSMGDAIFEGSGKECSLEAPFINHNKADVVKEGLRLGVPYHLTWSCYEGGDKPCGHCGTCIDRAEAFRANGVEDPAQ

SEQ ID NO: 43134 - protein, 231 aa, Veillonella montpellierensis
  REGION 1..231: note = tr|A0A096AJ15|A0A096AJ15_9FIRM 7-cyano-7-deazaguanine synthase OS=Veillonella montpellierensis DNF00314 OX=1401067 GN=queC PE=3 SV=1
MNERNERAVVLLSGGVDSTTCLALAIERFGKDCVIPLSILYGQKHSKELEAVHAILNYYHMQGQSLDVTKIFAFSNCSLLQQSTESIPEGSYATQQANSGSDVVSTYVPFRNGLFLSAAASLALSLEASHVYYGAHSDDAAGNAYPDCSNAFYNAMGAAIYEGSGKLLTLEAPFITASKADVIKEGIRLGVPYELTWSCYEGGATPCGHCGTCIDRAQAFAANGLKDPAIK

SEQ ID NO: 43135 - protein, 229 aa, Veillonella parvula
  REGION 1..229: note = tr|D1BPC1|D1BPC1_VEIPT 7-cyano-7-deazaguanine synthase OS=Veillonella parvula (strain ATCC 10790 / DSM 2008 / JCM 12972 / Te3) OX=479436 GN=queC PE=3 SV=1
MAQKQKAVVLFSGGVDSTTCLALAIERFGKDNVVPLSIQYGQKHSKELEAAIAILEYYGMEGKTMDVTKLFAFSNCSLLTQSSEDIPQGSYKEQQDAEGEGTVSTYVPFRNGLFLSAAASLALSLDCGYIYYGAHSDDAAGNAYPDCTEHFYKSMGDAIFEGSGKECSLEAPFINANKADIVKEGLRLGVPYHLTWSCYEGGDKPCGHCGTCIDRAKAFHANGVEDPAL

SEQ ID NO: 43136 - protein, 229 aa, Veillonella parvula
  REGION 1..229: note = tr|D1YQ19|D1YQ19_9FIRM 7-cyano-7-deazaguanine synthase OS=Veillonella parvula ATCC 17745 OX=686660; GN = queC PE=3 SV=1
MAQKQKAVVLFSGGVDSTTCLALAIERFGKDNVVPLSIQYGQKHSKELEAAIAILEYYNMKGKTMDVTKLFAFSNCSLLVQSSEDIPQGSYKEQQDAEGKGTVSTYVPFRNGLFLSAAASLALSLDCGYIYYGAHSDDAAGNAYPDCTEHFYKSMGDAIFEGSGKECSLEAPFINSNKADIVKEGLRLGVPYHLTWSCYEGGDKPCGHCGTCIDRAKAFHANGVEDPAL

SEQ ID NO: 43137 - protein, 233 aa, Veillonella rodentium
  REGION 1..233: note = tr|A0A239ZRQ0|A0A239ZRQ0_9FIRM 7-cyano-7-deazaguanine synthase OS=Veillonella rodentium; OX = 248315 GN=queC PE=3 SV=1
MAQKQRAVVLFSGGVDSTTCLALAVERFGKENVVPLSIRYGQKHCKELEAAAAVLAYYGIEGKTMDVTKLFAFSNSSLLMQSDEAVPQGSYKEQQDREGDGPVSTYVPFRNGLFLSAAASLALSLDCGYIYYGAHSDDAAGNAYPDCTEQFYKSMGDAIFEGSGEACSLEAPFINANKADVVKEGLRLHVPYELTWSCYEGGAVPCGHCGTCIDRAEAFRANGVEDPAIHFGK

SEQ ID NO: 43138 - protein, 229 aa, Veillonella rogosae
  REGION 1..229: note = tr|A0A2S7YWF1|A0A2S7YWF1_9FIRM 7-cyano-7-deazaguanine synthase OS=Veillonella rogosae JCM 15642 OX=1298595 GN=queC PE=3 SV=1
MAQKQKAVVLFSGGVDSTTCLALAIERFGKDNVVPLSIQYGQKHSKELEAATSILAYYGIEGKTMNVTKLFAFSNCSLLTQSTEEIPQGSYKEQQETEGEGTVSTYVPFRNGLFLSAAASLALSLDCGYIYYGAHSDDAAGNAYPDCTEHFYKSMGDAIFEGSGKECSLEAPFINSNKADIVKEGLRLGVPYHLTWSCYEGGDKPCGHCGTCIDRQAAFEANGVEDPAQ

SEQ ID NO: 43139 - protein, 229 aa, unidentified
  source 1..229: note = Veillonella seminalis
  REGION 1..229: note = tr|K9D5V9|K9D5V9_9FIRM 7-cyano-7-deazaguanine synthase OS=Veillonella seminalis ACS-216-V-Col6b; OX = 883156 GN=queC PE=3 SV=1
MKAIVLSSGGVDSTTCLALSIDRLGKENVAAVSIFYGQKHDKELQCARKIAAYYEVPHYELDLSQILKYSNSSLLQNSTDEIIHKSYAEQIEEQGEGMVSTYVPFRNGLMLSAVASLGMSLFLDDTVQLYLGAHADDAAGNAYADCSEAFVDAMTKAISLGTYDKVQVVAPFAAKNKAQLVKVGLDLKVPYELTWSCYEGGDKPCGTCGTCIDRIKAFELNGTTDPLIK

SEQ ID NO: 43140 - protein, 229 aa, Veillonella sp.
  REGION 1..229: note = tr|A0A134C8Y6|A0A134C8Y6_9FIRM 7-cyano-7-deazaguanine synthase OS=Veillonella sp. DNF00869 OX=1384081 GN=queC PE=3 SV=1
MKALVLSSGGVDSTTCLAMAIDVLGTDNVSALSIWYGQKHKKELDSAKAIANYYGIPHYELDLTQVMSYSNSSLLSSSTESIDHRTYGEQIAETGSVSTYVPFRNGLILSMAASLALSLYPEEEVTIYIGAHADDAAGNAYPDCRPDFNHHMNEAIYIGSYNKVRLYAPLNDMNKSQVIQEGLRLQVPYHLTWSCYEGGSTPCHTCGTCRDREQAFMDNDMVDPLLQQK

SEQ ID NO: 43141 - protein, 233 aa, Veillonella sp.
  REGION 1..233: note = tr|W3Y3I3|W3Y3I3_9FIRM 7-cyano-7-deazaguanine synthase OS=Veillonella sp. AS16 OX=936589 GN=queC PE=3; SV = 1
MAQKQRAVVLFSGGVDSTTCLALAIERFGKDNVVPLSIRYGQKHGKELEAAAAVLAHYGIEGKTMDVTKLFAFSNSSLLMQSDEAVPQGSYKEQQDREGDGPVSTYVPFRNGLFLSAAASLALSLDCGYIYYGAHSDDAAGNAYPDCTEQFYKSMGDAIFEGSGQACSLEAPFINVNKADVVKEGLRLHVPYELTWSCYEGGAVPCGHCGTCIDRAEAFRANGVEDPAIHFGK

SEQ ID NO: 43142 - protein, 229 aa, unidentified
  source 1..229: note = Veillonella tobetsuensis
  REGION 1..229: note = tr|A0A2S7ZQ50|A0A2S7ZQ50_9FIRM 7-cyano-7-deazaguanine synthase OS=Veillonella tobetsuensis OX=1110546 GN=queC PE=3 SV=1
MAQKQKAVVLFSGGVDSTTCLALAIERFGKENVVPLSIQYGQKHSKELEAAANVLAYYGIEGKTMDVTKLFAFSNSSLLTQSTEDVPTGSYKEQQDELGEGPVSTYVPFRNGLFLSAAVSLALSLDCGYIYYGAHADDAAVNAYPDCTEVFYTSMGNAIFEGSGKECSLEAPFINRNKADVVREGLRLGVPYQLTWSCYEGGDHPCGHCGTCIDRQEAFRANGIKDPAN

SEQ ID NO: 43143 - protein, 229 aa, unidentified
  source 1..229: note = Veillonella tobetsuensis
  REGION 1..229: note = tr|A0A480B2Z0|A0A480B2Z0_9FIRM 7-cyano-7-deazaguanine synthase OS=Veillonella tobetsuensis OX=1110546 GN=queC PE=3 SV=1
MAQKQKAVVLFSGGVDSTTCLALAIERFGKENVVPLSIQYGQKHSKELEAAANVLAYYGIEGKTMDVTKLFAFSNSSLLKQSTEDVPSGSYKEQQDELGEGPVSTYVPFRNGLFLSAAASLALSLDCGYIYYGAHADDAAGNAYPDCTEVFYTSMGNAIFEGSGKECSLEAPFINRNKADVVREGLRLGVPYQLTWSCYEGGDYPCGHCGTCIDRLEAFRANGIEDPAN

SEQ ID NO: 43144 - protein, 230 aa, unidentified
  source 1..230: note = Veillonellaceae bacterium
  REGION 1..230: note = tr|A0A316LFA7|A0A316LFA7_9FIRM 7-cyano-7-deazaguanine synthase OS=Veillonellaceae bacterium OX=2049049 GN=queC PE=3 SV=1
MKKAIVLSSGGVDSTTCISVAVKELGADNVCTASIFYGQKHVKELDAARKVAEWFHVKHYEFDLSSILQYSNCALLAGSSEEIKHESYEDQVKESETGRVSTYVPFRNGLMLSVAASLAASLYEDEEVDIYIGAHADDAAGNAYADCSEPFLKAMEDAISIGTYGKVHLVFPFADKNKAGVVKTGLALGTPYELTWSCYEGGEKPCGTCGTCRDRAAAFEANGVKDPALD

SEQ ID NO: 43145 - protein, 229 aa, unidentified
  source 1..229: note = Veillonellaceae bacterium
  REGION 1..229: note = tr|A0A134CAW8|A0A134CAW8_9FIRM 7-cyano-7-deazaguanine synthase OS=Veillonellaceae bacterium DNF00626 OX=1588754 GN=HMPREF3191_01291 PE=3 SV=1
MKKAMILSSGGVDSTTCLSLAVKNLGAENVWTASVFYGQKHDRELLAARQVAAYYHVKHDEFDLSFLMKYSHCPLLSSSSEAIPHESYADQIRRNGEGKVATYVPFRNGLMLSVAATLASGMFEGVDCDIYIGAHADDAAGNAYADCSPEFLSAMGSAISIGTYQQVHLVYPFAGKSKAEVVKMGISLGTPYELTWSCYEGGSRPCGRCATCIDRAKAFAANGMADPAL

SEQ ID NO: 43146 - protein, 237 aa, Verminephrobacter eiseniae
  REGION 1..237: note = sp|A1WSR5|QUEC_VEREI 7-cyano-7-deazaguanine synthase; OS = Verminephrobacter eiseniae (strain EF01-2) OX=391735; GN = queC PE=3 SV=1
MRAGHALVLFSGGQDSTTCLAWALTQFAHVETIGFDYGQRHHVELQARQTVLAAIRSRFAQWRERLGADHMIDLSVLGRISDTALTRDSAIQLSAAGLPNTFVPGRNLLFFNLAAAVGYRRGLHTLVGGMCETDFSGYPDCRDDSLKALQVAVSLGLGQRFTFETPLMWLDKAATWELARSLGGQALVELIVRDSHTCYHGVRGVLHAWGHGCGTCPACVLRQTGYDRWQARPVAAP

SEQ ID NO: 43147 - protein, 237 aa, Verminephrobacter sp.; identical to SEQ ID NO: 43146
  REGION 1..237: note = tr|A0A4Q2L7B1|A0A4Q2L7B1_9BURK 7-cyano-7-deazaguanine synthase OS=Verminephrobacter sp. Larva24 OX=2509434 GN=queC PE=3 SV=1

SEQ ID NO: 43148 - protein, 228 aa, unidentified
  source 1..228: note = Verrucomicrobia bacterium
  REGION 1..228: note = tr|A0A1Q6VB68|A0A1Q6VB68_9BACT 7-cyano-7-deazaguanine synthase OS=Verrucomicrobia bacterium 13_2_20CM_55_10 OX=1805420 GN=queC PE=3 SV=1
MKRAVVLLSGGIDSTTTLAIAIAEDYETYALSFDYGQRHQIETDAARRVASSLGAKEHRIAKIDMRIFGGSALTDDVDVPKQRSETEIAHGIPITYIPARNTIFLAYALALAEVIPAADIFIGVNAIDYSGYPDCRPEFIQAFENLANVGTKAGVEGRRFQIHTPLIKLSKAEIIRKAGELGVDLSLTHSCYDPTPDGLACGECDSCLLRLKGFREARVKDPIRYAQK

SEQ ID NO: 43149 - protein, 245 aa, unidentified
  source 1..245: note = Verrucomicrobia bacterium
  REGION 1..245: note = tr|A0A424HLR2|A0A424HLR2_9BACT 7-cyano-7-deazaguanine synthase OS=Verrucomicrobia bacterium TMED71 OX=1986878 GN=queC PE=3 SV=1
  VARIANT 150: note = Xaa can be any naturally occurring amino acid
  VARIANT 156: note = Xaa can be any naturally occurring amino acid
  VARIANT 161: note = Xaa can be any naturally occurring amino acid
  VARIANT 176: note = Xaa can be any naturally occurring amino acid
  VARIANT 186: note = Xaa can be any naturally occurring amino acid
  VARIANT 209: note = Xaa can be any naturally occurring amino acid
MPKSTDQIPETAIAVYSGGMDSTVMLYSMLEQGVDLQGALSFDYGQKHRKEILVAKEICERLGMEHRIVDLRSIATLFGSSGLTDSDTDVPEGHYEEVSMKQTVVPNRNMILISLATAWAITKGAEAVAYAAHSGDHAIYPDCRESFANXLDQAMXLCDWXEIRLYRPFVNSSKSXIVAEGHRLGXPLGSTWSCYKGGDLHCGKCGTCXERREAFHLAGVQDPTSYSASAPSVETLVAQNWHLST

SEQ ID NO: 43150 - protein, 164 aa, unidentified
  source 1..164: note = Verrucomicrobia subdivision
  REGION 1..164: note = tr|A0A0R2RQJ8|A0A0R2RQJ8_9BACT 7-cyano-7-deazaguanine synthase (Fragment); OS = Verrucomicrobia subdivision 6 bacterium BACL9 MAG-120507-bin52 OX=1655590 GN=ABR82_05600PE=3 SV=1
MKVVVLLSGGLDSVTALHHMAATEKVVAALSFDYGAKHNSRELPCAADQCRSLRIPNRIVSLNFMADAFKSDLLKSGGKIPDGHYEEQSMKKTVVPFRNGVFLSLGTGYAESLGAEAIAIAAHAGDHTIYPDCREDFLKPMAQAMGTGTYAHIQLLRPFVSMDK

SEQ ID NO: 43151 - protein, 257 aa, unidentified
  source 1..257: note = Verrucomicrobia subdivision
  REGION 1..257: note = tr|A0A520Q557|A0A520Q557_9BACT 7-cyano-7-deazaguanine synthase OS=Verrucomicrobia subdivision 3 bacterium OX=2052186 GN=EVA72_11085 PE=3 SV=1
MFADKPAGKTVISLSGGMDSTGLLMHLLAQNCEVFGISFNYGQKHILELERLKANIVYLKTHNIDINYDVIDLSILGKLYSSALTDPDWEIPEGHYEQDNMKQTVVPNRNAIFASIAYGYALSIATETNEQVSIALGVHSGDHAIYPDCRPEFYEAIHKAFAIGNWDSDKVDLYLPYINGDKHTILKDAEASIDKVGLDFDTIFKNTNTSYEPDELGRASGKTGADIERIEAFIKLGRKDPVEYQASWEELIKNNEA

SEQ ID NO: 43152 - protein, 226 aa, unidentified
  source 1..226: note = Verrucomicrobiaceae bacterium
  REGION 1..226: note = tr|A0A4Q2Y7I2|A0A4Q2Y7I2_9BACT 7-cyano-7-deazaguanine synthase OS=Verrucomicrobiaceae bacterium OX=2026800 GN=queC PE=3 SV=1
MKTCVLLSGGMDSVAAFYEVLGTHEVVACLSFDYGSKHNAKEIPFAKLHADRNGVQHHVIPLDFMNTLFKSDLLKSGGEIPEGHYAEETMKQTVVPFRNGIMLAIAAGYAESVEADGLVIAAHSGDHAIYPDCREPFMRAMGTAMEEGTYAKIKLLRPFIDNDKAGIARRGVELGIDFSETWSCYKGGDIHCGVCGTCVERREAFILAGLPDPTTYAQTPELPILG

SEQ ID NO: 43153 - protein, 226 aa, unidentified
  source 1..226: note = Verrucomicrobiaceae bacterium
  REGION 1..226: note = tr|A0A4Q2Y5S7|A0A4Q2Y5S7_9BACT 7-cyano-7-deazaguanine synthase OS=Verrucomicrobiaceae bacterium OX=2026800 GN=queC PE=3 SV=1
MKTCVLLSGGMDSVAAFYEVLGKHEVVACLSFDYGSKHNSKEIPFAKLHADRNGVPHHVIPLDFMNTLFKSDLLKSGGDIPDGHYAEETMKQTVVPFRNGIMLAIAAGYAESVEADALVIAAHSGDHAIYPDCREPFMRAIGTAMEEGTYAKIQLLRPFIDNDKAGIARRGVELGIDFSETWSCYKGGEVHCGVCGTCVERREAFILAGLPDPTRYEQTPDLPTLA

SEQ ID NO: 43154 - protein, 1398 aa, unidentified
  source 1..1398: note = Verrucomicrobiae bacterium
  REGION 1..1398: note = tr|B5JCX8|B5JCX8_9BACT ExsB family; OS = Verrucomicrobiae bacterium DG1235 OX=382464; GN = VDG1235_3256 PE=4 SV=1
MPPNQSIKASSFLERITEDSGLTHSQIQIWVGQKVHPQSPFCNMAFGIEIEGEIDVETFEQAWAKVVSENSVLRTRILELKSVPQRSLTPPADFSLEKLDFSNHEQPANYFRSWARKRCSTLLPLEGKLVESAIVKLAPNAYAWYLNQHHLITDATSTVRLYQAISDAYEQLTEEQAAAVSNFEDYYEVSSKISDETAEIREHAKQHWSTKGTQTERLTPIYGRKGDAAQTESSRLEYQLDERQSERIRKLASEPELQSLFPDISTFAVFSTLLSAFLYRSSGQNAVSFDSPAANRSTRSAKNALGCFIEMFPLDLQVEEGATFRSLAAHCMEEIHSFLQNVSNGASSPSGSNTSNVVLNLFTLPFGSFAGCPTRAEWIHSGHIDGVYDFKLQVHDYNADGRYTLHFDLSESTFTAEDQQRIQFHFISMLDAMIENLDTPIAAVDILSESERNHLLIDYNRPSLAPIPTDTVIERIARQAAATPDRIALRQQSKTLTYKELWDQVEASARCLNSRGIGPESCVALIMPRSQETILSILAVLRAGAAYIPIDPTYPEERIAKILADSGANCHIKSFSELLDGNKRSELPPFPKSGDLAYVIYTSGSTGQPKGVEIEHRGLVDYIDWAEREYVRGEQLTYPLFTSLSFDLTVTSLFLPLVTGGELVVYPQTSAEVDSAVIDVINENTVDFIKLTPSHLSLLKQLDLKRSRISRLVLGGEDLKLSLASTIAAQFGHPVELYNEYGPTECVVGCMIHRFDPTSDFANESSVPIGRPADHVSLYLLNDRLQPVPEGAPGELCIARNGIARGYRNDPEKTALSFVANPYRPGERLYRTGDLARFSAKGVMTYLGRIDKQVKISGHRIELGEIEATLLRHPSVRNAFVSTRAPDIQTRPTGAAAHCTRCGLSSHYPNIVFNAEGVCSVCDSYHSIKGEASHYFSDPESLKELFKASRNKRRGNYDCMVFFSGGKDSAYALCQLVDMGLNVYAFTLDNGYLSDQAMANISRVTKSLGVEHEFATTPAMNEIFRDSLTRFSNVCNGCFKTIYTLGMNRANELGIPIIVTGLSRGQFFETRLTGNLFENGRFSPQDVDEAVLEARKRYHRDDDAVSRCLDVSKFQDDSIFEEIQFVDFYRYWDAPLEEIYSYLDRRVPWIRPSDTGRSTNCRVNDVGIYIHQKERGFHNYSLPYSWDVRLEQKKREEAIEELDDKFDLAEVRQMLAEIGYDEDRIAADENRVELVAYYEADSEIEANSLLKTLERHLPPQMRPRHIVHIDSMPLTKNGKVDEAALPQPLDKRPDQDAPIIEPNGPVQEHVFSIWSQTLNLKTISVTDSFFQLGGTSLTAMEITLQICQDFEIDLPLQTIFQHPTIAQLSSKIENTILEEIESLSEEDANNLLSEESPS

SEQ ID NO: 43155 - protein, 234 aa, unidentified
  source 1..234: note = Verrucomicrobiae bacterium
  REGION 1..234: note = tr|A0A2A2YCY0|A0A2A2YCY0_9BACT 7-cyano-7-deazaguanine synthase OS=Verrucomicrobiae bacterium AMD-G2 OX=1982328 GN=queC PE=3 SV=1
MNHPQDNEAIVLLSGGMDSVTALHHAHAAGPVLTAVSFDYGSKHNVREISFAKWHCDELGIKHQVVALDFFTQLFTSSLLDGGAPIPDGHYAEANMKQTVVPFRNGIMLAIAAGIAENHGAGRLVIAAHSGDHAIYPDCRESFMQGMATAVEEGTYARVRIDRPFIHLGKAAIAARGTELGIDFRQTWSCYKGGDIHCGTCGTCVERREAFLLANIIDPTEYLATPPLPATPSC

SEQ ID NO: 43156 - protein, 233 aa, unidentified
  source 1..233: note = Verrucomicrobiales bacterium
  REGION 1..233: note = tr|A0A3D3NZL7|A0A3D3NZL7_9BACT 7-cyano-7-deazaguanine synthase OS=Verrucomicrobiales bacterium OX=2026801 GN=queC PE=3 SV=1
MTRTLVLLSGGMDSTAALHWARREHEVAGAVSFDYGSKHNAREIELARWQCEKLGVPHDVLALPFINEHFSSDLLLSGGNIPEGHYADENMRRTVVPFRNGIMLAIACGLAESRGARALVIAAHAGDHAIYPDCREEFMQAIAAAMRAGTYAGIELLRPFIHLDKAAIARLGHDLGVDFGMTWSCYKGGGIHCGVCGTCVERREAFLKAGLPDPTRYLDEGALPAPAVLPPSS

SEQ ID NO: 43157 - protein, 267 aa, unidentified
  source 1..267: note = Verrucomicrobiales bacterium
  REGION 1..267: note = tr|A0A358EMP7|A0A358EMP7_9BACT 7-cyano-7-deazaguanine synthase OS=Verrucomicrobiales bacterium OX=2026801 GN=DEB48_06735 PE=3 SV=1
MSTGDLKGRAVISLSGGMDSTGLLMHLLANGSKVYGISFDYGQKHKLELSRLKANLDYLAAHDYEVTHRTVDISVLGSLYKSALTTDGWVVPQGHYEQDNMKETVVPNRNAIFSSIAYGYALSIANEVEEEVSLCLGVHSGDHAIYPDCRPEFYEAIHNAFALGNWDSERVSMYLPYLDGDKHTILKDAQKAINQLGLDFNEIFGNTNTSYDPDPQGRASGKTGADIERILAFHRLGVPDPVLYTDSWEVVLQNALKEQEEFGTKNH

SEQ ID NO: 43158 - protein, 232 aa, Verrucosispora sp.
  REGION 1..232: note = tr|A0A2N7T3R2|A0A2N7T3R2_9ACTN 7-cyano-7-deazaguanine synthase OS=Verrucosispora sp. ts21; OX = 2069341 GN=queC PE=3 SV=1
MSAVKPQAVVLLSGGLDSATALAVAMNEGFEANALSFRYGQRHTVELGAAARVAKALGATRHVVADIDLRVFGGSALTDDDFAVPHHDSADEIGSEIPVTYVPARNTIFLSFALAWAETLGSSDIYIGVSALDYSGYPDCRPEYIEAYEHMANLATKAGVEGRQRMKIHTPLIHLTKADTIRLGLSLGVDYALTHSCYDPVNGQPCGSCDSCLLRTRGFAELGMSDPVGGAS

SEQ ID NO: 43159 - protein, 231 aa, Verrucosispora sp.
  REGION 1..231: note = tr|A0A2N7T4Q1|A0A2N7T4Q1_9ACTN 7-cyano-7-deazaguanine synthase OS=Verrucosispora sp. ts21; OX = 2069341 GN=C1A38_09290 PE=3 SV=1
MSEILLFSAGLDSFPAWHYLGKPRTLYFDSGHFGRQQEIDTVRALAAAHGMDLEISSELDLSGRATPQGDLIPFRNVLFAMLAAFRADVIWCVGVKGDHTADKSSEAFARMSEMLTTFAGRPIRVDSPFWDMTKSDIVAWYLKAGLPVDDLLQTFSCATPGTAFTHCGRCPSCLRRWIALTNNDITGHFASPPWTWDRIRTYYLPAMASGGYPPHRVEEFRCAMATVGALP

SEQ ID NO: 43160 - protein, 302 aa, unidentified
  source 1..302: note = Verticiella sediminum
  REGION 1..302: note = tr|A0A556AWM5|A0A556AWM5_9BURK 7-cyano-7-deazaguanine synthase OS=Verticiella sediminum; OX = 1247510 GN=queC PE=3 SV=1
MNLNHRRALVLFSGGQDSTACLAWALDRYAHVETVGFDYGQRHRIELDCRTHVRDRIAAAFPAWAPRLGDDHLLRVDVLGEISDTALTRDAEVQMQANGLPNTFVPGRNLLFLTLAGALAYRRNLDVIVGGMCETDYSGYPDCRDVTIKAMQVALNLGTDRAFVFETPLMWLDKAETWQLTQDLGGDALVEIVRADTHTCYLGERGELHDWGHGCGTCPACALRARGYAQWRGALSGEMAAQRPEGRPHSTTARPPEGGAASLGEVAAQRPEGRPHSAAARPPEGGAASLGEVAAQRPEGRP

SEQ ID NO: 43161 - protein, 230 aa, unidentified
  source 1..230: note = Vesicomyosocius okutanii
  REGION 1..230: note = sp|A5CWP9|QUEC_VESOH 7-cyano-7-deazaguanine synthase; OS = Vesicomyosocius okutanii subsp. Calyptogena okutanii (strain HA) OX=412965 GN=queC PE=3 SV=1
MLNAKHKIKAVILLSGGLDSTTTLAIAKSKKFECYSLSFDYGQKQESELQSAKNIAKIFITSEHRVVKISLSGISKSALTNDNIDVPKFSQSNKIPITYVPARNTIFLSYALAWSEVLNCQHIFIGVNELDYSGYPDCRKSYIKAFEIMANLATKQGIEGQKLTIHTPLIHLNKAQIIKKGLSLGIDYTLTTTCYQADKNGKACGICDACEYRKLGFKEAKVPDQTRYQT

SEQ ID NO: 43162 - protein, 219 aa, unidentified
  source 1..219: note = Vespertiliibacter pulmonis
  REGION 1..219: note = tr|A0A3N4W2K3|A0A3N4W2K3_9PAST 7-cyano-7-deazaguanine synthase OS=Vespertiliibacter pulmonis OX=1443036 GN=queC PE=3 SV=1
MTNQPKAAVIFSGGQDSTTCLFLAIQEFGVENVEVVTFQYGQRHAIELEKAAWIAKDLGVKQTIIDTSVIKAITANALMDNNAEIKQNGETPNTFVDGRNALFLLYTAIYAKSQGIKTIFTGVCETDFSGYPDCRDIFIKSMNVTLNLAMDYNFNIRTPLMYLTKKETWQLADQLGAFDYIREYTHTCYLGIEGGCHTCPSCILREKGLNEYLAERNHV

SEQ ID NO: 43163 - protein, 238 aa, Vibrio aerogenes
  REGION 1..238: note = tr|A0A1M5XPK0|A0A1M5XPK0_9VIBR 7-cyano-7-deazaguanine synthase OS=Vibrio aerogenes CECT 7868 OX=1216006 GN=queC PE=3 SV=1
MTKAVVVFSGGQDSTTCLVEALQNYDEVHAITFDYGQRHRKEIEVAQALGKKLNVAAHKIINAGVLNELAISSLTREDIPVSAALQDNGLPNSFVPGRNILFLTLAGIYAYQIGASAVITGVCETDFSGYPDCRNDFVKAMNHALVQGMERDLTVITPLMWLDKAETWAMADHYGALSLVKDNTLTCYNGIVGDGCGECPSCKLRKAGLDTYIENKPAIMKAYLDKQRTASSRNGDKR

SEQ ID NO: 43164 - protein, 228 aa, Vibrio agarivorans
  REGION 1..228: note = tr|A0A2K1CHJ8|A0A2K1CHJ8_9VIBR 7-cyano-7-deazaguanine synthase OS=Vibrio agarivorans; OX = 153622 GN=queC PE=3 SV=1
MKKAVVVFSGGQDSTTCLVQALKEFDEVHAITFDYGQRHRLEIEVAKKLATELGITAHKVMNVELLNELAISSLTREDIPVSHDLQENGLPNSFVPGRNILFLTLTGIYAYQIGAEAVITGVCETDFSGYPDCRDDFVKTMNSALIKGMDRQFEIKTPLMWLTKAETWALADQYNSLQVIRDHTLTCYNGVIGDGCGECPACDLRKAGLDEYLNNKHSVMQSLIEKQS

SEQ ID NO: 43165 - protein, 232 aa, unidentified
  source 1..232: note = Vibrio alfacsensis
  REGION 1..232: note = tr|A0A347UQ81|A0A347UQ81_9VIBR 7-cyano-7-deazaguanine synthase OS=Vibrio alfacsensis; OX = 1074311 GN=queC PE=3 SV=1
MKKAVVVFSGGQDSTTCLVQALQEYDEVHAITFDYGQRHKLEIEVAEKLAKDLGVTAHKVMDVGLLNELAISSLTRDDIPVSHELQENGLPNSFVPGRNILFLTLAGIYAYQIGAKAVITGVCETDFSGYPDCRDDFVKSMNSALVKGMDRQFKINTPLMWLNKAETWALADQYDALNLVRENTLTCYNGIIGDGCGDCPSCDLRKAGLEEYLNNQEMVMKSLIQKQQAEDQ

SEQ ID NO: 43166 - protein, 218 aa, Vibrio alginolyticus
  REGION 1..218: note = tr|A0A0H0YGV0|A0A0H0YGV0_VIBAL 7-cyano-7-deazaguanine synthase OS=Vibrio alginolyticus; OX = 663 GN=queC PE=3 SV=1
MATTKALVVFSGGQDSTTCLIDALNTYDEVHAITFDYGQRHSDEIDIAIELGKQLNIKSHKVLDVKSINELAISSLTRDNIPVSNDLSDANVPNTFVPGRNILFLTYACIHAYQLGIQDIITGVCETDFSGYPDCRDNFIRSLNLSCNLGMDKAFNIKTPLMWLTKAETWALADKHNMLEFVQNNTLTCYNGIVGKGCGECPACLLRQSGLEEYLASK

SEQ ID NO: 43167 - protein, 231 aa, Vibrio alginolyticus
  REGION 1..231: note = tr|A0A1W6VEA1|A0A1W6VEA1_VIBAL 7-cyano-7-deazaguanine synthase OS=Vibrio alginolyticus; OX = 663 GN=queC PE=3 SV=1
MKKAVVVFSGGQDSTTCLVQALKEYDEVHAITFDYGQRHRLEIEVAESLSKELGVKAHKVMDVTLLNELAISSLTRDDIPVSHELQENGLPNSFVPGRNILFLTLAGIYAYQIGANTVITGVCETDFSGYPDCRNDFVKAMNSALVQGMDKPLDIKTPLMWLNKAETWALADQYSALELVRNKTLTCYNGIIGSGCGDCPACELRKIGLSDYLGDREGIMAELVRKQGENK

SEQ ID NO: 43168 - protein, 229 aa, unidentified
  source 1..229: note = Vibrio algivorus
  REGION 1..229: note = tr|A0A557NYR4|A0A557NYR4_9VIBR 7-cyano-7-deazaguanine synthase OS=Vibrio algivorus; OX = 1667024 GN=queC PE=3 SV=1
MTSKAVVVFSGGQDSTTCLVKALKEFDEVHAITFDYGQRHKLEIEVAQSLAKKLGVTAHKVMDVGLLNELAISSLTRDDIPVSNELQENGLPNSFVPGRNILFLTLAGIYAYQIGAQSVITGVCETDFSGYPDCRDEFVKSINQSLVLGMDRQFTIDTPLMWLNKAETWALADQFDALELVRNETLTCYNGIIGDGCGDCPACDLRKVGLVDYLDNREAVIAALIAKQS

SEQ ID NO: 43169 - protein, 237 aa, Vibrio anguillarum
  REGION 1..237: note = tr|A0A191W3M9|A0A191W3M9_VIBAN 7-cyano-7-deazaguanine synthase OS=Vibrio anguillarum; OX = 55601 GN=queC PE=3 SV=1
MPEERKMKKAVVVFSGGQDSTTCLVQALKEFDEVHAITFDYGQRHKLEIEVASTLAKKLGVAAHKVMDVSLLNELAISSLTRDDIPVSHELQENGLPNSFVPGRNILFLTLAGIYAYQIGADEVITGVCETDFSGYPDCRNDFVKAMNSALVQGMDRPFNIRTPLMWLNKAETWALADQHDALELIRHETLTCYNGIIGDGCGDCPSCELRKAGLNDYLVNKALVMNALHQKQSVTL

SEQ ID NO: 43170 - protein, 237 aa, Vibrio anguillarum
  REGION 1..237: note = tr|A0A289GBP0|A0A289GBP0_VIBAN 7-cyano-7-deazaguanine synthase OS=Vibrio anguillarum; OX = 55601 GN=queC PE=3 SV=1
MPEERKMKKAVVVFSGGQDSTTCLVQALKEFDEVHAITFDYGQRHKLEIEVASTLAKKLGVAAHKVMNVSLLNELAISSLTRDDIPVSHELQENGLPNSFVPGRNILFLTLAGIYAYQIGADEVITGVCETDFSGYPDCRNDFVKAMNSALVQGMDRPFNIRTPLMWLNKAETWALADQHDALELIRHETLTCYNGIIGDGCGDCPSCELRKAGLNDYLVNKALVMNALHQKQSVTL

SEQ ID NO: 43171 - protein, 231 aa, unidentified
  source 1..231: note = Vibrio antiquarius
  REGION 1..231: note = tr|A7K042|A7K042_VIBAE 7-cyano-7-deazaguanine synthase OS=Vibrio antiquarius (strain Ex25) OX=150340; GN = queC PE=3 SV=1
MKKAVVVFSGGQDSTTCLVQALKEFDEVHAITFDYGQRHKLEIEVAQNIAKDLGVKAHKVMDVGLLNELAISSLTRDDIPVSHELQENGLPNSFVPGRNILFLTLAGIYAYQIGAETVITGVCETDFSGYPDCRDDFVKAMNTALVKGMDRNLTIKTPLMWLNKAETWALADQYDALQLVRENTLTCYNGVIGDGCGDCPSCDLRKAGLDDYLNNKETVMQSLVNKQAADV

SEQ ID NO: 43172 - protein, 231 aa, Vibrio atlanticus
  REGION 1..231: note = tr|A0A558H1S7|A0A558H1S7_9VIBR 7-cyano-7-deazaguanine synthase OS=Vibrio atlanticus; OX = 693153 GN=queC PE=3 SV=1
MKKAVVVFSGGQDSTTCLVQALKEYDEVHAITFDYGQRHKLEIEVAQSLSKDLGVKAHKVMDVTVLNELAISSLTRDDIPVSHELQENGLPNSFVPGRNILFLTLAGIYAYQIGAETVITGVCETDFSGYPDCRNDFVKAMNSALVQGMDKQLDIKTPLMWLNKAETWAMADQYSTLELVRNRTLTCYNGIIGDGCGDCPACELRKVGLNDYLADRESIMAELVRKQTEYK

SEQ ID NO: 43173 - protein, 231 aa, Vibrio atlanticus
  REGION 1..231: note = tr|A0A1C3IZI2|A0A1C3IZI2_9VIBR 7-cyano-7-deazaguanine synthase OS=Vibrio atlanticus; OX = 693153 GN=queC PE=3 SV=1
MKKAVVVFSGGQDSTTCLVQALKEYDEVHAITFDYGQRHRLEIEVAESLSKDLGVKAHKVMDVTLLNELAISSLTRDDIPVSHELQENGLPNSFVPGRNILFLTLAGIYAYQIGANTVITGVCETDFSGYPDCRNDFVKAMNSALVQGMDKPLDIKTPLMWLNKAETWALADQYSALELVRNKTLTCYNGIVGDGCGDCPACELRKIGLSDYLGDRQGIMAELVRKQGQNK

SEQ ID NO: 43174 - protein, 228 aa, Vibrio azureus
  REGION 1..228: note = tr|U3AW83|U3AW83_9VIBR 7-cyano-7-deazaguanine synthase OS=Vibrio azureus NBRC 104587 OX=1219077 GN=queC; PE = 3 SV=1
MKKAVVVFSGGQDSTTCLVQALKEFDEVHAITFDYGQRHRLEIDVAQKLAKELNVAAHKIMNVELLNELAISSLTREDIPVSHDLQDNGLPNSFVPGRNILFLTLAGIYAYQIGAQAVITGVCETDFSGYPDCRDDFVKTMNSALVKGMDREFEVKTPLMWLNKAETWALADQYHSLQMIREQTLTCYNGVIGDGCGDCPACDLRKSGLEEYLNNKESVMQSLVHKQK

SEQ ID NO: 43175 - protein, 228 aa, unidentified
  source 1..228: note = Vibrio barjaei
  REGION 1..228: note = tr|A0A1J4QV01|A0A1J4QV01_9VIBR 7-cyano-7-deazaguanine synthase OS=Vibrio barjaei; OX = 1676683 GN=queC PE=3 SV=1
MKKAVVVFSGGQDSTTCLVQALKQYDEVHAITFDYGQRHKLEIEVAETLAKKLNVKAHKVMDVSLLNELAISSLTRDDIPVSHELQENGLPNSFVPGRNILFLTLAGIYAYQIGAQAVITGVCETDFSGYPDCRNDFIKAMNSALVQGMDREFDIVTPLMWLDKAETWALADKFNALQLIREETLTCYNGVIGDGCGDCPSCDLRSNGLNHYLENKTEVMASLNEKSE

SEQ ID NO: 43176 - protein, 232 aa, unidentified
  source 1..232: note = Vibrio bivalvicida
  REGION 1..232: note = tr|A0A177XUL8|A0A177XUL8_9VIBR 7-cyano-7-deazaguanine synthase OS=Vibrio bivalvicida; OX = 1276888 GN=queC PE=3 SV=1
MKKAVVVFSGGQDSTTCLVQAIKHFDEVHAITFDYGQRHKLEIEVAQSLANELGVKAHKTMDVGLLNELAISSLTRDDIPVSHELQENGLPNSFVPGRNILFLTLAGIYAYQIGAQTVITGVCETDFSGYPDCRNDFVKAMNNALVQGMDRPLEISTPLMWLNKAETWALADQYDALQLVREKTLTCYNGIIGDGCGDCPSCELRKVGLNDYLADRKNIMAELVRKQSSVDK

SEQ ID NO: 43177 - protein, 228 aa, Vibrio brasiliensis
  REGION 1..228: note = tr|E8LPE8|E8LPE8_9VIBR 7-cyano-7-deazaguanine synthase OS=Vibrio brasiliensis LMG 20546 OX=945543; GN = queC PE=3 SV=1
MNKAVVVFSGGQDSTTCLVQALKQYDEVHAITFDYGQRHKLEIEVAQSLAKELGVKAHKVMDVSLLNELAISSLTRDDIPVSHDLQENGLPNSFVPGRNILFLTLAGIYAYQIGAKTVITGVCETDFSGYPDCRNDFVKAMNSALEQGMDYQLEIATPLMWLNKAETWALADQYDALQLVREKTLTCYNGVIGDGCGDCPSCELRKVGLNDYLDNREAVMAELVAKQS

SEQ ID NO: 43178 - protein, 235 aa, Vibrio breoganii
  REGION 1..235: note = tr|A0A4V5RKB4|A0A4V5RKB4_9VIBR 7-cyano-7-deazaguanine synthase OS=Vibrio breoganii; OX = 553239 GN=queC PE=3 SV=1
MSVKGISMNKAVVIFSGGQDSTTCLVQALTQFDEVHAITYDYGQRHRQEIEIAQKLAKKLGAKAHKVMDVTLLNELAVSSLTRDDIPVSHDLGENGLPNSFVPGRNILFLTLAGIYAYQVGAKTLITGVCETDFSGYPDCRDEFVKAMNAALSLGMDYALDVKTPLMWLNKAETWAMADHYDALEMVRYETLTCYNGIVGSGCGDCPACDLRAKGLAEYQDNADEVMTSYKQKSQ

SEQ ID NO: 43179 - protein, 235 aa, Vibrio breoganii
  REGION 1..235: note = tr|A0A4U2GL99|A0A4U2GL99_9VIBR 7-cyano-7-deazaguanine synthase OS=Vibrio breoganii; OX = 553239 GN=queC PE=3 SV=1
MSVKGISMNKAVVIFSGGQDSTTCLVQALTQFDEVHAITYDYGQRHRQEIEIAQKLAKKLGAKAHKVMDVTLLNELAVSSLTRDDIPVSHDLGENGLPNSFVPGRNILFLTLAGIYAYQVGAKTLITGVCETDFSGYPDCRDEFVKAMNAALSLGMDYALDVKTPLMWLNKAETWAMADHYEALEMVRDETLTCYNGIVGSGCGDCPACDLRAKGLAEYQDNADEVMTSYKQKSQ

SEQ ID NO: 43180 - protein, 232 aa, Vibrio campbellii
  REGION 1..232: note = sp|A7MW43|QUEC_VIBCB 7-cyano-7-deazaguanine synthase; OS = Vibrio campbellii (strain ATCC BAA-1116 / BB120); OX = 338187 GN=queC PE=3 SV=1
MKKAVVVFSGGQDSTTCLVQALKEFDEVHAITFDYGQRHKLEIEVAEKVAKDLGVAAHKVMDVGLLNELAISSLTRDDIPVSHELQENGLPNSFVPGRNILFLTLAGIYAYQIGAETVITGVCETDFSGYPDCRDDFVKAMNSALVKGMDRQFEIKTPLMWLNKAETWALADQYDALQLVRESTLTCYNGIIGDGCGDCPSCDLRKAGLDDYLNNKDAVMQSLIQKQKSEDQ

SEQ ID NO: 43181 - protein, 232 aa, Vibrio campbellii; identical to SEQ ID NO: 43180
  REGION 1..232: note = tr|A0A1Q1P9J8|A0A1Q1P9J8_9VIBR 7-cyano-7-deazaguanine synthase OS=Vibrio campbellii; OX = 680 GN=queC PE=3 SV=1

SEQ ID NO: 43182 - protein, 231 aa, unidentified
  source 1..231: note = Vibrio caribbeanicus
  REGION 1..231: note = tr|E3BNP4|E3BNP4_9VIBR 7-cyano-7-deazaguanine synthase OS=Vibrio caribbeanicus ATCC BAA-2122 OX=796620; GN = queC PE=3 SV=1
MKKAVVVFSGGQDSTTCLMQAIKQYDEVHTITFDYGQRHRLEIEVARSIADELGVKAHKVMDVTLLNDLAASSLTRDNIAVSNDVQENGLPNSFVPGRNILFLTLAGIYAYQVGAHDLITGVCETDFSGYPDCRNDFVQAMGKALEQGMDRQLNIITPLMWLNKAETWALADSLGALDLIKDKTLTCYNGIIGEGCGDCPSCHLRTKGLDDYLSNKDNITKDLIAKQSSNE

SEQ ID NO: 43183 - protein, 235 aa, unidentified
  source 1..235: note = Vibrio caribbeanicus
  REGION 1..235: note = tr|A0A0A6QMU9|A0A0A6QMU9_9VIBR 7-cyano-7-deazaguanine synthase OS=Vibrio caribbeanicus; OX = 701175 GN=queC PE=3 SV=1
MKKAVVVFSGGQDSTTCLVKALKEFDEVHAITFDYGQRHKLEIEVAEQLATKLGVKAHKVMDVGLLNELAISSLTRDDIPVSHELQDNGLPNSFVPGRNILFLTLAGIYAYQIGADVVITGVCETDFSGYPDCRDEFVRSMNNSLVLGMDRAFTIETPLMWLNKAETWALADQYDALQLVRESTLTCYNGIVGDGCGDCPSCDLRKAGLNDYLSNKEAIMSELVRKQSSQDKSAH

SEQ ID NO: 43184 - protein, 231 aa, Vibrio casei
  REGION 1..231: note = tr|A0A368LN00|A0A368LN00_9VIBR 7-cyano-7-deazaguanine synthase OS=Vibrio casei OX=673372; GN = queC PE=3 SV=1
MTSKAVVVFSGGQDSTTCLVQALKKYDEVHAITFDYGQRHKLEIEVAEKLCKQLGVKAHKVMDVGLLNELAISSLTRDDIPVSHELQENGLPNSFVPGRNILFLTLAGIYAYQIGAESVITGVCETDFSGYPDCRDQFVKSINNALILGMDREFSIETPLMWLNKAETWALADQNDALELIRNETLTCYNGIIGDGCGDCPSCDLRRVGLMDYLNNRNEVMNELKQKQQNN

SEQ ID NO: 43185 - protein, 231 aa, Vibrio celticus
  REGION 1..231: note = tr|A0A1C3JGW3|A0A1C3JGW3_9VIBR 7-cyano-7-deazaguanine synthase OS=Vibrio celticus; OX = 446372 GN=queC PE=3 SV=1
MKKAVVVFSGGQDSTTCLVQALKEYDEVHAITFDYGQRHRLEIEVAESLSKELGVKAHKVMDVTLLNELAISSLTRDDIPVSHELQENGLPNSFVPGRNILFLTLAGIYAYQIAAETVITGVCETDFSGYPDCRNDFVKAMNSALVQGMDKQLDIKTPLMWLNKAETWALADQYSALELVRNKTLTCYNGIVGDGCGDCPACELRKVGLNDYLGDRESIMAELVRKQAENK

SEQ ID NO: 43186 - protein, 231 aa, Vibrio chagasii
  REGION 1..231: note = tr|A0A2S7VDW1|A0A2S7VDW1_9VIBR 7-cyano-7-deazaguanine synthase OS=Vibrio chagasii; OX = 170679 GN=queC PE=3 SV=1
MKKTVVVFSGGQDSTTCLVQALKEYDEVHAITFDYGQRHKLEIEVAESLAKELGVKAHKVMDVTLLNELAISSLTRDDIPVSHELQENGLPNSFVPGRNILFLTLAGIYAYQIGAETVITGVCETDFSGYPDCRNDFVKAMNSALVQGMDKQLDIKTPLMWLNKAETWALADQYSALELVRNKTLTCYNGIIGDGCGDCPACELRKVGLNDYLGDRESIMAELVRKQAENK

SEQ ID NO: 43187 - protein, 231 aa, Vibrio cholerae
  REGION 1..231: note = sp|A5F8G4|QUEC_VIBC3 7-cyano-7-deazaguanine synthase; OS = Vibrio cholerae serotype O1 (strain ATCC 39541 / Classical Ogawa 395 / O395) OX=345073 GN=queC PE=3 SV=1
MKKAVVVFSGGQDSTTCLVQALKEFDEVHAITFDYGQRHKLEIEVAQQLAKQLGVTAHKVMDVSLLNELAISSLTRDDIPVSHELQANGLPNSFVPGRNILFLTLAGIYAYQIGATTVITGVCETDFSGYPDCRDEFVQAMNQALAKGMDLPLMIRTPLMWLNKAETWALADQLGALDLVRHQTLTCYNGLIGDGCGECPACGLRQAGLKAYLDNRDLIMSALKSKQSAAH

SEQ ID NO: 43188 - protein, 231 aa, Vibrio cholerae; identical to SEQ ID NO: 43187
  REGION 1..231: note = sp|C3LM61|QUEC_VIBCM 7-cyano-7-deazaguanine synthase; OS = Vibrio cholerae serotype O1 (strain M66-2) OX=579112; GN = queC PE=3 SV=1

SEQ ID NO: 43189 - protein, 228 aa, unidentified
  source 1..228: note = Vibrio cidicii
  REGION 1..228: note = tr|A0A151JLP7|A0A151JLP7_9VIBR 7-cyano-7-deazaguanine synthase OS=Vibrio cidicii; OX = 1763883 GN=queC PE=3 SV=1
MNKAVVVFSGGQDSTTCLVQALNEYDEVHAITFDYGQRHRLEIEVAQQLAADLGVKAHKVMDVTLLNELAISSLTRDDIPVSHELQANGLPNSFVPGRNILFLTLAGIYAYQIGADTVITGVCETDFSGYPDCRDDFVKAMNSALVKGMDKALTIKTPLMWLNKAETWALADQNKALQLVREKTLTCYNGVIGDGCGDCPSCHLRKAGLDDYLNNQPLVMASLLEKQA

SEQ ID NO: 43190 - protein, 232 aa, Vibrio cincinnatiensis
  REGION 1..232: note = tr|A0A1T4RI44|A0A1T4RI44_VIBCI 7-cyano-7-deazaguanine synthase OS=Vibrio cincinnatiensis DSM 19608 OX=1123491 GN=queC PE=3 SV=1
MNKAVVVFSGGQDSTTCLVQALKEYDEVHAITFDYGQRHRLEIEVAKKLSAKLGVKAHKVMDVTLLNELAVSSLTRDEIPVSHEQQDNGLPNSFVPGRNILFLTLAGIYAYQIGADTIITGVCETDFSGYPDCRDEFVKAMNQALIQGMARALDIRTPLMWLNKAETWALADQYQALELIRHETLTCYNGIMGDGCGACPSCDLRKAGLEQYLADKTVWTKSLLTKQSSRNK

SEQ ID NO: 43191 - protein, 228 aa, Vibrio comitans
  REGION 1..228: note = tr|A0A4Y3IPX5|A0A4Y3IPX5_9VIBR 7-cyano-7-deazaguanine synthase OS=Vibrio comitans NBRC 102076 OX=1219078 GN=queC PE=3 SV=1
MNKAVVIFSGGQDSTTCLVQALTQFDEVHAITYDYGQRHRQEIEIAQQLAKKLGAKAHKVMDVTLLNELAVSSLTRDDIPVSHDLGENGLPNSFVPGRNILFLTLAGIYAYQVGAKTLITGVCETDFSGYPDCRDEFVKAMNSALSLGMDYQLDIKTPLMWLNKAETWAMADHYRALEMVRDETLTCYNGIVGSGCGDCPACDLRAKGLADYQDNADEVMASYKQKSL

SEQ ID NO: 43192 - protein, 231 aa, Vibrio coralliilyticus
  REGION 1..231: note = tr|A0A2A2CQU4|A0A2A2CQU4_9VIBR 7-cyano-7-deazaguanine synthase OS=Vibrio coralliilyticus; OX = 190893 GN=queC PE=3 SV=1
MKKAVVVFSGGQDSTTCLVQALKNFDEVHAITFDYGQRHKLEIEVAQDLAKELGVKAHKVMDVGLLNELAISSLTRDDIPVSHELQENGLPNSFVPGRNILFLTLAGIYAYQIGAQAVITGVCETDFSGYPDCRNDFVKAMNSALVQGMDRNLDIVTPLMWLNKAETWALADQYDALQLVREKTLTCYNGIIGDGCGDCPACDLRKAGLNDYIDNREAVMASLVSKQSSEA

SEQ ID NO: 43193 - protein, 231 aa, Vibrio coralliilyticus
  REGION 1..231: note = tr|A0A1V0I775|A0A1V0I775_9VIBR 7-cyano-7-deazaguanine synthase OS=Vibrio coralliilyticus; OX = 190893 GN=queC PE=3 SV=1
MKKAVVVFSGGQDSTTCLVQALKNFDEVHAITFDYGQRHKLEIEVAQDLAKELGVKAHKVMDVGLLNELAISSLTRDDIPVSHELQENGLPNSFVPGRNILFLTLAGIYAYQIGAQAVITGVCETDFSGYPDCRNDFVKAMNSALVQGMDRNLDIVTPLMWLNKAETWALADQYDALQLVREKTLTCYNGVIGDGCGDCPACDLRKAGLNDYIDNREAVMASLVSKQSSEA

SEQ ID NO: 43194 - protein, 231 aa, Vibrio crassostreae
  REGION 1..231: note = tr|A0A1B1BV44|A0A1B1BV44_9VIBR 7-cyano-7-deazaguanine synthase OS=Vibrio crassostreae 9CS106 OX=1191300 GN=queC PE=3 SV=1
MKKAVVVFSGGQDSTTCLVQALKEYDEVHAITFDYGQRHRLEIEVAESLSKELGVKAHKVMDVTLLNELAISSLTRDDIPVSHELQENGLPNSFVPGRNILFLTLAGIYAYQIGAETVIAGVCETDFSGYPDCRNDFVKAMNSALVQGMDKQLDIKTPLMWLNKAETWALADQYSALELVRNKTLTCYNGIVGDGCGDCPACELRKVGLNDYLGDRESIMAELVRKQAENK

SEQ ID NO: 43195 - protein, 231 aa, Vibrio crassostreae
  REGION 1..231: note = tr|A0A0T7D690|A0A0T7D690_9VIBR 7-cyano-7-deazaguanine synthase OS=Vibrio crassostreae; OX = 246167 GN=queC PE=3 SV=1
MKKAVVVFSGGQDSTTCLVQALKEYDEVHAITFDYGQRHRLEIEVAESLSKELGVKAHKVMDVTLLNELAISSLTRDDIPVSHELQENGLPNSFVPGRNILFLTLAGIYAYQIGAETVITGVCETDFSGYPDCRNDFVKAMNSALVQGMDKQLDIKTPLMWLNKAETWALADQYSALELVRNKTLTCYNGIVGDGCGDCPACELRKVGLNDYLGDRESIMAELVRKQAENK

SEQ ID NO: 43196 - protein, 231 aa, Vibrio diabolicus
  REGION 1..231: note = tr|A0A2L2K1Q4|A0A2L2K1Q4_9VIBR 7-cyano-7-deazaguanine synthase OS=Vibrio diabolicus; OX = 50719 GN=queC PE=3 SV=1
MKKAVVVFSGGQDSTTCLVQALKEFDEVHAITFDYGQRHKLEIEVAQKIAKDLGVKAHKVMDVGLLNELAISSLTRDDIPVSHELQENGLPNSFVPGRNILFLTLAGIYAYQIGAETVITGVCETDFSGYPDCRDDFVKAMNTALVQGMDRNLTIKTPLMWLNKAETWALADQYDALQLVRENTLTCYNGVIGDGCGDCPSCDLRKAGLDDYLNNKETVMQSLVNKQAADV

SEQ ID NO: 43197 - protein, 229 aa, Vibrio diazotrophicus
  REGION 1..229: note = tr|A0A2J8GMA7|A0A2J8GMA7_VIBDI 7-cyano-7-deazaguanine synthase OS=Vibrio diazotrophicus; OX = 685 GN=queC PE=3 SV=1
MKKAVVVFSGGQDSTTCLVQALQEFDEVHAITFDYGQRHKLEIEVAQALTKKLGVTAHKVLDVGLLNELAISSLTRDDIPVSHELQENGLPNSFVPGRNILFLTLAGIYAYQIGAHTVITGVCETDFSGYPDCRNDFIQAMNSALVKGMDRELEIRTPLMWLNKAETWALADQYQSLDLVRNETLTCYNGIIGDGCGDCPACHLRKAGLNDYLDNRAAVIESLKQKNNQ

SEQ ID NO: 43198 - protein, 229 aa, Vibrio diazotrophicus
  REGION 1..229: note = tr|A0A329E094|A0A329E094_VIBDI 7-cyano-7-deazaguanine synthase OS=Vibrio diazotrophicus; OX = 685 GN=queC PE=3 SV=1
MKKAVVVFSGGQDSTTCLVQALQEFDEVHAITFDYGQRHKLEIEVAQALTKKLGVTAHKVLDVGLLNELAISSLTRDDIPVSHELQENGLPNSFVPGRNILFLTLAGIYAYQIGAQTVITGVCETDFSGYPDCRNDFIKAMNSALVKGMDRELEIRTPLMWLNKAETWALADQYQSLDLVRNETLTCYNGIIGDGCGDCPACHLRKAGLNDYLDNRAAVIESLKQKNNQ

SEQ ID NO: 43199 - protein, 232 aa, unidentified
  source 1..232: note = Vibrio europaeus
  REGION 1..232: note = tr|A0A178JEJ8|A0A178JEJ8_9VIBR 7-cyano-7-deazaguanine synthase OS=Vibrio europaeus; OX = 300876 GN=queC PE=3 SV=1
MKKAVVVFSGGQDSTTCLVQAIKDFDEVHAITFDYGQRHKLEIEVAQSLAKELDVKAHKVMDVGLLNELAISSLTRDDIPVSHELQENGLPNSFVPGRNILFLTLAGIYAYQIGAQTVITGVCETDFSGYPDCRNDFVKAMNNALVQGMDRQLEISTPLMWLNKAETWALADQYDALQLIREKTLTCYNGVIGDGCGDCPACELRKVGLNDYLSDRKAIMAELVRKQNSADK

SEQ ID NO: 43200 - protein, 230 aa, Vibrio ezurae
  REGION 1..230: note = tr|U3CEC5|U3CEC5_9VIBR 7-cyano-7-deazaguanine synthase OS=Vibrio ezurae NBRC 102218 OX=1219080 GN=queC; PE = 3 SV=1
MNKAVVIFSGGQDSTTCLVQALTQYDEVHAITYDYGQRHRQEIEVAKCLAKQLGVKAHKVMDVTLLNELAVSSLTRDDIPVSHELAENGLPNSFVPGRNILFLTLAGIYAYQVGAKTLITGVCETDFSGYPDCRDEFVKTMNSALAQGMDYPLQVNTPLMWLNKAETWAMADSYNALELVRDHTLTCYNGIVGSGCGDCPACDLRAKGLTDYQQNATQVMAAYQEKKTKI

SEQ ID NO: 43201 - protein, 229 aa, Vibrio fluvialis
  REGION 1..229: note = tr|S7I9P3|S7I9P3_VIBFL 7-cyano-7-deazaguanine synthase OS=Vibrio fluvialis PG41 OX=1336752 GN=queC PE=3; SV = 1
MKKAVVVFSGGQDSTTCLVQALKEFDEVHAITFDYGQRHKLEIEVAQTLAKKLGVKAHKVMDVGLLNELAISSLTRDDIPVSHELQENGLPNSFVPGRNILFLTLAGIYAYQIGAQTVITGVCETDFSGYPDCRNDFVKAMNSALVQGMDRELEIRTPLMWLNKAETWAMADQNDALELVRNETLTCYNGIIGDGCGDCPSCHLRKAGLNDYLENREAVMAALVAKQAQ

SEQ ID NO: 43202 - protein, 231 aa, Vibrio fluvialis
  REGION 1..231: note = tr|A0A1L9L8B8|A0A1L9L8B8_VIBFL 7-cyano-7-deazaguanine synthase OS=Vibrio fluvialis OX=676; GN = queC PE=3 SV=1
MNKAVVVFSGGQDSTTCLVKALNEFDEVHAITFDYGQRHRLEIEVAQNLAKELGVAAHKVMDVTLLNELAISSLTRDDIPVSHELQENGLPNSFVPGRNILFLTLAGIYAYQIGAETIITGVCETDFSGYPDCRDDFVKAMNSALVKGMDKPLVIQTPLMWLNKAETWALADQNNALQLVREKTLTCYNGIIGDGCGDCPSCHLRKVGLNDYLDNREAIMASLVEKQHAES

SEQ ID NO: 43203 - protein, 231 aa, Vibrio fortis
  REGION 1..231: note = tr|A0A066UW34|A0A066UW34_9VIBR 7-cyano-7-deazaguanine synthase OS=Vibrio fortis OX=212667; GN = queC PE=3 SV=1
MKKAVVVFSGGQDSTTCLVQALQEYDEVHAITFDYGQRHRLEIEVAQNLAKELGVKAHKVMDVTLLNELAISSLTRDDIPVSHELQENGLPNSFVPGRNILFLTLAGIYAYQIGAQAVITGVCETDFSGYPDCRNDFVKAMNSALVQGMDRELDIKTPLMWLNKAETWALADQYSALELVRSKTLTCYNGVIGDGCGDCPACELRKVGLNDYLDNREQIMAELVRKQSVNR

SEQ ID NO: 43204 - protein, 229 aa, Vibrio furnissii
  REGION 1..229: note = tr|F0LUE3|F0LUE3_VIBFN 7-cyano-7-deazaguanine synthase OS=Vibrio furnissii (strain DSM 14383 / NCTC 11218 / VL 6966) OX=903510 GN=queC PE=3 SV=1
MKKAVVVFSGGQDSTTCLVQALKEFDEVHAITFDYGQRHKLEIEVAQTLAKKLGVKAHKVMDVGLLNELAISSLTRDDIPVSNELQENGLPNSFVPGRNILFLTLAGIYAYQIGAQTVITGVCETDFSGYPDCRNDFVKAMNSALVLGMDRELEIRTPLMWLNKAETWAMADQNGALELVRHETLTCYNGIMGDGCGDCPSCHLRKVGLNDYLEHREAVMAALVAKQSQ

SEQ ID NO: 43205 - protein, 229 aa, Vibrio furnissii
  REGION 1..229: note = tr|A0A0Q2M905|A0A0Q2M905_VIBFU 7-cyano-7-deazaguanine synthase OS=Vibrio furnissii; OX = 29494 GN=queC PE=3 SV=1
MKKAVVVFSGGQDSTTCLVQALKEFDEVHAITFDYGQRHKLEIEVAQMLAKKLGVKAHKVMDVGLLNELAISSLTRDDIPVSNELQENGLPNSFVPGRNILFLTLAGIYAYQIGAQTVITGVCETDFSGYPDCRNDFVKAMNSALVLGMDRELEIRTPLMWLNKAETWAMADQNGALELVRHETLTCYNGIMGDGCGDCPSCHLRKVGLNDYLEHREAVMAALVAKQSQ

SEQ ID NO: 43206 - protein, 231 aa, unidentified
  source 1..231: note = Vibrio galatheae
  REGION 1..231: note = tr|A0A0F4NKS1|A0A0F4NKS1_9VIBR 7-cyano-7-deazaguanine synthase OS=Vibrio galatheae; OX = 579748 GN=queC PE=3 SV=1
MKKAVVVFSGGQDSTTCLVQALKEFDEVHAITFDYGQRHKLEIEVAQSLAKELGVKAHKVMDVGLLNELAISSLTRDDIPVSHELQDNGLPNSFVPGRNILFLTLAGIYAYQIGAQTVITGVCETDFSGYPDCRNDFVKAMNSALVQGMDRPLEIATPLMWLNKAETWALADQYDALQLVREKTLTCYNGIIGDGCGDCPSCELRKVGLNDYLANREAVMAELVRKQTTES

SEQ ID NO: 43207 - protein, 233 aa, Vibrio gazogenes
  REGION 1..233: note = tr|A0A1Z2SBH0|A0A1Z2SBH0_VIBGA 7-cyano-7-deazaguanine synthase OS=Vibrio gazogenes OX=687; GN = queC PE=3 SV=1
MKKAVVVFSGGQDSTTCLVEALQTYDEVHAITFDYGQRHRLEIETARQLAAQLGVKAHKVMDVGLLNELAISSLTRDDIPVSHELQDNGLPNSFVPGRNILFLTLAGIYAYQIGAESVITGVCETDFSGYPDCRNTFIQTMNRALVQGMDREMRIVTPLMWLNKAETWAMADHYDALALVRNQTLTCYNGVIGDGCGECPSCHLRQAGLDEYLHNQEAVQQAYLDKRTTQTHA

SEQ ID NO: 43208 - protein, 233 aa, Vibrio gazogenes
  REGION 1..233: note = tr|A0A1M4ZB77|A0A1M4ZB77_VIBGA 7-cyano-7-deazaguanine synthase OS=Vibrio gazogenes DSM 21264 = NBRC 103151 OX=1123492 GN=queC PE=3 SV=1
MKKAVVVFSGGQDSTTCLVEALQTYDEVHAITFDYGQRHRLEIETARQLATQLGVKAHKVMDVGLLNELAISSLTRDDIPVSHELQDNGLPNSFVPGRNILFLTLAGIYAYQIGAESVITGVCETDFSGYPDCRNEFIQTMNRALVQGMDRKMHIVTPLMWLNKAETWAMADHYDALALVRNQTLTCYNGVIGDGCGECPSCHLRKAGLDEYLHNREAVQQAYLDKRATQAHS

SEQ ID NO: 43209 - protein, 229 aa, unidentified
  source 1..229: note = Vibrio genomosp.
  REGION 1..229: note = tr|A0A1B9QV12|A0A1B9QV12_9VIBR 7-cyano-7-deazaguanine synthase OS=Vibrio genomosp. F10; OX = 723171 GN=queC PE=3 SV=1
MKKAVVVFSGGQDSTTCLVKALQEFDEVHAITFDYGQRHRLEIDIAQDLAKELGATAHKVMDVTLLNELAISSLTRDDIPVSHELQDNGLPNSFVPGRNILFLTLAGIYAYQIGADTVITGVCETDFSGYPDCRDEFVKSMNTALVLGMDRTFEISTPLMWLNKAETWAMADRYDALELVRNKTLTCYNGVIGDGCGDCPSCDLRKSGLDEYLQNKEEVMKHYLSKASR

SEQ ID NO: 43210 - protein, 232 aa, unidentified
  source 1..232: note = Vibrio genomosp.
  REGION 1..232: note = tr|A0A4U1YV17|A0A4U1YV17_9VIBR 7-cyano-7-deazaguanine synthase OS=Vibrio genomosp. F6; OX = 723172 GN=queC PE=3 SV=1
MKKAVVVFSGGQDSTTCLVQALKEFDEVHAITFDYGQRHKLEIEVAQNLANELGVTAHKVMDVGLLNELAISSLTRDDIEVSHELQENGLPNSFVPGRNILFLTLAGIYAYQIGAQSVITGVCETDFSGYPDCRDEFVKSMNTALVQGMDRQFEILTPLMWLNKAETWALADQYDALELVRSKTLTCYNGIIGDGCGDCPSCELRKIGLNDYQANSQTVMSELKNKQRLANQ

SEQ ID NO: 43211 - protein, 230 aa, Vibrio halioticoli
  REGION 1..230: note = tr|V5F4A9|V5F4A9_9VIBR 7-cyano-7-deazaguanine synthase OS=Vibrio halioticoli NBRC 102217 OX=1219072; GN = queC PE=3 SV=1
MNKAVVIFSGGQDSTTCLVQALTQYDEVHAITYDYGQRHRQEIEVATSLAKQLGVTAHKVMDVTLLNELAVSSLTRDDIPVSHDLAENGLPNSFVPGRNILFLTLAGIYAYQVGAKTLITGVCETDFSGYPDCRDEFVKTMNSALAQGMDYPLQVNTPLMWLNKAETWAMADSYNALEMVRDHTLTCYNGIVGSGCGDCPACDLRAKGLTDYQDNAEQVMAAYQQKTAKA

SEQ ID NO: 43212 - protein, 228 aa, Vibrio hangzhouensis
  REGION 1..228: note = tr|A0A1H5YGE3|A0A1H5YGE3_9VIBR 7-cyano-7-deazaguanine synthase OS=Vibrio hangzhouensis; OX = 462991 GN=queC PE=3 SV=1
MKKAVVVFSGGQDSTTCLVQALKQYDEVHAITFDYGQRHKLEIEVAQALAQKLGVAAHKVMDVSLLNELAISSLTRDDIPVSHELQENGLPNSFVPGRNILFLTLAGIYAYQIGANAVITGVCETDFSGYPDCRNDFIKAMNSALVQGMDRDLEIVTPLMWLDKAETWALADKYQALDLVRQETLTCYNGVIGDGCGDCPSCELRANGLNQYLDNKDNVMQALNAKSE

SEQ ID NO: 43213 - protein, 232 aa, Vibrio harveyi
  REGION 1..232: note = tr|A0A0D0IGR1|A0A0D0IGR1_VIBHA 7-cyano-7-deazaguanine synthase OS=Vibrio harveyi OX=669; GN = queC PE=3 SV=1
MKKAVVVFSGGQDSTTCLVQALKEFDEVHAITFDYGQRHKLEIEVAEKVAKDLGVAAHKVMDVGLLNELAISSLTRDDIPVSHELQENGLPNSFVPGRNILFLTLAGIYAYQIGAETVITGVCETDFSGYPDCRDDFVKAMNSALVKGMDRQFEIKTPLMWLNKAETWALADQYDALQLVRENTLTCYNGIIGDGCGDCPSCDLRKAGLDDYLNNKDAVTQSLIQKQKTEGQ

SEQ ID NO: 43214 - protein, 232 aa, Vibrio harveyi
  REGION 1..232: note = tr|A0A3A1PYI4|A0A3A1PYI4_VIBHA 7-cyano-7-deazaguanine synthase OS=Vibrio harveyi OX=669; GN = queC PE=3 SV=1
MKKAVVVFSGGQDSTTCLVQALKEFDEVHAITFDYGQRHKLEIEVAEKVAKDLGVAAHKVMDVGLLNELAISSLTRDDIPVSHELQENGLPNSFVPGRNILFLTLAGIYAYQIGAETVITGVCETDFSGYPDCRDDFVKAMNSALVKGMDRQFDIKTPLMWLNKAETWALADQYDALQLVRESTLTCYNGIIGDGCGDCPSCDLRKAGLDDYLNNKDTVMQSLIQKQKAEDQ

SEQ ID NO: 43215 - protein, 231 aa, Vibrio hepatarius
  REGION 1..231: note = tr|A0A0M0HWK0|A0A0M0HWK0_9VIBR 7-cyano-7-deazaguanine synthase OS=Vibrio hepatarius; OX = 171383 GN=queC PE=3 SV=1
MRKAVVVFSGGQDSTTCLVKALKEFDEVHAITFDYGQRHKLEIEVAQSLAKELGVTAHKVMDVGLLNELAISSLTRDDIPVSHELQENGLPNSFVPGRNILFLTLAGIYAYQIGAQTVITGVCETDFSGYPDCRDAFVKAMNNALVQGMDRELVIDTPLMWLNKAETWALADQNDALQLVREKTLTCYNGIIGDGCGDCPSCELRKVGLNDYLADREAVMAELTRKQSLAK

SEQ ID NO: 43216 - protein, 231 aa, Vibrio ichthyoenteri
  REGION 1..231: note = tr|F9S2J8|F9S2J8_9VIBR 7-cyano-7-deazaguanine synthase OS=Vibrio ichthyoenteri ATCC 700023 OX=870968; GN = queC PE=3 SV=1
MKKAVVVFSGGQDSTTCLVQALKEYDEVHAITFDYGQRHKLEIEVAQQLALDLGVTAHKVMDVGLLNELAISSLTRDDIPVSHELQENGLPNSFVPGRNILFLTLAGIYAYQIGAQSVITGVCETDFSGYPDCRDEFVKSMNTALVQGMDRPFTIQTPLMWLNKAETWALADQYDALSLVREKTLTCYNGIIGDGCGDCPACELRKVGLEQYLADKPLVMQSLEHKQASAM

SEQ ID NO: 43217 - protein, 228 aa, Vibrio inusitatus
  REGION 1..228: note = tr|A0A4Y3HY12|A0A4Y3HY12_9VIBR 7-cyano-7-deazaguanine synthase OS=Vibrio inusitatus NBRC 102082 OX=1219070 GN=queC PE=3 SV=1
MNKAVVIFSGGQDSTTCLVQALTQFDEVHAITYDYGQRHRQEIEIAQKLAKKLGAKAHKVMDVTLLNELAVSSLTREDIPVSHDLGENGLPNSFVPGRNILFLTLAGIYAYQVGAKTLITGVCETDFSGYPDCRDEFVKAMNSALSLGMDYQLDIKTPLMWLNKAETWAMADHYDALEMIRDETLTCYNGIIGSGCGDCPACDLRAKGLAEYQDNADEIMASYQQKSL

SEQ ID NO: 43218 - protein, 227 aa, unidentified
  source 1..227: note = Vibrio ishigakensis
  REGION 1..227: note = tr|A0A0B8NPC4|A0A0B8NPC4_9VIBR 7-cyano-7-deazaguanine synthase OS=Vibrio ishigakensis; OX = 1481914 GN=queC PE=3 SV=1
MNKAVVIFSGGQDSTTCLVQALEQYDEVHAITFDYGQRHREEIEVAQKLTSKLGVKAHKVMDVTLLNELAVSSLTRDDIPVSHELQENGLPNSFVPGRNILFLTLAGIYAYQVGAKTLITGVCETDFSGYPDCRDEFVKAMNSALAQGMDYDLEVKTPLMWLNKAETWAMADHYKALELVRDESLTCYNGIVGTGCGDCPACLLRANGLQDYLDNKSEVMKSYLAKA

SEQ ID NO: 43219 - protein, 227 aa, unidentified
  source 1..227: note = Vibrio ishigakensis
  REGION 1..227: note = tr|A0A0B8PNZ3|A0A0B8PNZ3_9VIBR 7-cyano-7-deazaguanine synthase OS=Vibrio ishigakensis; OX = 1481914 GN=queC PE=3 SV=1
MNKAVVIFSGGQDSTTCLVQALEQYDEVHAITFDYGQRHREEIEVAQKLTSKLGVKAHKVMDVTLLNELAVSSLTRDDIPVSHEIQENGLPNSFVPGRNILFLTLAGIYAYQVGAKTLITGVCETDFSGYPDCRDEFVKAMNSALAQGMDYDLEVKTPLMWLNKAETWAMADHYKSLELVRDESLTCYNGIVGTGCGDCPACLLRANGLQDYLDNKSEVMESYLAKA

SEQ ID NO: 43220 - protein, 232 aa, unidentified; identical to SEQ ID NO: 43213
  source 1..232: note = Vibrio jasicida
  REGION 1..232: note = tr|A0A2S7VUH0|A0A2S7VUH0_9VIBR 7-cyano-7-deazaguanine synthase OS=Vibrio jasicida; OX = 766224 GN=queC PE=3 SV=1

SEQ ID NO: 43221 - protein, 231 aa, Vibrio kanaloae
  REGION 1..231: note = tr|A0A1E5DR25|A0A1E5DR25_9VIBR 7-cyano-7-deazaguanine synthase OS=Vibrio kanaloae 5S-149; OX = 1191299 GN=queC PE=3 SV=1
MKKAVVVFSGGQDSTTCLVQALKEYDEVHAITFDYGQRHRLEIEVAESLSKELGVKAHKVMDVTLLNELAISSLTRDDIPVSHELQENGLPNSFVPGRNILFLTLAGIYAYQIGAETVITGVCETDFSGYPDCRNDFVKAMNSALVQGMDKKLDIKTPLMWLNKAETWAMADQYSALDLVRNKTLTCYNGIIGDGCGDCPACELRKVGLNDYLADRESIMVELVRKQTEYK

SEQ ID NO: 43222 - protein, 231 aa, Vibrio kanaloae; identical to SEQ ID NO: 43221
  REGION 1..231: note = tr|A0A4U1ZNQ4|A0A4U1ZNQ4_9VIBR 7-cyano-7-deazaguanine synthase OS=Vibrio kanaloae; OX = 170673 GN=queC PE=3 SV=1

SEQ ID NO: 43223 - protein, 231 aa, Vibrio lentus
  REGION 1..231: note = tr|A0A0L1LBQ9|A0A0L1LBQ9_9VIBR 7-cyano-7-deazaguanine synthase OS=Vibrio lentus OX=136468; GN = queC PE=3 SV=1
MKKAVVVFSGGQDSTTCLVQALTEYDEVHAITFDYGQRHKLEIEVAQSLSKELGVKAHKVMDVTLLNELAISSLTRDDIPVSHELQENGLPNSFVPGRNILFLTLAGIYAYQIGSETVITGVCETDFSGYPDCRNDFVKAMNSALVQGMDKKLDIKTPLMWLNKAETWALADQYSALELVRNKTLTCYNGIIGDGCGDCPACELRKAGLNDYLVDRQSIMTELVRKQTEYK

SEQ ID NO: 43224 - protein, 231 aa, Vibrio lentus
  REGION 1..231: note = tr|A0A4U2DXA2|A0A4U2DXA2_9VIBR 7-cyano-7-deazaguanine synthase OS=Vibrio lentus OX=136468; GN = queC PE=3 SV=1
MKKAVVVFSGGQDSTTCLVQALKEYDEVHAITFDYGQRHKLEIEVAESLSKELGVKAHKVMDVTLLNELAISSLTRDDIPVSHELQENGLPNSFVPGRNILFLTLAGIYAYQIGAETVITGVCETDFSGYPDCRNDFVKAMNSALVQGMDKKLDIKTPLMWLNKAETWAMADQYSALELVRNKTLTCYNGIIGDGCGDCPACELRKVGLNDYLGDREGIMAELVRKQAENK

SEQ ID NO: 43225 - protein, 227 aa, Vibrio mangrovi
  REGION 1..227: note = tr|A0A1Y6IQN3|A0A1Y6IQN3_9VIBR 7-cyano-7-deazaguanine synthase OS=Vibrio mangrovi; OX = 474394 GN=queC PE=3 SV=1
MKKAVVVFSGGQDSTTCLVEALQTYDEVHAITFDYGQRHRLEIETAQRLSSLLGVKAHKVMDVGLLNELAISSLTRDDIPVSHELQENGLPNSFVPGRNILFLTLAGIYAYQIGAESVITGVCETDFSGYPDCRHEFIQTMNRALVQGMDRVMTIVTPLMWLNKAETWAMADHYGALKLIREQTLTCYNGVIGDGCGECPSCHLRKAGLDEYLQNRESVLQSYLNKN

SEQ ID NO: 43226 - protein, 228 aa, Vibrio maritimus
  REGION 1..228: note = tr|A0A090TTM4|A0A090TTM4_9VIBR 7-cyano-7-deazaguanine synthase OS=Vibrio maritimus; OX = 990268 GN=queC PE=3 SV=1
MKKAVVVFSGGQDSTTCLVQALKEYDEVHAITFDYGQRHKLEIEVAQALTEKLGVKAHKVMDVGLLNELAISSLTRDDIPVSHELQENGLPNSFVPGRNILFLTLAGIYAYQIGASAVITGVCETDFSGYPDCRNDFIKAMNSALVQGMDRELDIVTPLMWLDKAETWALADKYDALELVRNETLTCYNGIIGDGCGDCPSCELRANGLNHYLDNQQAVMQSLSEKSN

SEQ ID NO: 43227 - protein, 228 aa, Vibrio maritimus
  REGION 1..228: note = tr|A0A090S314|A0A090S314_9VIBR 7-cyano-7-deazaguanine synthase OS=Vibrio maritimus; OX = 990268 GN=queC PE=3 SV=1
MKKAVVVFSGGQDSTTCLVQALEQYDEVHAITFDYGQRHKLEIEVAEAVAKKLGVKAHKVMDVGLLNELAISSLTRDDIPVSHELQENGLPNSFVPGRNILFLTLAGIYAYQIGAQAVITGVCETDFSGYPDCRNDFIKAMNSALVQGMDRELDIVTPLMWLDKAETWALADKYDALELVRNETLTCYNGVIGDGCGDCPSCELRANGLNQYLDNKETVMKSLEDKSN

SEQ ID NO: 43228 - protein, 228 aa, Vibrio mediterranei
  REGION 1..228: note = tr|A0A2S9ZKE1|A0A2S9ZKE1_9VIBR 7-cyano-7-deazaguanine synthase OS=Vibrio mediterranei; OX = 689 GN=queC PE=3 SV=1
MKKAVVVFSGGQDSTTCLVQALEQYDEVHAITFDYGQRHKLEIEVAEALANKLNVKAHKVMDVSLLNELAISSLTRDDIPVSHELQENGLPNSFVPGRNILFLTLAGIYAYQIGAQAVITGVCETDFSGYPDCRNDFIKAMNSALVQGMDREFDIVTPLMWLDKAETWALADKFNALPLIREETLTCYNGVIGDGCGDCPSCDLRANGLNHYLENKSQVMASLNEKSE

SEQ ID NO: 43229 - protein, 228 aa, Vibrio mediterranei
  REGION 1..228: note = tr|A0A2C9PEZ1|A0A2C9PEZ1_9VIBR 7-cyano-7-deazaguanine synthase OS=Vibrio mediterranei; OX = 689 GN=queC PE=3 SV=1
MKKAVVVFSGGQDSTTCLVQALEQYDEVHAITFDYGQRHKLEIEVAEALANKLNVKAHKVMDVSLLNELAISSLTRDDIPVSHELQENGLPNSFVPGRNILFLTLAGIYAYQIGAQAVITGVCETDFSGYPDCRNDFIKAMNSALVQGMDREFDIVTPLMWLDKAETWALADKFNALSLIREETLTCYNGVIGDGCGDCPSCDLRANGLNQYLENKSEVMASLNEKSE

SEQ ID NO: 43230 - protein, 231 aa, unidentified
  source 1..231: note = Vibrio metoecus
  REGION 1..231: note = tr|A0A0Q0JSW1|A0A0Q0JSW1_9VIBR 7-cyano-7-deazaguanine synthase OS=Vibrio metoecus; OX = 1481663 GN=queC PE=3 SV=1
MNKAVVVFSGGQDSTTCLVQALQEFDEVHAITFDYGQRHKLEIEVAQQLAKQLGVTAHKVMDVSLLNELAISSLTRDDIPVSHELQANGLPNSFVPGRNILFLTLAGIYAYQIGAKTVITGVCETDFSGYPDCRNEFVQSMNQSLAKGMDMPLTIRTPLMWLNKAETWALADQLGALELVRQQTLTCYNGLIGDGCGECPACHLRKAGLNDYLDNRSDVLNALMSKQSAAQ

SEQ ID NO: 43231 - protein, 231 aa, unidentified
  source 1..231: note = Vibrio metoecus
  REGION 1..231: note = tr|A0A067BA12|A0A067BA12_9VIBR 7-cyano-7-deazaguanine synthase OS=Vibrio metoecus; OX = 1481663 GN=queC PE=3 SV=1
MNKAVVVFSGGQDSTTCLVQALQEFDEVHAITFDYGQRHKLEIEVAQKLAKQLGVTAHKVMDVSLLNELAISSLTRDDIPVSHELQANGLPNSFVPGRNILFLTLAGIYAYQIGAKTVITGVCETDFSGYPDCRNEFVQSMNQSLAKGMDMPLTIRTPLMWLNKAETWALADQLGALELVRQQTLTCYNGLIGDGCGECPACHLRKAGLNDYLDNRSDVLNALMSKQSVAQ

SEQ ID NO: 43232 - protein, 232 aa, Vibrio metschnikovii
  REGION 1..232: note = tr|C9P4J4|C9P4J4_VIBME 7-cyano-7-deazaguanine synthase OS=Vibrio metschnikovii CIP 69.14 OX=675813; GN = queC PE=3 SV=1
MNKAVVVFSGGQDSTTCLVQALQEFDEVHAITFDYGQRHKLEIEVAQQLALKLGVKAHKVMDVSLLNELAISSLTRDDIPVSHELQANGLPNSFVPGRNILFLTLAGIYAYQIGADTIITGVCETDFSGYPDCRNDFVKAMNHALVQGMDRQLTIRTPLMWLNKAETWALADQYQALDLVRNETLTCYNGMIGDGCGTCPACELRKAGLNQYLQHPQSVSQFLFSKHTIDKG

SEQ ID NO: 43233 - protein, 232 aa, Vibrio metschnikovii; identical to SEQ ID NO: 43232
  REGION 1..232: note = tr|A0A380NVS9|A0A380NVS9_VIBME 7-cyano-7-deazaguanine synthase OS=Vibrio metschnikovii; OX = 28172 GN=queC PE=3 SV=1

SEQ ID NO: 43234 - protein, 231 aa, Vibrio mimicus
  REGION 1..231: note = tr|D2YJD3|D2YJD3_VIBMI 7-cyano-7-deazaguanine synthase OS=Vibrio mimicus VM603 OX=671074 GN=exsB PE=3; SV = 1
MKKAVVVFSGGQDSTTCLVQALKEFDEVHAITFDYGQRHKLEIEVAQKLAKQLGVAAHKVMDVGLLNELAISSLTRDDIPVSHELQANGLPNSFVPGRNILFLTLAGIYAYQIGAATVITGVCETDFSGYPDCRNDFVQAMNQALTKGMDMSLTIRTPLMWLNKAETWALADQLGALDLVRHQTLTCYNGLIGDGCGECPACHLRKSGLNDYLNNRDSVLNALMNKQSVEH

SEQ ID NO: 43235 - protein, 231 aa, Vibrio mimicus
  REGION 1..231: note = tr|A0A5B6XEK5|A0A5B6XEK5_VIBMI 7-cyano-7-deazaguanine synthase OS=Vibrio mimicus OX=674; GN = queC PE=3 SV=1
MKKAVVVFSGGQDSTTCLVQALKEFDEVHAITFDYGQRHKLEIEVAQKLAKQLGVAAHKVMDVGLLNELAISSLTRDDIPVSHDLQANGLPNSFVPGRNILFLTLAGIYAYQIGAATVISGVCETDFSGYPDCRNDFVQAMNQALTKGMDMSLTIRTPLMWLNKAETWALADQLGALDLVRHQTLTCYNGLIGDGCGECPACHLRKAGLNDYLNNRDSVLNALMNKQSVEH

SEQ ID NO: 43236 - protein, 231 aa, Vibrio mytili
  REGION 1..231: note = tr|A0A0C3DJ82|A0A0C3DJ82_9VIBR 7-cyano-7-deazaguanine synthase OS=Vibrio mytili OX=50718; GN = queC PE=3 SV=1
MKKAVVVFSGGQDSTTCLVQALKEFDEVHAITFDYGQRHKLEIEVAQKLTQELGVKAHKVMDVGLLNELAISSLTRDDIPVSHELQENGLPNSFVPGRNILFLTLAGIYAYQIGADTVITGVCETDFSGYPDCRDDFVKAMTSALVKGMDRTLKIKTPLMWLNKAETWALADQYDALQLVREKTLTCYNGIIGDGCGNCPSCDLRKAGLDDYLNNKTAVMASLIQKQKSQG

SEQ ID NO: 43237 - protein, 231 aa, Vibrio natriegens
  REGION 1..231: note = tr|A0A1B1ECG6|A0A1B1ECG6_VIBNA 7-cyano-7-deazaguanine synthase OS=Vibrio natriegens; OX = 691 GN=queC PE=3 SV=1
MKKAVVVFSGGQDSTTCLVQALKEFDEVHAITFDYGQRHKLEIEVAQQVAKDLGVAAHKVMDVGLLNELAISSLTRDDIPVSHELQENGLPNSFVPGRNILFLTLAGIYAYQIGAETVITGVCETDFSGYPDCRDDFVKAMNAALVKGMDRELTIKTPLMWLNKAETWALADQYDALQLVRENTLTCYNGIIGDGCGDCPSCDLRKAGLEDYLNNKDAVMQSLVEKQNSEA

SEQ ID NO: 43238 - protein, 230 aa, Vibrio navarrensis
  REGION 1..230: note = tr|A0A099LSG6|A0A099LSG6_9VIBR 7-cyano-7-deazaguanine synthase OS=Vibrio navarrensis; OX = 29495 GN=queC PE=3 SV=1
MNKAVVVFSGGQDSTTCLVQALNEYDEVHAITFDYGQRHRLEIEVAQQLAADLGVKAHKVMDVTLLNELAISSLTRDDIPVSHELQANGLPNSFVPGRNILFLTLAGIYAYQIGADTVITGVCETDFSGYPDCRDDFVKAMNSALVKGMDKALTIKTPLMWLNKAETWALADQNKALQLVREKTLTCYNGVIGDGCGDCPSCHLRKAGLDDYLNNQPLVMASLLEKQAQA

SEQ ID NO: 43239 - protein, 218 aa, unidentified; identical to SEQ ID NO: 43166
  source 1..218: note = Vibrio neocaledonicus
  REGION 1..218: note = tr|A0A4P8FZU7|A0A4P8FZU7_9VIBR 7-cyano-7-deazaguanine synthase OS=Vibrio neocaledonicus; OX = 1208308 GN=queC PE=3 SV=1

SEQ ID NO: 43240 - protein, 231 aa, Vibrio neptunius
  REGION 1..231: note = tr|A0A0F4P131|A0A0F4P131_9VIBR 7-cyano-7-deazaguanine synthase OS=Vibrio neptunius; OX = 170651 GN=queC PE=3 SV=1
MKKAVVVFSGGQDSTTCLVQALKNFDEVHAITFDYGQRHKLEIEVAQALAKELGVKAHKVMDVGLLNELAISSLTRDDIPVSHELQENGLPNSFVPGRNILFLTLAGIYAYQIGAQTVITGVCETDFSGYPDCRNDFVKAMNSALVQGMDRNLDIVTPLMWLNKAETWALADQYDALQLVREKTLTCYNGIIGDGCGDCPACDLRKTGLNDYIDNRDAVMASLVSKQSSEV

SEQ ID NO: 43241 - protein, 231 aa, Vibrio nereis
  REGION 1..231: note = tr|A0A0M0HU24|A0A0M0HU24_VIBNE 7-cyano-7-deazaguanine synthase OS=Vibrio nereis OX=693; GN = queC PE=3 SV=1
MRKAVVVFSGGQDSTTCLVQALKEFDEVHAITFDYGQRHKLEIEVAQNLAKELGVKAHKVMDVGLLNELAISSLTRDDIPVSHELQENGLPNSFVPGRNILFLTLAGIYAYQIGAQTVITGVCETDFSGYPDCRDSFVKAMNNALVQGMDRELEIATPLMWLNKAETWALADQNEALQLVREKTLTCYNGIIGDGCGDCPSCELRKVGLNDYLSNREAVMSELVRKQSLAK

SEQ ID NO: 43242 - protein, 233 aa, Vibrio nigripulchritudo
  REGION 1..233: note = tr|U4JY90|U4JY90_9VIBR 7-cyano-7-deazaguanine synthase OS=Vibrio nigripulchritudo OX=28173 GN=queC PE=3; SV = 1
MKKAVVVFSGGQDSTTCLVQAIKDFDEVHAITFDYGQRHKLEIEVAEQLAKDLKIAAHKIMDVGLLNELAISSLTRDDIPVSHELQENGLPNSFVPGRNILFLTLAGIYAYQIGAETVITGVCETDFSGYPDCRDEFVKAMNKALVSGMDKALEIKTPLMWLNKAETWALADQYEALDLVRQHTLTCYNGVVGDGCGDCPSCDLRAAGLNEYLDNKDSVMQSLVSKQNGVSHQ

SEQ ID NO: 43243 - protein, 233 aa, Vibrio nigripulchritudo
  REGION 1..233: note = tr|U4E5Q7|U4E5Q7_9VIBR 7-cyano-7-deazaguanine synthase OS=Vibrio nigripulchritudo FTn2 OX=1238441; GN = queC PE=3 SV=1
MKKAVVVFSGGQDSTTCLVQAIKDFDEVHAITFDYGQRHKLEIEVAEQLAKDLKIAAHKVMDVGLLNELAISSLTRDDIPVSHELQENGLPNSFVPGRNILFLTLAGIYAYQIGAETVITGVCETDFSGYPDCRDEFVKAMNTALVSGMDKALEIKTPLMWLNKAETWALADQYEALDLVRQHTLTCYNGVIGDGCGDCPSCDLRAAGLNEYLDNKDSVMQSLVSKQNGVSHQ

SEQ ID NO: 43244 - protein, 232 aa, Vibrio orientalis
  REGION 1..232: note = tr|C9QHW9|C9QHW9_VIBOR 7-cyano-7-deazaguanine synthase OS=Vibrio orientalis CIP 102891 = ATCC 33934; OX = 675816 GN=queC PE=3 SV=1
MKKAVVVFSGGQDSTTCLVQALKEFDEVHAITFDYGQRHKLEIEVAQSLAKELGVAAHKVMDVGLLNELAISSLTRDDIPVSHELQENGLPNSFVPGRNILFLTLAGIYAYQIGAQSVITGVCETDFSGYPDCRNDFVKAMNRALVQGMDRDLEIATPLMWLDKAETWALADQYDALQLVREKTLTCYNGIIGDGCGDCPSCDLRKVGLNSYLDNREQIMAELVRKQKQADK

SEQ ID NO: 43245 - protein, 232 aa, Vibrio owensii
  REGION 1..232: note = tr|A0A0C1ZG02|A0A0C1ZG02_9VIBR 7-cyano-7-deazaguanine synthase OS=Vibrio owensii CAIM 1854 = LMG 25443 OX=1229493 GN=queC PE=3 SV=1
MKKAVVVFSGGQDSTTCLVQALKEFDEVHAITFDYGQRHKLEIEVAEKVAKDLGVAAHKVMDVGLLNELAISSLTRDDIPVSHELQENGLPNSFVPGRNILFLTLAGIYAYQIGAETVITGVCETDFSGYPDCRDDFVKAMNSALVKGMDRQFEIKTPLMWLNKAETWALADQYDALQLVRENTLTCYNGIIGDGCGDCPSCDLRKAGLDDYLNNKDAVMQSLIQKQKTEDQ

SEQ ID NO: 43246 - protein, 223 aa, Vibrio owensii
  REGION 1..223: note = tr|A0A3G2PUQ1|A0A3G2PUQ1_9VIBR 7-cyano-7-deazaguanine synthase OS=Vibrio owensii; OX = 696485 GN=queC PE=3 SV=1
MKKAVVVFSGGQDSTTCLVQALTQYDEVHAITFDYGQRHKLEIEVAQSLCQELGVTAHKVMDVSLLNELAISSLTRDDIPVSHELQANGLPNSFVPGRNILFLTLAGIYAYQIGALSVITGVCETDFSGYPDCRNSFVQAMENALQQGMEYDLSLVTPLMWLDKAQTWALADKYEHLDLVKNKTLTCYNGVIGSGCGDCPSCKLRGEGLRAYEKSKEHYLGSL

SEQ ID NO: 43247 - protein, 227 aa, unidentified
  source 1..227: note = Vibrio palustris
  REGION 1..227: note = tr|A0A1R4B2B3|A0A1R4B2B3_9VIBR 7-cyano-7-deazaguanine synthase OS=Vibrio palustris; OX = 1918946 GN=queC PE=3 SV=1
MKKAVVVFSGGQDSTTCLVQALQEFDEVHAITFDYGQRHKLEIEVAQSLGTKLGITAHKVMDVGLLNELAVSSLTRDDIAVSNELQENGLPNSFVPGRNILFLTLAGIYAYQIGANTVITGVCETDFSGYPDCRNDFVKAMNTALVQGMDKELDIRTPLMWLNKAQTWALADQQGALELVRHQTLTCYNGIIGDGCGECPACQLRQAGLNEYLDNQDEIMKELVAKQ

SEQ ID NO: 43248 - protein, 232 aa, unidentified
  source 1..232: note = Vibrio panuliri
  REGION 1..232: note = tr|A0A1Q9HFD8|A0A1Q9HFD8_9VIBR 7-cyano-7-deazaguanine synthase OS=Vibrio panuliri; OX = 1381081 GN=queC PE=3 SV=1
MNKAVVVFSGGQDSTTCLVKALSEYDEVHAITFDYGQRHKLEIEVAQQLAQELGVKAHKVMDVSLLNELAISSLTRDDIAVSHELQENGLPNSFVPGRNILFLTLAGIYAYQVGAETIITGVCETDFSGYPDCRDEFVKAMNQSLVVGMDKPLFIQTPLMWLNKAETWALADQYDALDLVREKTLTCYNGIIGDGCGDCPSCDLRKTGLTDYLNNQQSVMAELIRKQATPDR

SEQ ID NO: 43249 - protein, 197 aa, unidentified
  source 1..197: note = Vibrio panuliri
  REGION 1..197: note = tr|A0A1Q9HP67|A0A1Q9HP67_9VIBR 7-cyano-7-deazaguanine synthase OS=Vibrio panuliri; OX = 1381081 GN=BIY22_15090 PE=3 SV=1
MSSVLLLSGGLDSIALAAWKNPEYGLTINYGQIAAEAEIKAATQVCSLLGIKHAVIDMDLSILGSGLMHGDGARSHSENAEFWPYRNQLLITIASMFALKHGCKDVLIGTVVTDQRHLDGSEKFLDYINKLVAYQEGAVSVSAPAKSLTTADLINKSKVPFEVLSWGHSCHTSNLACGQCPGCIKHSEVMLELGVER

SEQ ID NO: 43250 - protein, 232 aa, Vibrio parahaemolyticus
  REGION 1..232: note = sp|Q87P80|QUEC_VIBPA 7-cyano-7-deazaguanine synthase; OS = Vibrio parahaemolyticus serotype O3:K6 (strain RIMD 2210633) OX=223926 GN=queC PE=3 SV=1
MKKAVVVFSGGQDSTTCLVQALKEFDEVHAITFDYGQRHKLEIEVAQKIAKDLGVKAHKVMDVGLLNELAISSLTRDDIPVSHELQENGLPNSFVPGRNILFLTLAGIYAYQIGADTVITGVCETDFSGYPDCRDDFVKSMNTALVKGMDRALTIKTPLMWLNKAETWALADQYNALQLVRENTLTCYNGIIGDGCGDCPSCDLRKAGLDEYLNNKDAVMKSLVQKQESEGL

SEQ ID NO: 43251 - protein, 232 aa, Vibrio parahaemolyticus; identical to SEQ ID NO: 43250
  REGION 1..232: note = tr|A0A072FSU0|A0A072FSU0_VIBPH 7-cyano-7-deazaguanine synthase OS=Vibrio parahaemolyticus; OX = 670 GN=queC PE=3 SV=1

SEQ ID NO: 43252 - protein, 227 aa, Vibrio pectenicida
  REGION 1..227: note = tr|A0A427TZS6|A0A427TZS6_9VIBR 7-cyano-7-deazaguanine synthase OS=Vibrio pectenicida; OX = 62763 GN=queC PE=3 SV=1
MKKAVVVFSGGQDSTTCLVQALNDFDEVHAITFDYGQRHRLEIEVAQNLAKDLGVAAHKVMDVGLLNELAISSLTRDDIPVSHELQDNGLPNSFVPGRNILFLTLAGIYAYQIGATTIITGVCETDFSGYPDCRDSFVKSMNTALVQGMEYQLEISTPLMWLNKAETWALADQYQALSLVKYKTLTCYNGVIGDGCGDCPACGLRKAGLEDYLNNREAVITSLVSKQ

SEQ ID NO: 43253 - protein, 233 aa, Vibrio penaeicida
  REGION 1..233: note = tr|A0A3S0MRP7|A0A3S0MRP7_9VIBR 7-cyano-7-deazaguanine synthase OS=Vibrio penaeicida; OX = 104609 GN=queC PE=3 SV=1
MKKAVVVFSGGQDSTTCLVQAIEEFDEVHAITFDYGQRHKLEIEVAEKLASDLNIAAHKVMDVGLLNELAISSLTRDDIPVSHELQDNGLPNSFVPGRNILFLTLAGIYAYQIGAETVITGVCETDFSGYPDCRDEFVKAMNKALVSGMDKTLDIKTPLMWLNKAETWALADQYKALELVRSQTLTCYNGIIGDGCGDCPSCDLRSAGLNEYLDNQESVMQSLVSKQGEERCQ

SEQ ID NO: 43254 - protein, 232 aa, Vibrio ponticus
  REGION 1..232: note = tr|A0A3N3DWG1|A0A3N3DWG1_9VIBR 7-cyano-7-deazaguanine synthase OS=Vibrio ponticus; OX = 265668 GN=queC PE=3 SV=1
MNKAVVVFSGGQDSTTCLVQALKQYDEVHAITFDYGQRHKLEIEVASQLVKDLGVAAHKVMDVTLLNELAISSLTRDDIAVSHELQDNGLPNSFVPGRNILFLTLAGIYAYQVGAQTIITGVCETDFSGYPDCRDEFVKAMNDALVKGMDKNITIKTPLMWLNKAETWALAEQYQALELVRNHTLTCYNGIIGDGCGDCPSCDLRKTGLNDYLSNKESVDAELTRKQANPSK

SEQ ID NO: 43255 - protein, 231 aa, Vibrio ponticus
  REGION 1..231: note = tr|A0A090P365|A0A090P365_9VIBR 7-cyano-7-deazaguanine synthase OS=Vibrio ponticus; OX = 265668 GN=queC PE=3 SV=1
MNKAVVVFSGGQDSTTCLVKALTEYDEVHAITFDYGQRHKLEIEVAQQLAIELGVKAHKVMDVSLLNELAISSLTRDDIAVSHELQENGLPNSFVPGRNILFLTLAGIYAYQIGATAIITGVCETDFSGYPDCRDQFVKAMNGALNQGMDKQFSIETPLMWLNKAQTWALADHYNALSLVREKTLTCYNGIIGDGCGDCPSCDLRKKGLDEYLSNQSEVKAELLTKMSADK

SEQ ID NO: 43256 - protein, 230 aa, Vibrio proteolyticus
  REGION 1..230: note = tr|U3A2P7|U3A2P7_VIBPR 7-cyano-7-deazaguanine synthase OS=Vibrio proteolyticus NBRC 13287 OX=1219065; GN = queC PE=3 SV=1
MKKVVVVFSGGQDSTTCLVQALKEFDEVHAITFDYGQRHKLEIEVAQKLASELGVKAHKVMDVGLLNELAISSLTRDDIPVSHELQENGLPNSFVPGRNILFLTLAGIYAYQIGADCVITGVCETDFSGYPDCRDEFVKSMNDALVKGMDRQLMIRTPLMWLNKAETWALADQYDALSLIREKTLTCYNGIIGDGCGDCPSCDLRRVGLNDYLDNRETVMTELVRKQQAN

SEQ ID NO: 43257 - protein, 226 aa, unidentified
  source 1..226: note = Vibrio qinghaiensis
  REGION 1..226: note = tr|A0A223MXG6|A0A223MXG6_9VIBR 7-cyano-7-deazaguanine synthase OS=Vibrio qinghaiensis; OX = 2025808 GN=queC PE=3 SV=1
MKKAVVVFSGGQDSTTCLVQALKEFDEVHAITFDYGQRHKLEIEVAIALAKKLGVAAHKVMDVSLLNELAISSLTRDDIPVSHELQENGLPNSFVPGRNILFLTLAGIYAYQIGADEVITGVCETDFSGYPDCRNDFVKAMNSALVQGMDRPFHISTPLMWLNKAETWALADEYGALDLIRHETLTCYNGIIGDGCGGCPSCELRKAGLNDYLSSKESIMNALYNK

SEQ ID NO: 43258 - protein, 231 aa, unidentified
  source 1..231: note = Vibrio quintilis
  REGION 1..231: note = tr|A0A1M7Z248|A0A1M7Z248_9VIBR 7-cyano-7-deazaguanine synthase OS=Vibrio quintilis; OX = 1117707 GN=queC PE=3 SV=1
MTKAVVVFSGGQDSTTCLVEALQNYDEVHAITFDYGQRHRQEIEVAQALAKKLKVTAHKIIDASVLNELAISSLTRDDIPVSNELQENGLPNSFVPGRNILFLTLAGIYAYQIGASAIITGVCETDFSGYPDCRNDFVKAMNHALVQGMERDLLVVTPLMWLDKAETWAMADHYGALSLVRENTLTCYNGIVGDGCGECPSCQLRKAGLDTYNGNKAEILKSYLDKQRSVV

SEQ ID NO: 43259 - protein, 218 aa, unidentified
  source 1..218: note = Vibrio renipiscarius
  REGION 1..218: note = tr|A0A0C2K1L2|A0A0C2K1L2_9VIBR 7-cyano-7-deazaguanine synthase OS=Vibrio renipiscarius; OX = 1461322 GN=queC PE=3 SV=1
MTTTKALVVFSGGQDSTTCLIDALNTYDEVHAITFDYGQRHSNEIEVALEIGKELNVKSHKVLDVTAINELAISSLTRDNIPVSNELNDNDLPNTFVPGRNIVFLTYACIHAYQLGIKDIITGVCETDFSGYPDCRDNFIRALNLACNLGMDNNVNIKTPLMWLNKAETWGLADKHNMLEYVQNKTLTCYNGILGKGCGECPACLLRQNGLDEYFASK

SEQ ID NO: 43260 - protein, 232 aa, Vibrio rotiferianus
  REGION 1..232: note = tr|A0A510I4Y0|A0A510I4Y0_9VIBR 7-cyano-7-deazaguanine synthase OS=Vibrio rotiferianus; OX = 190895 GN=queC PE=3 SV=1
MKKAVVVFSGGQDSTTCLVQALKEFDEVHAITFDYGQRHKLEIEVAEKVAKDLGVAAHKVMDVGLLNELAISSLTRDDIPVSHDLQENGLPNSFVPGRNILFLTLAGIYAYQIGAETVITGVCETDFSGYPDCRDDFVKAMNSALVKGMDRQFEIKTPLMWLNKAETWALADQYDALQLVRENTLTCYNGIIGDGCGDCPSCDLRKAGLDDYLNNKEAVMHSLVEKQKVEGQ

SEQ ID NO: 43261 - protein, 232 aa, Vibrio rotiferianus
  REGION 1..232: note = tr|A0A2K7SYS0|A0A2K7SYS0_9VIBR 7-cyano-7-deazaguanine synthase OS=Vibrio rotiferianus; OX = 190895 GN=queC PE=3 SV=1
MKKAVVVFSGGQDSTTCLVQALKEFDEVHAITFDYGQRHKLEIEVAEKVAKDLGVAAHKVMDVGLLNELAISSLTRDDIPVSHDLQENGLPNSFVPGRNILFLTLAGIYAYQIGAETVITGVCETDFSGYPDCRDDFVKAMNSALVKGMERQFQIKTPLMWLNKAETWALADQYDALQLVRENTLTCYNGIIGDGCGDCPSCDLRKAGLDDYLNNKEAVMHSLVEKQKVEGQ

SEQ ID NO: 43262 - protein, 233 aa, Vibrio ruber
  REGION 1..233: note = tr|A0A1R4LPI9|A0A1R4LPI9_9VIBR 7-cyano-7-deazaguanine synthase OS=Vibrio ruber DSM 16370; OX = 1123498 GN=queC PE=3 SV=1
MKKAVVVFSGGQDSTTCLVEALQTYDEVHAITFDYGQRHRLEIETARQLAEQLGVKSHKVMDVGLLNELAISSLTRDDIPVSHALQDNGLPNSFVPGRNILFLTLAGIYAYQIGAESVITGVCETDFSGYPDCRNEFIQTMNRALVQGMDREMKIVTPLMWLNKAETWAMADHYDALTLVRSQTLTCYNGVIGDGCGECPSCHLRQAGLDEYLNHRDTVQQSYLDKRVAQTHQ

SEQ ID NO: 43263 - protein, 237 aa, Vibrio rumoiensis
  REGION 1..237: note = tr|A0A1E5E1K0|A0A1E5E1K0_9VIBR 7-cyano-7-deazaguanine synthase OS=Vibrio rumoiensis 1S-45; OX = 1188252 GN=queC PE=3 SV=1
MEKGKSMTSKAVVVFSGGQDSTTCLVQALKQYDEVHTITFDYGQRHKLEIEIAEKLCRQLGVSAHKVMDVGLLNELAISSLTRDDIPVSHELQENGLPNSFVPGRNILFLTLAGIYAYQIGADSVITGVCETDFSGYPDCRDQFVKAINNALVLGMDRQFKIETPLMWLNKAETWALADQHDALELIRNDTLTCYNGIIGDGCGDCPSCDLRRDGLMDYLNNREVIMNELKQKQQVS

SEQ ID NO: 43264 - protein, 228 aa, Vibrio sagamiensis; identical to SEQ ID NO: 43164
  REGION 1..228: note = tr|A0A511QDU2|A0A511QDU2_9VIBR 7-cyano-7-deazaguanine synthase OS=Vibrio sagamiensis NBRC 104589 OX=1219064 GN=queC PE=3 SV=1

SEQ ID NO: 43265 - protein, 231 aa, Vibrio scophthalmi
  REGION 1..231: note = tr|F9RRP7|F9RRP7_9VIBR 7-cyano-7-deazaguanine synthase OS=Vibrio scophthalmi LMG 19158 OX=870967 GN=queC; PE = 3 SV=1
MKKAVVVFSGGQDSTTCLVQALKEYDEVHAITFDYGQRHKLEIEVAQQLAIELGVAAHKVMDVGLLNELAISSLTRDDIPVSHELQENGLPNSFVPGRNILFLTLAGIYAYQIGAQSVITGVCETDFSGYPDCRDEFVKAMNSALVKGMDRQFTIKTPLMWLNKAETWALADQYDALCLIQEKTLTCYNGIIGSGCGDCPACELRKVGLNQYLEDKQTIMQQLVQKQATDS

SEQ ID NO: 43266 - protein, 231 aa, Vibrio scophthalmi
  REGION 1..231: note = tr|A0A1B1NP94|A0A1B1NP94_9VIBR 7-cyano-7-deazaguanine synthase OS=Vibrio scophthalmi; OX = 45658 GN=queC PE=3 SV=1
MKKAVVVYSGGQDSTTCLVQALKEYDEVHAITFDYGQRHKLEIEVAQQLAIELGVAAHKVMDVGLLNELAISSLTRDDIPVSHELQENGLPNSFVPGRNILFLTLAGIYAYQIGAQSVITGVCETDFSGYPDCRDEFVKAMNSALVKGMDRQFTIKTPLMWLNKAETWALADQYDALCLIQEKTLTCYNGIIGSGCGDCPACELRKVGLNQYLEDKQTIMQQLVQKQATDS

SEQ ID NO: 43267 - protein, 228 aa, Vibrio shilonii
  REGION 1..228: note = tr|A6D5M7|A6D5M7_9VIBR 7-cyano-7-deazaguanine synthase OS=Vibrio shilonii AK1 OX=391591 GN=queC PE=3 SV=1
MKKAVVVFSGGQDSTTCLVQALEQYDEVHAITFDYGQRHKLEIEVAEALANKLNVKAHKVMDVSLLNELAISSLTRDDIPVSHELQENGLPNSFVPGRNILFLTLAGIYAYQIGAQAVITGVCETDFSGYPDCRNDFIKALNSALVQGMDREFDIVTPLMWLDKAETWALADKFNALSLIREETLTCYNGVIGDGCGDCPSCDLRANGLNHYLENKSEVMASLNEKSE

SEQ ID NO: 43268 - protein, 235 aa, Vibrio sinaloensis
  REGION 1..235: note = tr|E8M5V5|E8M5V5_9VIBR 7-cyano-7-deazaguanine synthase OS=Vibrio sinaloensis DSM 21326 OX=945550 GN=queC; PE = 3 SV=1
MRKAVVVFSGGQDSTTCLVQALKEYDEVHAITFDYGQRHKLEIEVAQSLAKELGVKAHKVMDVGLLNELAISSLTRDDIPVSHELQDNGLPNSFVPGRNILFLTLAGIYAYQIGAQAVITGVCETDFSGYPDCRDEFVKSINRSLVLGMDRQFEIETPLMWLNKAETWALADQYDALQLVREKTLTCYNGIIGDGCGDCPSCELRKVGLSDYLSNRETVMSELVRKQSLANKSVR

SEQ ID NO: 43269 - protein, 235 aa, Vibrio sinaloensis
  REGION 1..235: note = tr|A0A0A5JI84|A0A0A5JI84_9VIBR 7-cyano-7-deazaguanine synthase OS=Vibrio sinaloensis; OX = 379097 GN=queC PE=3 SV=1
MKKAVVVFSGGQDSTTCLVKALKEFDEVHAITFDYGQRHKLEIEVAEQLATKLGVKAHKVMDVGLLNELAISSLTRDDIPVSHELQDNGLPNSFVPGRNILFLTLAGIYAYQIGADAVITGVCETDFSGYPDCRDEFVRSMNNSLVLGMDRTFTIETPLMWLNKAETWALADQYDSLQLVRESTLTCYNGIVGDGCGDCPSCDLRKTGLNDYLSNKEAIMSELVRKQNSQDKSAH

SEQ ID NO: 43270 - protein, 237 aa, Vibrio sp.
  REGION 1..237: note = tr|A0A2T1JDM3|A0A2T1JDM3_9VIBR 7-cyano-7-deazaguanine synthase OS=Vibrio sp. V02_P2A34T13; OX = 1982231 GN=queC PE=3 SV=1
MPEERKMKKAVVVFSGGQDSTTCLVQALKEFDEVHAITFDYGQRHKLEIEVASTLAKKLGVAAHKVMDVSLLNELAISSLTRDDIPVSHELQENGLPNSFVPGRNILFLTLAGIYAYQIGADEVITGVCETDFSGYPDCRNDFVKAMNSALVQGMDRPFNIRTPLMWLNKAETWALADQHDALELIRHETLTCYNGIIGDGCGDCPSCELRKAGLNDYLVNKALVMNALHQKQTVTL

SEQ ID NO: 43271 - protein, 215 aa, Vibrio sp.
  REGION 1..215: note = tr|A0A084TA26|A0A084TA26_9VIBR ATP_bind_3 domain-containing protein OS=Vibrio sp. ER1A OX=1517681; GN = HW45_09135 PE=4 SV=1
MASIAFYSGGLDSTAMLYLLSQTDEEIIAHHVYFETDTERDKLEMQAVEKIQKYFGDRFKWESSSISLMGAPLLKQSRDVIWFSIIGAVYTAYENVDNIYFGFEHQAADVYYKQWLQTAEDLCNGVLEKALPLSCKGDLVNEDPDKIKPYKIISPVAGLSKADEYNLLPEELKKVVWSCRNPQRLKSGVITHCGTCEPCSEYTRHNLPFNSTRLS

SEQ ID NO: 43272 - protein, 233 aa, unidentified
  source 1..233: note = Vibrio spartinae
  REGION 1..233: note = tr|A0A1N6M3Q9|A0A1N6M3Q9_9VIBR 7-cyano-7-deazaguanine synthase OS=Vibrio spartinae; OX = 1918945 GN=queC PE=3 SV=1
MKKAVVVFSGGQDSTTCLVEALQTYDEVHAITFDYGQRHRLEIETARQLATQLGVKAHKVMDVGLLNELAISSLTRDDIPVSHELQDNGLPNSFVPGRNILFLTLAGIYAYQIGAESVITGVCETDFSGYPDCRNEFIQTMNQALVQGMDRKMNIVTPLMWLNKAETWAMADDYDALALVRNQTLTCYNGVIGDGCGECPSCHLRQAGLDEYLNNRDAIQQAYLDKRATQTHS

SEQ ID NO: 43273 - protein, 231 aa, Vibrio splendidus
  REGION 1..231: note = tr|A0A0P6Z5A6|A0A0P6Z5A6_VIBSP 7-cyano-7-deazaguanine synthase OS=Vibrio splendidus; OX = 29497 GN=queC PE=3 SV=1
MKKAVVVFSGGQDSTTCLVQALKEYDEVHAITFDYGQRHRLEIEVAESLSKELGVKAHKVMDVTLLNELAISSLTRDDIPVSHELQENGLPNSFVPGRNILFLTLAGIYAYQIGANTVITGVCETDFSGYPDCRNDFVKAMNSALVQGMDKPLDIKTPLMWLNKAETWALADQYSALELVRNKTLTCYNGIIGDGCGDCPACELRKVGLNDYLGDREGIMAELVRKQTENK

SEQ ID NO: 43274 - protein, 231 aa, Vibrio splendidus
  REGION 1..231: note = tr|A0A2N7DYU1|A0A2N7DYU1_VIBSP 7-cyano-7-deazaguanine synthase OS=Vibrio splendidus; OX = 29497 GN=queC PE=3 SV=1
MKKAVVVFSGGQDSTTCLVQALKEYDEVHAITFDYGQRHRLEIEVAESLSKELGVKAHKVMDVTLLNELAISSLTRDDIPVSHELQENGLPNSFVPGRNILFLTLAGIYAYQIGANTVITGVCETDFSGYPDCRNDFVKAMNSALVQGMDKPLDIKTPLMWLNKAETWALADQYSALELVRNKTLTCYNGIVGDGCGDCPACELRKVGLNDYLGDREGIMAELVRKQTENK

SEQ ID NO: 43275 - protein, 227 aa, Vibrio superstes
  REGION 1..227: note = tr|A0A511QLC3|A0A511QLC3_9VIBR 7-cyano-7-deazaguanine synthase OS=Vibrio superstes NBRC 103154 OX=1219062 GN=queC PE=3 SV=1
MNKAVVIFSGGQDSTTCLVQALTQFDEVHAITYDYGQRHRQEIEIAQTLAKKLGVKAHKVMDVTLLNELAVSSLTRDDIPVSHELGENGLPNSFVPGRNILFLTLAGIYAYQVGAKTLITGVCETDFSGYPDCRDEFVKSMNSSLALGMDYKLEIKTPLMWLNKAETWAMADHYQALELVRDESLTCYNGIVGSGCGDCPACVLRANGLQDYLDDKTKVMEDYLSKV

SEQ ID NO: 43276 - protein, 230 aa, Vibrio tapetis
  REGION 1..230: note = tr|A0A2N8ZA20|A0A2N8ZA20_9VIBR 7-cyano-7-deazaguanine synthase OS=Vibrio tapetis subsp. tapetis OX=1671868 GN=queC PE=3 SV=1
MKKAVVVFSGGQDSTTCLVQALKEYDEVHAITFDYGQRHKLEIEVAQSLAIELGVKAHKVMDVSLLNELAVSSLTRDDIPVSHELQENGLPNSFVPGRNILFLTLAGIYAYQIGAQSVITGVCETDFSGYPDCRDEFVKAMNTALVQGMDRPFDILTPLMWLNKAETWAMADQYQSLSLVRDKTLTCYNGIIGDGCGDCPSCDLRKAGLEDYLNDRESIMQALVEKQRRA

SEQ ID NO: 43277 - protein, 197 aa, Vibrio tasmaniensis
  REGION 1..197: note = tr|B7VNE1|B7VNE1_VIBTL 7-cyano-7-deazaguanine synthase OS=Vibrio tasmaniensis (strain LGP32) OX=575788; GN = queC PE=3 SV=1
MKKAVVVFSGGQDSTTCLVQALKEYDEVHAITFDYGQRHRLEIEVAESLSKELGVKAHKVMDVTLLNELAISSLTRDDIPVSHELQENGLPNSFVPGRNILFLTLAGIYAYQIGANTVITGVCETDFSGYPDCRNDFVKAMNSALVQGMDKPLDIKTPLMWLNKAETWALADQYSALELVRNKTLTCYNGIIGSATC

SEQ ID NO: 43278 - protein, 218 aa, Vibrio tasmaniensis
  REGION 1..218: note = tr|B7VNE2|B7VNE2_VIBTL 7-cyano-7-deazaguanine synthase OS=Vibrio tasmaniensis (strain LGP32) OX=575788; GN = queC PE=3 SV=1
MQQSKALVVFSGGQDSTTCLIDALNTYDEVHAITFDYGQRHSNEIDVAVSIGKELNVKSHKVLDVTAINELAISSLTRDNIPVSNELSNNDLPNTFVPGRNIVFLTYACIHAYQLGIKDIVTGVCETDFSGYPDCRDTFIRALNLSCNLGMDNAFNIKTPLMWLNKAETWELADKHNKLEYVEKNTLTCYNGILGKGCGECPACLLRQNGLKEYLASK

SEQ ID NO: 43279 - protein, 228 aa, unidentified
  source 1..228: note = Vibrio thalassae
  REGION 1..228: note = tr|A0A240EN10|A0A240EN10_9VIBR 7-cyano-7-deazaguanine synthase OS=Vibrio thalassae; OX = 1243014 GN=queC PE=3 SV=1
MKKAVVVFSGGQDSTTCLVQALKQYDEVHAITFDYGQRHKLEIEVAEALAKKLNVKAHKVMDVSLLNELAISSLTRDDIPVSHELQENGLPNSFVPGRNILFLTLAGIYAYQIGATAVITGVCETDFSGYPDCRNDFIKAMNSALTQGMDREFEIVTPLMWLDKAETWALADKFDALQLIREETLTCYNGIIGDGCGDCPSCDLRANGLNHYLENKSDVMRSLNEKSE

SEQ ID NO: 43280 - protein, 231 aa, unidentified
  source 1..231: note = Vibrio toranzoniae
  REGION 1..231: note = tr|A0A120DH24|A0A120DH24_9VIBR 7-cyano-7-deazaguanine synthase OS=Vibrio toranzoniae; OX = 1194427 GN=queC PE=3 SV=1
MKKAVVVFSGGQDSTTCLVQALKEYDEVHAITFDYGQRHRLEIEVAESLSKELGVKAHKVMDVTLLNELAISSLTRDDIPVSHELQENGLPNSFVPGRNILFLTLAGIYAYQIDAETVITGVCETDFSGYPDCRNDFVKAMNSALVQGMDKQLDIKTPLMWLNKAETWAMADQYSALDLVRNKTLTCYNGIIGDGCGDCPACELRKVGLNDYLGDRESIMAELVRKQTEYK

SEQ ID NO: 43281 - protein, 232 aa, Vibrio tubiashii
  REGION 1..232: note = tr|F9T269|F9T269_9VIBR 7-cyano-7-deazaguanine synthase OS=Vibrio tubiashii ATCC 19109 OX=1051646 GN=queC; PE = 3 SV=1
MKKAVVVFSGGQDSTTCLVQAIKDFDEVHAITFDYGQRHKLEIEVAQSLAKELSVKAHKVMDVGLLNELAISSLTRDDIPVSHELQENGLPNSFVPGRNILFLTLAGIYAYQIGAQTVITGVCETDFSGYPDCRNDFVKAMNNALVQGMDRQLEISTPLMWLNKAETWALADQYDALQLVREKTLTCYNGVIGDGCGDCPSCELRKVGLNDYLSERKAIMAELVRKQNSADK

SEQ ID NO: 43282 - protein, 232 aa, Vibrio tubiashii
  REGION 1..232: note = tr|A0A0A5IA61|A0A0A5IA61_9VIBR 7-cyano-7-deazaguanine synthase OS=Vibrio tubiashii; OX = 29498 GN=queC PE=3 SV=1
MRKAVVVFSGGQDSTTCLVQAIKEFDEVHAITFDYGQRHKLEIEVAQNLAQELGVKAHKVMNVGLLNELAISSLTRDDIPVSHELQENGLPNSFVPGRNILFLTLAGIYAYQIGAQNVITGVCETDFSGYPDCRDEFVKSMNDALVKGMDRQLEISTPLMWLNKAETWALADQYGALQLVREKTLTCYNGIIGDGCGDCPSCELRKVGLNDYLSEREAVMAELVRKQSSVGK

SEQ ID NO: 43283 - protein, 203 aa, Vibrio variabilis
  REGION 1..203: note = tr|A0A090T332|A0A090T332_9VIBR 7-cyano-7-deazaguanine synthase OS=Vibrio variabilis; OX = 990271 GN=queC PE=3 SV=1
MKKAVVVFSGGQDSTTCLVQALEQYDEVHAITFDYGQRHKLEIEVAEAVAKKLGVKAHKVMDVGLLNELAISSLTRDDIPVSHELQENGLPNSFVPGRNILFLTLAGIYAYQIGAQAVITGVCETDFSGYPDCRNDFIKAMNSALVQGMDRELDIVTPLMWLDKAETWALADKYDALELVRNETLTCYNGVIGDGCGDCHHVS

SEQ ID NO: 43284 - protein, 231 aa, Vibrio vulnificus
  REGION 1..231: note = tr|A0A2S3R899|A0A2S3R899_VIBVL 7-cyano-7-deazaguanine synthase OS=Vibrio vulnificus; OX = 672 GN=queC PE=3 SV=1
MNKAVVVFSGGQDSTTCLVKALNEFDEVHAITFDYGQRHRLEIEVAQNLAKKLGVAAHKVMDVTLLNELAISSLTRDDIPVSHELQENGLPNSFVPGRNILFLTLAGIYAYQIGAQTIITGVCETDFSGYPDCRDDFVKAMNSALVKGMDKPLVIQTPLMWLNKAETWALADQNNALQLVREKTLTCYNGIIGDGCGDCPSCHLRKVGLNDYLDNREAIMASLVEKQHAES

SEQ ID NO: 43285 - protein, 231 aa, Vibrio vulnificus
  REGION 1..231: note = sp|Q8D985|QUEC_VIBVU 7-cyano-7-deazaguanine synthase; OS = Vibrio vulnificus (strain CMCP6) OX=216895 GN=queC PE=3; SV = 1
MNKAVVVFSGGQDSTTCLVKALNEFDEVHAITFDYGQRHRLEIEVAQNLAKELGVAAHKVMDVTLLNELAISSLTRDDIPVSHELQENGLPNSFVPGRNILFLTLAGIYAYQIGAQTIITGVCETDFSGYPDCRDDFVKAMNSALVKGMDKPLVIQTPLMWLNKTETWALADQNNALQLVREKTLTCYNGIIGDGCGDCPSCHLRKVGLNDYLDNREAIMASLVEKQHAES

SEQ ID NO: 43286 - protein, 230 aa, unidentified
  source 1..230: note = Vibrio xiamenensis
  REGION 1..230: note = tr|A0A1G7YFX1|A0A1G7YFX1_9VIBR 7-cyano-7-deazaguanine synthase OS=Vibrio xiamenensis; OX = 861298 GN=queC PE=3 SV=1
MKKAVVVFSGGQDSTTCLVQAMQEYDEVHAITFDYGQRHKLEIEVAEQLAKQLGVKAHKVMDVGLLNELAISSLTRDDIPVSHELQENGLPNSFVPGRNILFLTLAGIYAYQIGAQTVITGVCETDFSGYPDCRDEFVKAMNRALVQGMDRELEIKTPLMWLNKAQTWALADQYQALDLVRNHTLTCYNGVIGDGCGDCPSCDLRRAGLNDYLDNREAVMAQLTAKQKSA

SEQ ID NO: 43287 - protein, 240 aa, unidentified
  source 1..240: note = Vibrio xiamenensis
  REGION 1..240: note = tr|A0A1G8FRI6|A0A1G8FRI6_9VIBR 7-cyano-7-deazaguanine synthase (Queuosine biosynthesis); OS = Vibrio xiamenensis OX=861298 GN=SAMN04488136_1329 PE=4; SV = 1
MNNESSNECVNVLWTGGWDSSFRVIQAVKQGNIVQPYYVIDTSRQSSLKEIKQMQKIRAALSAKYSNGTVNEIKYINIDSLVAEPKYKQAHSRLLKQNFMGTQYIWLSALSKQISNLELCIHRDDKAEFFVNKLEAQRANNPDGARDSDEELIFGSLKYPILNYTKVDMAEECKKDGDLDILNMSWFCFSPINDTPCGLCNPCKYSLEEGMQNRFTTRGKLYSKAPVVFGTVRKIARRFF

SEQ ID NO: 43288 - protein, 232 aa, unidentified
  source 1..232: note = Vibrionales bacterium
  REGION 1..232: note = tr|A0A366XHA9|A0A366XHA9_9GAMM 7-cyano-7-deazaguanine synthase OS=Vibrionales bacterium C3R12 OX=2267228 GN=queC PE=3 SV=1
MKKAVVVFSGGQDSTTCLVQALKEFDEVHAITFDYGQRHKLEIEVAQNLASELGVTAHKVMDVGLLNELAISSLTRDDIEVSHELQDNGLPNSFVPGRNILFLTLAGIYAYQIGAQSVITGVCETDFSGYPDCRDEFVKSMNTALVQGMDRQFEILTPLMWLNKAETWALADQYDALELVRSKTLTCYNGIIGDGCGDCPSCELRKIGLNDYQANSQTVMSELKNKQRLANQ

SEQ ID NO: 43289 - protein, 86 aa, unidentified
  source 1..86: note = Vibrionales bacterium
  REGION 1..86: note = tr|A5L8U1|A5L8U1_VIBBS 7-cyano-7-deazaguanine synthase (Fragment) OS=Vibrionales bacterium (strain SWAT-3) OX=391574 GN=VSWAT3_24264 PE=3 SV=1
MKKAVVVFSGGQDSTTCLVQALKEYDEVHAITFDYGQRHKLEIEVAESLAKELGVKAHKVMDVTLLNELAISSLTRDDIPVSHELQ

SEQ ID NO: 43290 - protein, 228 aa, unidentified
  source 1..228: note = Victivallales bacterium
  REGION 1..228: note = tr|A0A2S0L1Y9|A0A2S0L1Y9_9BACT 7-cyano-7-deazaguanine synthase OS=Victivallales bacterium CCUG 44730 OX=2094242 GN=queC PE=3 SV=1
MKMKKAVVLLSGGLDSATVLAIAKSENFECYALSFDYGQRHFCELEAAEKVAKQLGAAKHNTVKIDLRLWGGSALTDDALEVPEASASPGVPITYVPARNLIFLSFATAWAEVLGARDIFIGVNSVDYSGYPDCRPAFIESFRETARLGTCAVDEGWSYRINAPLQNLSKAQIIETGTRLGVDYALTTSCYNPDSEGRSCGKCDSCALRIAGFREAGVPDPTRYSGAE

SEQ ID NO: 43291 - protein, 225 aa, Victivallis vadensis
  REGION 1..225: note = tr|A0A2U1B4I9|A0A2U1B4I9_9BACT 7-cyano-7-deazaguanine synthase OS=Victivallis vadensis; OX = 172901 GN=queC PE=3 SV=1
MNKRAVILLSGGLDSATVLAIAGSEGFDCYTMSFDYGQRHRCELEAAGRIAAALGAVKHNTVKIDLRQWGGSALTDDALAVPDAEDSHGIPITYVPARNLIFLSFATAWAEVLGARDIFIGVNSVDYSGYPDCRPKFIESFQETARLGTCAVDEGWHYSINAPLQNLSKAEIIRRGVALGVDYGLTTSCYNPDSEGRSCGKCASCSLRIAGFREAGVPDPTRYHR

SEQ ID NO: 43292 - protein, 163 aa, Virgibacillus dokdonensis
  REGION 1..163: note = tr|A0A2K9IWK6|A0A2K9IWK6_9BACI 7-cyano-7-deazaguanine synthase OS=Virgibacillus dokdonensis OX=302167 GN=A21D_00723 PE=3 SV=1
MDFVDSFKDLYMNDDDPIHIFRKGESVITFIKSFGAGIGLSLAASYAAEIDAKHLFYGVHKDDKVFNENNREFFTLMSKAISIEIGTEFNVHTPFLEKSKAEVLKLGYDLGMPAEETWSCASNSSIHCGWCDPCQDRINAFRKTNLNDTTLYENSLVKSSSNA

SEQ ID NO: 43293 - protein, 220 aa, unidentified
  source 1..220: note = Virgibacillus massiliensis
  REGION 1..220: note = tr|A0A024QD99|A0A024QD99_9BACI 7-cyano-7-deazaguanine synthase OS=Virgibacillus massiliensis OX=1462526 GN=queC PE=3 SV=1
MNNQKAVVVFSGGQDSTTCLFWALREFEHVEAVTFQYGQRHLEELHVAKNICDQLKVTHHELDMNLLNQLAPNALTRKDIAITEGDDGLPSTFVPGRNLLFLSFAAILAKQINAKHVVTGVCETDFSGYPDCRDIFTKSLNVTLNLAMDDQFVIHTPLMWLDKAGVWELSDQLGAFSFVKNNTLTCYNGLKGSGCGECPACQLRQTGLEKYEANRKKVRT

SEQ ID NO: 43294 - protein, 247 aa, Virgibacillus necropolis
  REGION 1..247: note = tr|A0A221M9C9|A0A221M9C9_9BACI Uncharacterized protein OS=Virgibacillus necropolis OX=163877; GN = CFK40_04020 PE=4 SV=1
MINKILWTGGWDSTYRLLDLVLNKKKVVQPYYVFDTERKSTGMEIKTMENIKALIYKMDPTSKNRVLDTVTIDLANIPKNEKITSNFKKILTHSFIGSQHDWLARYVDSLGINDLELGVHLDDNLQRIIEKEVVKVEEIDDSFYKVKSNPSDDNLKIFSYYNFPLLDMTKLDMERKSKESGFGHIMEVTWFCHWPFNDKPCGMCNPCKYTRQEGLGRRVSNVTLLMLLNRKINSKYSGLKKRLNFLR

SEQ ID NO: 43295 - protein, 221 aa, Virgibacillus necropolis
  REGION 1..221: note = tr|A0A221MA59|A0A221MA59_9BACI 7-cyano-7-deazaguanine synthase OS=Virgibacillus necropolis OX=163877 GN=queC PE=3 SV=1
MKMSKKAVVVFSGGQDSTTCLFWALEQFEEVEAVTFQYGQRHIAELDCAKEICQKLGVLHHELDMSLLNQLAPNALTRDDIAITEDEGELPSTFVPGRNLLFLSFAGVLAKQIGAKHLITGVSEADYSGYPDCRDGFMKSLNVTLNLSMDDTFVIHTPLMWLDKSQVWELSDKLNAFEFVKTHTLTCYNGVKGSGCGDCPACILRQRGLENYKKKKEGEVV

SEQ ID NO: 43296 - protein, 220 aa, unidentified
  source 1..220: note = Virgibacillus phasianinus
  REGION 1..220: note = tr|A0A220U3N9|A0A220U3N9_9BACI 7-cyano-7-deazaguanine synthase OS=Virgibacillus phasianinus OX=2017483 GN=queC PE=3 SV=1
MNKKAVVVFSGGQDSTTCMFWALKKFDQVEAVTFQYGQRHIAELDCAREICQTLGVPHHELDMSLLNQLAPNALTRNDIEITESEGELPNTFVPGRNLLFLSFAGVLAKQIGAQHLITGVSEADFSGYPDCRDGFMKSLNVTLNLSMDDTFVIHTPLMWLDKSEVWELSDQLDAFEFVKQHTLTCYNGVKGSGCGECPSCVLRQRGLEQYEQKKEAGEVI

SEQ ID NO: 43297 - protein, 219 aa, unidentified
  source 1..219: note = Virgibacillus profundi
  REGION 1..219: note = tr|A0A2A2I7U9|A0A2A2I7U9_9BACI 7-cyano-7-deazaguanine synthase OS=Virgibacillus profundi; OX = 2024555 GN=queC PE=3 SV=1
MENEKAIVVFSGGQDSTTCLFWAKEQFKAVETVTFDYGQKHKLEIECAKEIAEDLGVKHHILDMSLLHQLAPNALTREAIEVVDGDGTELPNTFVPGRNLLFLSFAGVLAKQVGAKHLVTGVSETDFSGYPDCRDSFIKSLNVTLNLAMDEEFIINTPLMRLDKREVWALSDELGVMNLIREKTLTCYNGIKADGCGECPACKLRNNGLEQYLRNKGEE

SEQ ID NO: 43298 - protein, 221 aa, Virgibacillus soli
  REGION 1..221: note = tr|A0A0Q9XYQ9|A0A0Q9XYQ9_9BACI 7-cyano-7-deazaguanine synthase OS=Virgibacillus soli; OX = 480284 GN=queC PE=3 SV=1
MDDRKAVVVFSGGQDSTTCLFWALEKFEHVEAVTFQYGQRHIAELECAREICMKLNVHHHELDMTLLNQLAPNALTRADMEIKEGDNELPSTFVPGRNLLFLSFAAVLAKQINAKHLITGVSETDFSGYPDCRDGFIKSLNVTLNLSMDETFVIHTPLMWRDKSDVWALSDQLGAFDFVKEHTLTCYNGIKASGCGECPACQLRNRGLEQYEELRQGGTIK

SEQ ID NO: 43299 - protein, 219 aa, Virgibacillus sp.
  REGION 1..219: note = tr|A0A268I0E1|A0A268I0E1_9BACI 7-cyano-7-deazaguanine synthase OS=Virgibacillus sp. 7505; OX = 2022548 GN=queC PE=3 SV=1
MKKGKAIVVFSGGQDSTTCLFWAMEQFEEVEAVTFNYNQRHSLEIEVAEQIAKEQGIRHHVLDMSLLNQLAPNALTRDDIEIEQQEGELPSTFVPGRNLVFLSFAAILAHQVGAKHLVTGVCETDFSGYPDCRDIFVKSLNVSLNLSMDKDFVIHTPLMWLDKAETWELADQLGQLDYVKEKTLTCYNGIIAEGCGECPACKLRQNGLDQYEAKKAEQV

SEQ ID NO: 43300 - protein, 232 aa, unidentified
  source 1..232: note = Vitiosangium sp.
  REGION 1..232: note = tr|A0A2T4VR61|A0A2T4VR61_9DELT 7-cyano-7-deazaguanine synthase OS=Vitiosangium sp. GDMCC 1.1324 OX=2138576 GN=queC PE=3 SV=1
MSATKRAVVLLSGGLDSTTCLAMAKADGFEPVCLAVSYGQRHAVELERARRVTQAMGVKDFRVVTVDLRQVGGSALTADIDVPKDRPENEMSHGIPITYVPARNALFLSLALGLAEVVGASDIYIGVNAVDYSGYPDCRPEFIRAFEQMATLATKAGVEGTRFKVHAPLSGMSKADIIREGVRLGVDYSMTHSCYDPDAEGRACGRCDSCVLRRRGFEQAGVADPTTYVKGA

SEQ ID NO: 43301 - protein, 237 aa, Vitreoscilla filiformis
  REGION 1..237: note = tr|A0A221KBX6|A0A221KBX6_VITFI 7-cyano-7-deazaguanine synthase OS=Vitreoscilla filiformis; OX = 63 GN=queC PE=3 SV=1
MSVSPRGALVLFSGGQDSTACLAWALERFSRVETLGFDYGQRHRIELDCRLTVRTELARQFPAWAARLGEDHLLDLSVLGQISDCALTAERAIEMQANGLPNTFVPGRNLLFLTFAATLAYRRGLSVLVGGMCETDYSGYPDCRDNTLKALQVALSLGLDGPMTVETPLMFLDKADTWALTQQLGGEALNRLIVEHTHTCYLGERGTLHPWGHGCGHCPACELRAKGWDAWQQRCRP

SEQ ID NO: 43302 - protein, 230 aa, Vogesella indigofera
  REGION 1..230: note = tr|A0A495B5B4|A0A495B5B4_VOGIN 7-cyano-7-deazaguanine synthase OS=Vogesella indigofera; OX = 45465 GN=queC PE=3 SV=1
MNKTSKALVVLSGGQDSTTCLFWALREFGAANVEAVTFDYGQRHRIELDAARKVAELAGVRQTLLPIDTFAAIGGNALTDDSIAPEQGARDDGDSTIPNTFVPGRNLIFLSFAAAFAYGRGIEHVVTGVAQTDYSGYPDCRENTLKALELALRLGMDSRVTLHTPLMFMSKAETVQLAQEVGAMDAMAWSHTCYNGAVPPCGHCAACELRAKGFAEAGVADPLVVRCGGH

SEQ ID NO: 43303 - protein, 231 aa, Vogesella sp.
  REGION 1..231: note = tr|A0A1C6MHP2|A0A1C6MHP2_9NEIS 7-cyano-7-deazaguanine synthase OS=Vogesella sp. LIG4; OX = 1192162 GN=queC PE=3 SV=1
MPNNTRKALVVLSGGQDSTTCLYWALREFGAANVEAVTFDYGQRHRVELDAARKVAAMAGVRQTVLPIDTFAAIGGNALTDDAITPEAGARDDGDAALPNTFVPGRNLVFLSFAAAFAYTRGIEHVVTGVAQTDYSGYPDCRENTLKALELTLRLGMDSRVTLHTPLMFMSKAETVHLAQQVGAMEALAWSHTCYNGEVPPCGHCASCELRAKGFDEAGVIDPLLLRSQGA

SEQ ID NO: 43304 - protein, 230 aa, Vogesella sp.
  REGION 1..230: note = tr|A0A0J5GIE0|A0A0J5GIE0_9NEIS 7-cyano-7-deazaguanine synthase OS=Vogesella sp. EB; OX = 1526735 GN=queC PE=3 SV=1
MNKTSKALVVLSGGQDSTTCLFWALREFGAANVEAVTFDYGQRHRIELDAARKVAELAGVRQTLLPIDTFAAIGGNALTDAGITPEQGARDDGDSTIPNTFVPGRNLIFLSFAAAFAYGRGIEHVVTGVAQTDYSGYPDCRENTLKALELALRLGMDSRVTLHTPLMFMSKAETVQLAQEVGAMDAMAWSHTCYNGAVPPCGHCAACELRAKGFLEAGVADPLVVRCGGH

SEQ ID NO: 43305 - protein, 228 aa, Volucribacter psittacicida
  REGION 1..228: note = tr|A0A4R1FUI6|A0A4R1FUI6_9PAST 7-cyano-7-deazaguanine synthase OS=Volucribacter psittacicida OX=203482 GN=queC PE=3 SV=1
MNNLATNNPKGIVIFSGGQDSTTCLLQAIQHYGVENVETISFQYGQRHHIELEKAKWIAQDLKVKQTILDLSVMQSITHNALMDSQQTIAQAKGELPNTFVDGRNALFLLYTAIYAKGQGIKDIITGVCETDFSGYPDCRDVFIKSMNITLNLAMDYQFNIITPLMYLTKAQTWQLADELGYLDYVRQHTHTCYQGVQGGCGQCPSCQLREKGLQQYLQQKQGGNNGI

SEQ ID NO: 43306 - protein, 219 aa, Vulcanibacillus modesticaldus
  REGION 1..219: note = tr|A0A1D2YW51|A0A1D2YW51_9BACI 7-cyano-7-deazaguanine synthase OS=Vulcanibacillus modesticaldus OX=337097 GN=queC PE=3 SV=1
MNRDKAVVVFSGGQDSTTCLFWAKQRYKEVIAISFDYNQKHKLELECAKDICKKHGIEHHILDLNLLNQLAPNSLTRVDIEVDKEAPKDRLPNSFVDGRNMLFLTFAAVFAKQRGINQIITGVSQSDYSGYPDCRDVFIKSLNVTLNLAMDYQFEIHTPLMWINKEETWKMAYDLGVLDIIKNETLTCYNGIKGDGCGECPACKLRNKGYQDFEKKYLK

SEQ ID NO: 43307 - protein, 227 aa, unidentified
  source 1..227: note = Vulcaniibacterium tengchongense
  REGION 1..227: note = tr|A0A3N4V912|A0A3N4V912_9GAMM 7-cyano-7-deazaguanine synthase OS=Vulcaniibacterium tengchongense OX=1273429 GN=queC PE=3 SV=1
MKKAVVLVSGGMDSAVVLAIARAQGFATHALSVRYGQRHTSELEAAARVARALGAAAHKVVDVDLRSIGGSALTDDAIAVPTGDAGATAAGAIPSTYVPARNTIMLSLALGWAEVLGAADIFCGVNAVDYSGYPDCRPEFVAAFERLANLATKAGVEGAGIRVHAPLQYLSKADIVREGLRLGVDFAETVSCYQADAQGRACGRCDACRLRAQGFAAAGAADPTRYA

SEQ ID NO: 43308 - protein, 231 aa, unidentified
  source 1..231: note = Vulgatibacter incomptus
  REGION 1..231: note = tr|A0A0K1PF64|A0A0K1PF64_9DELT 7-cyano-7-deazaguanine synthase OS=Vulgatibacter incomptus; OX = 1391653 GN=queC PE=3 SV=1
MKRGVVLLSGGLDSTTCLAIATRRDGLEAHCLSFDYGQRHRQEIEHAATVAAALGAASHRVARMDLSEVSRSALLDRTIEVPKDREPGRIGDDLPSTYVPARNTIFLAVALGMAETLGAEAIYLGVNALDYSGYPDCRPAFVKAFADLARAACEDRAPRIESPLLYLTKAEIIRLGSSLGVDYSITHSCYDPSAEGWACGRCDACLLRSRGFAEAGVPDPTRYTLGEAGRA

SEQ ID NO: 43309 - protein, 212 aa, Waddlia chondrophila
  REGION 1..212: note = tr|D6YWT9|D6YWT9_WADCW 7-cyano-7-deazaguanine synthase OS=Waddlia chondrophila (strain ATCC VR-1470 / WSU 86-1044) OX=716544 GN=queC1 PE=3 SV=1
MKAIVLLSGGIDSTVVLAMAQSLGRECTALSFDYGQRHKVELEHAAHIAHYYKVPQIIINISPACFENTALVNALNVPKNRTLDEISKGGIPSTYVPARNTLFLAYAAGQAEIMNAEEIHCGPNLLDRNCYPDCRPEFYSAFQQVLASATKQGAEGNPPRIVTPLINWDKNRIVQEGRKLGAPLDTTFSCYSPSAGKACGMCDACILRQEAL

SEQ ID NO: 43310 - protein, 228 aa, Waddlia chondrophila
  REGION 1..228: note = tr|F8LBP9|F8LBP9_9BACT 7-cyano-7-deazaguanine synthase OS=Waddlia chondrophila 2032/99 OX=765953 GN=queC; PE = 3 SV=1
MRCKQALVVHSGGMDSSLCLKLAIDRHGVDQVLSISFRYGQRHSNELVQAAKICRDWGVDHCVIQLDCLQEITDNALMNTEIAIEHSQGRPPNTLVLGRNGLMARLAAIHANHLGAEKIYMGVIEVEGANSGYRDCSRNYMNLMEKILRIDLDNPRFEIVTPIVQMTKCQTMALADQLGVLDYLLKETITCYEGIGGRGCQQCPACKLRNEGVDRYKRLSIGYVLTKN

SEQ ID NO: 43311 - protein, 211 aa, unidentified
  source 1..211: note = Waddliaceae bacterium
  REGION 1..211: note = tr|A0A2E3LW96|A0A2E3LW96_9BACT 7-cyano-7-deazaguanine synthase OS=Waddliaceae bacterium; OX = 2026802 GN=queC PE=3 SV=1
MDSSICLALAIKKYSADEVLSLSFRYGQRHSPELIQAKKISEEWNVDHIELSIDCLQEITDNALMNTDMVIDYTEQVPNTLVLGRNGLMARIAAIHAHSLGAKKIALGVMGLEEANSGYRDCSRRYMNLMEEILRIDLDDESFEVLTPLVDMTKAETMKLADELGVLDYLLENTITCYEGLPKEGCKVCPACKLRNEGILEYRQTQYATSL

SEQ ID NO: 43312 - protein, 224 aa, unidentified
  source 1..224: note = Waddliaceae bacterium
  REGION 1..224: note = tr|A0A2E3LZG9|A0A2E3LZG9_9BACT 7-cyano-7-deazaguanine synthase OS=Waddliaceae bacterium; OX = 2026802 GN=queC PE=3 SV=1
MKAIVLLSGGLDSCVVLALAKEQSRDCHALTFDYGQRHHIELERAKALCEHYQVPQTIIHIDHTAFSKSSLVHDGKVPRNRTVLEDAKKSIPNTYVPARNTIFLAHAVGLAEQLDAGEIHVGINCMDAQPYPDCRPAYLQAMQNTMNLCTKQACEDKGPRLVTPLLHKTKVEIIQAGLHLNAPLDITSSCYDPMPGGEACGECLACRLRDQAFMEMQQLASTHP

SEQ ID NO: 43313 - protein, 226 aa, unidentified
  source 1..226: note = Wenzhouxiangella marina
  REGION 1..226: note = tr|A0A0K0XT00|A0A0K0XT00_9GAMM 7-cyano-7-deazaguanine synthase OS=Wenzhouxiangella marina; OX = 1579979 GN=queC PE=3 SV=1
MAKESIERAVVLLSGGLDSATVLAMARDQGFECHTLSVDYGQRHRSELEASRRLSESLGARSHRVVSVDLRAIGGSALTDDIDVPTEMGEGIPVTYVPARNTLMLALALGHAEVQAARHLFIGVNAVDYSGYPDCRPQFIAAFEDLCSLATKAGDEGQRFEIHTPLIHLSKAEIIRQGTALGVNYADTISCYQADEQGRACGVCDSCRLRKAGFEDAGIKDPTRYV

SEQ ID NO: 43314 - protein, 228 aa, unidentified
  source 1..228: note = Wenzhouxiangella sediminis
  REGION 1..228: note = tr|A0A3E1K9C9|A0A3E1K9C9_9GAMM 7-cyano-7-deazaguanine synthase OS=Wenzhouxiangella sediminis OX=1792836 GN=queC PE=3 SV=1
MSESVRKAVVLVSGGLDSATVLAEAVAAGYECHTLAVDYGQRHRAELAAARRVSEGLGAASHRVVGVDLRAIGGSALTDDIDVPEEETPGIPATYVPARNTLMLSLALGHAEVLGSLDLFVGVNAVDYSGYPDCRPQFVVAFEALCQVATKVGVEGGRFRVHAPLISLSKADIVRRGTALGVDYSRTVSCYQADEDGRACGRCDSCRLRRAGFEAAGLADPTRYAPDA

SEQ ID NO: 43315 - protein, 228 aa, unidentified
  source 1..228: note = Wenzhouxiangella sp.
  REGION 1..228: note = tr|A0A372BYC9|A0A372BYC9_9GAMM 7-cyano-7-deazaguanine synthase OS=Wenzhouxiangella sp. 15181 OX=2301224 GN=queC PE=3 SV=1
MSSGNRKGVVLLSGGLDSATVLAEAVAAGYECHSLAVDYGQRHRAELDAAQQISRVQGAASHRVVSVDLRAIGGSALTDDIDVPETESSGIPVTYVPARNTLMLSLALGLAEVIEARDLFVGVNAVDYSGYPDCRAQFIVAFEALCQVATRAGVDGERFRVHAPLISLSKADIIRRGVSLGVDYSMTVSCYQADSDGLACGRCDSCRLRRAGFESAGVSDPTRYVMHD

SEQ ID NO: 43316 - protein, 227 aa, unidentified; identical to SEQ ID NO: 39588
  source 1..227: note = Westiellopsis prolifica
  REGION 1..227: note = tr|A0A4Q9J9P1|A0A4Q9J9P1_9CYAN 7-cyano-7-deazaguanine synthase OS=Westiellopsis prolifica IICB1 OX=1970206 GN=queC PE=3 SV=1

SEQ ID NO: 43317 - protein, 380 aa, Winogradskyella sp.
  REGION 1..380: note = tr|A0A1Y0MH77|A0A1Y0MH77_9FLAO ExsB family protein; OS = Winogradskyella sp. PC-19 OX=754417 GN=BTO05_08535 PE=4; SV = 1
MNLEENKQNICSRCVMDGSDPEITYNSQGVCNHCERYDSLVQTRTFSGDVAKTELSKVIASIKASGKNKEYDCIIGVSGGVDSTYVAYRIKEMGLNPLAIHFDNGWNSELAVSNIEKTLDKLDIDLHTYVIDWDVFSDLQKAFLNASTPDGEIPTDHAINALLFKEASKRGIKYIISGMNFATESMAVRMWSYGHSDWTYIKDVYKKFGNGQSLKPYPHFSFFDLFNWTFLKRIKVVSILNYMDYNKDEAMEVLKNELDWVYYGGKHYESVYTRFYQGYILPKKFNIDKRRGHVSDLIRAGQLTRKEALKELEKETYPSAEMLNHDMDFVHKKFDYTEKEFNQIMKQPTKSFLEFKNKASKVDKIKLVLNFLRKKGILSK

SEQ ID NO: 43318 - protein, 225 aa, unidentified
  source 1..225: note = Woeseia oceani
  REGION 1..225: note = tr|A0A193LL21|A0A193LL21_9GAMM 7-cyano-7-deazaguanine synthase OS=Woeseia oceani; OX = 1548547 GN=queC PE=3 SV=1
MENEFKREHALVVLSGGQDSTTCLYWALARFGEVQCISFDYGQRHRIELQCAERIAARAGVPQVLIPMNTLAALGGNSLTDSSIAVGAEAEPETGLPNSFVPGRNLLFLTAAAAFAWQRGIHHLVTGVAQTDYSGYPDCREETIAALQSALRLGMETEVTIHTPLMHLSKKETVLLARDEGALEAMADTHTCYNGVRPPCGECPACILRARGFAEAGIADPLVAS

SEQ ID NO: 43319 - protein, 230 aa, unidentified
  source 1..230: note = Woeseiaceae bacterium
  REGION 1..230: note = tr|A0A2D9M1W7|A0A2D9M1W7_9GAMM 7-cyano-7-deazaguanine synthase OS=Woeseiaceae bacterium; OX = 2026806 GN=CMP01_03010 PE=3 SV=1
  VARIANT 23: note = Xaa can be any naturally occurring amino acid
  VARIANT 100: note = Xaa can be any naturally occurring amino acid
  VARIANT 122: note = Xaa can be any naturally occurring amino acid
  VARIANT 145: note = Xaa can be any naturally occurring amino acid
  VARIANT 159: note = Xaa can be any naturally occurring amino acid
MLIEQTKDGQATAILCSAGLDSXVLLAAEARSRFVQPVYVAAGLAWESDELLALNQLLETQAFLTNVGRPVRLEATVHDVYPPSHWAIKGQAPAYDTPDXDVYLVGRNAILLSKVAVFCCQXGIGRIAIGSLANNPFPDGTPEFXEAMANALSLGLAHXLSIVAPLTKHHKADVIALGIELKVPLELTLSCMQPENGLHCGLCSKCRERRDAFNEAGVPDLTDYKMPSPR

SEQ ID NO: 43320 - protein, 267 aa, unidentified
  source 1..267: note = Woeseiaceae bacterium
  REGION 1..267: note = tr|A0A2D9M288|A0A2D9M288_9GAMM 7-cyano-7-deazaguanine synthase OS=Woeseiaceae bacterium; OX = 2026806 GN=CMP01_03700 PE=3 SV=1
  VARIANT 204..205: note = Xaa can be any naturally occurring amino acid
  VARIANT 208: note = Xaa can be any naturally occurring amino acid
  VARIANT 225: note = Xaa can be any naturally occurring amino acid
  VARIANT 228: note = Xaa can be any naturally occurring amino acid
  VARIANT 232: note = Xaa can be any naturally occurring amino acid
  VARIANT 252: note = Xaa can be any naturally occurring amino acid
MIIQNKASSCQVEEFDLLPSMLMVQLSTRGKPAMRRAILCSGGLDSAVLVASELEETRGLYGEKAYIQPIYVSSGFSWETGERAQVIKLIQSKQLAGLIEPLACLECPVSDTYPSKHWALNGNPPAYDTPDEDVYLVGRNILLLAKVSTYCAINQIERIAIGPLAGNPFPDATPQFFASMQQALSQGLDHELEIVAPFSELSKXXVIXRGHSLGVPFELTVSCMXPLXTKHXGRCSKCRERLLAFGASGITXPASYDFKPSDIIRGL

SEQ ID NO: 43321 - protein, 220 aa, Wohlfahrtiimonas chitiniclastica
  REGION 1..220: note = tr|A0A162VSP1|A0A162VSP1_9GAMM 7-cyano-7-deazaguanine synthase OS=Wohlfahrtiimonas chitiniclastica OX=400946 GN=queC PE=3 SV=1
MNKDRAIVVFSGGQDSTTCLFWAQKQFKEVIALTFDYGQRHSNEVQHAKAIAEMLGVQWLSIELDLFQKLTKNALTSPDVAIEMAEGELPSTFVPGRNHLFFSIAAMVAYQKDAKHIVVGVSETDFSGYPDCRDQFVKSLNVTLDLAMEAPFEIHTPLMWRDKAAVWALSDELGAFEFVRDHTLTCYEGIPAAGCGKCPACILRQNGLETYLAEKAKGEA

SEQ ID NO: 43322 - protein, 220 aa, Wohlfahrtiimonas chitiniclastica
  REGION 1..220: note = tr|L8XVE1|L8XVE1_9GAMM 7-cyano-7-deazaguanine synthase OS=Wohlfahrtiimonas chitiniclastica SH04; OX = 1261130 GN=queC PE=3 SV=1
MNKDRAIVVFSGGQDSTTCLFWAQKQFKEVIALTFDYGQRHSNEVQHAKAIAEMLGVQWLSIELDLFQKLTKNALTSPDVAIEMAEGELPSTFVPGRNHLFFSIAAMVAYQKDAKHIVVGVSETDFSGYPDCRDQFVKSLNVTLDLAMEAPFEIHTPLMWRDKAAVWALSDELGVFEFVRDHTLTCYEGIPAAGCGKCPACILRQNGLETYLAEKAKGAA

SEQ ID NO: 43323 - protein, 222 aa, Wohlfahrtiimonas sp.
  REGION 1..222: note = tr|A0A256C5P1|A0A256C5P1_9GAMM 7-cyano-7-deazaguanine synthase OS=Wohlfahrtiimonas sp. G9077 OX=1980118 GN=queC PE=3 SV=1
MIVNKDRAIVVFSGGQDSTTCLFWAQKQFKEVIALTFDYGQRHSNEVQHAKAIADKLGVEWLSIELDLFQKLTKNALTSPDVAIEMAEGELPSTFVPGRNHLFFSIAAMVAYQRDAKHIVVGVSETDFSGYPDCRDQFVKSLNVTLDLAMEAPFEIHTPLMWRDKAAVWALSDELGAFEFVRDHTLTCYEGIPAAGCGKCPACILRQNGLETYLADKANKEA

SEQ ID NO: 43324 - protein, 233 aa, Wolinella succinogenes; identical to SEQ ID NO: 38710
  REGION 1..233: note = sp|Q7M8H4|QUEC_WOLSU 7-cyano-7-deazaguanine synthase; OS = Wolinella succinogenes (strain ATCC 29543 / DSM 1740 / LMG 7466 / NCTC 11488 / FDC 602W) OX=273121 GN=queC PE =3; SV = 1

SEQ ID NO: 43325 - protein, 249 aa, Xanthobacter autotrophicus
  REGION 1..249: note = tr|A7IGH6|A7IGH6_XANP2 7-cyano-7-deazaguanine synthase OS=Xanthobacter autotrophicus (strain ATCC BAA-1158 / Py2) OX=78245 GN=queC PE=3 SV=1
MTEAQAHAEEGALVLFSGGQDSATCLAYALERFGRVETLGFHYGQRHAVELERRPVLRDAFATLKPAWASRLGADHMLDMPVLGQISETALTRDVAVEMAEGGLPNTFVPGRNLVFLTFAAALAYRRGLRHIIGGMCETDFSGYPDCRDDTVKAMQVALNLGMEKRFVLHTPLMWIDKAETWGLAERLGGTALVDLIVEDAHTCYLGERGKRHAWGYGCGECPACKLRADGFARYRAGQGVERRAAATK

SEQ ID NO: 43326 - protein, 243 aa, Xanthobacter tagetidis
  REGION 1..243: note = tr|A0A3L7A7S4|A0A3L7A7S4_9RHIZ 7-cyano-7-deazaguanine synthase OS=Xanthobacter tagetidis; OX = 60216 GN=queC PE=3 SV=1
MRASGIAGEGALVLFSGGQDSTTCLAYALERFGRVETLGFDYGQRHRVELERRPVLRDALAGLKPGWAERLGADHTLDLSVLGALSETALTRNVAIEMEDGGLPNTFVPGRNIVFLTFAAALAYRRGLRHIVGGMCETDFSGYPDCRDDTIKALQVALNLGMDRRLVLHTPLMFIDKAETWALAERLGGPPLVDTIVEETHTCYLGERGTRRDWGYGCGACPACALRADGFARYRNTLRSAPR

SEQ ID NO: 43327 - protein, 248 aa, unidentified
  source 1..248: note = Xanthobacteraceae bacterium
  REGION 1..248: note = tr|A0A521W1E7|A0A521W1E7_9RHIZ 7-cyano-7-deazaguanine synthase OS=Xanthobacteraceae bacterium OX=2021379 GN=queC PE=3 SV=1
MAQGGIDEAEDNGALVLFSGGQDSATCLAWALARFSRVETVGFAYGQRHAVELDCRADLVRGLTALRPDWALGLGEAHTLDVGVIGALSDTALTREREIELGEGGLPNTFVPGRNLIFVVLAAALAYRRGLKHIVAGMCETDYSGYPDCRDDTLKALQVAINLGMDRRFVLHTPLMWRDKAATWRLAQELGGVDLVKLIREHSHTCYLGERGQWHEWGYGCGTCPACRLRADGWTRYAAASSTGEPAA

SEQ ID NO: 43328 - protein, 232 aa, unidentified
  source 1..232: note = Xanthomonadaceae bacterium
  REGION 1..232: note = tr|A0A2M9ECW2|A0A2M9ECW2_9GAMM 7-cyano-7-deazaguanine synthase OS=Xanthomonadaceae bacterium NML95-0200 OX=2032577 GN=queC PE=3 SV=1
MSQTAKKRAVVLVSGGMDSAVVAAIARAQGFEVYALSVAYGQRHESELAAAARVAAMTAAVAHKTVNIDLRSIGGSALTDDISVPTDQDGHQIGQDIPSTYVPARNTIMLSVALGWAEVLDARDIFCGVNAVDYSGYPDCRPAFIEAFEHLANLATKAGVEGSGFRIHAPLMAMGKGEIVQRGVALGVDFSQTVSCYQADSDGRACGHCDACVLRAQGFKDAKILDNTRYVV

SEQ ID NO: 43329 - protein, 232 aa, unidentified; identical to SEQ ID NO: 43328
  source 1..232: note = Xanthomonadaceae bacterium
  REGION 1..232: note = tr|A0A2M9ENF5|A0A2M9ENF5_9GAMM 7-cyano-7-deazaguanine synthase OS=Xanthomonadaceae bacterium NML07-0707 OX=2032574 GN=queC PE=3 SV=1

SEQ ID NO: 43330 - protein, 224 aa, unidentified
  source 1..224: note = Xanthomonadales bacterium
  REGION 1..224: note = tr|A0A1G3ZXD5|A0A1G3ZXD5_9GAMM 7-cyano-7-deazaguanine synthase OS=Xanthomonadales bacterium GWF1_69_6 OX=1802654 GN=queC PE=3 SV=1
MKKAVVLVSGGMDSAVVLALAREQGFACHALSVSYGQRHTSELAAAAELAVVQGAVEHKVVTVDLRSIGGSALTADIDVPEAAGQGIPVTYVPARNTIMLSIALGWAEVLGADDLFCGVNAVDYSGYPDCRPEFIAAFERLANLATKAGVEGHSLRVHAPLMRLGKADIAREGARLGVDFSRTVSCYQADAEGRACGRCDACRLRAEGFAAAGLADPTRYAPRG

SEQ ID NO: 43331 - protein, 226 aa, unidentified
  source 1..226: note = Xanthomonadales bacterium
  REGION 1..226: note = tr|A0A1Q4FNY5|A0A1Q4FNY5_9GAMM 7-cyano-7-deazaguanine synthase OS=Xanthomonadales bacterium 63-13 OX=1895867 GN=queC PE=3 SV=1
MNRESGKLAVVLVSGGMDSAVTLAIARERGFAIHALSVAYGQRHGSELVAAARIATTLGALVHKTVSVDLRSIGGSALTADIEVPEQGGEGIPLTYVPARNTIMLSIALGWAEVLGANDIFCGVNAVDYSGYPDCRPAFIESFERLANLATRSGVEGAGIRVHAPLMNLSKADIAREGVRLGIDFSATVSCYSADAEGRACGHCDACRLRAEGFAAAGIPDPTRYR

SEQ ID NO: 43332 - protein, 941 aa, Xanthomonas albilineans
  REGION 1..941: note = tr|D2UDP3|D2UDP3_XANAP Amino acid adenylationalbicidin synthetase protein OS=Xanthomonas albilineans (strain GPE PC73 / CFBP 7063) OX=380358; GN = albIV PE=4 SV=1
MNETATVTKATLSSAKASTTPAFVHQWFEAQVSSTPDAPAAFLGERRMSYGQLNTRANRLARLLQSQGVGPGARVAVWMNRSPECLAALLAVMKAGAAYVPIDLSLPIRRVQYILQDSQARLVLVDEEGQGRLGELELSAMTAVDVCGTLDGEEANLDLPCDPAQPVYCIYTSGSTGSPKGVLVRHSGLANYVAWAKRQYVTADTTSFAFYSSLSFDLTVTSIYVPLVAGLCVHVYPEQGDDVPVINRVLDDNQVDVIKLTPSHMLMLRNAALATSRLKTLIVGGEDLKAALAYDIHQRFRRDVAIYNEYGPTETVVGCAIHRYDPATEREGSVPIGVPIDHTSLHLLDERLQPVAPGEVGQIHIGGAGVAIGYVNKPEITDAQFIDNPFEGGGRLYASGDLGRMRADGKLEFLGRKDSQIKLRGYRIELGEIENVLLGHAALRECIVNTTVAPRRDYDSKSLRYCARCGIASNFPNTSFDEHGVCNHCHAYDKYRNVVEDYFRTEDELRTIFEQVKAHNRPRYDCLVAFSGGKDSTYALCRVVDMGLRVLAYTLDNGYISDEAKANVDRVVRELGVDHRYLGTPHMNAIFVDSLNRHSNVCNGCFKTIYTLGINLAHEVGVSDIVMGLSKGQLFETRLSELFRASTFDNQVFEKNLMEARKIYHRIDDAAARLLDTSCVRNDRLLESTRFIDFYRYCSVSRKDMYRYIAERVGWSRPADTGRSTNCLLNDVGIYMHKKQRGYHNYSLPYSWDVRVGHIPREDAMRELEDTDDIDEAKVLGLLKQIGYDSSLIDTQAGDAQLIAYYVAAEELDPVALRNFAAAILPEYMLPSYFVRLDRMPLTPNGKVNRRALPRPELKKNASEAHTEPSSALEQELVQIWKEVLMVDKVGVRDNFFELGGHSLSALMLLYSIAERYQKMVSIQAFSVNPTIEGLSEHLVA

SEQ ID NO: 43333 - protein, 941 aa, Xanthomonas albilineans
  REGION 1..941: note = tr|Q70C44|Q70C44_XANAL Non-ribosomal peptide synthase OS=Xanthomonas albilineans OX=29447 GN=albIV PE=4; SV = 1
MNETATVTKATLSSAKASITPACVHQWFEAQVSSTPDAPAAFLGERRMSYGQLNTRANRLARLLQSQGVGPGARVAVWMNRSPECLAALLAVMKAGAAYVPIDLSLPIRRVQYILQDSQARLVLVDDEGQGRLDELELGAMTAVDVCGTLDGDEANLDLPCDPAQPVYCIYTSGSTGSPKGVLVRHSGLANYVAWAKRQYVTADTTSFAFYSSLSFDLTVTSIYVPLVAGLCVHVYPEQGDDVPVINRVLDDNQVDVIKLTPSHMLMLRNAALATSRLKTLIVGGEDLKAAVAYDIHQRFRRDVAIYNEYGPTETVVGCAIHRYDPATEREGSVPIGVPIDHTSLHLLDERLQPVAPGEVGQIHIGGAGVAIGYVNKPEITDAQFIDNPFEGSGRLYASGDLGRMRADGKLEFLGRKDSQIKLRGYRIELGEIENVLLGHAALRECIVDTTVAPRRDYDSKSLRYCARCGIASNFPNTSFDEHGVCNHCHAYDKYRNVVEDYFRTEDELRTIFEQVKAHNRLRYDCLVAFSGGKDSTYALCRVVDMGLRVLAYTLDNGYISDEAKANVDRVVRELGVDHRYLGTPHMNAIFVDSLHRHSNVCNGCFKTIYTLGINLAHEVGVSDIVMGLSKGQLFETRLSELFRASTFDNQVFEKNLMEARKIYHRIDDAAARLLDTSCVRNDRLLESTRFIDFYRYCSVSRKDMYRYIAERVGWSRPADTGRSTNCLLNDVGIYMHKKQRGYHNYSLPYSWDVRVGHIPREDAMRELEDTDDIDEAKVLGLLKQIGYDSSLIDTQAGDAQLIAYYVAAEELDPVALRNFAAAILPEYMLPSYFVRLDRMPLTPNGKVNRRALPRPELKKNASEAHTEPSSALEQELVQIWKEVLMVDKVGVRDNFFELGGHSLSALMLLYSIAERYQKMVSIQAFSVNPTIEGLSEHLVA

SEQ ID NO: 43334 - protein, 224 aa, Xanthomonas alfalfae
  REGION 1..224: note = tr|A0A1S1XH67|A0A1S1XH67_9XANT 7-cyano-7-deazaguanine synthase OS=Xanthomonas alfalfae; OX = 366650 GN=queC PE=3 SV=1
MKKAVVLLSGGMDSAAVIALAQEQGFAVYALSVRYGQRHTSELDAAARVAAAQGVVAHKVVDVDLRSIGGSALTDDIDVPDAGGDGIPVTYVPARNTIMLSLALGWAEVVGANDLFCGVNAVDYSGYPDCRPEFVRAFEVLANLATKAGVEGAGLRVHAPLQFLSKADIVREGVRLGVDFGLTVSCYRADADGRACGHCDACRLRAAGFADAGVPDPTHYAILS

SEQ ID NO: 43335 - protein, 224 aa, Xanthomonas arboricola
  REGION 1..224: note = tr|A0A2S7A6M3|A0A2S7A6M3_9XANT 7-cyano-7-deazaguanine synthase OS=Xanthomonas arboricola pv. guizotiae OX=487867 GN=queC PE=3 SV=1
MKKAVVLLSGGMDSAAVIALAQEQGFAVHALSVRYGQRHTSELDAAARVAAAQGVIAHKVVDVDLRSIGGSALTDDIDVPDSGGDGIPITYVPARNTIMLSLALGWAEVIGANDLFCGVNAVDYSGYPDCRPEFVRAFEVLANLATKAGVEGAGLRVHAPLQFLSKADIVREGVRLGVDFGLTVSCYRADAGGRACGHCDACRLRAAGFADAGVADPTHYAISP

SEQ ID NO: 43336 - protein, 224 aa, Xanthomonas arboricola
  REGION 1..224: note = tr|A0A2S6YTL1|A0A2S6YTL1_9XANT 7-cyano-7-deazaguanine synthase OS=Xanthomonas arboricola; OX = 56448 GN=queC PE=3 SV=1
MKKAVVLLSGGMDSAAVIALAQEQGFAVHALSVRYGQRHTSELDAAARVAAAQGVIAHKVVDVDLRSIGGSALTDDIDVPDAGGDGIPVTYVPARNTIMLSLALGWAEVIGANDLFCGVNAVDYSGYPDCRPEFVRAFEVLANLATKAGVEGAGLRVHAPLQFLSKADIVREGVRLGVDFGLTVSCYRADADGRACGHCDACRLRAAGFADAGVPDPTHYAISP

SEQ ID NO: 43337 - protein, 224 aa, Xanthomonas axonopodis
  REGION 1..224: note = tr|A0A2S6YG80|A0A2S6YG80_9XANT 7-cyano-7-deazaguanine synthase OS=Xanthomonas axonopodis pv. begoniae OX=473403 GN=queC PE=3 SV=1
MKKAVVLLSGGMDSAAVIALAQEQGFAVYALSVRYGQRHTSELDAAARVAAAQGVIAHKVVDVDLRSIGGSALTDDIDVPDAGGDGIPVTYVPARNTIMLSLALGWAEVIGANDLFCGVNAVDYSGYPDCRPEFVRAFEVLANLATKAGVEGAGLRVHAPLQFLSKADIVREGVRLGVDFGLTVSCYRADADGRACGHCDACRLRAAGFVDAGVPDPTHYAILS

SEQ ID NO: 43338 - protein, 224 aa, Xanthomonas axonopodis
  REGION 1..224: note = sp|Q8PHW1|QUEC_XANAC 7-cyano-7-deazaguanine synthase; OS = Xanthomonas axonopodis pv. citri (strain 306) OX=190486; GN = queC PE=3 SV=1
MKKAVVLLSGGMDSAAVIALAQEQGFAVYALSVRYGQRHTSELDAAARVAAAQGVIAHKVVDVDLRSIGGSALTDDIEVPDAGGDGIPVTYVPARNTIMLSLALGWAEVIGANDLFCGVNAVDYSGYPDCRPEFVRAFEVLANLATKAGVEGAGLRVHAPLQFLSKADIVREGVRLGVDFGVTVSCYRADADGRACGHCDACRLRAAGFADAGIPDPTHYAILS

SEQ ID NO: 43339 - protein, 224 aa, Xanthomonas bromi
  REGION 1..224: note = tr|A0A1C3NJI3|A0A1C3NJI3_9XANT 7-cyano-7-deazaguanine synthase OS=Xanthomonas bromi; OX = 56449 GN=queC PE=3 SV=1
MKKAVVLLSGGMDSAAVIALAQEQGFAVYALSVRYGQRHTSELDAAARVAAAQGVIAHKVVDVDLRSIGGSALTDDIDVPDAGGDGIPVTYVPARNTIMLSLALGWAEVIGANDLFCGVNAVDYSGYPDCRPEFVRAFEVLANLATKAGVESAGLRVHAPLQFLSKADIVREGMRLGVDFGLTVSCYRANADGRACGHCDACRLRAAGFADAGIPDPTHYAILS

SEQ ID NO: 43340 - protein, 224 aa, Xanthomonas campestris
  REGION 1..224: note = tr|A0A3E1LAS0|A0A3E1LAS0_XANCA 7-cyano-7-deazaguanine synthase OS=Xanthomonas campestris; OX = 339 GN=queC PE=3 SV=1
MKKAVVLLSGGMDSAAVIALAQEQGFAVHALSVRYGQRHTSELDAAARVAAAQGVVAHKVVDVDLRSIGGSALTADIDVPEAGGAGIPVTYVPARNTIMLSLALGWAEVVGANDLFCGVNAVDYSGYPDCRPEFVRAFEVLANLATKAGVEGAGLRVHAPLQFLSKADIVREGVRLGVDFGLTVSCYSADADGRACGHCDACRLRAAGFADAGVPDPTHYAISS

SEQ ID NO: 43341 - protein, 224 aa, Xanthomonas campestris
  REGION 1..224: note = sp|Q4UXK8|QUEC_XANC8 7-cyano-7-deazaguanine synthase; OS = Xanthomonas campestris pv. campestris (strain 8004); OX = 314565 GN=queC PE=3 SV=1
MKKAVVLLSGGMDSAAVIALAQEQGFAVHALSVRYGQRHTSELDAAARVAAAQGVVAHKVVDVDLRSIGGSALTADIDVPEAGGAGIPVTYVPARNTIMLSLALGWAEVVGANDLFCGVNAVDYSGYPDCRPEFVRAFEVLANLATKAGVEGAGLRVHAPLQFLSKADIVRAGVRLGVDFGLTVSCYNADADGRACGHCDACRLRAAGFADAGVPDPTHYAISS

SEQ ID NO: 43342 - protein, 224 aa, unidentified
  source 1..224: note = Xanthomonas cannabis
  REGION 1..224: note = tr|A0A0B2CPS8|A0A0B2CPS8_9XANT 7-cyano-7-deazaguanine synthase OS=Xanthomonas cannabis pv. cannabis OX=1885894 GN=queC PE=3 SV=1
MKKAVVLLSGGMDSAAVIALAQEQGFVVYALSVRYGQRHTSELDAAARVAAAQGVAAHKVVDVDLRSIGGSALTDDIEVPDAGGEGIPVTYVPARNTIMLSLALGWAEVVGANDLFCGVNAVDYSGYPDCRPEFVRAFEVLANLATKAGVEGVGLRVHAPLQFLSKADIVREGVRLGVDFGLTVSCYRADADGRACGHCDACRLRAAGFADAGVQDPTHYAISS

SEQ ID NO: 43343 - protein, 224 aa, Xanthomonas citri
  REGION 1..224: note = tr|A0A220WEZ4|A0A220WEZ4_XANCI 7-cyano-7-deazaguanine synthase OS=Xanthomonas citri pv. vignicola OX=473426 GN=queC PE=3 SV=1
MKKAVVLLSGGMDSAAVIALAQEQGFAVYALSVRYGQRHTSELDAAARVADAQGVIAHKVVDVDLRSIGGSALTDDIDVPDAGGDGIPVTYVPARNTIMLSLALGWAEVIGANDLFCGVNAVDYSGYPDCRPEFVRAFEVLANLATKAGVEGAGLRVHAPLQFLSKADIVREGVRLGVDFGLTVSCYRADADGRACGHCDACRLRAAGFADAGIPDPTHYAILS

SEQ ID NO: 43344 - protein, 224 aa, Xanthomonas citri
  REGION 1..224: note = tr|A0A2H1SGE4|A0A2H1SGE4_XANCI 7-cyano-7-deazaguanine synthase OS=Xanthomonas citri pv. fuscans OX=366649 GN=queC PE=3 SV=1
MKKAVVLLSGGMDSAAVIALAQEQGFAVYALSVRYGQRHTSELDAAARIADAQGVIAHKVVDVDLRSIGGSALTDDIDVPDAGGDGIPVTYVPARNTIMLSLALGWAEVIGANDLFCGVNAVDYSGYPDCRPEFVRAFEVLANLATKAGVEGAGLRVHAPLQFLSKADIVREGVRLGVDFGLTVSCYRADADGRACGHCDACRLRAAGFADAGIPDPTHYAILS

SEQ ID NO: 43345 - protein, 224 aa, Xanthomonas codiaei
  REGION 1..224: note = tr|A0A2S7CYQ1|A0A2S7CYQ1_9XANT 7-cyano-7-deazaguanine synthase OS=Xanthomonas codiaei; OX = 56463 GN=queC PE=3 SV=1
MKKAVVLLSGGMDSAAVIALAQEQGFAVYALSVRYGQRHTSELDAAARVAAAQGVVAHKLVDVDLRSIGGSALTDDIEVPEAGGDGIPVTYVPARNTIMLSLALGWAEVVGANDLFCGVNAVDYSGYPDCRPEFVRAFEVLANLATKAGVEGAGLRVHAPLQFLSKADIVREGVRLGVDFGLTVSCYRADAEGRACGHCDACRLRAAGFADAGVPDPTHYAISS

SEQ ID NO: 43346 - protein, 224 aa, Xanthomonas cucurbitae
  REGION 1..224: note = tr|A0A2S7DT00|A0A2S7DT00_9XANT 7-cyano-7-deazaguanine synthase OS=Xanthomonas cucurbitae; OX = 56453 GN=queC PE=3 SV=1
MKKAVVLLSGGMDSAAVVALAQEQGFAVHALSVRYGQRHTSELDAAARVAAAQGVVAHKVVEVDLRSIGGSALTDDIDVPDAGGEGIPVTYVPARNTIMLSLALGWAEVVGANDLFCGVNAVDYSGYPDCRPEFVRAFEVLANLATKAGVEGAGMRVHAPLQFLSKADIVREGLRLGVDFALTVSCYRADAAGRACGHCDACRLRAAGFADAGVADPTHYAISP

SEQ ID NO: 43347 - protein, 224 aa, Xanthomonas cynarae
  REGION 1..224: note = tr|A0A2S7AZS1|A0A2S7AZS1_9XANT 7-cyano-7-deazaguanine synthase OS=Xanthomonas cynarae; OX = 109214 GN=queC PE=3 SV=1
MKKAVVLLSGGMDSAAVVALAQEQGFAVHALSVRYGQRHTSELDAAARVATAQGVIAHKVVDVDLRSIGGSALTADIDVPDAGGDGIPVTYVPARNTIMLSLALGWAEVIGANDLFCGVNAVDYSGYPDCRPEFVRAFEVLANLATKTGVEGAGLRVHAPLQFLSKADIVREGVRLGVDFGLTVSCYRADADGRACGHCDACRLRAAGFTDAGIPDPTHYAISS

SEQ ID NO: 43348 - protein, 224 aa, Xanthomonas dyei
  REGION 1..224: note = tr|A0A2S7BYY2|A0A2S7BYY2_9XANT 7-cyano-7-deazaguanine synthase OS=Xanthomonas dyei; OX = 743699 GN=queC PE=3 SV=1
MKKAVVLLSGGMDSAAVIALAQEQGFAVYALSVRYGQRHTSELDAAARVAAAQGVVAHKVVDVDLRSIGGSALTDDIEVPEAGGDGIPVTYVPARNTIMLSLALGWAEVVGANDLFCGVNAVDYSGYPDCRPEFVRAFEILANLATKAGVEGAGLRVHAPLQFLSKADIVREGVRLGVDFGLTVSCYRADADGRACGHCDACRLRAAGFADAGVQDPTHYTISS

SEQ ID NO: 43349 - protein, 224 aa, Xanthomonas euvesicatoria; identical to SEQ ID NO: 43334
  REGION 1..224: note = tr|A0A2S7EGV7|A0A2S7EGV7_XANEU 7-cyano-7-deazaguanine synthase OS=Xanthomonas euvesicatoria pv. citrumelonis OX=189396 GN=queC PE=3 SV=1

SEQ ID NO: 43350 - protein, 224 aa, unidentified
  source 1..224: note = Xanthomonas floridensis
  REGION 1..224: note = tr|A0A1A9M8T8|A0A1A9M8T8_9XANT 7-cyano-7-deazaguanine synthase OS=Xanthomonas floridensis; OX = 1843580 GN=queC PE=3 SV=1
MKKAVVLLSGGMDSAAVIALAQEQGFAVYALSVRYGQRHTSELDAAARIAAAQGVVAHKVVDVDLRSIGGSALTDDIEVPDAGGDGIPVTYVPARNTIMLSLALGWAEVVGANDLFCGVNAVDYSGYPDCRPEFVRAFEVLANLATKAGVEGAGLRVHAPLQFLSKADIVREGVRLGVDFGLTVSCYRADADGRACGHCDACRLRAAGFADAGVQDPTHYAISS

SEQ ID NO: 43351 - protein, 224 aa, Xanthomonas fragariae
  REGION 1..224: note = tr|A0A1Y6HA48|A0A1Y6HA48_9XANT 7-cyano-7-deazaguanine synthase OS=Xanthomonas fragariae; OX = 48664 GN=queC PE=3 SV=1
MKKAVVLLSGGMDSAAVIALAQEQGFAVYALSLRYGQRHTSELDAAARVAAAQGVITHKVLDVDLRSIGGSALTDDIEVPEAGGDGIPVTYVPARNTIMLSLALGWAEVIGANDLFCGVNAVDYSGYPDCRPEFVRAFEVLANLATKAGVEGAGLRVHAPLQFLSKADIVREGVRLGVDFGLTVSCYRADANGRACGHCDACRLRAAGFADAGVPDPTHYAISS

SEQ ID NO: 43352 - protein, 196 aa, Xanthomonas gardneri
  REGION 1..196: note = tr|F0C1U8|F0C1U8_9XANT 7-cyano-7-deazaguanine synthase OS=Xanthomonas gardneri ATCC 19865 OX=925777; GN = XGA_0810 PE=3 SV=1
MTIKGKATSLDSAYLAGVSQRRPPPPPPPPPPPPPPPPPTAPPPPPADIDVPDAGGDGIPVTYVPARNTIMLSLALGWAEVIGANDLFCGVNAVDYSGYPDCRPEFVRAFEVLANLATKAGVEGAGLRVHAPLQFLSKADIVREGVRLGVDFGLTVSCYRADADGRACGHCDACRLRAAGFTDAGIPDPTHYAISS

SEQ ID NO: 43353 - protein, 224 aa, Xanthomonas gardneri
  REGION 1..224: note = tr|A0A0G8MMX9|A0A0G8MMX9_9XANT 7-cyano-7-deazaguanine synthase OS=Xanthomonas gardneri; OX = 90270 GN=queC PE=3 SV=1
MKKAVVLLSGGMDSAAVVALAQEQGFAVHALSVRYGQRHTSELDAAARVATAQGVIAHKVVDVDLRSIGGSALTADIDVPDAGGDGIPVTYVPARNTIMLSLALGWAEVIGANDLFCGVNAVDYSGYPDCRPEFVRAFEVLANLATKAGVEGAGLRVHAPLQFLSKADIVREGVRLGVDFGLTVSCYRADADGRACGHCDACRLRAAGFTDAGIPDPTHYAISS

SEQ ID NO: 43354 - protein, 224 aa, Xanthomonas hortorum
  REGION 1..224: note = tr|V7Z9J5|V7Z9J5_9XANT 7-cyano-7-deazaguanine synthase OS=Xanthomonas hortorum pv. carotae str. M081; OX = 863365 GN=queC PE=3 SV=1
MKKAVVLLSGGMDSAAVVALAHEQGFAVHALSVRYGQRHTSELDAAARVATAQGVIAHKVVDVDLRSIGGSALTADIDVPDAGGDGIPVTYVPARNTIMLSLALGWAEVIGANDLFCGVNAVDYSGYPDCRPEFVRAFEVLANLATKAGVEGAGLRVHAPLQFLSKADIVREGVRLGVDFGLTVSCYRADADGRACGHCDACRLRAAGFTDAGIPDPTHYAISS

SEQ ID NO: 43355 - protein, 224 aa, Xanthomonas hortorum; identical to SEQ ID NO: 43353
  REGION 1..224: note = tr|A0A248YFL2|A0A248YFL2_9XANT 7-cyano-7-deazaguanine synthase OS=Xanthomonas hortorum; OX = 56454 GN=queC PE=3 SV=1

SEQ ID NO: 43356 - protein, 221 aa, unidentified
  source 1..221: note = Xanthomonas hyacinthi
  REGION 1..221: note = tr|A0A2S7ET31|A0A2S7ET31_9XANT 7-cyano-7-deazaguanine synthase OS=Xanthomonas hyacinthi; OX = 56455 GN=queC PE=3 SV=1
MKNAVVLLSGGMDSAVVVAIACEQGYAVHALSVSYGQRHTSELDAATRVAAALGAVAHKTVNVDLRSIGGSALTDDIEVPDAGGEGIPVTYVPARNTIMLSLALGWAEVLGAADIFCGVNAVDYSGYPDCRPEFIDAFQTLANLATKAGVEGAGLRVHAPLQRMSKADIVREGLRLGVDFGLTVSCYRADADGRACGHCDACRLRAAGFADAGVADPTRYA

SEQ ID NO: 43357 - protein, 224 aa, unidentified
  source 1..224: note = Xanthomonas manihotis
  REGION 1..224: note = tr|A0A0W7YL95|A0A0W7YL95_XANMN 7-cyano-7-deazaguanine synthase OS=Xanthomonas manihotis; OX = 43353 GN=queC PE=3 SV=1
MKKAVVLLSGGMDSAAVIALAQEQGFAVYALSVRYGQRHTSELDAAARVAAAQGVIAHKVVDVDLRSIGGSALTDDIDVPDAGGDGIPVTYVPARNTIMLSLALGWAEVVGANDLFCGVNAVDYSGYPDCRPEFVRAFEVLANLATKAGVEGAGLRVHAPLQFLSKADIVREGVRLGVDLGLTVSCYRADADGRACGHCDACRLRAAGFADAGVPDPTHYAILS

SEQ ID NO: 43358 - protein, 224 aa, Xanthomonas melonis
  REGION 1..224: note = tr|A0A2S7DHN3|A0A2S7DHN3_9XANT 7-cyano-7-deazaguanine synthase OS=Xanthomonas melonis; OX = 56456 GN=queC PE=3 SV=1
MKKAVVLLSGGMDSAAVIALAQEQGFAVYALSVRYGQRHTSELDAAARVAAAQKVMAHKVVDVDLRSIGGSALTDDIEVPEAGGAGIPVTYVPARNTIMLSLALGWAEVVGANDLFCGVNAVDYSGYPDCRPEFVRAFEVLANLATKAGVEGAGMRVHAPLQFLSKADIVREGLRLGVDFGLTVSCYRADADGRACGHCDACRLRAAGFADAGVADPTHYAISS

SEQ ID NO: 43359 - protein, 224 aa, unidentified
  source 1..224: note = Xanthomonas nasturtii
  REGION 1..224: note = tr|A0A3E1KNL0|A0A3E1KNL0_9XANT 7-cyano-7-deazaguanine synthase OS=Xanthomonas nasturtii; OX = 1843581 GN=queC PE=3 SV=1
MKKAVVLLSGGMDSAAVVALAQEQGFAVHALSVRYGQRHTSELDAAARVAAAQGVIAHKVVDVDLRSIGGSALTDDIDVPDAGGDGIPVTYVPARNTIMLSLALGWAEVVGANDLFCGVNAVDYSGYPDCRPEFVRAFEVLANLATKAGVEGTGLRVHAPLQFLSKADIVREGVRLGVDFGLTVSCYRADADGRACGHCDACRLRAAGFADAGIPDPTHYAILS

SEQ ID NO: 43360 - protein, 428 aa, unidentified
  source 1..428: note = Xanthomonas nasturtii
  REGION 1..428: note = tr|A0A3E1KEJ6|A0A3E1KEJ6_9XANT Uncharacterized protein OS=Xanthomonas nasturtii OX=1843581 GN=DZD52_21420; PE = 4 SV=1
MKIFSAPRGVAVPAVSDLQLILYGQPDRHADGTRSVGSAGAAIETRIQRLRYAPAPRAWDFLSLALSVVGADLSVHRAGSPDGWTRQIDLITAVGEPDFWNSEAHTIEAALRFLSTDVWTLEFVGKGRRPDPPDELFRPTEDSVCLLSGGMDSLIGAIDLAESGRRSIAVSNTVPGDGHNQHSFAEAVGFKHLALNHNASPPSDGGREPSQRARSIIFLAFGVLAATSLQAYQDGAQVPLFICENGFIALNPPLTGTRLGSLSTRTAHPEFLHGVQSVLDAADLRVKLVNPYQHKTKGEMSRECADQDLLRNLAASSVSCGRYRRYGYNQCGRCIPCQIRRAAYLAWGQPDPTDYTFKDIGRREADYAHFDDVRSVAMAISRVNREGLEAWLRSALSYPHAGPRAPLRDVIQRGLGELMALHQSVGLH

SEQ ID NO: 43361 - protein, 224 aa, Xanthomonas oryzae
  REGION 1..224: note = tr|A0A2K9IQB7|A0A2K9IQB7_XANOO 7-cyano-7-deazaguanine synthase OS=Xanthomonas oryzae pv. oryzae OX=64187 GN=queC PE=3 SV=1
MKKAVVLLSGGMDSAAVIALAQEQGFAVYALSVRYGQRHTSELDAAARVAAAQGVIAHKVVDVDLRSIGGSALTDDIDVPDAGGDGIPVTYVPARNTIMLSLALGWAEVVGANDLFCGVNAVDYSGYPDCRPEFVRAFEVLANLATKAGVEGAGLRVHAPLQFLSKADIVREGVRLGVDFGLTVSCYRADAHGRACGHCDACRLRAAGFADAGVPDPTHYAILS

SEQ ID NO: 43362 - protein, 224 aa, Xanthomonas oryzae; identical to SEQ ID NO: 43334
  REGION 1..224: note = sp|B2STI7|QUEC_XANOP 7-cyano-7-deazaguanine synthase; OS = Xanthomonas oryzae pv. oryzae (strain PXO99A) OX=360094; GN = queC PE=3 SV=1

SEQ ID NO: 43363 - protein, 224 aa, Xanthomonas perforans; identical to SEQ ID NO: 43334
  REGION 1..224: note = tr|A0A0G8WAD9|A0A0G8WAD9_9XANT 7-cyano-7-deazaguanine synthase OS=Xanthomonas perforans; OX = 442694 GN=queC PE=3 SV=1

SEQ ID NO: 43364 - protein, 224 aa, Xanthomonas phaseoli
  REGION 1..224: note = tr|A0A1V9H4P5|A0A1V9H4P5_9XANT 7-cyano-7-deazaguanine synthase OS=Xanthomonas phaseoli pv. syngonii LMG 9055 OX=1437878 GN=queC PE=3 SV=1
MKKAVVLLSGGMDSAAVIALAQEQGFAVYALSVRYGQRHTSELDAAARVAAAQGVIAHKVVDVDLRSIGGSALTDDIDVPDAGGDGIPVTYVPARNTIMLSLALGWAEVIGANDLFCGVNAVDYSGYPDCRPEFVRAFEVLANLATKAGVEGAGLRVHAPLQFLSKADIVREGVRLGVDFGLTVSCYRADADGRACGHCDACRLRAAGFANAGVPDPTHYAILS

SEQ ID NO: 43365 - protein, 224 aa, Xanthomonas phaseoli
  REGION 1..224: note = tr|A0A0N8TRP8|A0A0N8TRP8_9XANT 7-cyano-7-deazaguanine synthase OS=Xanthomonas phaseoli pv. dieffenbachiae OX=92828 GN=queC PE=3 SV=1
MKKAVVLLSGGMDSAAVIALAQEQGFAVYALSVRYGQRHTSELDAAARVAAAQGVIAHKVVDVDLRSIGGSALTDDIDVPDAGGEGIPVTYVPARNTIMLSLALGWAEVIGANDLFCGVNAVDYSGYPDCRPEFVRAFEVLANLATKAGVEGAGLRVHAPLQFLSKADIVREGVRLGVDFGLTVSCYRADADGRACGHCDACRLRAAGFADAGVPDPTHYAILS

SEQ ID NO: 43366 - protein, 224 aa, Xanthomonas pisi
  REGION 1..224: note = tr|A0A2S7CRI3|A0A2S7CRI3_9XANT 7-cyano-7-deazaguanine synthase OS=Xanthomonas pisi; OX = 56457 GN=queC PE=3 SV=1
MKKAVVLLSGGMDSAAVIALAQEQGFAVYALSVRYGQRHTSELDAAARVAAAQGVVAHKVVDVDLRSIGGSALTDDIEVPDAGGDGIPVTYVPARNTIMLSLALGWAEVVGANDLFCGVNAVDYSGYPDCRPEFVRAFEVLANLATKAGVEGAGLRVHAPLQFLSKADIVREGVRLGVDFGLTVSCYRADADGRACGHCDACRLRAAGFADAGIPDPTHYAILS

SEQ ID NO: 43367 - protein, 224 aa, Xanthomonas populi
  REGION 1..224: note = tr|A0A2S7E2C2|A0A2S7E2C2_9XANT 7-cyano-7-deazaguanine synthase OS=Xanthomonas populi; OX = 53414 GN=queC PE=3 SV=1
MKKAVVLLSGGMDSAAVVALAQEQGYSVYALSVRYGQRHTSELDAAARVATAQGVIAHKVVDVDLRSIGGSALTDDIDVPDAGGDGIPVTYVPARNTIMLALALGWAEVIGANDLFCGVNAVDYSGYPDCRAEFVRAFEVLANLATKAGVEGAGLRVHAPLQFLSKADIVRQGVRLGVDFGLTVSCYRADANGRACGYCDACRLRAAGFADAGIPDHTHYAISS

SEQ ID NO: 43368 - protein, 224 aa, unidentified
  source 1..224: note = Xanthomonas prunicola
  REGION 1..224: note = tr|A0A2N3RNI0|A0A2N3RNI0_9XANT 7-cyano-7-deazaguanine synthase OS=Xanthomonas prunicola; OX = 2053930 GN=queC PE=3 SV=1
MKKAVVLLSGGMDSAAVIALAQEQGFAVHALSVRYGQRHTSELDAAARVAAAQGISEHKVVDVDLRSIGGSALTDDIDVPDAGGDGIPVTYVPARNTIMLSLALGWAEVVGANDLFCGVNAVDYSGYPDCRPEFVRAFEVLANLATKAGVEGAGLRVHAPLQFLSKADIVREGVRLGVDFGLTVSCYRADPEGRACGHCDACRLRAAGFADAGIPDPTHYAILS

SEQ ID NO: 43369 - protein, 221 aa, Xanthomonas sacchari
  REGION 1..221: note = tr|A0A0A8DR54|A0A0A8DR54_9XANT 7-cyano-7-deazaguanine synthase OS=Xanthomonas sacchari; OX = 56458 GN=queC PE=3 SV=1
MKNAVVLLSGGMDSAVVVAIARAQGFAVHALSVRYGQRHTSELDAAARVASALGAVAHKTVNVDLRSIGGSALTDDIEVPDAGGDGIPVTYVPARNTIMLSVALGWAEVLGAADIFCGVNAVDYSGYPDCRPEFIDAFQTLANLATKAGVEGAGLRVHAPLQHMSKADIVREGVRLGVDFGLTVSCYRADDAGRACGHCDACRLRAAGFADAGVADPTRYA

SEQ ID NO: 43370 - protein, 221 aa, Xanthomonas sacchari
  REGION 1..221: note = tr|A0A2P5Z314|A0A2P5Z314_9XANT 7-cyano-7-deazaguanine synthase OS=Xanthomonas sacchari; OX = 56458 GN=queC PE=3 SV=1
MKNAVVLLSGGMDSAVVVAIARAQGFAVHALSVRYGQRHTSELDAAARVAAALGAVAHKTVNVDLRSIGGSALTDDIEVPDAGGDGIPVTYVPARNTIMLSVALGWAEVLGAADIFCGVNAVDYSGYPDCRPEFIDAFQTLANLATKAGVEGAGLRVHAPLQRMSKADIVREGVRLGVDFGLTVSCYRADDAGRACGHCDACRLRAAGFADAGVADPTRYA

SEQ ID NO: 43371 - protein, 224 aa, Xanthomonas sp.
  REGION 1..224: note = tr|A0A0Q5IXB0|A0A0Q5IXB0_9XANT 7-cyano-7-deazaguanine synthase OS=Xanthomonas sp. Leaf148; OX = 1736275 GN=queC PE=3 SV=1
MKKAVVLLSGGMDSAAVIALAQEQGFAVYALSVRYGQRHTSELDAAVRVAAAQGVVAHKVVDVDLRSIGGSALTDDIEVPDAGGDGIPVTYVPARNTIMLSLALGWAEVVGANDLFCGVNAVDYSGYPDCRPEFVRAFEVLANLATKAGVEGAGLRVHAPLQFLSKADIVREGVRLGVDFGLTVSCYRADPDGRACGHCDACRLRAAGFADAGVQDPTHYAISS

SEQ ID NO: 43372 - protein, 221 aa, Xanthomonas sp.
  REGION 1..221: note = tr|A0A0J6FKG2|A0A0J6FKG2_9XANT 7-cyano-7-deazaguanine synthase OS=Xanthomonas sp. NCPPB 1128 OX=1775876 GN=queC PE=3 SV=1
MKNAVVLLSGGMDSAVVVAIARAQGFAVHALSVRYGQRHTSELDAAARVASALGAVAHKTVNVDLRSIGGSALTDDIEVPDAGGDGIPVTYVPARNTIMLSVALGWAEVLGASDIFCGVNAVDYSGYPDCRPEFIDAFQTLANLATKAGVEGAGLRVHAPLQHMSKADIVREGVRLGVDFGLTVSCYRADDAGRACGHCDACRLRAAGFADAGVADPTRYA

SEQ ID NO: 43373 - protein, 221 aa, Xanthomonas theicola
  REGION 1..221: note = tr|A0A2S6ZLU0|A0A2S6ZLU0_9XANT 7-cyano-7-deazaguanine synthase OS=Xanthomonas theicola; OX = 56464 GN=queC PE=3 SV=1
MKNAVVLLSGGMDSAVVVAIAREQGYAVHALSVRYGQRHTSELDAATRVAGALGAVAHKTVNVDLRSIGGSALTDDIEVPDAGGGGIPVTYVPARNTIMLSVALGWAEVLGAADIFCGVNAVDYSGYPDCRPEFIDAFQTLANLATKAGVEGAGLRVHAPLQRMSKADIVREGMRLDVDFGLTVSCYRADADGRACGHCDACRLRAAGFVDARVADPTRYA

SEQ ID NO: 43374 - protein, 221 aa, Xanthomonas translucens
  REGION 1..221: note = tr|A0A1M4IEA1|A0A1M4IEA1_XANCT 7-cyano-7-deazaguanine synthase OS=Xanthomonas translucens pv. graminis OX=134874 GN=queC PE=3 SV=1
MKNAVVLLSGGMDSAVVVAIAREQGYAVHALSVSYGQRHTSELDAATRVAAALGAVAHKTVNVDLRSIGGSALTDDIEVPDAGGEGIPVTYVPARNTIMLSVALGWAEVLGAADIFCGVNAVDYSGYPDCRPEFIDAFQTLANLATKAGVEGAGLRVHAPLQRMSKADIVREGQRLGVDFGLTVSCYRADGDGRACGHCDACRLRAVGFADAGVADPTRYA

SEQ ID NO: 43375 - protein, 221 aa, Xanthomonas translucens
  REGION 1..221: note = tr|A0A514E9D6|A0A514E9D6_XANCT 7-cyano-7-deazaguanine synthase OS=Xanthomonas translucens pv. cerealis OX=152263 GN=queC PE=3 SV=1
MKNAVVLLSGGMDSAVVVAIAREQGYAVHALSVSYGQRHTSELDAATRVAAALGAVAHKTVNVDLRSIGGSALTDDIEVPDAGGEGIPVTYVPARNTIMLSVALGWAEVLGAADIFCGVNAVDYSGYPDCRPEFIDAFQTLANLATKAGVEGAGLRVHAPLQRMSKADIVREGQRLGVDFGLTVSCYRADGDGRACGHCDACRLRAAGFADAGVADPTRYA

SEQ ID NO: 43376 - protein, 224 aa, Xanthomonas vasicola
  REGION 1..224: note = tr|A0A0A3GSI6|A0A0A3GSI6_XANVA 7-cyano-7-deazaguanine synthase OS=Xanthomonas vasicola; OX = 56459 GN=queC PE=3 SV=1
MKKAVVLLSGGMDSAAVIALAQEQGFAVYALSVRYGQRHTSELDAATRVAAAQGVIAHKVVDVDLRSIGGSALTDDIDVPDAGGDGIPVTYVPARNTIMLSLALGWAEVVGANDLFCGVNAVDYSGYPDCRPEFVRAFEVLANLATKAGVEGAGLRVHAPLQFLSKADIVREGVRLGVDFGLTVSCYRADADGRACGHCDACRLRAAGFADAGVPDPTHYAILS

SEQ ID NO: 43377 - protein, 213 aa, Xanthomonas vesicatoria
  REGION 1..213: note = tr|F0B8L1|F0B8L1_9XANT 7-cyano-7-deazaguanine synthase OS=Xanthomonas vesicatoria ATCC 35937 OX=925775; GN = queC PE=3 SV=1
MDSAAVIALAQEQGFAVYALSVRYGQRHTSELDAAARVAAAQGVAAHKVVDVDLRSIGGSALTDDIEVPDAGGDGIPVTYVPARNTIMLSLALGWAEVVGANDLFCGVNAVDYSGYPDCRPEFVRAFEVLANLATKAGVEGAGLRVHAPLQFLSKADIVREGVRLGVDFGLTVSCYRADVDGRACGHCDACRLRAAGFADAGVQDPTHYAISS

SEQ ID NO: 43378 - protein, 224 aa, Xanthomonas vesicatoria
  REGION 1..224: note = tr|A0A1L5QQR2|A0A1L5QQR2_9XANT 7-cyano-7-deazaguanine synthase OS=Xanthomonas vesicatoria; OX = 56460 GN=queC PE=3 SV=1
MKKAVVLLSGGMDSAAVIALAQEQGFAVYALSVRYGQRHTSELDAAARVAAAQGVAAHKVVDVDLRSIGGSALTDDIEVPDAGGDGIPVTYVPARNTIMLSLALGWAEVVGANDLFCGVNAVDYSGYPDCRPEFVRAFEVLANLATKAGVEGAGLRVHAPLQFLSKADIVREGVRLGVDFGLTVSCYRADVDGRACGHCDACRLRAAGFADAGVQDPTHYAISS

SEQ ID NO: 43379 - protein, 225 aa, Xenococcus sp.
  REGION 1..225: note = tr|L8LX24|L8LX24_9CYAN 7-cyano-7-deazaguanine synthase OS=Xenococcus sp. PCC 7305 OX=102125 GN=queC PE=3; SV = 1
MNQKKAVVLLSGGLDSATVAAIAIAEGYEVIALSFRYGQRHQKELAAAQKIAHLLEIKEHVILDVNLSQWGGSSLTDATMEIPQDGIVSDIIPSTYVPGRNTVFIAIALALAEAKNARTIFLGINAVDYSGYPDCRPEYLAAYQKLANLSSKAAIEGHNIQLQAPLVKDSKVDIVKRALALGVPIEHTWSCYQGQEVPCGVCDSCRIRDRALIEAGRSDLATHPA

SEQ ID NO: 43380 - protein, 234 aa, Xenophilus sp.
  REGION 1..234: note = tr|A0A254VF58|A0A254VF58_9BURK 7-cyano-7-deazaguanine synthase OS=Xenophilus sp. AP218F; OX = 2014876 GN=queC PE=3 SV=1
MTDPTPEKALVVLSGGQDSTTCLYWALQRFGQDHVEAVTFDYGQRHRVELDCARKIAALAGVRQTVLPIDTFAAIGGNALTDDAIAPESGARADGDQALPNTFVPGRNLIFLSFAAALAYTRGARHLVTGVAQTDYSGYPDCRENTLKALELALRLGMDSRVELHAPLMHLSKAQTVTLAQQVGAMEALSFSHTCYNGEVPPCGHCAACELRAKGFAEAGVADPLVERCRQQGN

SEQ ID NO: 43381 - protein, 232 aa, Xenorhabdus beddingii
  REGION 1..232: note = tr|A0A1Y2SQF2|A0A1Y2SQF2_9GAMM 7-cyano-7-deazaguanine synthase OS=Xenorhabdus beddingii; OX = 40578 GN=queC PE=3 SV=1
MKRAVVVFSGGQDSTTCLIQALRQYDEVHCVTFDYGQRHRAEIDVACRISKELGAAAHKVLDVTLLNELAISSLTRDDIPVPDFSASEKSGLPNTFVPGRNILFLTLAAIYAYQVEAEAVITGVCETDFSGYPDCRDEFVKALNKAVSLGIARDIRFETPLMWLNKAETWALADYYQKLDFVRHQTLTCYNGIQGDGCGECAACHLRARGLDNYLNNAQSTMAEMKSKTHVG

SEQ ID NO: 43382 - protein, 232 aa, Xenorhabdus bovienii
  REGION 1..232: note = tr|A0A077QKJ9|A0A077QKJ9_XENBV 7-cyano-7-deazaguanine synthase OS=Xenorhabdus bovienii str. Intermedium OX=1379677 GN=ybaX PE=3 SV=1
MKRAVVVFSGGQDSTTCLIQALRQYDEVHCVTFDYGQRHRAEIDVACRISKELGAAAHKVLDVTLLSELAISSLTRDNIPVPDFSESEKSGLPNTFVPGRNILFLTLAAIYAYQVEAEAVITGVCETDFSGYPDCRDEFVKALNKAVCLGIARDIRFETPLMWLNKAETWALADYYQKLNFVRTQTLTCYNGIQGDGCSECAACHLRANGLNLYLNNTQSIMEDMKSKTHLS

SEQ ID NO: 43383 - protein, 232 aa, Xenorhabdus bovienii
  REGION 1..232: note = tr|A0A077P8K1|A0A077P8K1_XENBV 7-cyano-7-deazaguanine synthase OS=Xenorhabdus bovienii str. oregonense OX=1398202 GN=ybaX PE=3 SV=1
MKRAVVVFSGGQDSTTCLIQALRQYDEVHCVTFDYGQRHRAEIDVACRISKELDAAAHKVLDVTLLSELAISSLTRDNIPVPDFSESEKSGLPNTFVPGRNILFLTLAAIYAYQVEAEAVITGVCETDFSGYPDCRDEFVKALNKAVCLGISRDIRFETPLMWLNKAETWALADYYQKLNFVRTQTLTCYNGIQGDGCSECAACHLRANGLNLYLNNTQSIMEEMKSKTHLS

SEQ ID NO: 43384 - protein, 232 aa, Xenorhabdus budapestensis
  REGION 1..232: note = tr|A0A2D0J0P9|A0A2D0J0P9_XENBU 7-cyano-7-deazaguanine synthase OS=Xenorhabdus budapestensis OX=290110 GN=queC PE=3 SV=1
MKRAVVVFSGGQDSTTCLIQSLHQYDEVHCVTFDYGQRHRAEIDVASCISKELGAAAHKVLDVTLLNELAISSLTRDNIPVPDFNESEKSGLPNTFVPGRNILFLTLAAIYAYQVEAEAVITGVCETDFSGYPDCRDEFVKSLNNAVCLGIARDIRFETPLMWLNKAETWALADYYQKLDFVRTQTLTCYNGIQGDGCGECAACHLRANGLNLYLNNTKPTMAEMKSKTQLN

SEQ ID NO: 43385 - protein, 232 aa, Xenorhabdus cabanillasii
  REGION 1..232: note = tr|A0A3D9UGP6|A0A3D9UGP6_9GAMM 7-cyano-7-deazaguanine synthase OS=Xenorhabdus cabanillasii OX=351673 GN=queC PE=3 SV=1
MKRAVVVFSGGQDSTTCLIQALHQYDEVHCVTFDYGQRHRAEIDVASRISKELGAAAHKVLDVTLLNELAISSLTRDNIPVPDFSESEKSGLPNTFVPGRNILFLTLAAIYAYQVEAEAVITGVCETDFSGYPDCRDEFVKSLNNAVCLGIARDIRFETPLMWLNKAETWALADYYQKLDFVRTQTLTCYNGIQGDGCSECAACHLRANGLNLYLNNTKLTMAEMKSKTQLD

SEQ ID NO: 43386 - protein, 232 aa, Xenorhabdus cabanillasii
  REGION 1..232: note = tr|W1ISS6|W1ISS6_9GAMM 7-cyano-7-deazaguanine synthase OS=Xenorhabdus cabanillasii JM26 OX=1427517; GN = queC PE=3 SV=1
MKRAVVVFSGGQDSTTCLIQALHQYDEVHCVTFDYGQRHRAEIDVASRISKELGAAAHKVLDVTLLNELAISSLTRDNIPVPDFSESEKSGLPNTFVPGRNILFLTLAAIYAYQVEAEAVITGVCETDFSGYPDCRDEFVKSLNNAVCLGIARDIRFETPLMWLNKAETWALADYYQKLDFVRTQTLTCYNGIQGDGCGECAACHLRANGLNLYLNNTKFTMAEMKSKTQLD

SEQ ID NO: 43387 - protein, 232 aa, Xenorhabdus doucetiae
  REGION 1..232: note = tr|A0A068QNL4|A0A068QNL4_9GAMM 7-cyano-7-deazaguanine synthase OS=Xenorhabdus doucetiae; OX = 351671 GN=queC PE=3 SV=1
MKRAVVVFSGGQDSTTCLIQALRQYDEVHCVTFDYGQRHRAEIDVACHISKELGAAAHKVLDVTLLNELAISSLTRDNIPVPDFSESEKSGLPSTFVPGRNILFLTLAAIYAYQVEAEAVITGVCETDFSGYPDCRDEFVKALNKAVSLGIARNIRFETPLMWLNKAETWALADYYQKLDFVRNQTLTCYNGIQGDGCGECAACHLRAKGLTHYLSNAQTIMLDMKSKTHLS

SEQ ID NO: 43388 - protein, 232 aa, unidentified
  source 1..232: note = Xenorhabdus eapokensis
  REGION 1..232: note = tr|A0A1Q5TVW7|A0A1Q5TVW7_9GAMM 7-cyano-7-deazaguanine synthase OS=Xenorhabdus eapokensis; OX = 1873482 GN=queC PE=3 SV=1
MKRAVVVFSGGQDSSTCLIQALHQYDEVHCVTFDYGQRHRAEIDVACRISKELGAAAHKVLDVTLLNELAISSLTRDNIPVPDFSESEKSGLPSTFVPGRNILFLTLAAIYAYQVEAEVVITGVCETDFSGYPDCRDEFVKALNKAVSLGIARDIRFETPLMWLNKAETWALADYYQKLDFVRNETLTCYNGIQGDGCGECAACHLRAKGLNHYLSNAQATMLDMKSKTHLS

SEQ ID NO: 43389 - protein, 232 aa, Xenorhabdus ehlersii
  REGION 1..232: note = tr|A0A2D0IQ53|A0A2D0IQ53_9GAMM 7-cyano-7-deazaguanine synthase OS=Xenorhabdus ehlersii; OX = 290111 GN=queC PE=3 SV=1
MKRAVVVFSGGQDSSTCLIQALHQYDEVHCVTFDYGQRHHAEIDVACRISKELGTAAHKVLDVTLLNELAISSLTRDSIPVPDFSESEKSGLPSTFVPGRNILFLTLAAIYAYQVEAEVVITGVCETDFSGYPDCRDEFVKALNKAVSLGIARDIRFETPLMWLNKAETWALADYYQKLDFVRNKTLTCYNGIQGDGCGECAACHLRAQGLKHYLNNVQATMLDMKSKTHLS

SEQ ID NO: 43390 - protein, 232 aa, Xenorhabdus hominickii
  REGION 1..232: note = tr|A0A2G0Q8Y5|A0A2G0Q8Y5_9GAMM 7-cyano-7-deazaguanine synthase OS=Xenorhabdus hominickii; OX = 351679 GN=queC PE=3 SV=1
MKRAVVVFSGGQDSTTCLIQALRQYDEVHCVTFDYGQRHRAEIDVACHISTELGAAAHKVLDVTLLNELAISSLTRDNIPVPDFSASEESALPNTFVPGRNILFLTLAAIYAYQVEAESVITGVCETDFSGYPDCRDEFVKALNKAVSLGMARDIRFETPLMWLNKAETWALADYYQKLDFVRSQTLTCYNGVQGDGCGDCAACHLRAKGLSNYLNNTQSIMAEMKSKTHLN

SEQ ID NO: 43391 - protein, 232 aa, Xenorhabdus innexi
  REGION 1..232: note = tr|A0A1N6MTP7|A0A1N6MTP7_9GAMM 7-cyano-7-deazaguanine synthase OS=Xenorhabdus innexi; OX = 290109 GN=queC PE=3 SV=1
MKRAVVVFSGGQDSTTCLIQALRQYDEVHCVTFDYGQRHRAEIDVASRISKELGAAAHKVLDVTLLNELAVSSLTRDNIPVPDFSESEKNGLPNTFVPGRNILFLTLAAIYAYQVEAEAVITGVCETDFSGYPDCRDEFVKSLNNAVCLGIARDIRFETPLMWLNKAETWALADYYQKLDFVRTQTLTCYNGIQGDGCGECAACHLRANGLDLYLNNAESTMAEMKSKTKLN

SEQ ID NO: 43392 - protein, 232 aa, unidentified
  source 1..232: note = Xenorhabdus ishibashii
  REGION 1..232: note = tr|A0A2D0KI18|A0A2D0KI18_9GAMM 7-cyano-7-deazaguanine synthase OS=Xenorhabdus ishibashii; OX = 1034471 GN=queC PE=3 SV=1
MKRAVVVFSGGQDSTTCLIQALRQYDEVHCVTFDYGQRHRAEIDVACHISKELGAAAHKVLDVTLLNELAISSLTRDNIPVPDFSESEKNGLPSTFVPGRNILFLTLAAIYAYQVEAESVITGVCETDFSGYPDCRDEFVKALNKAVSLGIARDIRFETPLMWLNKAETWALADYYQKLDFVRNKTLTCYNGVQGDGCGECAACHLRAKGLNHYLSNAQTTMLDMKSKTHLS

SEQ ID NO: 43393 - protein, 232 aa, Xenorhabdus japonica
  REGION 1..232: note = tr|A0A1I5CYB4|A0A1I5CYB4_9GAMM 7-cyano-7-deazaguanine synthase OS=Xenorhabdus japonica; OX = 53341 GN=queC PE=3 SV=1
MKRSVVVFSGGQDSTTCLIQALRQYDEVHCVTFDYGQRHRAEIDVACHISKELGATAHKVLDVTLLNELAISSLTRDNIPVPDFSESEKSGLPSTFVPGRNILFLTLATIYAYQVEAEAVITGVCETDFSGYPDCRDEFVTALNKAVNLGIARDIRFETPLMWLNKAETWALADYYQKLDFVRNQTLTCYNGIQGDGCSECAACHLRAKGLNHYLSNALAVMLEMKSKTHLS

SEQ ID NO: 43394 - protein, 232 aa, unidentified
  source 1..232: note = Xenorhabdus khoisanae
  REGION 1..232: note = tr|A0A0J5FVT8|A0A0J5FVT8_9GAMM 7-cyano-7-deazaguanine synthase OS=Xenorhabdus khoisanae; OX = 880157 GN=queC PE=3 SV=1
MKRAVVVFSGGQDSTTCLIQALRQYDEVHCVTFDYGQRHRAEIDVACRISEELGAAAHKVLDVTLLNELAISSLTRDNIPVPDFSESEKNGLPNTFVPGRNILFLTLAAIYAYQVEAEAVITGVCETDFSGYPDCRDEFVKALNKAVSLGIARDIRFETPLMWLNKAETWALADYYEKLDFVRNQTLTCYNGIQGDGCGECAACHLRAKGLGYYLNNAQSTMADMKSKTHLS

SEQ ID NO: 43395 - protein, 232 aa, Xenorhabdus koppenhoeferi
  REGION 1..232: note = tr|A0A1I7I8X1|A0A1I7I8X1_9GAMM 7-cyano-7-deazaguanine synthase OS=Xenorhabdus koppenhoeferi OX=351659 GN=queC PE=3 SV=1
MKRAVVVFSGGQDSTTCLIQALRQYDEVHCVTFDYGQRHRTEIDVACRISKELGAAAHKVLDVTVLNELAISSLTRDNIPVPDFNASEKSGLPNTFVPGRNILFLTLAAIYAYQIEAEAVITGVCETDFSGYPDCRDEFVKALNNAVSLGIARDIRFETPLMWLNKAETWALADYYQKLDFVRNQTLTCYNGIQGDGCGECAACHLRTKGLTNYLTNIQSIMADMKSKTHLS

SEQ ID NO: 43396 - protein, 232 aa, Xenorhabdus kozodoii
  REGION 1..232: note = tr|A0A2D0L7I8|A0A2D0L7I8_9GAMM 7-cyano-7-deazaguanine synthase OS=Xenorhabdus kozodoii; OX = 351676 GN=queC PE=3 SV=1
MKRAVVVFSGGQDSTTCLIQALHQYDEVHCVTFDYGQRHRAEIDVACRISKELGAAAHKVLDVTLLNELAISSLTRDNIPVPDFSESEKSGLPSTFVPGRNILFLTLAAIYAYQVEAEAVITGVCETDFSGYPDCRDEFVKALNKAVSLGIARDIRFETPLMWLNKAETWALADYYQKLDFIRNKTLTCYNGIQGDGCGECAACHLRAKGLNHYLNNAQSTMLAMKSKTHLS

SEQ ID NO: 43397 - protein, 232 aa, Xenorhabdus mauleonii
  REGION 1..232: note = tr|A0A1I3Q9H6|A0A1I3Q9H6_9GAMM 7-cyano-7-deazaguanine synthase OS=Xenorhabdus mauleonii; OX = 351675 GN=queC PE=3 SV=1
MKRAVVVFSGGQDSTTCLIQALRQYDEVHCVTFDYGQRHRAEIDVACRISKELGAAAHKVLDVTLLNELAISSLTRDNIPVPDFNTSEKSGLPSTFVPGRNILFLTLAAIYAYQVEAEAVITGVCETDFSGYPDCRDEFVKALNKAVSLGIARDIRFETPLMWLNKAETWALADYYQQLDFIRSQTLTCYNGIQGDGCGECAACHLRAKGLNDYLNNAQSIMLDMKSKTHLS

SEQ ID NO: 43398 - protein, 232 aa, Xenorhabdus miraniensis
  REGION 1..232: note = tr|A0A2D0JNB1|A0A2D0JNB1_9GAMM 7-cyano-7-deazaguanine synthase OS=Xenorhabdus miraniensis; OX = 351674 GN=queC PE=3 SV=1
MKRAVVVFSGGQDSTTCLIQALRQYDEVHCVTFDYGQRHRAEIDVACRISEKLGAAAHKVLDVTLLNELAISSLTRDNIPVPDFSESEKNGLPNTFVPGRNILFLTLAAIYAYQVEAEAVITGVCETDFSGYPDCRDEFVKALNKAVSLGIARDIRFETPLMWLNKAETWALADYYEKLDFVRNQTLTCYNGIQGDGCGECAACHLRAKGLDNYLNNTQSTMANMKSKTRLS

SEQ ID NO: 43399 - protein, 442 aa, Xenorhabdus nematophila
  REGION 1..442: note = tr|D3VM37|D3VM37_XENNA Uncharacterized protein; OS = Xenorhabdus nematophila (strain ATCC 19061 / DSM 3370 / LMG 1036 / NCIB 9965 / AN6) OX=406817 GN=XNC1_p0121 PE=4; SV = 1
MARMGGLPMTQLVFHHDHRLLPSAGDSLLPVQLYGLSGQGRGDISIIGNPAIDRIKRLGVKIPAQVMDFLSIALAVTAADTFVQRESSEDGWTRQFSLRLPLHEPSRWIALKKELESALHFLSGDIWDFEFCNGGYVPPEPYSQHSKFHLIKLKDLDCVSLFSGGLDSAIGAIDLLAAGRAPLLVSHAYKGDKSRQDQIAEKLNGRYSRFEINADPHIYQGDTEITMRTRSLNFLAFAAVGACAVQEVSQQEKVDLFVPENGFISLNAPLTPRRIGTLSTRTTHPHFITSVQKLFDAAGIPCQIINPYQFKTKGQMASQCLNKQLLSEVVESTVSCSHWKRRNQQCGVCVPCIIRRASLHAGGIDKDADYTFQSLAKVINEIDRRDDLMALRIAIAQKSTLKIGTWIAKSGPLPTATFNNFKQVFIDGLDEVESYLLSESIV

SEQ ID NO: 43400 - protein, 232 aa, Xenorhabdus nematophila
  REGION 1..232: note = tr|A0A0A8NV66|A0A0A8NV66_XENNE 7-cyano-7-deazaguanine synthase OS=Xenorhabdus nematophila str. Websteri OX=1437826 GN=ybaX PE=3 SV=1
MKRAVVVFSGGQDSTTCLIQALRQYDEVHCVTFDYGQRHRAEIDVASRISKELGAAAHKVLDVTLLNELAISSLTRDNIPVPDFNASEKSDLPNTFVPGRNILFLTLAAIYAYQVEAEAVITGVCETDFSGYPDCRDEFVRALNKAVSLGIARDIRFETPLMWLNKAETWALADYYKKLDFIRNQTLTCYNGIQGDGCSECAACHLRAKGLTNYLDNSQSIMAEMKSKTHLS

SEQ ID NO: 43401 - protein, 232 aa, Xenorhabdus poinarii
  REGION 1..232: note = tr|A0A068R1X8|A0A068R1X8_9GAMM 7-cyano-7-deazaguanine synthase OS=Xenorhabdus poinarii G6; OX = 1354304 GN=queC PE=3 SV=1
MKRAVVVFSGGQDSTTCLIQALRQYDEVHCVTFDYGQHHRAEIDVACRISKELGATAHKVLDVTLLNELAISSLTRDNIPIPDFSESEKSGLPSTFVPGRNILFLTLAAIYAYQVEAEAVITGVCETDFSGYPDCRDEFVKALNKAVSLGIARDLRFETPLMWLNKAETWALADYYQKLDFVRNQTLTCYNGIQGDGCGECAACHLRAKGLKHYLDNTQSIMLAMKFKTHLS

SEQ ID NO: 43402 - protein, 232 aa, Xenorhabdus sp.
  REGION 1..232: note = tr|A0A2D0K0Y3|A0A2D0K0Y3_9GAMM 7-cyano-7-deazaguanine synthase OS=Xenorhabdus sp. KK7.4; OX = 1851572 GN=queC PE=3 SV=1
MKRAVVVFSGGQDSTTCLIQALRQYDEVHCVTFDYGQRHRAEIDVASRISKELGAAAHKVLDVTLLNELAVSSLTRDNIPVPDFSESEKNGLPNTFVPGRNILFLTLAAIYAYQVEAEAVITGVCETDFSGYPDCRDEFVKSLNNAVCLGIARNIRFETPLMWLNKAETWALADYYQKLDFVRSQTLTCYNGMQGDGCGECAACHLRANGLNVYLNNAESTMAEMKSKTQLN

SEQ ID NO: 43403 - protein, 232 aa, Xenorhabdus sp.
  REGION 1..232: note = tr|A0A0M0TAU2|A0A0M0TAU2_9GAMM 7-cyano-7-deazaguanine synthase OS=Xenorhabdus sp. GDc328; OX = 742178 GN=queC PE=3 SV=1
MKRAVVVFSGGQDSSTCLIQALHQYDEVHCVTFDYGQRHHAEIDVACRISKELGAAAHKVLDVTLLNELAISSLTRDNIPVPDFSESEKSGLPSTFVPGRNILFLTLAAIYAYQVEAEVVITGVCETDFSGYPDCRDEFVKALNKAVSLGIARDIRFETPLMWLTKAETWALADYYQKLDFVRNKTLTCYNGIQGDGCGECAACHLRAEGLKHYLSNAQATMLDMKAKTHLS

SEQ ID NO: 43404 - protein, 232 aa, Xenorhabdus stockiae
  REGION 1..232: note = tr|A0A2D0KVJ4|A0A2D0KVJ4_9GAMM 7-cyano-7-deazaguanine synthase OS=Xenorhabdus stockiae; OX = 351614 GN=queC PE=3 SV=1
MKRAVVVFSGGQDSTTCLIQALRQYDEVHCVTFDYGQRHRAEIDVASRISKELGAAAHKVLDVTLLNELAVSSLTRDNIPVPDFSESEKNGLPNTFVPGRNILFLTLAAIYAYQVEAEAVITGVCETDFSGYPDCRDEFVKSLNNAVCLGIARNIRFETPLMWLNKAETWALADYYQKLDFVRSQTLTCYNGIQGDGCGECAACHLRANGLNVYLNNAESTMAEMKSKTQLN

SEQ ID NO: 43405 - protein, 432 aa, Xenorhabdus szentirmaii
  REGION 1..432: note = tr|W1IYU0|W1IYU0_9GAMM Uncharacterized protein; OS = Xenorhabdus szentirmaii DSM 16338 OX=1427518; GN = XSR1_340019 PE=4 SV=1
MTQLVFHHEHRLLPRASENLLPVQLYGLSGRGDISIIGNPAIDRIKRLGVKIPAQVMDFLSIALAVTAADTFVQRESSEDGWTRQLSLRLPLHEPSRWIALKKELESALHFLSGDIWDFEFCDGGYAPPEPYSQHSRFHLIKLKELDCVSLFSGGLDSAIGAIDLLTVGRAPLLVSHAYKGDKSRQDQIAERLNGRYSRFEINADPHLYQGVTDITMRTRSLNFLAFAAVGACAVQEVSQQKKVDLFVPENGFISLNAPLTPRRIGTLSTRTTHPYFISSIQQLFDAVGIPCQIINPYQFKTKGQMVSQCLNKQLLSDVVESTVSCSHWKRTDQQCGVCVPCIIRRASLHAGRISRDADYTFQSLAKVINEIDRRDDLMALRIAIAQKSTLKIGTWIAKSGPLPTATFNNFKQVFIDGLDEVESYLLSESIV

SEQ ID NO: 43406 - protein, 232 aa, Xenorhabdus szentirmaii
  REGION 1..232: note = tr|W1J046|W1J046_9GAMM 7-cyano-7-deazaguanine synthase OS=Xenorhabdus szentirmaii DSM 16338 OX=1427518; GN = queC PE=3 SV=1
MKRAVVVFSGGQDSTTCLIQALRQYDEVHCVTFDYGQRHHAEIDIACRISKELGAAAHKVLDVTLLNELAISSLTRDNIPIPDFTASEKSGLPNTFVPGRNILFLTLAAIYAYQVEAEAVITGVCETDFSGYPDCRDEFVKALNKAVNLGVARDIRFETPLMWLDKAETWALADYYQKLDYIRNQTLTCYNGIQGDGCGECAACHLRAKGLSHYLNNKQTTMADMKAKTQLN

SEQ ID NO: 43407 - protein, 232 aa, unidentified
  source 1..232: note = Xenorhabdus thuongxuanensis
  REGION 1..232: note = tr|A0A1Q5U5K0|A0A1Q5U5K0_9GAMM 7-cyano-7-deazaguanine synthase OS=Xenorhabdus thuongxuanensis OX=1873484 GN=queC PE=3 SV=1
MKRAVVVFSGGQDSSTCLIQALHQYDEVHCVTFDYGQRHRAEIDVACRISKELGATAHKVLDVTLLNELAISSLTRDNIPVPDFSESEKSGLPSTFVPGRNILFLTLAAIYAYQVEAEVVITGVCETDFSGYPDCRDEFVKALNKAVSLGIARDIRFETPLMWLNKAETWALADYYQKLDFVRNRTLTCYNGIQGDGCGECAACHLRAKGLNHYLSNTQATMLDMKSKTHLS

SEQ ID NO: 43408 - protein, 446 aa, unidentified
  source 1..446: note = Xenorhabdus thuongxuanensis
  REGION 1..446: note = tr|A0A1Q5U3Y1|A0A1Q5U3Y1_9GAMM DNA-binding protein; OS = Xenorhabdus thuongxuanensis OX=1873484 GN=Xentx_01453; PE = 4 SV=1
MNIYIDHDYSRLPPSNENTVSVQIYSRDGIISKNGIKPRDDIATIGKPVYDAMKRLGVKISDEVMDFLTISLAVTAADTFIVRDDCFDGWTRNINLSVSVINPVIWEKNKELIEKSLQFLSGDVWNFDFKSGGQKPPMPFEPVNGRRLVNLKGLDCISLFSGGLDSAIGVIDLLESGKKPLLISHSYKGDKKKQDQIARGIQEKGKFSRFCSSANPIGRGMPRDITMRTRSLNFLAFAAVGADAVMKANHHVDIPIYIPENGFISLNAPLTNRRIGSLSTRTTHPYFIKMIQEIFNNVGFNMKLLNPYQFQTKGQMVSDCKDSTTLSQIVDSTVSCSHWKRKHKQCGYCVPCMIRRASLLKGNMNEAILYHHGSYLTLRDFVKNKQDGRDDVISVLMAIENAKKKNLKTWVLKSGKLKSNDIAKYEKVFSDGLKEVEAFLKKEGII

SEQ ID NO: 43409 - protein, 232 aa, Xenorhabdus vietnamensis
  REGION 1..232: note = tr|A0A1Y2SIE2|A0A1Y2SIE2_9GAMM 7-cyano-7-deazaguanine synthase OS=Xenorhabdus vietnamensis OX=351656 GN=queC PE=3 SV=1
MKRAVVVFSGGQDSTTCLIQALRQYDEVHCVTFDYGQRHHAEIDVACHISKELGAAAHKVLDVTLLNELAISSLTRDNIPVPDFSESEKSGLPSTFVPGRNILFLTLAAIYAYQVEAEAVITGVCETDFSGYPDCRDEFVKALNKAVSLGIARDIRFETPLMWLNKAETWALADYYQKLDFVRNQTLTCYNGIQGDGCGECAACHLRAKGLNHYLSNTQTIMLEMKSKTHLT

SEQ ID NO: 43410 - protein, 230 aa, Xylella fastidiosa
  REGION 1..230: note = sp|Q9PCC3|QUEC_XYLFA 7-cyano-7-deazaguanine synthase; OS = Xylella fastidiosa (strain 9a5c) OX=160492 GN=queC PE=3; SV = 2
MKKAVVLLSGGMDSAVVTAIAQSQGFMVHALSIRYGQRHTSELDAAVRIARVLNVAAHKVVDVDLRSIGGSALTDDIEIPDAGGKGIPVTYVPARNTIMLSLALGWAEVIGAADIFCGVNAVDYSGYPDCRPQFITAFETLANLATKVGVEGTQLHVHAPLQFLSKAEIVHEGVLHGVDFGLTVSCYRADVDGRACGRCDACKLRAAGFADAGVADPTRYMELPCSLLLL

SEQ ID NO: 43411 - protein, 230 aa, Xylella fastidiosa
  REGION 1..230: note = sp|B0U2I4|QUEC_XYLFM 7-cyano-7-deazaguanine synthase; OS = Xylella fastidiosa (strain M12) OX=405440 GN=queC PE=3; SV = 1
MKKAVILLSGGMDSAVVTAIAQSQGFMVHALSIRYGQRHTSELDAAVRIARALNVVAHKVVDVDLRSIGGSALTDDIEIPDAGGEGIPVTYVPARNTIMLSLALGWAEVIGAADIFCGVNAVDYSGYPDCRPQFITAFETLANLATKVGVEGTQLHVHAPLQFLSKAEIVHEGLLHGVDFGLTVSCYRADVDGRACGRCDACKLRAAGFADAGVVDPTRYMELPCSLLLL

SEQ ID NO: 43412 - protein, 222 aa, unidentified
  source 1..222: note = Xylella taiwanensis
  REGION 1..222: note = tr|Z9JID6|Z9JID6_9GAMM 7-cyano-7-deazaguanine synthase OS=Xylella taiwanensis OX=1444770 GN=queC PE=3; SV = 1
MKKAVVLLSGGMDSAVVTAIAQSQGFTVHALSVRYGQRHTSELDAASRVAKARDVAAHKVVDVDLRSIGGSALTDDIEIPDAGSEGIPVTYVPARNTIMLSLALSWAEVIGAADLFCGVNAVDYSGYPDCRPQFITAFETLANLATKAGVEGTKLQVHAPLQFLSKANIVHEGLRQGVDFALTVSCYRADVGGRACGRCDACKLRAAGFADAGVSDPTRYVQ

SEQ ID NO: 43413 - protein, 241 aa, Xylophilus ampelinus
  REGION 1..241: note = tr|A0A318SEI5|A0A318SEI5_9BURK 7-cyano-7-deazaguanine synthase OS=Xylophilus ampelinus; OX = 54067 GN=queC PE=3 SV=1
MQRSALVLFSGGQDSATCLAWALQRYERVETVGFDYGQRHRVELDARLEVLHALRHRFPQWAARLDDDHLLEVGVLGQVSETSLTRDTAFQMEASGLPNTFVPGRNLLFLTLAAALAYRRGHDVLVTGVCETDYSGYPDCRDDTMKAMQVALSLGMDRRLVVETPLMWIDKAATWAMAEQLGGPPLVDLVVEHSHTCYLGDRSHRHPWGYGCGICAACELRAGGWNRYRETAGCQKTTDPK

SEQ ID NO: 43414 - protein, 241 aa, Xylophilus sp.
  REGION 1..241: note = tr|A0A0Q4GAE1|A0A0Q4GAE1_9BURK 7-cyano-7-deazaguanine synthase OS=Xylophilus sp. Leaf220; OX = 1735686 GN=queC PE=3 SV=1
MQRSALVLFSGGQDSATCLAWALQRYERVETVGFDYGQRHRVELDARLEVLHALRHQFPQWAARLDDDHLLDVGVLGQVSETSLTRDTAFRMEASGLPNTFVPGRNLLFLTLAAALAYRRGHDVLVTGVCETDYSGYPDCRDDTMKAMQVALSLGMDRRLVVETPLMWIDKAATWAMAEQLGGLPFVDLVVEHSHTCYLGDRSHRHAWGYGCGTCAACELRANGWNRYREAADHQQTPGQK

SEQ ID NO: 43415 - protein, 233 aa, Yangia pacifica
  REGION 1..233: note = tr|A0A2U8HHK5|A0A2U8HHK5_9RHOB 7-cyano-7-deazaguanine synthase OS=Yangia pacifica; OX = 311180 GN=queC PE=3 SV=1
MKTIVICSGGLDSVSLAHMVAANGDLTRLVSFDYGQRHAKELDFAKAAAARLGVPFQRIDMRGIGAALTGSALTSDIDVPDGHYAEETMRITVVPNRNAIMLAIAFGVAAANGDEAVATAVHGGDHFIYPDCRPGFTRAFEAMQRAALDGYADVQLYTPFVERSKADIVTEGARCGTPFAETWSCYKGGEVHCGCCGTCVERREAFHLAGIEDPTIYADPDFWVRAVASREEA

SEQ ID NO: 43416 - protein, 233 aa, Yangia pacifica
  REGION 1..233: note = tr|A0A1I6TQH9|A0A1I6TQH9_9RHOB 7-cyano-7-deazaguanine synthase OS=Yangia pacifica; OX = 311180 GN=queC PE=3 SV=1
MKIIVICSGGLDSVSLAHMVAARHELTRLVSFDYGQRHAKELDFAKAAAERLGVPFHRIDMRTIGAALTGSALTSDIDVPDGHYAEETMRITVVPNRNAIMLAIAFGVAAANGDEAVATAVHGGDHFIYPDCRPGFTRAFETMQRAALDGYADVSLYTPFVTRTKADIVTEGAKHGTPFAETWSCYKGGETHCGRCGTCVERREAFHLAGVADPTVYADPDFWVQAVASREEA

SEQ ID NO: 43417 - protein, 233 aa, Yangia sp.
  REGION 1..233: note = tr|A0A1B1PMB0|A0A1B1PMB0_9RHOB 7-cyano-7-deazaguanine synthase OS=Yangia sp. CCB-MM3; OX = 1792508 GN=queC PE=3 SV=1
MKTIVICSGGLDSVSLAHMVAARHDLTRLVSFDYGQRHAKELDFAKAAAERLGVPFHRIDMRTIGAALTGSALTSDIDVPDGHYAEETMRITVVPNRNAIMLAIAFGVAAANGDEAVATAVHGGDHFIYPDCRPGFTRAFETMQRHALDGYADVSLYTPFVERTKADIVTEGAKHGTPFAQTWSCYKGGETHCGRCGTCVERREAFHLAGVADPTIYADPDFWQQAIAAREEA

SEQ ID NO: 43418 - protein, 233 aa, Yangia sp.
  REGION 1..233: note = tr|A0A2A3JT61|A0A2A3JT61_9RHOB 7-cyano-7-deazaguanine synthase OS=Yangia sp. SAOS 153D; OX = 1779329 GN=queC PE=3 SV=1
MKTIVICSGGLDSVSLAHMVAAEQELTRLVSFDYGQRHAKELDFAQAAAARLGVPFQRIDMRGIGAALTGSALTSDIDVPDGHYAEETMRITVVPNRNAIMLAIAFGVAAANGDEAVATAVHGGDHFIYPDCRPGFTRAFETMQRHALEGYADVQFYTPFVERTKADIVTEGAKHGTPFEKTWSCYKGGEVHCGCCGTCVERREAFHLAGIEDPTVYADPDFWVRAVASREEV

SEQ ID NO: 43419 - protein, 232 aa, Yersinia aldovae
  REGION 1..232: note = tr|A0A0T9UHK6|A0A0T9UHK6_YERAL 7-cyano-7-deazaguanine synthase OS=Yersinia aldovae; OX = 29483 GN=queC PE=3 SV=1
MKRAVVVFSGGQDSTTCLIQALQQYDEVHCITFDYGQRHRAEIDVARKLAIQLGAKAHKVLDVGMLNELAVSSLTRDSIPVPTFDEEDEDSVPSTFVPGRNILFLTLTAIYAYQVQAEAVITGVCETDFSGYPDCRDKFVKALNHAIDLGIGRDIAFITPLMWLDKAETWALADYYQQLDLVRHHTLTCYNGIQGEGCGQCAACHLRAKGLSHYLANKAQVLLSLKKKTGLV

SEQ ID NO: 43420 - protein, 232 aa, Yersinia bercovieri
  REGION 1..232: note = tr|A0A2G4U4D7|A0A2G4U4D7_YERBE 7-cyano-7-deazaguanine synthase OS=Yersinia bercovieri; OX = 634 GN=queC PE=3 SV=1
MRRAVVVFSGGQDSTTCLIQALQQYDEVHCITFDYGQRHRAEIDVARELATQLGAKAHKVLDVGMLNELAVSSLTRDSIPVPTYNEEDTDAVPSTFVPGRNILFLTLAAIYAYQVQAQAVITGVCETDFSGYPDCRDEFVKALNHAIDLGIGRDIAFITPLMWLDKAETWALADYYQQLDRVRNDTLTCYNGIQGDGCGECAACHLRAKGLAFYLANKPNVLLSLKQKTGLV

SEQ ID NO: 43421 - protein, 232 aa, Yersinia enterocolitica
  REGION 1..232: note = tr|A0A2R9T9G8|A0A2R9T9G8_YEREN 7-cyano-7-deazaguanine synthase OS=Yersinia enterocolitica subsp. palearctica YE-P4 OX=1329364 GN=queC PE=3 SV=1
MKRAVVVFSGGQDSTTCLIQALQQYDEVHCITFDYGQRHRAEIDVARELAIQLGAKAHKVLEVGMLNELAVSSLTRDNIPVPSYSEEGEDSIPSTFVPGRNILFLTLAAIYAYQVQAQAVITGVCETDFSGYPDCRDEFVKALNHAIDLGIGRDIAFITPLMWLDKAETWALADYYQQLDRIRHDTLTCYNGIQGDGCGKCAACHLRAKGLEFYLANKPKVILSLKQKTGLV

SEQ ID NO: 43422 - protein, 232 aa, Yersinia enterocolitica
  REGION 1..232: note = sp|A1JNM3|QUEC_YERE8 7-cyano-7-deazaguanine synthase; OS = Yersinia enterocolitica serotype O:8 / biotype 1B (strain NCTC 13174 / 8081) OX=393305 GN=queC PE=3 SV=1
MKRAVVVFSGGQDSTTCLIQALQQYDEVHCITFDYGQRHRAEIDVARELAIQLGAKAHKVLDVGMLNELAVSSLTRDNIPVPSYSEEGEDSIPSTFVPGRNILFLTLAAIYAYQVQAQAVITGVCETDFSGYPDCRDEFVKALNHAIDLGIGRDIAFITPLMWLDKAETWALADYYQQLDRIRHDTLTCYNGIQGDGCGQCAACHLRAKGLEFYLANKPKVILSLKQKTGLV

SEQ ID NO: 43423 - protein, 232 aa, Yersinia entomophaga
  REGION 1..232: note = tr|A0A3S6EVF5|A0A3S6EVF5_YERET 7-cyano-7-deazaguanine synthase OS=Yersinia entomophaga; OX = 935293 GN=queC PE=3 SV=1
MKRAVVVFSGGQDSTTCLIQALQQYDEVHCVTFDYGQRHREEIDVARELVIQLGAKAHKVLDVCMLNELAVSSLTRDSIPVPTYEESSENAIPSTFVPGRNILFLTLAAIYAYQVQAEAVITGVCETDFSGYPDCRDEFVKALNHAINLGIARDIAFITPLMWLDKAETWALADYYQQLDLIRHHTLTCYNGIKGDGCGECAACHLRANGLNNYLTNKSAVTTSLKKKIGLL

SEQ ID NO: 43424 - protein, 232 aa, Yersinia frederiksenii
  REGION 1..232: note = tr|A0A0B6FLN8|A0A0B6FLN8_YERFR 7-cyano-7-deazaguanine synthase OS=Yersinia frederiksenii Y225 OX=1454377 GN=queC PE=3 SV=1
MKRAVVVFSGGQDSTTCLIQALQQYDEVHCITFDYGQRHRTEIDVARDLAIQLGAKAHKVLDVTMLNELAVSSLTRDSIPVPIHNEEAGDSLPSTFVPGRNILFLTLAAIYAYQVQAQAVITGVCETDFSGYPDCRDEFVKALNHAIDLGIGRDIAFITPLMWLDKAETWALADYYQQLDRVRHDTLTCYNGIQGDGCGQCAACHLRAKGLEFYLANKSKVLLSLKQKTGLV

SEQ ID NO: 43425 - protein, 232 aa, Yersinia frederiksenii
  REGION 1..232: note = tr|A0A0T9UJ51|A0A0T9UJ51_YERFR 7-cyano-7-deazaguanine synthase OS=Yersinia frederiksenii; OX = 29484 GN=queC PE=3 SV=1
MRRAVVVFSGGQDSTTCLIQALQQYDEVHCITFDYGQRHRAEIEVARKLAAQLGVKAHKVLDVGMLNELAVSSLTRDSIPVPTYNEDEKDRVPSTFVPGRNILFLTLAAIYAYQVQAEAVITGVCETDFSGYPDCRDEFVKALNHAIDLGIGRDIAFITPLMWLDKAETWALADYYQQLELVRHSTLTCYNGVQGDGCGQCAACHLRARGLESYQANKAKTLLSLKQKTGLV

SEQ ID NO: 43426 - protein, 232 aa, unidentified
  source 1..232: note = Yersinia hibernica
  REGION 1..232: note = tr|A0A481QFT1|A0A481QFT1_9GAMM 7-cyano-7-deazaguanine synthase OS=Yersinia hibernica; OX = 2339259 GN=queC PE=3 SV=1
MKRAVVVFSGGQDSTTCLIQALQQYDEVHCITFDYGQRHRAEIDVARKLATQLGAKAHKVLDVGMLNELAVSSLTRDSIPVPTYSEEEGNSLPSTFVPGRNILFLTLAAIYAYQVQAQAVITGVCETDFSGYPDCRDEFVKALNQAIDLGIGRNIAFITPLMWLDKAETWALADYYQQLDRVRHDTLTCYNGIQGDGCGQCAACHIRAKGLEFYLANKAKILLNLKQKTGLI

SEQ ID NO: 43427 - protein, 232 aa, Yersinia intermedia
  REGION 1..232: note = tr|A0A209A1C6|A0A209A1C6_YERIN 7-cyano-7-deazaguanine synthase OS=Yersinia intermedia; OX = 631 GN=queC PE=3 SV=1
MKRAVVVFSGGQDSTTCLIQALQQYDEVHCITFDYGQRHRAEIDVARALATQLGAKAHKVLDVGMLNELAVSSLTRDSIPIPSFDEEDANTVPSTFVPGRNILFLTLAAIYAYQVQAQTVITGVCETDFSGYPDCRDEFVKALNRAIDLGIGRDIAFVTPLMWLDKAETWALADYYQQLERVRHDTLTCYNGIQGDGCGQCAACHLRAKGLALYLANKPKVLLSLKQKTGLI

SEQ ID NO: 43428 - protein, 232 aa, Yersinia intermedia
  REGION 1..232: note = tr|A0A0U1EP47|A0A0U1EP47_YERIN 7-cyano-7-deazaguanine synthase OS=Yersinia intermedia; OX = 631 GN=queC PE=3 SV=1
MKRAVVVFSGGQDSTTCLIQALQQYDEVHCITFDYGQRHRTEIDVARELALQLGATAHKVLDVGMLNELAVSSLTRDSIPVPSYDANADGALPSTFVPGRNILFLTLASIYAYQVQAQAVITGVCETDFSGYPDCRDEFIKALNHAIDLGIGRDIAFITPLMWLDKAETWALADYYQQLDLIRHHTLTCYNGIKGDGCGQCAACHLRAKGLASYMANKQQVILNLKQKVGLA

SEQ ID NO: 43429 - protein, 232 aa, Yersinia kristensenii
  REGION 1..232: note = tr|A0A0T9L9T1|A0A0T9L9T1_YERKR 7-cyano-7-deazaguanine synthase OS=Yersinia kristensenii; OX = 28152 GN=queC PE=3 SV=1
MKRAVVVFSGGQDSTTCLIQALQQYDEVHCMTFDYGQRHRAEIDVARDLAIQLGAKAHKVLDVTMLNELAVSSLTRDSIPVPTYNEGDGDSLPSTFVPGRNILFLTLAAIYAYQVQAQAVITGVCETDFSGYPDCRDEFVKALNHAIDLGIGRDIAFITPLMWLDKAETWALADYYQQLDRVRHDTLTCYNGIQGDGCGQCAACHLRAKGLEFYLANKSKVLLSLKQKTGLV

SEQ ID NO: 43430 - protein, 232 aa, Yersinia kristensenii; identical to SEQ ID NO: 43424
  REGION 1..232: note = tr|A0A0T9N8Y0|A0A0T9N8Y0_YERKR 7-cyano-7-deazaguanine synthase OS=Yersinia kristensenii; OX = 28152 GN=queC PE=3 SV=1

SEQ ID NO: 43431 - protein, 232 aa, Yersinia massiliensis
  REGION 1..232: note = tr|A0A0T9PKL1|A0A0T9PKL1_9GAMM 7-cyano-7-deazaguanine synthase OS=Yersinia massiliensis; OX = 419257 GN=queC PE=3 SV=1
MKRAVVVFSGGQDSTTCLIQALQQYDEVHCITFDYGQRHRAEIDVARELAIQLGAKAHKVLDVGMLNGLAVSSLTRESIPVPHHDEEDADAIPSTFVPGRNILFLTLAAIYAYQVQAQAVITGVCETDFSGYPDCRDEFVKALNQAINLGIGRNIDFITPLMWLDKAETWALADYYQRLDLVRSATLTCYNGIQGDGCGECAACHLRAKGLEFYLANKPNVLLSLKQKTGLV

SEQ ID NO: 43432 - protein, 232 aa, Yersinia massiliensis
  REGION 1..232: note = tr|A0A2R4NT00|A0A2R4NT00_9GAMM 7-cyano-7-deazaguanine synthase OS=Yersinia massiliensis; OX = 419257 GN=queC PE=3 SV=1
MKRAVVVFSGGQDSTTCLIQALQQYDEVHCITFDYGQRHRAEIDVARELATQLGAKAHKVLDVGMLNELAVSSLTRENIPVPHHDEEDADAIPSTFVPGRNILFLTLAAIYAYQVQAQAVITGVCETDFSGYPDCRDEFVKALNQAINLGIGRNIDFITPLMWLDKAETWALADYYQQLDRVRSSTLTCYNGIQGDGCGECAACHLRAKGLEFYLANKPNVLLSLKQKTGLV

SEQ ID NO: 43433 - protein, 232 aa, Yersinia mollaretii
  REGION 1..232: note = tr|A0A0U1I302|A0A0U1I302_YERMO 7-cyano-7-deazaguanine synthase OS=Yersinia mollaretii; OX = 33060 GN=queC PE=3 SV=1
MKRAVVVFSGGQDSTTCLIQALQQYDEVHCITFDYGQRHHAEIDVARELAIKLGAKAHKVLDVSMLNELAVSSLTRDSIPVPTYNEDDTDTVPSTFVPGRNILFLTLAAIYAYQVQAQAVITGVCETDFSGYPDCRDEFVKALNHAIDLGIGRDIAFITPLMWLDKAETWALADYYQQLDLVRNHTLTCYNGIQGDGCGECAACHLRAKGLERYQANKPNVLLSLKQKTGLV

SEQ ID NO: 43434 - protein, 232 aa, Yersinia mollaretii
  REGION 1..232: note = tr|A0A0U1K7V8|A0A0U1K7V8_YERMO 7-cyano-7-deazaguanine synthase OS=Yersinia mollaretii; OX = 33060 GN=queC PE=3 SV=1
MKRAVVVFSGGQDSTTCLIQALQQYDEVHCITFDYGQRHRAEIDVARELATQLGAKAHKVLDVGMLNELAVSSLTRDSIPVPTYNEDDTDTVPSTFVPGRNILFLTLAAIYAYQVQAQAVITGVCETDFSGYPDCRDEFVKALNHAIDLGIGRDIAFITPLMWLDKAETWALADYYQQLNLVRNHTLTCYNGIQGDGCGGCAACHLRAKGLEFYLANKPNVLLSLKQKTGLV

SEQ ID NO: 43435 - protein, 232 aa, Yersinia nurmii
  REGION 1..232: note = tr|A0A0T9L7N5|A0A0T9L7N5_9GAMM 7-cyano-7-deazaguanine synthase OS=Yersinia nurmii; OX = 685706 GN=queC PE=3 SV=1
MKRAVVVFSGGQDSTTCLIQALQQYDEVHCVTFDYGQRHREEIDVARELAIQLGAKAHKVLDVGMLNELAVSSLTRDSIPVPTYEESSENAIPSTFVPGRNILFLTLAAIYAYQVQAEAVITGVCETDFSGYPDCRDEFVKALNHAINLGIARDIAFITPLMWLDKAETWALADYYQQLDLIRHQTLTCYNGIKGDGCGECAACHLRANGLNNYLANKSAVTTSLKKKVGLL

SEQ ID NO: 43436 - protein, 232 aa, Yersinia pekkanenii
  REGION 1..232: note = tr|A0A0T9NJP8|A0A0T9NJP8_9GAMM 7-cyano-7-deazaguanine synthase OS=Yersinia pekkanenii; OX = 1288385 GN=queC PE=3 SV=1
MKRAVVVFSGGQDSTTCLIQALQQYDEVHCITFDYGQRHRAEIDVARELATRLGAKAHKVLDVGMLNELAVSSLTRDSIPVPTDSEEDADTVPSTFVPGRNILFLTLAAIYAYQVQAQAVITGVCETDFSGYPDCRDEFVKALNHAIDLGIGRDIAFITPLMWLDKAETWALADYYQQLDLVRQGTLTCYNGIQGDGCGQCAACHLRAKGLGLYLANKPDVLLSLKQKTGLV

SEQ ID NO: 43437 - protein, 232 aa, Yersinia pestis; identical to SEQ ID NO: 43428
  REGION 1..232: note = sp|Q8ZC72|QUEC_YERPE 7-cyano-7-deazaguanine synthase; OS = Yersinia pestis OX=632 GN=queC PE=3 SV=1

SEQ ID NO: 43438 - protein, 232 aa, Yersinia pestis; identical to SEQ ID NO: 43428
  REGION 1..232: note = sp|Q1CL58|QUEC_YERPN 7-cyano-7-deazaguanine synthase; OS = Yersinia pestis bv. Antiqua (strain Nepal516) OX=377628; GN = queC PE=3 SV=1

SEQ ID NO: 43439 - protein, 232 aa, Yersinia pseudotuberculosis
  REGION 1..232: note = tr|A0A0T9MY55|A0A0T9MY55_YERPU 7-cyano-7-deazaguanine synthase OS=Yersinia pseudotuberculosis OX=633 GN=queC PE=3 SV=1
MKRAVVVFSGGQDSTTCLIQALQQYDEVHCITFDYGQRHRTEIDVARKLALQLGATAHKVLDVGMLNELAVSSLTRDSIPIPPYDANAEGALPSTFVPGRNILFLTLASIYAYQVQAQAVITGVCETDFSGYPDCRDEFVKALNHAIDLGIGRDIAFITPLMWLDKAETWALADYYQQLELIRHHTLTCYNGIKGDGCGQCAACHLRAKGLASYLANKQQVILSLKQKVGLA

SEQ ID NO: 43440 - protein, 232 aa, Yersinia pseudotuberculosis; identical to SEQ ID NO: 43428
  REGION 1..232: note = sp|A7FLB7|QUEC_YERP3 7-cyano-7-deazaguanine synthase; OS = Yersinia pseudotuberculosis serotype O:1b (strain IP 31758) OX=349747 GN=queC PE=3 SV=1

SEQ ID NO: 43441 - protein, 232 aa, Yersinia rohdei
  REGION 1..232: note = tr|A0A0U1HR72|A0A0U1HR72_YERRO 7-cyano-7-deazaguanine synthase OS=Yersinia rohdei; OX = 29485 GN=queC PE=3 SV=1
MKRAVVVFSGGQDSTTCLIQALQQYDEVHCITFDYGQRHSAEIEVARQLATQLGVKAHKVLDVGMLNELAVSSLTRDSIPVPSYHEDDENAVPNTFVPGRNILFLTLSAIYAYQVQAQAVITGVCETDFSGYPDCRDEFVKALNHAIDLGIGRDIAFITPLMWLDKAETWALADYYQQLDRVRHDTLTCYNGIQGDGCGQCAACHLRAKGLTFYLANKPKVLLSMKQKTGLN

SEQ ID NO: 43442 - protein, 232 aa, Yersinia ruckeri
  REGION 1..232: note = tr|A0A085U5B3|A0A085U5B3_YERRU 7-cyano-7-deazaguanine synthase OS=Yersinia ruckeri; OX = 29486 GN=queC PE=3 SV=1
MKRAVVVFSGGQDSTTCLIQALQQYDEVHCITFDYGQRHREEIEVARKLTSQLGAKAHKVLDVGMLNELAVSSLTRDNIPVPVYEENSVNTLPNTFVPGRNILFLTLAAIYAYQVQAEAVITGVCETDFSGYPDCRDEFVKALNHAINLGIARDIAFITPLMWLDKAETWALADYYQQLELIRHHTLTCYNGVQGDGCGECAACHLRAKGLNNYLANKTAVTTSLKNKTGLR

SEQ ID NO: 43443 - protein, 232 aa, Yersinia similis; identical to SEQ ID NO: 43439
  REGION 1..232: note = tr|A0A0T9PRB5|A0A0T9PRB5_9GAMM 7-cyano-7-deazaguanine synthase OS=Yersinia similis; OX = 367190 GN=queC PE=3 SV=1

SEQ ID NO: 43444 - protein, 232 aa, unidentified
  source 1..232: note = Yersinia wautersii
  REGION 1..232: note = tr|A0A0E8XEZ1|A0A0E8XEZ1_9GAMM 7-cyano-7-deazaguanine synthase OS=Yersinia wautersii; OX = 1341643 GN=queC PE=3 SV=1
MKRAVVVFSGGQDSTTCLIQALQQYDEVHCITFDYGQRHRTEIDVARELALQLGATAHKVLDVGMLNELAVSSLTRDSIPVPSYDANANSALPSTFVPGRNILFLTLASIYAYQVQAQAVITGVCETDFSGYPDCRDEFIKALNHAIDLGIGRDIAFITPLMWLDKAETWALADYYQQLDLIRHHTLTCYNGIKGDGCGQCAACHLRAKGLAFYIANKQQVILSLKQKVGLA

SEQ ID NO: 43445 - protein, 232 aa, unidentified
  source 1..232: note = Yersiniaceae bacterium
  REGION 1..232: note = tr|A0A2N5EQM6|A0A2N5EQM6_9GAMM 7-cyano-7-deazaguanine synthase OS=Yersiniaceae bacterium 2016Iso3 OX=2060066 GN=queC PE=3 SV=1
MKRAVVVFSGGQDSTTCLIQALAQYDEVHCITFDYGQRHRAEIEVAQKLSAGLGARAHKVLDVGLLNELAISSLTRDNIPVPSYGSEAAGQLPSTFVPGRNILFLTLASIYAYQIEAEAVITGVCETDFSGYPDCRDEFVKVLNQAVSLGLARDVRFETPLMWLNKAETWALADYYGQLDLVRRDTLTCYNGIQGDGCGECAACHLRANGLAVYQQDRAGVMASLKQKSGLQ

SEQ ID NO: 43446 - protein, 232 aa, unidentified
  source 1..232: note = Yersiniaceae bacterium
  REGION 1..232: note = tr|A0A2N5EAX8|A0A2N5EAX8_9GAMM 7-cyano-7-deazaguanine synthase OS=Yersiniaceae bacterium 2016Iso4 OX=2060068 GN=queC PE=3 SV=1
MKRAVVVFSGGQDSTTCLIQALAQYDEVHCITFDYGQRHRAEIEVAQTLSAALGARAHKVLDVGLLNELAISSLTRDNIPVPSYGSEAAGALPSTFVPGRNILFLTLASIYAYQIEAEAVITGVCETDFSGYPDCRDEFVKALNQAVSLGLARDVRFETPLMWLNKAETWALADYYGQLERIRRDTLTCYNGIQGDGCGECAACHLRANGLAVYQQDRAGVMASLKHKSGLQ

SEQ ID NO: 43447 - protein, 231 aa, Yokenella regensburgei
  REGION 1..231: note = tr|G9Z4A1|G9Z4A1_9ENTR 7-cyano-7-deazaguanine synthase OS=Yokenella regensburgei ATCC 43003 OX=1002368; GN = queC PE=3 SV=1
MKRAVVVFSGGQDSTTCLVQALQQYDEVHCVTFDYGQRHRAEIDVARELALKLGARAHKVLDVTLLNELAVSSLTRDSIPVPDYEPDADGIPNTFVPGRNILFLTLTAIYAYQVKAEAVITGVCETDFSGYPDCRDEFVKALNHAVDLGMAKEIRFETPLMWLDKAETWALADFWGKLDLVRSETLTCYNGIKGDGCGHCAACSLRANGLNHYLADKAGVMAAMKAKTGLN

SEQ ID NO: 43448 - protein, 231 aa, Yokenella regensburgei; identical to SEQ ID NO: 43447
  REGION 1..231: note = tr|A0A2X2QUN8|A0A2X2QUN8_9ENTR 7-cyano-7-deazaguanine synthase OS=Yokenella regensburgei; OX = 158877 GN=queC PE=3 SV=1

SEQ ID NO: 43449 - protein, 233 aa, unidentified
  source 1..233: note = Yoonia maritima
  REGION 1..233: note = tr|A0A2T0VT87|A0A2T0VT87_9RHOB 7-cyano-7-deazaguanine synthase OS=Yoonia maritima; OX = 1435347 GN=queC PE=3 SV=1
MKTIVICSGGLDSVSLTHVVANDGNLSRLVSFDYGQRHRKELDYAAACAVRLGVPHHIIDMRQIGAALSGSALTDDIDVPDGHYAEETMKITVVPNRNAIMLTIAYGIAAANGDDAVATAVHGGDHFIYPDCRPAFTESFDRMQRAALDGYADVTLSTPFVHRSKAEIVTEGARVGTPFAETWSCYKGGEKQCGRCGTCVERREAFHLAGVEDPTDYEDPDFWQAAIAAHEGN

SEQ ID NO: 43450 - protein, 233 aa, unidentified
  source 1..233: note = Yoonia sediminilitoris
  REGION 1..233: note = tr|A0A2T6KC79|A0A2T6KC79_9RHOB 7-cyano-7-deazaguanine synthase OS=Yoonia sediminilitoris; OX = 1286148 GN=queC PE=3 SV=1
MKTIVICSGGLDSVSLAHMVAQEQQLTRLVSFDYGQRHRKELNYASLCAQRLDVPLDIIDLRGIGAALTGSALTDDIDVPDGHYAEESMRVTVVPNRNAIMLAVAFGVAAAQGDQAVATAVHGGDHFIYPDCRPSFTQAFETMQKAALDGYADVSLYTPFVHRTKADIVTEGARHSTPFAQTWSCYKGGEKHCGRCGTCVERREAFHLANIADPTTYADPDYWIAAIARKDRG

SEQ ID NO: 43451 - protein, 232 aa, unidentified
  source 1..232: note = Yoonia vestfoldensis
  REGION 1..232: note = tr|A0A1Y0E731|A0A1Y0E731_9RHOB 7-cyano-7-deazaguanine synthase OS=Yoonia vestfoldensis; OX = 245188 GN=queC PE=3 SV=1
MKTIVICSGGLDSVSLAHKVADENDLIGLVSFDYGQRHKKEVEFAARCADRLGVPHDLIDMRHIGQHLSGSALTDDVDVPDGHYAEDSMKITVVPNRNAIMLAIAFGIGAAKGADAVAAAVHGGDHFIYPDCRPEFIDAFEAMQKHALDGYAAIRLYTPFVHIPKSAIVIEGAAHGTPFGDTWSCYKGGEKHCGRCGTCVERQEAFALAEVIDPTEYDDPDFWKTTVEKGQL

SEQ ID NO: 43452 - protein, 232 aa, Zavarzinia sp.
  REGION 1..232: note = tr|A0A317ECN1|A0A317ECN1_9PROT 7-cyano-7-deazaguanine synthase OS=Zavarzinia sp. HR-AS; OX = 2211142 GN=queC PE=3 SV=1
MTEKALVLFSGGQDSTVCLAWALDRFETVETIGFDYGQRHSVELECRQTLRRRLAEEFPQWRGRLGEDHLLDLGILGAISETALTRADEIRLQADGLPNTFVPGRNLLFFTFAATIAWRRGLRHLVGGMCETDYSGYPDCRDDTLKALQVALNLGMDRRFVVETPLMWIDKAQTWALTERLGGTALVELIRTESHSCYKGERQIEHPWGRGCGQCPACELRAAGWAKWRAGR

SEQ ID NO: 43453 - protein, 232 aa, unidentified
  source 1..232: note = Zetaproteobacteria bacterium
  REGION 1..232: note = tr|A0A2A5F7J8|A0A2A5F7J8_9PROT 7-cyano-7-deazaguanine synthase OS=Zetaproteobacteria bacterium OX=2026807 GN=queC PE=3 SV=1
MSKEIQHLTKAVVLLSGGLDSATALAWALDQGWACTTLSFNYGQRHDVELQAAVKIADIYGITDHRVIDVSLGVIGGSALTSSLDVPKDLPESSEIPVTYVPARNLVFLSLAAGLAETVGAMKIVIGANVVDYSGYPDCRPDFLSAFETVANLGTKAGAEGQRFEVVAPLICLDKSEIIRLGLSLGVDYGLTRSCYDPDTYGNPCGHCDSCLFRKSGFDKLGEKDPLNYRDS

SEQ ID NO: 43454 - protein, 234 aa, unidentified
  source 1..234: note = Zetaproteobacteria bacterium
  REGION 1..234: note = tr|A0A2A5H1A3|A0A2A5H1A3_9PROT 7-cyano-7-deazaguanine synthase OS=Zetaproteobacteria bacterium OX=2026807 GN=queC PE=3 SV=1
MKILVICSGGLDSVTLAYKIAKEHDLMGLISFDYGQKHKKELAYAEKCAKALNVSYDMIDISTVGGLLSGSALTEDGIDVPDGHYAEDSMKLTIVPNRNAIMLSIAYGIASARGADAVATAVHGGDHFIYPDCRPDFINTFQTMQDHALGEHIRLYTPFIDIPKSEIAAQTAPLNVPVIDTWSCYKGGDIHCGRCGTCVERIEAFHIAKVADPTQYADPDFWIKTTQNTKTETA

SEQ ID NO: 43455 - protein, 234 aa, unidentified
  source 1..234: note = Zhizhongheella caldifontis
  REGION 1..234: note = tr|A0A2S5SUD2|A0A2S5SUD2_9BURK 7-cyano-7-deazaguanine synthase OS=Zhizhongheella caldifontis OX=1452508 GN=queC PE=3 SV=1
MADPRTALVLFSGGQDSTVCLAWALSRFQRVETIGFDYGQRHRIELDCRLTVRDALCRAFPAWAARLGDDHVLDLALLGQLSDTALTEARAIEMQANGLPNTFVPGRNLLFLTFAATLAYRRGASVLVGGMCETDYSGYPDCRDNTLKALQVALSLGMDTPMTVETPLMWLNKAQTWALAQALGGAALVDLIVEHTHTCYLGDRSSRHAWGWGCGHCPACELRARGHADFLAGA

SEQ ID NO: 43456 - protein, 225 aa, unidentified
  source 1..225: note = Zhongshania aliphaticivorans
  REGION 1..225: note = tr|A0A127M3N2|A0A127M3N2_9GAMM 7-cyano-7-deazaguanine synthase OS=Zhongshania aliphaticivorans OX=1470434 GN=queC PE=3 SV=1
MQKKAVVLVSGGLDSATVLAQAIKAGYECYALAFDYGQRHRAELVAASRVAESGGAKEFKIIKLDLSSIGGSALTDMKIDVPDAGAVGIPVTYVPARNTVFLSIALGWAEVLDADDIFIGVNAVDYSGYPDCRPAFIEAFETLANVATKAGVEGHGMRIHTPLMALSKADIVKLGTGLGVDYGQTVSCYRANTEGEACGRCDSCHLRREGFLQAGVADPTRYHKL

SEQ ID NO: 43457 - protein, 225 aa, Zhongshania sp.
  REGION 1..225: note = tr|A0A3N0CRD8|A0A3N0CRD8_9GAMM 7-cyano-7-deazaguanine synthase OS=Zhongshania sp. DSW25-10 OX=2304603 GN=queC PE=3 SV=1
MAKKAVVLVSGGLDSATVLAQAVAAGYECYALAFDYGQRHRAELVAAKRVAETGGATEFKVIRLDLSSIGGSALTDMNIAVPDAGATGIPVTYVPARNTVFLSIALGWAEVLDADDIFIGVNAVDYSGYPDCRPAFIDAFETLANVATKAGVEGHGMQIHTPLMTLSKAEIVKAGTALGVDYAQTVSCYSANDDGEACGRCDSCFLRREGFEQAGINDPTRYSKQ

SEQ ID NO: 43458 - protein, 225 aa, Zhongshania sp.; identical to SEQ ID NO: 43457
  REGION 1..225: note = tr|A0A2S4HC82|A0A2S4HC82_9GAMM 7-cyano-7-deazaguanine synthase OS=Zhongshania sp. ZX-21; OX = 2067667 GN=queC PE=3 SV=1

SEQ ID NO: 43459 - protein, 235 aa, Zobellella denitrificans
  REGION 1..235: note = tr|A0A291HPW4|A0A291HPW4_9GAMM 7-cyano-7-deazaguanine synthase OS=Zobellella denitrificans OX=347534 GN=queC PE=3 SV=1
MNALLICSGGFDSVTLAHRLAAEQSLGALLTFDYGQRHKKEIDAARRCAERLAVPHLVMDIGHIGRQLSGSALTDDIEVPHGHYSEENMKVTVVPNRNAIMLTIAFGVAAARGLDTVALAVHGGDHFIYPDCRPDFIRLFGEMQARALEGVAEVALLAPYVNTDKAEIARDAARFDVPVADTWSCYEGGDLHCGRCGTCVERIEAMALAGVVDPTAYKDEQYWREAVARVNACTP

SEQ ID NO: 43460 - protein, 235 aa, Zobellella denitrificans
  REGION 1..235: note = tr|A0A231MVT5|A0A231MVT5_9GAMM 7-cyano-7-deazaguanine synthase OS=Zobellella denitrificans OX=347534 GN=queC PE=3 SV=1
MNALLICSGGFDSVTLAHRLAAEQSLGALLTFDYGQRHKKEIDAARRCAERLAVPHLVMDIGHIGRQLSGSALTDDIEVPHGHYSEENMKVTVVPNRNAIMLTIAFGVAAARGLDTVALAVHGGDHFIYPDCRPDFIRLFGEMQARALEGVAEVALLAPYVNTDKTEIARDTARFNVPVADTWSCYEGGDLHCGRCGTCVERIEAMALAGVADPTPYKDEQYWREAVARVNACTP

SEQ ID NO: 43461 - protein, 235 aa, unidentified
  source 1..235: note = Zobellella endophytica
  REGION 1..235: note = tr|A0A2P7RBD3|A0A2P7RBD3_9GAMM 7-cyano-7-deazaguanine synthase OS=Zobellella endophytica; OX = 2116700 GN=queC PE=3 SV=1
MKALLICSGGFDSVTLAHRLAAEQSLGALLTFDYGQRHKKEIDAARRCAERLAVPHLVMDIGHIGRQLSGSALTDDIEVPHGHYSEENMKVTVVPNRNAIMLTIAFGVAAARGLDTVALAVHGGDHFIYPDCRPDFIRLFGEMQARALEGVAEVALLAPYVNSDKTGIARDAARFAVPVADTWSCYEGGDLHCGRCGTCVERIEALALAGVADPTPYRDEQYWREAVARVKACTP

SEQ ID NO: 43462 - protein, 231 aa, Zobellella taiwanensis
  REGION 1..231: note = tr|A0A2P7RE19|A0A2P7RE19_9GAMM 7-cyano-7-deazaguanine synthase OS=Zobellella taiwanensis; OX = 347535 GN=queC PE=3 SV=1
MKALLICSGGFDSVTLAYRLAADNALGALLTFDYGQRHKKEIDAARLCAERLGVPHLVMDIGHIGRQLSGSALTDDIDVPHGHYSEENMKVTVVPNRNAIMLTIAFGVAAARGLDTVALAVHGGDHFIYPDCRPDFIRLFGDMQAKALDGVAEVALLAPYVNADKTEIARDAARFNVPVAETWSCYEGGDIHCGRCGTCVERIEAMALAGLADPTPYQDDQFWRDAVARAK

SEQ ID NO: 43463 - protein, 225 aa, Zoogloea ramigera
  REGION 1..225: note = tr|A0A4Y4CTW2|A0A4Y4CTW2_ZOORA 7-cyano-7-deazaguanine synthase OS=Zoogloea ramigera; OX = 350 GN=queC PE=3 SV=1
MTKPRALVLLSGGLDSATCLAIARDAGFETYALSVEYGQRHAAELAAARRVAAALGAVAHRVAHVDLGQFGGSALTDPALAVPTDGLDGGIPITYVPARNTIMLSIAMAWAEVLGARHIYVGVNAVDYSGYPDCRPAFIEAFETMANLATKAGVEGHRLTIHAPLIDLSKAQIIQRGTELGVDYGLTVSCYQADDDGRACGLCDACRLRRAGFEAAGLPDPTPYR

SEQ ID NO: 43464 - protein, 227 aa, Zoogloea sp.
  REGION 1..227: note = tr|A0A5C7KFR4|A0A5C7KFR4_9RHOO 7-cyano-7-deazaguanine synthase OS=Zoogloea sp. OX=49181; GN = queC PE=3 SV=1
MTTPRPRALVLLSGGLDSATCLAIARAEGFDAYALSVEYGQRHAAELAAAQRVAKALGATAHRVAHVDLGQFGGSALTDPALAVPIEGLEGGIPITYVPARNTIMLSIALAWAEVLGADHIYVGVNAVDYSGYPDCRPAFISAFETMANLATKAGVEGHKLHIHAPLIDLSKADIIRRGTALGVDYGLTVSCYQADDEGRACGLCDACRLRRAGFEAAGVADPTPYR

SEQ ID NO: 43465 - protein, 230 aa, unidentified
  source 1..230: note = Zoogloeaceae bacteirum
  REGION 1..230: note = tr|A0A2S0QTS2|A0A2S0QTS2_9RHOO 7-cyano-7-deazaguanine synthase OS=Zoogloeaceae bacteirum Par-f-2 OX=2080469 GN=queC PE=3 SV=1
MEQTPRAVVLLSGGLDSATCLAIARDMGFECYALSVAYGQRHAAELTASKRVADALGAREHRLARVNLGQFGGSALTDPAIQVPEGDSGNGIPVTYVPARNTVMLSIALAWAEVLDARDIFVGVNAVDYSGYPDCRPEFIRAFETMANLATKTGVEGARLRIHAPLIELSKAEIIQLGTRLGVDYGITVTCYQADEQGRACGRCEACRLRRAGFQAAGIEDPTPYQGRDG

SEQ ID NO: 43466 - protein, 243 aa, Zooshikella ganghwensis
  REGION 1..243: note = tr|A0A4P9VMP2|A0A4P9VMP2_9GAMM Uncharacterized protein OS=Zooshikella ganghwensis OX=202772; GN = B9G39_12245 PE=4 SV=1
MAIYHVLWTGGWDSTFRLLDLLINKAAPVVPYYILNTDRTSTGIELSTMTRIKRAIQQQWPDATQRLSPTVFRAANDVESVGRLIESYDTILQSQYIGPQYEWLAKFAHQLNLHDLELSIHKDDKAHDVLLPYVIKQADEHGPYWVVNPELKSTPEYQLFHYFRFPLFELTKLEMAQQAQDSGFSDILEMTWFCHEPLANQQPCGTCNPCRYTIEEGLSRRIPWRGKLRYWGKRALTPLLSRS

SEQ ID NO: 43467 - protein, 224 aa, Zooshikella ganghwensis
  REGION 1..224: note = tr|A0A4P9VJF5|A0A4P9VJF5_9GAMM 7-cyano-7-deazaguanine synthase OS=Zooshikella ganghwensis; OX = 202772 GN=queC PE=3 SV=1
MKKAVVLLSGGLDSTTCLAYAKSQGYECYALSFDYGQKHNSELEAAKRIAHAMNAARHEVLPLQLNQLTRSALTDQSIDIPDYVDDGEIPVTYVPARNTILIAVALGWAEVLEADAIFIGVSSVDYSGYPDCRPEYIEAYRKLAELATKVGVEGKPISIETPLIHLNKAETIQLGHKLGVDYGLTVSCYRANDEGEACGECDSCYLRKKGFSDAGVEDPTHYIQ

SEQ ID NO: 43468 - protein, 242 aa, Zymobacter palmae
  REGION 1..242: note = tr|A0A348HE37|A0A348HE37_9GAMM 7-cyano-7-deazaguanine synthase OS=Zymobacter palmae; OX = 33074 GN=queC PE=3 SV=1
MSEHTPVSASNAVLSSSIPASRRAVVIYSGGMDSFTVLHKAIAQGFEVHALSFNYGQRHSRELESARKVCAQLGLSHKVVDIRAIHGLIDNSSLTNNDQALPTGDYDEGNMTSTVVPNRNMILLSLAIGYAVNIDAEHCFYGAHGGDHAIYPDCRPEFVEKMQDVARIANYTPVEVHAPYLTASKADILADGIAMGLDYADTWTCYLGEEAACGECGSCRERLAAFAAHGLTDPVPYRQSKG

SEQ ID NO: 43469 - protein, 254 aa, Zymomonas mobilis
  REGION 1..254: note = tr|A0A2R9NTM5|A0A2R9NTM5_ZYMMB 7-cyano-7-deazaguanine synthase OS=Zymomonas mobilis subsp. mobilis NRRL B-12526 OX=1194424 GN=queC PE=3 SV=1
MTANQTKKSVPSFTSDIRQGVSNEGCLVLYSGGQDSATCLAWALEHFDRVETIGFDYGQRHKIELECRENLKQKLIENFPDWAAHLGEDHMLDLAVLHQVSDCALTRETEIAFGEDGIPNSFVPGRNLLFFTFAATIAYRRGLRHIVGGMCETDYSGYPDCRDDTIKALQVAINLGLERRLVLHTPLMWLDKASTWQMAEEVGGKELVEIIRQESHSCYLGEREILHDWGYGCGHCPACELRAAGWESYQKSRS

SEQ ID NO: 43470 - protein, 254 aa, Zymomonas mobilis
  REGION 1..254: note = sp|Q5NNR3|QUEC_ZYMMO 7-cyano-7-deazaguanine synthase; OS = Zymomonas mobilis subsp. mobilis (strain ATCC 31821 / ZM4 / CP4) OX=264203 GN=queC PE=3 SV=1
MTANQTKKSVPSFTSDIRQGVSNEGCLVLYSGGQDSATCLAWALEHFDRVETIGFDYGQRHKVELECRENLKQKLIQNFPDWAAHLGEDHMLDLAVLHQVSDCALTRETEIAFGEDGIPNSFVPGRNLLFFTFAATIAYRRGLRHIVGGMCETDYSGYPDCRDDTIKALQVAINLGLERRLVLHTPLMWLDKASTWQMAEEVGGKELVEIIRQESHSCYLGEREILHDWGYGCGHCPACELRAAGWESYQKSRS

SEQ ID NO: 43471 - protein, 231 aa, Escherichia coli; identical to SEQ ID NO: 35457
  REGION 1..231: note = sp|P77756|QUEC_ECOLI 7-cyano-7-deazaguanine synthase; OS = Escherichia coli (strain K12) OX=83333 GN=queC PE=1 SV=1

SEQ ID NO: 43472 - protein, 231 aa, Escherichia coli
  REGION 1..231: note = sp|B7L681|QUEC_ECO55 7-cyano-7-deazaguanine synthase; OS = Escherichia coli (strain 55989 / EAEC) OX=585055; GN = queC PE=3 SV=1
MKRAVVVFSGGQDSTTCLVQALQQYDEVHCVTFDYGQRHRAEIDVARELALKLGARARKVLDVTLLNELAVSSLTRDSIPVPDYEPEADGIPNTFVPGRNILFLTLAAIYAYQVKAEAVITGVCETDFSGYPDCRDEFVKALNHAVSLGMAKDIRFETPLMWIDKAETWALADYYGKLDLVRNETLTCYNGIKGDGCGHCAACNLRANGLNHYLADKPTVMAAMKQKTGLR

SEQ ID NO: 43473 - protein, 231 aa, Escherichia coli
  REGION 1..231: note = sp|B1J004|QUEC_ECOLC 7-cyano-7-deazaguanine synthase; OS = Escherichia coli (strain ATCC 8739 / DSM 1576 / Crooks); OX = 481805 GN=queC PE=3 SV=1
MKRAVVVFSGGQDSTTCLVQALQQYDEVHCVTFDYGQRHRAEIDVARELALKLGARAHKVLDVTLLNELAVSSLTRDSIPVPDYEPEADGIPNTFVPGRNILFLTLAAIYAYQVKAEAVITGVCETDFSGYPDCRDEFVKALNHAVSLGMAKDIRFETPLMWIDKAETWALADYYGKLDLVRNETLTCYNGIKGDGCSHCAACNLRANGLNHYLADKPTVMAAMKQKTGLR

SEQ ID NO: 43474 - protein, 119 aa, unidentified
  source 1..119: note = Abditibacterium utsteinense
  REGION 1..119: note = tr|A0A2S8SQB4|A0A2S8SQB4_9BACT NADPH-dependent 7-cyano-7-deazaguanine reductase OS=Abditibacterium utsteinense OX=1960156 GN=queF PE=3 SV=1
MAALTPSKTIESFPNPHPDNTYTIQFSTQEFTTLCPLTGQPDFASIHVEYCPGEKCLESKSIKQFLWSFRDEGNFHEDVTNLILNEMVRACQPKWMVVTGHFNARGGIDFIIKARHDAK

SEQ ID NO: 43475 - protein, 163 aa, Abiotrophia defectiva
  REGION 1..163: note = tr|W1Q377|W1Q377_ABIDE NADPH-dependent 7-cyano-7-deazaguanine reductase OS=Abiotrophia defectiva ATCC 49176 OX=592010 GN=queF PE=3 SV=1
MRQAQEMGSVSHLGSQGTQYRDDYAPEVLETFPNKHQGNDYFVKFNCPEFTSLCPITGQPDFATLYISYVPGAQMVESKSLKLYLFSFRNHGDFHEDCMNIIMKDLIALMDPKYIEVWGKFTPRGGISIDPYCNYGKPGTPWEQVAWNRLANHDLYPETVDNR

SEQ ID NO: 43476 - protein, 137 aa, unidentified
  source 1..137: note = Abyssibacter profundi
  REGION 1..137: note = tr|A0A363UMY8|A0A363UMY8_9GAMM NADPH-dependent 7-cyano-7-deazaguanine reductase OS=Abyssibacter profundi; OX = 2182787 GN=queF PE=3 SV=1
MSTQPSKDLETFPNPNPERDFLIQMRIPEFTCLCPKTGQPDFATIHLDYIADQTCVELKSLKLYMWSFRDEGAFHEAVTNRILDDLVAATSPRYMRVTAEFYVRGGIYTNVVAEHRAEDWTPAPPAPVPPAVTGVGQ

SEQ ID NO: 43477 - protein, 164 aa, unidentified
  source 1..164: note = Abyssicoccus albus
  REGION 1..164: note = tr|A0A3N5CIH9|A0A3N5CIH9_9STAP NADPH-dependent 7-cyano-7-deazaguanine reductase OS=Abyssicoccus albus; OX = 1817405 GN=queF PE=3 SV=1
MRDQNKLNESISHLGNQNTQYPTTYTPDVLESFDNKHPYRDYFVKFNCPEFTSLCPITNQPDFATIYISYIPDQKMVESKSLKLYLFSFRNHGDFHEDCMNIIMNDLIELMDPRYIEVWGKFTPRGGISIDPYCNYGKAGTKYEQLAENRLFNHDLYPEKIDNR

SEQ ID NO: 43478 - protein, 144 aa, unidentified
  source 1..144: note = Acaryochloris marina
  REGION 1..144: note = sp|B0CDX9|QUEF_ACAM1 NADPH-dependent 7-cyano-7-deazaguanine reductase OS=Acaryochloris marina (strain MBIC 11017) OX=329726 GN=queF PE=3 SV=1
MSQSPIQNPTSDPNAQSVQETSESKYGERQIAEGTLITFPNPRVGRRYDIHITLPEFTCKCPFSGYPDFATIHLTYVPDQRVVELKALKLYINSYRDRYISHEESVNQILDDIVAACDPLEITVKGDFLPRGNVHTVIEVHHQK

SEQ ID NO: 43479 - protein, 142 aa, unidentified
  source 1..142: note = Acaryochloris sp.
  REGION 1..142: note = tr|A0A2W1JBC8|A0A2W1JBC8_9CYAN NADPH-dependent 7-cyano-7-deazaguanine reductase OS=Acaryochloris sp. RCC1774 OX=1764569 GN=queF_2 PE=3 SV=1
MSQSSASVTELTNPIPSADPKYGERSIEEGELTTFPNPRPGRRYSIQISLPEFTCKCPFSGYPDFATIHLTYSPDQRVVELKALKLYINGYRDRYISHEESINQIMDDIVAAIDPLEIGVKGDFSPRGNVHTVIEVSHQKAS

SEQ ID NO: 43480 - protein, 139 aa, unidentified
  source 1..139: note = Accumulibacter phosphatis
  REGION 1..139: note = tr|C7RKG9|C7RKG9_ACCPU NADPH-dependent 7-cyano-7-deazaguanine reductase OS=Accumulibacter phosphatis (strain UW-1) OX=522306 GN=queF PE=3 SV=1
MSTEPAKTLDTFPNPAPQRDFHIHMEIPEFTCLCPKTGQPDFATLLLDYVPDEACVELKSLKLYIWSFRNTGCFHEEVSNRILDDLVSATRPRYMKLTAKFYVRGGIFTTVVAEYRQEGWAPTATVQLADLPSQYSTRG

SEQ ID NO: 43481 - protein, 162 aa, Acetitomaculum ruminis
  REGION 1..162: note = tr|A0A1I0YWV8|A0A1I0YWV8_9FIRM NADPH-dependent 7-cyano-7-deazaguanine reductase OS=Acetitomaculum ruminis DSM 5522 OX=1120918 GN=queF PE=3 SV=1
MRDKEKENLTLLGSKNNKYEFDYAPDLLETFINKHPDNDYFVKFNCPEFTSLCPITGQPDFATIYISYVPSEKMVESKSLKLYLFSFRNRGDFHEDCVNIIMKDLIKLMDPKYIEVWGKFLPRGGISIDPYCNYGKAGTKWEEVAWNRMANHDLYPEEVNNR

SEQ ID NO: 43482 - protein, 156 aa, Acetobacter aceti
  REGION 1..156: note = tr|A0A0D6MW89|A0A0D6MW89_ACEAC NADPH-dependent 7-cyano-7-deazaguanine reductase OS=Acetobacter aceti NBRC 14818 OX=887700 GN=queF PE=3 SV=1
MTAQNDGRETLTQLGRSTPMPQSPEEAELERVPAPHKGRQYVVRFTAPEFTSLCPVTGQPDFAHLVIDYIPRDWIVESKSLKLYLTSFRNHGAFHEDCSVTIAETLVKLLDPVWLRIGAYWYPRGGMPIDVFWQTGLPPEGVWIPAQDVPGYRGRG

SEQ ID NO: 43483 - protein, 156 aa, Acetobacter aceti
  REGION 1..156: note = tr|A0A1U9KIF7|A0A1U9KIF7_ACEAC NADPH-dependent 7-cyano-7-deazaguanine reductase OS=Acetobacter aceti; OX = 435 GN=queF PE=3 SV=1
MTAQNDGRETLTQLGRSTPMPQSPEEAELERVPAPHKGRQYVVRFTAPEFTSLCPVTGQPDFAHLVIDYIPRDWIVESKSLKLYLTSFRNHGAFHEDCSVTIAETLVKRLDPVWLRIGAYWYPRGGMPIDVFWQTGLPPEGVWIPAQDVPGYRGRG

SEQ ID NO: 43484 - protein, 156 aa, unidentified
  source 1..156: note = Acetobacter ascendens
  REGION 1..156: note = tr|A0A1D8QYZ1|A0A1D8QYZ1_9PROT NADPH-dependent 7-cyano-7-deazaguanine reductase OS=Acetobacter ascendens; OX = 481146 GN=queF PE=3 SV=1
MTSTDDGRDQLTQLGKQVAAPQSPEEAILERVPAPYPDKHYLVRFTAPEFTSLCPITGQPDFAHIVIDYVPDKWIVESKSLKLYLTSFRNHGAFHEACSIQIANTLVERLAPRWLRIGAYWYPRGGIPIDVFWQTGEPPAGVWVPEQDVPTYRGRG

SEQ ID NO: 43485 - protein, 156 aa, Acetobacter cerevisiae
  REGION 1..156: note = tr|A0A149Q5Z8|A0A149Q5Z8_9PROT NADPH-dependent 7-cyano-7-deazaguanine reductase OS=Acetobacter cerevisiae; OX = 178900 GN=queF PE=3 SV=1
MTRPDDGSDALTQLGRATPAPTCPEDAVLERVPAPYPGKNYLVRFTAPEFTSLCPVTGQPDFAHIVIDYVPDQWIVESKSLKLFLTSFRNHGAFHEACSVQIATTLVERLNPVWLRIGAYWYPRGGIPIDVFWQTGAPPADVWIPSQDVPTYRGRG

SEQ ID NO: 43486 - protein, 156 aa, Acetobacter cerevisiae
  REGION 1..156: note = tr|A0A149VEG8|A0A149VEG8_9PROT NADPH-dependent 7-cyano-7-deazaguanine reductase OS=Acetobacter cerevisiae; OX = 178900 GN=queF PE=3 SV=1
MTRPDDGSDALTQLGRATPAPTCPEEAVLERVPAPYPGKNYLVRFTAPEFTSLCPVTGQPDFAHIVIDYVPDQWIVESKSLKLFLTSFRNHGAFHEACSVQIATTLVERLNPVWLRIGAYWYPRGGIPIDVFWQTGAPPTDVWIPSQDVPTYRGRG

SEQ ID NO: 43487 - protein, 156 aa, Acetobacter cibinongensis
  REGION 1..156: note = tr|A0A0D6N524|A0A0D6N524_9PROT NADPH-dependent 7-cyano-7-deazaguanine reductase OS=Acetobacter cibinongensis 4H-1 OX=1231339 GN=queF PE=3 SV=1
MSRPDDGSAALSQLGRNIAAPSCPEEAVLERVPAPYPDRNYLVRFTAPEFTSLCPVTSQPDFAHLVIDYVPDKWIVESKSLKLFLTSFRNHGAFHEACSIQIATTLVDLLSPVWLRIGAYWYPRGGIPIDVFWQTGAPPVDVWIPSQDVPTYRGRG

SEQ ID NO: 43488 - protein, 156 aa, Acetobacter cibinongensis; identical to SEQ ID NO: 43487
  REGION 1..156: note = tr|A0A1Z5YVA2|A0A1Z5YVA2_9PROT NADPH-dependent 7-cyano-7-deazaguanine reductase OS=Acetobacter cibinongensis OX=146475 GN=queF PE=3 SV=1

SEQ ID NO: 43489 - protein, 160 aa, Acetobacter fabarum
  REGION 1..160: note = tr|A0A269XVU6|A0A269XVU6_9PROT NADPH-dependent 7-cyano-7-deazaguanine reductase OS=Acetobacter fabarum; OX = 483199 GN=queF PE=3 SV=1
MEKTMNTADDGRHALTQLGRQIAPPNSPEEAVLERVPAPNPDKRYMVRFTAPEFTSLCPITGQPDFAHIVLDYVPDQWIVESKSLKLFLTSFRNHGAFHEACSVQIASTLVDLLNPVWLRIGAYWYPRGGIPIDVFWQTGDAPAGVWIPAQDVPSYRGRG

SEQ ID NO: 43490 - protein, 156 aa, Acetobacter ghanensis
  REGION 1..156: note = tr|A0A0U5F5E0|A0A0U5F5E0_9PROT NADPH-dependent 7-cyano-7-deazaguanine reductase OS=Acetobacter ghanensis; OX = 431306 GN=queF PE=3 SV=1
MNRPDDGSHALTQLGRQIAPPSSPEEAVLERVPAPYPDKRYMVRFTAPEFTSLCPITGQPDFAHIVLDYVPDQWIVESKSLKLFLTSFRNHGAFHEACSVQIANTLVELLNPVWLRIGAYWYPRGGIPIDVFWQTGEPPAGVWIPAQDVPSYKGRG

SEQ ID NO: 43491 - protein, 156 aa, Acetobacter indonesiensis
  REGION 1..156: note = tr|A0A252AWS0|A0A252AWS0_9PROT NADPH-dependent 7-cyano-7-deazaguanine reductase OS=Acetobacter indonesiensis OX=104101 GN=queF PE=3 SV=1
MTRPDDGSSALTQLGRHTPAPNNPEDAVLERVPAPYPGKNYLVRFTAPEFTSLCPVTGQPDFAHIVIDYVPDQWIVESKSLKLFLTSFRNHGAFHEACSVQIATTLVDLLSPVWLRIGAYWYPRGGIPIDVFWQTGAPPADIWIPSQDVPTYRGRG

SEQ ID NO: 43492 - protein, 156 aa, Acetobacter indonesiensis
  REGION 1..156: note = tr|A0A0D6NCU8|A0A0D6NCU8_9PROT NADPH-dependent 7-cyano-7-deazaguanine reductase OS=Acetobacter indonesiensis 5H-1 OX=1231340 GN=queF PE=3 SV=1
MTRPDDGSSALTQLGRHTPAPNNPEDAVLERVPAPYPGKNYLVRFTAPEFTSLCPVTGQPDFAHIVIDYVPDQWIVESKSLKLFLTSFRNHGAFHEACSVQIATTLVDLLSPVWLRIGAYWYPRGGIPIDVFWQTGAPPADVWIPSQDVPTYRGRG

SEQ ID NO: 43493 - protein, 156 aa, Acetobacter malorum; identical to SEQ ID NO: 43485
  REGION 1..156: note = tr|A0A149RMD7|A0A149RMD7_9PROT NADPH-dependent 7-cyano-7-deazaguanine reductase OS=Acetobacter malorum; OX = 178901 GN=queF PE=3 SV=1

SEQ ID NO: 43494 - protein, 156 aa, Acetobacter malorum
  REGION 1..156: note = tr|A0A149UN56|A0A149UN56_9PROT NADPH-dependent 7-cyano-7-deazaguanine reductase OS=Acetobacter malorum; OX = 178901 GN=queF PE=3 SV=1
MTRPDDGSDALTQLGRATPAPTCPEEAVLERVPAPYPGKNYLVRFTAPEFTSLCPVTGQPDFAHIVIDYVPDQWIVESKSLKLFLTSFRNHGAFHEACSVQIATTLVERLNPVWLRIGAYWYPRGGIPIDVFWQTGAPPADVWIPSQDVPTYRGRG

SEQ ID NO: 43495 - protein, 156 aa, Acetobacter nitrogenifigens
  REGION 1..156: note = tr|A0A511XCE5|A0A511XCE5_9PROT NADPH-dependent 7-cyano-7-deazaguanine reductase OS=Acetobacter nitrogenifigens DSM 23921 = LMG 23498 OX=1120919 GN=queF; PE = 3 SV=1
MTEHDNGAAALTQLGQATAIPASPEAAHLERVPAPHQDRQYVVRFTAPEFTSLCPVTGQPDFAHIVIDYIPREWIVESKSLKLYLTSFRNHGAFHEDCSVTIAQKLVETLDPIWLRIGAYWYPRGGMPIDVFWQTGEAPAGVWVPAQDVPGYRGRG

SEQ ID NO: 43496 - protein, 156 aa, Acetobacter oeni
  REGION 1..156: note = tr|A0A511XI21|A0A511XI21_9PROT NADPH-dependent 7-cyano-7-deazaguanine reductase OS=Acetobacter oeni; OX = 304077 GN=queF PE=3 SV=1
MTQHDDGTKALTQLGRATAMPASPEEARLERVPAPHQRRHYVVRFTAPEFTSLCPVTGQPDFAHIVIDYIPRDWIVESKSLKLYLTSFRNHGAFHEDCSVTIAETLVTLLDPEWLRIGAYWYPRGGMPIDVFWQTGEPPATVWIPAQDVHGYRGRG

SEQ ID NO: 43497 - protein, 156 aa, unidentified
  source 1..156: note = Acetobacter okinawensis
  REGION 1..156: note = tr|A0A252BV98|A0A252BV98_9PROT NADPH-dependent 7-cyano-7-deazaguanine reductase OS=Acetobacter okinawensis OX=1076594 GN=queF PE=3 SV=1
MSTADDGRHALTQLGRQIAPPNSPEDAVLERVPAPYPDKRYMVRFTAPEFTSLCPITGQPDFAHIVLDYVPDKWIVESKSLKLFLTSFRNHGAFHEACSVQIASTLVDLLNPVWLRIGAYWYPRGGIPIDVFWQTGDAPAGVWIPAQDVPNYKGRG

SEQ ID NO: 43498 - protein, 156 aa, Acetobacter orientalis
  REGION 1..156: note = tr|A0A252C402|A0A252C402_9PROT NADPH-dependent 7-cyano-7-deazaguanine reductase OS=Acetobacter orientalis; OX = 146474 GN=queF PE=3 SV=1
MTASDDGSAALTQLGRHTPAPNSPEEAVLERVPAPYPGKRYLVRFTAPEFTSLCPVTGQPDFAHIVIDYVPDQWIVESKSLKLFLTSFRNHGAFHEACSVQIATTLVDLLSPVWLRIGAYWYPRGGIPIDVFWQTGAPPADAWIPSQDVPTYRGRG

SEQ ID NO: 43499 - protein, 156 aa, Acetobacter orientalis
  REGION 1..156: note = tr|A0A252BF13|A0A252BF13_9PROT NADPH-dependent 7-cyano-7-deazaguanine reductase OS=Acetobacter orientalis; OX = 146474 GN=queF PE=3 SV=1
MTASDDGSAALTQLGRHTPAPNSPEEAVLERVPAPYPGKRYLVRFTAPEFTSLCPVTGQPDFAHIVIDYVPDQWIVESKSLKLFLTSFRNHGAFHEACSVQIATTLVDLLSPVWLRIGAYWYPRGGIPIDVFWQTGAPPADVWIPSQDVPTYRGRG

SEQ ID NO: 43500 - protein, 156 aa, Acetobacter orleanensis
  REGION 1..156: note = tr|A0A4Y3TQP8|A0A4Y3TQP8_9PROT NADPH-dependent 7-cyano-7-deazaguanine reductase OS=Acetobacter orleanensis OX=104099 GN=queF PE=3 SV=1
MTRPDDGSDALTQLGRATPAPTCPEEAVLERVPAPYPGKNYLVRFTAPEFTSLCPVTGQPDFAHLVIDYVPDQWIVESKSLKLFLTSFRNHGSFHEACSVQIATTLVERLNPVWLRIGAYWYPRGGMPIDVFWQTGAPPADVWIPSQDVPTYRGRG

SEQ ID NO: 43501 - protein, 156 aa, Acetobacter pasteurianus
  REGION 1..156: note = tr|A0A0K0TEE0|A0A0K0TEE0_ACEPA NADPH-dependent 7-cyano-7-deazaguanine reductase OS=Acetobacter pasteurianus OX=438 GN=queF PE=3 SV=1
MTPADDGRDQLTQLGKQVAAPQSPEEAILERVPAPYPDKHYLVRFTAPEFTSLCPITGQPDFAHIVIDYVPDKWIVESKSLKLYLTSFRNHGAFHEACSIQIANTLVERLAPRWLRIGAYWYPRGGIPIDVFWQTGEPPAGVWVPAQDVPTYRGRG

SEQ ID NO: 43502 - protein, 156 aa, Acetobacter pasteurianus; identical to SEQ ID NO: 43501
  REGION 1..156: note = tr|S6D6Z4|S6D6Z4_ACEPA NADPH-dependent 7-cyano-7-deazaguanine reductase OS=Acetobacter pasteurianus 386B OX=1266844 GN=queF PE=3 SV=1

SEQ ID NO: 43503 - protein, 156 aa, unidentified
  source 1..156: note = Acetobacter peroxydans
  REGION 1..156: note = tr|A0A4Y3TWA4|A0A4Y3TWA4_9PROT NADPH-dependent 7-cyano-7-deazaguanine reductase OS=Acetobacter peroxydans; OX = 104098 GN=queF PE=3 SV=1
MSRPDDGSTALTQLGRAVSAPASPENAVLERVPAPYRDRRYMVRFTAPEFTSLCPITAQPDFAHIVIDYVPDQWIVESKSLKLFLTSFRNHGAFHEACSIQIASTLVDLLDPVWLRIGAYWYPRGGIPIDIFWQTGEAPKDVWIPPQDVPNYRGRG

SEQ ID NO: 43504 - protein, 156 aa, unidentified; identical to SEQ ID NO: 43494
  source 1..156: note = Acetobacter persici
  REGION 1..156: note = tr|A0A252AU80|A0A252AU80_9PROT NADPH-dependent 7-cyano-7-deazaguanine reductase OS=Acetobacter persici; OX = 1076596 GN=queF PE=3 SV=1

SEQ ID NO: 43505 - protein, 204 aa, Acetobacter pomorum
  REGION 1..204: note = tr|A0A346DWW6|A0A346DWW6_9PROT NADPH-dependent 7-cyano-7-deazaguanine reductase OS=Acetobacter pomorum; OX = 65959 GN=queF PE=3 SV=1
MQVLLIWPCFSSYIQTVRKRSDQTLHVKLDERADSRNICKKPHVQEHKMNPPDDGRNQLTQLGKQVAAPQSPEEAILERVPAPYPDKHYLVRFTAPEFTSLCPITGQPDFAHIVIDYVPDQWIVESKSLKLYLTSFRNHGAFHEACSIQIANTLVERLAPRWLRIGAYWYPRGGIPIDVFWQTGEPPAGVWVPAQDVPTYRGRG

SEQ ID NO: 43506 - protein, 156 aa, Acetobacter pomorum
  REGION 1..156: note = tr|A0A2G4RB05|A0A2G4RB05_9PROT NADPH-dependent 7-cyano-7-deazaguanine reductase OS=Acetobacter pomorum; OX = 65959 GN=queF PE=3 SV=1
MTPSDDGRDQLTQLGKPVAAPQSPEEAILERVPAPYPDKHYLIRFTAPEFTSLCPITSQPDFAHIVIDYVPDKWIVESKSLKLYLTSFRNHGAFHEACSIQIATTLVERLAPRWLRIGAYWYPRGGIPIDVFWQTGEPPVGVWVPAQDVPTYRGRG

SEQ ID NO: 43507 - protein, 156 aa, Acetobacter senegalensis
  REGION 1..156: note = tr|A0A0U5ESM9|A0A0U5ESM9_9PROT NADPH-dependent 7-cyano-7-deazaguanine reductase OS=Acetobacter senegalensis OX=446692 GN=queF PE=3 SV=1
MTRPDDGSAALTQLGRHTPAPTSPEEAVLERVPAPYPDKRYLVRFTAPEFTSLCPVTGQPDFAHLVIDYVPDQWIVESKSLKLFLTSFRNHGAFHEACSVQIATTLVDLLSPVWLRIGAYWYPRGGIPIDVFWQTGAPPADVWIPSQDVPTYRGRG

SEQ ID NO: 43508 - protein, 156 aa, Acetobacter sp.; identical to SEQ ID NO: 43501
  REGION 1..156: note = tr|A0A5B9GEQ3|A0A5B9GEQ3_9PROT NADPH-dependent 7-cyano-7-deazaguanine reductase OS=Acetobacter sp. B6; OX = 2500548 GN=queF PE=3 SV=1

SEQ ID NO: 43509 - protein, 156 aa, Acetobacter sp.
  REGION 1..156: note = tr|A0A5C1YN98|A0A5C1YN98_9PROT NADPH-dependent 7-cyano-7-deazaguanine reductase OS=Acetobacter sp. KACC 21233 OX=2592655 GN=queF PE=3 SV=1
MTRPDDGSTSLTQLGRQVAQPANPEDATLERVPSPYQGRLYMVRFTAPEFTSLCPITGQPDFAHIVIDYVPGEWIVESKSLKLYLTSFRNHGSFHEACSLQIATTLVDLLSPVWLRIGAYWYPRGGMPIDVFWQTDEPPKGVWIADQNVPNYRGRG

SEQ ID NO: 43510 - protein, 156 aa, Acetobacter syzygii
  REGION 1..156: note = tr|A0A270BWR7|A0A270BWR7_9PROT NADPH-dependent 7-cyano-7-deazaguanine reductase OS=Acetobacter syzygii; OX = 146476 GN=queF PE=3 SV=1
MNKPDDGSQALTQLGRQIAPPNSPEEAVLERVPAPYPDKRYMVRFTAPEFTSLCPITGQPDFAHIVIDYVPDQWIVESKSLKLFLTSFRNHGAFHESCSVQIANTLVELLNPVWLRIGAYWYPRGGIPIDVFWQTGEPPAGVWIPSQDVPSYKGRG

SEQ ID NO: 43511 - protein, 156 aa, Acetobacter tropicalis
  REGION 1..156: note = tr|A0A252A307|A0A252A307_9PROT NADPH-dependent 7-cyano-7-deazaguanine reductase OS=Acetobacter tropicalis; OX = 104102 GN=queF PE=3 SV=1
MTRPDDGSAALTQLGRHTPAPTSPEEAVLERVPAPYPDKHYLVRFTAPEFTSLCPVTGQPDFAHLVIDYVPDQWIVESKSLKLFLTSFRNHGAFHEACSVQIATTLVDLLSPVWLRIGAYWYPRGGIPIDVFWQTGAPPADVWIPSQDVPTYRGRG

SEQ ID NO: 43512 - protein, 156 aa, Acetobacter tropicalis; identical to SEQ ID NO: 43507
  REGION 1..156: note = tr|A0A094ZJF3|A0A094ZJF3_9PROT NADPH-dependent 7-cyano-7-deazaguanine reductase OS=Acetobacter tropicalis; OX = 104102 GN=queF PE=3 SV=1

SEQ ID NO: 43513 - protein, 154 aa, unidentified
  source 1..154: note = Acetobacteraceae bacterium
  REGION 1..154: note = tr|A0A4Q4BST6|A0A4Q4BST6_9PROT NADPH-dependent 7-cyano-7-deazaguanine reductase OS=Acetobacteraceae bacterium OX=1909293 GN=queF PE=3 SV=1
MTETDVSSLSQLGAKTELPASPEAAVLEKVPTGHSGTRFVVRFTAPEFTSLCPMTGQPDFAHIVIDYIPGDWLVESKSLKLYLHSFRNHGAFHEDCTIDIAKRLVELLQPEWLRIGAYWYPRGGIPIDIFWQTGEVPAGVWLPDQAVAPYRGRG

SEQ ID NO: 43514 - protein, 156 aa, unidentified
  source 1..156: note = Acetobacteraceae bacterium
  REGION 1..156: note = tr|A0A327MFX0|A0A327MFX0_9PROT NADPH-dependent 7-cyano-7-deazaguanine reductase OS=Acetobacteraceae bacterium DB1506 OX=2230885 GN=queF PE=3 SV=1
MTEASTDTSGLTLLGRPAGVPASPEAARLERVPNPHPGTPYLVRFAAPEFTSLCPLTGQPDFAHLVIDYLPGDWLVESKSLKLYLSAFRNHGAFHEACTVAIARRLVAELAPVWLRIGGYWYPRGGMPIDVFYQTGPAPEGVWIPDQGVAPYRGRG

SEQ ID NO: 43515 - protein, 165 aa, Acetobacterium bakii
  REGION 1..165: note = tr|A0A0L6U4V1|A0A0L6U4V1_9FIRM NADPH-dependent 7-cyano-7-deazaguanine reductase OS=Acetobacterium bakii; OX = 52689 GN=queF PE=3 SV=1
MMKNRDREIEGLSLLGNQEVKYNYDYNPKVLETFENKNQENEYFVKFNCPEFTSLCPITGQPDFATIYISYVPSVYMVESKSLKLYLFSYRNHGGFHEDCVNTIMKDLIKLMDPKYIEVWGKFTPRGGISIDPYCNYGKEGTDWQDTAKQRLHMHDLNPEKVDNR

SEQ ID NO: 43516 - protein, 161 aa, unidentified
  source 1..161: note = Acetobacteroides hydrogenigenes
  REGION 1..161: note = tr|A0A4R2F1A0|A0A4R2F1A0_9BACT NADPH-dependent 7-cyano-7-deazaguanine reductase OS=Acetobacteroides hydrogenigenes OX=979970 GN=queF PE=3 SV=1
MERESEGLKSLGNQGTQYDFGYTPEVLETFVNKHQENDYWVKFNIPEFTSLCPITGQPDFATIYISYVPDVQMVESKSLKLYMFSFRNHGDFHEDCVNIIMKDLIKLMEPRYIEVWGKFTPRGGISIDPYCNYGKPGTKYEQLAEQRFMNHDMYPEKIGSR

SEQ ID NO: 43517 - protein, 130 aa, unidentified
  source 1..130: note = Acetomicrobium mobile
  REGION 1..130: note = tr|I4BWN1|I4BWN1_ACEMN NADPH-dependent 7-cyano-7-deazaguanine reductase OS=Acetomicrobium mobile (strain ATCC BAA-54 / DSM 13181 / JCM 12221 / NGA); OX = 891968 GN=queFPE=3 SV=1
MEKEFKALGKPIRTPLRELDTFPKPPDVDMVVMESDEVTSLCPITGQPDFETVIIEYKPDKLCIESKSLKLYFWSFREEGHFCEALASKILHDVQKACSPLWCKVTVIQKPRGGIKIKAEAVAGEMPRQC

SEQ ID NO: 43518 - protein, 165 aa, Acetonema longum
  REGION 1..165: note = tr|F7NPH1|F7NPH1_9FIRM NADPH-dependent 7-cyano-7-deazaguanine reductase OS=Acetonema longum DSM 6540 OX=1009370 GN=queF PE=3 SV=1
MSSNDKDLTGITLLGNHDITYNYSYHPEILETFNNRHQENDYWVKFNCPEFTSLCPITGQPDFATIYISYIPDVKMVESKSLKLYLLSFRNHGCFHEDVVNIIMKDLIHLMKPRYIEVWGKFLPRGGISIDPYCNYGQADTKFEKVAWHRMQEHDLHSLDKIDNR

SEQ ID NO: 43519 - protein, 274 aa, unidentified
  source 1..274: note = Achromobacter agilis
  REGION 1..274: note = tr|A0A446CLM3|A0A446CLM3_9BURK NADPH-dependent 7-cyano-7-deazaguanine reductase OS=Achromobacter agilis; OX = 1353888 GN=queF PE=3 SV=1
MTLSHGPLGQSVSYVSQYDPTLLFPIARSHNRAALNLAAGQLPFTGVDLWNAYELSWLDAKGKPRIAMATFSVPADSPNIIESKSFKLYLNSFNQTRLVNSAALRGRLERDLSAAAGAPVGLDFFLPQRFSELQMGELDGIYIDKLDIEIDTYEPAPDLLRTRAGGTVEETLASRLLKSNCPVTGQPDWASVQIRYRGAPIDRESLLRYIVSFRQHAEFHEHCVERIFTDIMQACRPELLTVYARYTRRGGLDINPWRSNFEAAPPADVRTVRQ

SEQ ID NO: 43520 - protein, 276 aa, unidentified
  source 1..276: note = Achromobacter aloeverae
  REGION 1..276: note = tr|A0A4V1MSS3|A0A4V1MSS3_9BURK NADPH-dependent 7-cyano-7-deazaguanine reductase OS=Achromobacter aloeverae OX=1750518 GN=queF PE=3 SV=1
MTLQDAPLGHEVAYPDRYDPSLLFPIDRAPNRAALGIAAGRLPFDQGVDIWNAYEVSWLDARGKPRVALATFTVPAHAPRIIESKSFKLYLNSYNQERLPDAATVAARMRKDLGAAAGGDVGVRLVMPAEFASQRIAELDGDCLDDLDVEIETYTPAPERLRVAEAADVVEETLMSRLLKSNCPVTGQPDWGSVQVRYRGPRIDRAGLLAYIVSFRQHADFHEHCVERMFTDILRTCRPEMLSVYARYTRRGGLDINPWRATAGVAAPADARTARQ

SEQ ID NO: 43521 - protein, 274 aa, unidentified
  source 1..274: note = Achromobacter arsenitoxydans
  REGION 1..274: note = tr|H0FEV5|H0FEV5_9BURK NADPH-dependent 7-cyano-7-deazaguanine reductase OS=Achromobacter arsenitoxydans SY8 OX=477184 GN=queF PE=3 SV=1
MTLSHGPLGQSVAYASQYDPSLLFPIARSHNRAALNLHADNLPFTGVDLWNAYELSWLDAKGKPRVAMATFSVPADSPNIIESKSFKLYLNSFNQTRLVNSAALRGRLERDLSAAAGAPVGLDFYLPQRFSELQMGELDGIYIDKLDIEINTYEPAPELLRTRPGDVVEETLASRLLKSNCPVTGQPDWATVQIRYRGAPIDRESLLRYVVSFRQHAEFHEHCVERIFSDIMQACGPEKLTVYARYTRRGGLDINPWRSNFESAPPADMRTVRQ

SEQ ID NO: 43522 - protein, 274 aa, Achromobacter denitrificans
  REGION 1..274: note = tr|A0A427WW57|A0A427WW57_ACHDE NADPH-dependent 7-cyano-7-deazaguanine reductase OS=Achromobacter denitrificans OX=32002 GN=queF PE=3 SV=1
MTLSHGPLGQSVSYVSQYDPTLLFPIARSHNRAALNLADDKLPFTGVDLWNAYELSWLDAKGKPRIAMATFSVPADSPNIIESKSFKLYLNSFNQTRLVNSAALRGRLERDLSAAAGAPVGLDFFLPQRFSELQMGELDGIYIDKLDIEIDTYEPAPEVLRTRPGDTVEETLASRLLKSNCPVTGQPDWASVQIRYRGAPIDRESLLRYIVSFRQHAEFHEHCVERIYTDIMHACRPELLTVYARYTRRGGLDINPWRSNFESAPPADLRTVRQ

SEQ ID NO: 43523 - protein, 274 aa, Achromobacter insolitus
  REGION 1..274: note = tr|A0A448JRR3|A0A448JRR3_9BURK NADPH-dependent 7-cyano-7-deazaguanine reductase OS=Achromobacter insolitus OX=217204 GN=queF PE=3 SV=1
MTLSHGPLGQNVAYASQYDPSLLFPIARSHNRAALNLEAGKLPFTGVDLWNAYELSWLDAKGKPRVAMATFSVPADSPNIIESKSFKLYLNSFNQTRLVNSAALRGRLERDLSAAAGAPVGLDFFLPQRFSELQMGEMDGIYIDKLDIEIDTYEPAPEVLRTRPGDVVEETLASRLLKSNCPVTGQPDWASVQIRYRGAPIDRESLLRYVVSFRQHAEFHEHCVERIFSDIMQACRPEQLTVYARYTRRGGLDINPWRSNFEAGPPADVRTVRQ

SEQ ID NO: 43524 - protein, 274 aa, unidentified
  source 1..274: note = Achromobacter insuavis
  REGION 1..274: note = tr|F7SV03|F7SV03_9BURK NADPH-dependent 7-cyano-7-deazaguanine reductase OS=Achromobacter insuavis AXX-A OX=1003200 GN=queF PE=3 SV=1
MTLSHGPLGQSVTYVSQYDPSLLFPIARAHNREALNLARGPLPFTGVDLWNAYELSWLDAKGKPRVAMATFSVPADSPNIIESKSFKLYLNSFNQTRLVNSAALRGRLERDLSAAAGAPVGLDFILPQRFGELRMGELDGIYIDKLDIEIDTYEPAPELLRTRVGDVVEETLCSRLLKSNCPVTGQPDWASVQIRYRGQPIDREALLRYVISFRQHAEFHEHCVERIFTDIMQACAPEQLTVYARYTRRGGLDINPWRSNVEPAPPADVRTVRQ

SEQ ID NO: 43525 - protein, 274 aa, Achromobacter marplatensis
  REGION 1..274: note = tr|J4YKL6|J4YKL6_9BURK NADPH-dependent 7-cyano-7-deazaguanine reductase OS=Achromobacter marplatensis OX=470868 GN=queF PE=3 SV=1
MTLSHGPLGQSVAYASQYDPSLLFPIARSHNRAALNLNAGNLPFTGVDLWNAYELSWLDAKGKPRVAMATFSVPADSPNIIESKSFKLYLNSFNQTRLVNSAALRGRLERDLSAAAGAPVGLDFFLPQRFSELRMGEMDGIYIDKLDIEIDTYEPAPQVLRTRPGDVVEETLASRLLKSNCPVTGQPDWASVQIRYRGAPIDRESLLRYVVSFRQHAEFHEHCVERIFSDIMQACAPEQLTVYARYTRRGGLDINPWRSNFETAPPADVRTVRQ

SEQ ID NO: 43526 - protein, 274 aa, Achromobacter piechaudii
  REGION 1..274: note = tr|D4XFV0|D4XFV0_9BURK NADPH-dependent 7-cyano-7-deazaguanine reductase OS=Achromobacter piechaudii ATCC 43553 OX=742159 GN=queF PE=3 SV=1
MTLSHGPLGQSVAYASQYDPSLLFPIARSHNRAALNLHAGNLPFKGVDLWNAYELSWLDAKGKPRVAMATFSVPADSPNIIESKSFKLYLNSFNQTRLVNSAALRGRLERDLSAAAGAPVGLDFFLPQRFSELQMGEMDGIYIDKLDIEIDTYEPAPEVLRTRPGDVVEETLASRLLKSNCPVTGQPDWASVQIRYRGAPIDRESLLRYVVSFRQHAEFHEHCVERIFSDIMQACAPEQLTVYARYTRRGGLDINPWRSNVDTAPPADVRTVRQ

SEQ ID NO: 43527 - protein, 274 aa, Achromobacter piechaudii
  REGION 1..274: note = tr|A0A0L6I689|A0A0L6I689_9BURK NADPH-dependent 7-cyano-7-deazaguanine reductase OS=Achromobacter piechaudii OX=72556 GN=queF PE=3 SV=1
MTLSHGPLGQSVAYASQYDPSLLFPIARSHNRAALNLHDGNLPFKGVDLWNAYELSWLDAKGKPRVAMATFSVPADSPNIIESKSFKLYLNSFNQTRLVNSAALRGRLERDLSAAAGAPVGLDFFLPQRFSELQMGEMDGIYIDKLDIEIDTYEPAPEVLRTRPGDVVEETLASRLLKSNCPVTGQPDWASVQIRYRGAPIDRESLLRYVVSFRQHAEFHEHCVERIFSDIMQACAPEQLTVYARYTRRGGLDINPWRSNVDTAPPVDVRTVRQ

SEQ ID NO: 43528 - protein, 274 aa, unidentified
  source 1..274: note = Achromobacter pulmonis
  REGION 1..274: note = tr|A0A2N8KLG8|A0A2N8KLG8_9BURK NADPH-dependent 7-cyano-7-deazaguanine reductase OS=Achromobacter pulmonis; OX = 1389932 GN=queF PE=3 SV=1
MTLSHGPLGQSVSYVSQYDPTLLFPIARSHNRAALNLADGKLPFKGVDLWNAYELSWLDAKGKPRIAMATFSVPADSPNIIESKSFKLYLNSFNQTRLVNSAALRGRLERDLSAAAGAPVGLDFFLPQRFSELQMGELDGIYIDKLDIEIDTYEPAPELLRTRAGDPVEETLASRLLKSNCPVTGQPDWASVQIRYRGAPIDRESLLRYIVSFRQHAEFHEHCVERIFTDIMQACRPEQLTVYARYTRRGGLDINPWRSNFEAAPPPDLRTVRQ

SEQ ID NO: 43529 - protein, 304 aa, Achromobacter ruhlandii
  REGION 1..304: note = tr|A0A1D8I759|A0A1D8I759_9BURK NADPH-dependent 7-cyano-7-deazaguanine reductase OS=Achromobacter ruhlandii OX=72557 GN=queF PE=3 SV=1
MPGAAFHDAKNRPVATAYNAVISTFSDDLSMTLSHGPLGQSVTYVSQYDPSLLFPIARAHNREALNLASGPLPFTGVDLWNAYELSWLDAKGKPRVAMATFSVPADSPNIIESKSFKLYLNSFNQTRLVNSAALRGRLERDLSAAAGAPVGLDFILPQRFGELRMGELDGIYIDKLDIEIDTYEPAPELLRTRAGEVVEETLCSRLLKSNCPVTGQPDWASVQVRYRGKPIDRESLLRYVISFRQHAEFHEHCVERIFTDIMQACAPEQLTVYARYTRRGGLDINPWRSNVETAPPADVRTVRQ

SEQ ID NO: 43530 - protein, 304 aa, Achromobacter ruhlandii
  REGION 1..304: note = tr|A0A2M9GX37|A0A2M9GX37_9BURK NADPH-dependent 7-cyano-7-deazaguanine reductase OS=Achromobacter ruhlandii OX=72557 GN=queF PE=3 SV=1
MPGAAFHDAKNEAFATAYNAVISTFSDDLSMTLSHGPLGQSVTYVSQYDPSLLFPIARAHNREALNLASGPLPFTGVDLWNAYELSWLDAKGKPRVAMATFSVPADSPNIIESKSFKLYLNSFNQTRLVNSAALRGRLERDLSAAAGAPVGLDFILPQRFGELRMGELDGIYIDKLDIEIDTYEPAPELLRTRAGEVVEETLCSRLLKSNCPVTGQPDWASVQVRYRGKPIDRESLLRYVISFRQHAEFHEHCVERIFTDIMQACAPEQLTVYARYTRRGGLDINPWRSNVETAPPADVRTVRQ

SEQ ID NO: 43531 - protein, 282 aa, Achromobacter sp.
  REGION 1..282: note = tr|A0A0M7NDA6|A0A0M7NDA6_9BURK NADPH-dependent 7-cyano-7-deazaguanine reductase OS=Achromobacter sp. ATCC35328 OX=1806490 GN=queF PE=3 SV=1
MSSYANHQALAGLTLGKSTDYRDTYDASLLQGVPRSLNRDPLGLKADNLPFHGTDIWTLYELSWLNAKGLPQVAVGHVELDYTSVNLIESKSFKLYLNSFNQTRFNNWDEVRQTLERDLSTCAQGKISVALYRLDELEGQPIGHFNGTCIDDQDITIDNYEFTTDYLENATCGEKVVEETLVSHLLKSNCLITHQPDWGSLQIQYRGRQIDREKLLRYLVSFRHHNEFHEQCVERIFNDLLRFCQPEKLSVYARYTRRGGLDINPWRSNSDFVPSTTRLVRQ

SEQ ID NO: 43532 - protein, 274 aa, Achromobacter sp.
  REGION 1..274: note = tr|A0A0Q8C3W9|A0A0Q8C3W9_9BURK NADPH-dependent 7-cyano-7-deazaguanine reductase OS=Achromobacter sp. Root565 OX=1736564 GN=queF PE=3 SV=1
MTLSHGPLGQSVAYASQYDPSLLFPIARSHNRAALNLTAGSLPFTGVDLWNAYELSWLDAKGKPRVAMATFSVPADSPNIIESKSFKLYLNSFNQTRLVNSAALRGRLERDLSAAAGAPVGLDFFLPQRFSELQMGELDGIYIDKLDIEIDTYEPAPELLRTRAGDVVEETLASRLLKSNCPVTGQPDWATVQIRYRGKPIDRESLLRYVVSFRQHAEFHEHCVERIFSDIMQACGPEQLTVYARYTRRGGLDINPWRSNFEVAPPADVRTVRQ

SEQ ID NO: 43533 - protein, 274 aa, Achromobacter spanius
  REGION 1..274: note = tr|A0A3Q9KLY0|A0A3Q9KLY0_9BURK NADPH-dependent 7-cyano-7-deazaguanine reductase OS=Achromobacter spanius; OX = 217203 GN=queF PE=3 SV=1
MTLSHGPLGQSVAYASQYDPSLLFPIARSHNRAALNLEAGKLPFRGVDIWNAYELSWLDAKGKPRVAMATFSVPADSPNIIESKSFKLYLNSFNQTRLVNSAALRGRLERDLSAAAGATVGLDFFLPQRFSELRMGELDGIYIDKLDVEIDTYEPAPEVLRTRPGDVVEETLASRLLKSNCPVTGQPDWASVQIRYRGAPIDRESLLRYVVSFRQHAEFHEHCVERIFSDIMQACAPEHLTVYARYTRRGGLDINPWRSNVETAPPADVRTVRQ

SEQ ID NO: 43534 - protein, 274 aa, Achromobacter spanius
  REGION 1..274: note = tr|A0A2S0IA31|A0A2S0IA31_9BURK NADPH-dependent 7-cyano-7-deazaguanine reductase OS=Achromobacter spanius; OX = 217203 GN=queF PE=3 SV=1
MTLSHGPLGQSVAYASQYDPSLLFPIARSHNRAALNLTAGSLPFTGVDLWNAYELSWLDAKGKPRVAMATFSVPADSPNIIESKSFKLYLNSFNQTRLVNSAALRGRLERDLSAAAGAPVGLDFFLPQRFSELQMGELDGIYIDKLDIEIDTYEPAPELLRTRAGEVVEETLASRLLKSNCPVTGQPDWATVQIRYRGKPIDRESLLRYVVSFRQHAEFHEHCVERIFSDIMQACGPEQLTVYARYTRRGGLDINPWRSNFETAPPADVRTVRQ

SEQ ID NO: 43535 - protein, 274 aa, Achromobacter xylosoxidans
  REGION 1..274: note = tr|E3HEW5|E3HEW5_ACHXA NADPH-dependent 7-cyano-7-deazaguanine reductase OS=Achromobacter xylosoxidans (strain A8) OX=762376 GN=queF PE=3 SV=1
MTLSHGPLGQSVAYASQYDPSLLFPIARSHNRAALNLEAGKLPFTGVDLWNAYELSWLDAKGKPRVAMATFSVPADSPNIIESKSFKLYLNSFNQTRLVNSAALRGRLERDLSAAAGAPVGLDFFLPQRFSELQMGELAGIYIDKLDIEIDTYEPAPEVLRTRPGEVVEETLASRLLKSNCPVTGQPDWASVQIRYRGAPIDRESLLRYVVSFRQHAEFHEHCVERIFSDIMQACRPEQLTVYARYTRRGGLDINPWRSNFEAGPPADVRTVRQ

SEQ ID NO: 43536 - protein, 165 aa, Acidaminobacter hydrogenoformans
  REGION 1..165: note = tr|A0A1G5RZL5|A0A1G5RZL5_9FIRM NADPH-dependent 7-cyano-7-deazaguanine reductase OS=Acidaminobacter hydrogenoformans DSM 2784 OX=1120920 GN=queF PE=3 SV=1
MTNRSTEELNGITHLGSQGTKYDMDYNPSVLETFINKHPENDYFVKFNCPEFTSLCPITGQPDFATITISYVPDLNMVESKSLKLYLFSFRNHGDFHEDCINKIMKDLIALMDPKYIEVWGKFTPRGGISIDPYCNYGKPNTKWQDVAFNRMANHDLYPEKVDNR

SEQ ID NO: 43537 - protein, 165 aa, unidentified
  source 1..165: note = Acidaminococcaceae bacterium
  REGION 1..165: note = tr|A0A3D2QGN5|A0A3D2QGN5_9FIRM NADPH-dependent 7-cyano-7-deazaguanine reductase OS=Acidaminococcaceae bacterium OX=2049052 GN=queF PE=3 SV=1
MTSGRTKEELQGVTLLGGKTKYAFDYTPEVLEAFPNKHPGRDYFVKFNCPEFTSLCPKTGQPDFATIYISYVPDQKLVESKSLKLYLFSFRNHGDFHEDCVNIILNDLVKLLEPKYMEVWGKFLPRGGLSIDPYANYGKRGTDWEKTAHDRLHYHDMHPERIDNR

SEQ ID NO: 43538 - protein, 121 aa, unidentified
  source 1..121: note = Acidaminococcaceae bacterium
  REGION 1..121: note = tr|A0A359EUL7|A0A359EUL7_9FIRM NADPH-dependent 7-cyano-7-deazaguanine reductase (Fragment); OS = Acidaminococcaceae bacterium OX=2049052 GN=DEG55_02370; PE = 3 SV=1
VKFNCPEFTSLCPKTGQPDFATIYISYVPDQKLVESKSLKLYLFSFRNHGDFHEDCVNIIMKDLIRLLDPKYIEVWGKFLPRGGLSIDPYANYGKKGTDWEKTAHQRLHYHDMSPETVQNR

SEQ ID NO: 43539 - protein, 154 aa, Acidaminococcus fermentans
  REGION 1..154: note = tr|A0A1I5GR38|A0A1I5GR38_ACIFE NADPH-dependent 7-cyano-7-deazaguanine reductase OS=Acidaminococcus fermentans OX=905 GN=queF PE=3 SV=1
MRTEEELRGVTELGSGHTVYQNTYAPEVLESFPNKHEEAPYMVKLNCPEFTSLCPKTGQPDFGRIVISYIPDHKLVESKSLKLYLFSFRNNGDFHEDCVNIIKNDLVKLLQPKYLEVAGYFNPRGGISILPFAVYYQPDYKDMAQRRMEAFVHE

SEQ ID NO: 43540 - protein, 154 aa, Acidaminococcus fermentans
  REGION 1..154: note = tr|D2RLP9|D2RLP9_ACIFV NADPH-dependent 7-cyano-7-deazaguanine reductase OS=Acidaminococcus fermentans (strain ATCC 25085 / DSM 20731 / VR4) OX=591001; GN = queF PE=3 SV =1
MRTEEELRGVTKLGSGHTVYQNTYAPEVLESFPNKHEEAPYMVKLNCPEFTSLCPKTGQPDFGRIVISYIPDHKLVESKSLKLYLFSFRNNGDFHEDCVNIIKNDLVKLLQPKYLEVAGYFNPRGGISILPFAVYYQPDYKDMAQRRMEAFVHE

SEQ ID NO: 43541 - protein, 154 aa, Acidaminococcus intestini
  REGION 1..154: note = tr|C0WAE8|C0WAE8_9FIRM NADPH-dependent 7-cyano-7-deazaguanine reductase OS=Acidaminococcus intestini OX=187327 GN=queF PE=3 SV=1
MRTKEELAGVTALGSGHTEYKSTYDPSVLEAFPNKHEEAPYLVKLNCPEFTSLCPKTGQPDFGRVVISYIPDHKLVESKSLKLYLFSFRNNGDFHEDCVNIIKNDLVALLSPKYLEVAGYFNPRGGISILPFAVYYQDEYKEMAQRRMEAFVHE

SEQ ID NO: 43542 - protein, 154 aa, Acidaminococcus intestini; identical to SEQ ID NO: 43541
  REGION 1..154: note = tr|G4Q904|G4Q904_ACIIR NADPH-dependent 7-cyano-7-deazaguanine reductase OS=Acidaminococcus intestini (strain RyC-MR95) OX=568816 GN=queF PE=3 SV=1

SEQ ID NO: 43543 - protein, 154 aa, Acidaminococcus sp.
  REGION 1..154: note = tr|R7LV15|R7LV15_9FIRM NADPH-dependent 7-cyano-7-deazaguanine reductase OS=Acidaminococcus sp. CAG:542 OX=1262687 GN=queF PE=3 SV=1
MRTKEELQGVTELGSGHTVYQNTYAPEVLECFPNKHEEAPYMVKLDCPEFTSLCPKTGQPDFGRIVISYIPDHKLVESKSLKLYLFSFRNNGDFHEDCVNIIKNDLVDLLQPKYLEVAGYFNPRGGISILPFAVYYQPEYKDMAQRRMEAFVHE

SEQ ID NO: 43544 - protein, 154 aa, Acidaminococcus sp.
  REGION 1..154: note = tr|A0A415EHD7|A0A415EHD7_9FIRM NADPH-dependent 7-cyano-7-deazaguanine reductase OS=Acidaminococcus sp. AM05-11 OX=2291997 GN=queF PE=3 SV=1
MRTKEELAGITELGSGKTVYANTYNPGVLECFPNKHEEAPYMVKLNCPEFTSLCPKTGQPDFGRIVISYIPDHALVESKSLKLYLFSFRNNGDFHEDCVNIIKNDLVNLLHPKYLEVAGYFNPRGGISILPFAVYAQPDYQDMAKRRMEAFIHE

SEQ ID NO: 43545 - protein, 122 aa, unidentified
  source 1..122: note = Acidibacillus ferrooxidans
  REGION 1..122: note = tr|A0A101XRA9|A0A101XRA9_9BACL NADPH-dependent 7-cyano-7-deazaguanine reductase OS=Acidibacillus ferrooxidans OX=1765683 GN=queF PE=3 SV=1
MSTKPSKELDPIPNPYPHRDYEITIEAPEFTTLCPKTGQPDFGTITIRYRPGPYIIELKSLKLYLWSFRDEGHFHEEVSNLIADDFIKYAKPKYMELIGRYNVRGGISTNVRVEYVDGEIVR

SEQ ID NO: 43546 - protein, 126 aa, unidentified
  source 1..126: note = Acidibacillus ferrooxidans
  REGION 1..126: note = tr|A0A1V4ER39|A0A1V4ER39_9BACL NADPH-dependent 7-cyano-7-deazaguanine reductase OS=Acidibacillus ferrooxidans OX=1765683 GN=queF PE=3 SV=1
METRSELTMSTKPSKELDPIPNPYPHRDYEITIEAPEFTTLCPKTGQPDFGTITIRYRPGPFIIELKSLKLYLWSFRDEGHFHEEVSNVIADDFIKFAKPKYMELIGRYNVRGGISTNVRVEYTEA

SEQ ID NO: 43547 - protein, 121 aa, unidentified
  source 1..121: note = Acidibacillus sulfuroxidans
  REGION 1..121: note = tr|A0A2U3D905|A0A2U3D905_9BACL NADPH-dependent 7-cyano-7-deazaguanine reductase OS=Acidibacillus sulfuroxidans OX=1765684 GN=queF PE=3 SV=1
MSTKPSATLDPIPNPYPERDYEIYIEAPEFTTLCPKTGQPDFGTITFRYRPGPYIIELKSLKLYLWSYREEGHFHEEVTNRIADDFVRFAQPRYLEVIGKFNVRGGISTTVKVEYQADVKQ

SEQ ID NO: 43548 - protein, 127 aa, Acidiferrobacter sp.
  REGION 1..127: note = tr|A0A2Z3QZK8|A0A2Z3QZK8_9GAMM NADPH-dependent 7-cyano-7-deazaguanine reductase OS=Acidiferrobacter sp. SPIII_3 OX=1281578 GN=queF PE=3 SV=1
MPTEPTKRLETFPNPHPERDYQIHIRIPEFTCLCPKTGQPDFAELDLVYVPDHACLELKSLKLYVWSYRNEGAFHEAVTNRILNDLVAATAPRYMVLTARFNVRGGLYTHVIAHHGQRPSGLPEHGL

SEQ ID NO: 43549 - protein, 127 aa, Acidiferrobacter thiooxydans
  REGION 1..127: note = tr|A0A1C2G322|A0A1C2G322_9GAMM NADPH-dependent 7-cyano-7-deazaguanine reductase OS=Acidiferrobacter thiooxydans OX=163359 GN=queF PE=3 SV=1
MPTEPTKQLETFPNPHPERDYQIHIRIPEFTCLCPKTGQPDFAELDLVYVPDRACVELKSLKLYVWSYRNEGAFHEAVTNRILSDLVAATAPRYMVLTARFNVRGGLYTHVIAHHGQRPPGLPEHGL

SEQ ID NO: 43550 - protein, 136 aa, unidentified
  source 1..136: note = Acidiferrobacteraceae bacterium
  REGION 1..136: note = tr|A0A2E9IDD6|A0A2E9IDD6_9GAMM NADPH-dependent 7-cyano-7-deazaguanine reductase OS=Acidiferrobacteraceae bacterium OX=2024893 GN=queF PE=3 SV=1
MPSAPSKELATFSNPNPERDYTIRIEVPEFTCLCPITGQPDFGSIHIEYVPEALCVELKSLKNYFWSFRNEGAFHEAVTNQILADLVGAIDPRFMRITAYFNVRGGIYTQVVAEHTHDGWRYPEATVLPVGPPPIS

SEQ ID NO: 43551 - protein, 136 aa, unidentified
  source 1..136: note = Acidiferrobacteraceae bacterium
  REGION 1..136: note = tr|A0A2D6K762|A0A2D6K762_9GAMM NADPH-dependent 7-cyano-7-deazaguanine reductase OS=Acidiferrobacteraceae bacterium OX=2024893 GN=queF PE=3 SV=1
MPSAPSKELATFSNPNPERDYTIRIEVPEFTCLCPIAGQPDFGSIHIEYVPEALCVELKSLKNYFWSFRNEGAFHEAVTNQILADLVGAIDPRFMRITAYFNVRGGIYTQVVAEHAHDGWRCPEATVLPEGSPPIS

SEQ ID NO: 43552 - protein, 129 aa, unidentified
  source 1..129: note = Acidihalobacter ferrooxidans
  REGION 1..129: note = tr|A0A1P8UHG0|A0A1P8UHG0_9GAMM NADPH-dependent 7-cyano-7-deazaguanine reductase OS=Acidihalobacter ferrooxidans OX=1765967 GN=queF PE=3 SV=1
MATKPSKELETFPNPQPARDYTIRIRIPEFTCLCPVTGQPDFATLHLEYVPEARCVELKALKLYIWTYRDQGAFHEAVTNEILQHLVDAISPRFMRLTSEFNVRGGIYTTVVAEHRAADWVPPTPVQLP

SEQ ID NO: 43553 - protein, 129 aa, unidentified
  source 1..129: note = Acidihalobacter prosperus
  REGION 1..129: note = tr|A0A1A6C8Y4|A0A1A6C8Y4_9GAMM NADPH-dependent 7-cyano-7-deazaguanine reductase OS=Acidihalobacter prosperus OX=160660 GN=queF PE=3 SV=1
MPSQPSKALETFANPEPNRDYTIRIRIPEFTCLCPVTGQPDFATLHLEYVPESRCVELKSLKQYVWSYRDEGAFHEAVTNRMVDDIVAAIAPRFVRLTSEFNVRGGIYTTVVAEHRAADWAPPTPITLP

SEQ ID NO: 43554 - protein, 129 aa, unidentified
  source 1..129: note = Acidihalobacter prosperus
  REGION 1..129: note = tr|A0A1D8ITD0|A0A1D8ITD0_9GAMM NADPH-dependent 7-cyano-7-deazaguanine reductase OS=Acidihalobacter prosperus OX=160660 GN=queF PE=3 SV=1
MPSQPSKALETFANPEPNRDYTIRIRIPEFTCLCPVTGQPDFATLHLEYVPNQRCVELKSLKLYVWSYRDEGAFHEAVTNRIVDDIVAAIAPRFVRLTSEFNVRGGVYTNVVAEHRAAGWTPPTPVTLP

SEQ ID NO: 43555 - protein, 125 aa, unidentified
  source 1..125: note = Acidimicrobiaceae bacterium
  REGION 1..125: note = tr|A0A2E6E509|A0A2E6E509_9ACTN Uncharacterized protein OS=Acidimicrobiaceae bacterium OX=2024894; GN = CL461_07865 PE=4 SV=1
MDETMLGREIDENEYGRLDTFEIEGPMRINFYTEELQALCPSVEGIQPDIYEATLSYRAVTHAIESKSLKLWLVQYRNQRIFGEHLAVELHQKLSSLNGIDDVKVRLVQNIRGGIITDITYPSED

SEQ ID NO: 43556 - protein, 171 aa, unidentified
  source 1..171: note = Acidimicrobiaceae bacterium
  REGION 1..171: note = tr|A0A2E7X9V8|A0A2E7X9V8_9ACTN Uncharacterized protein OS=Acidimicrobiaceae bacterium OX=2024894; GN = CL437_02345 PE=4 SV=1
  VARIANT 47: note = Xaa can be any naturally occurring amino acid
  VARIANT 110: note = Xaa can be any naturally occurring amino acid
  VARIANT 133: note = Xaa can be any naturally occurring amino acid
MPPLASWPCRSAPAARRPTPAARRRTTGASPTSAATADPTRLPPASXSPPVNQPVLGRADAEPGPQIDTFPVDASVQLVRFHSTELTALCPVTEQPDFYTIDIEYTPLDXCIESKSLKLYLRTFSGTGIFAEXLAPRIADHLAAAVGTPVTVTLEQGIRGGITTTVSATSN

SEQ ID NO: 43557 - protein, 140 aa, unidentified
  source 1..140: note = Acidimicrobiales bacterium
  REGION 1..140: note = tr|A0A524B371|A0A524B371_9ACTN NADPH-dependent 7-cyano-7-deazaguanine reductase OS=Acidimicrobiales bacterium mtb01 OX=1967499 GN=queF PE=3 SV=1
MNATPARLDPDDAATLDRLTVLGREVREAIPHVEVFPAPADVEIVRFTTDELASMCPVTNQPDLSRVVIEYRPGEWCVESKSLKLYLWGFRDRAVFAEALTAEIAREIMDTARPLSVTVTLTQKPRGGIEVEAVARLGNP

SEQ ID NO: 43558 - protein, 166 aa, unidentified
  source 1..166: note = Acidimicrobiales bacterium
  REGION 1..166: note = tr|A0A524MTR9|A0A524MTR9_9ACTN NADPH-dependent 7-cyano-7-deazaguanine reductase OS=Acidimicrobiales bacterium OX=2201156 GN=queF PE=3 SV=1
MSLTVLGNTVREPIEHVEVFPAPAHVTSVTFTNDELTSMCPVTEQPDLSTVTIEYAPGEWCVESKSLKLYLWGFRDRAVFAEALAAEIAGEIMTTAKPARVTVTLVQRPRGGIEVKAVAQLPWGLVGRSISGDRSGPNFVERVHGVVHVERPEAREACRCGHVPRP

SEQ ID NO: 43559 - protein, 129 aa, unidentified
  source 1..129: note = Acidimicrobiia bacterium
  REGION 1..129: note = tr|A0A0R2QJD5|A0A0R2QJD5_9ACTN NADPH-dependent 7-cyano-7-deazaguanine reductase OS=Acidimicrobiia bacterium BACL6 MAG-120924-bin43 OX=1655583 GN=queF PE=3; SV = 1
MATDSHDNLTVLGSTIRHAIDHVEIFPAPAHVTLVRFTTDEVTSICPVTSQPDLSHVTIEFKPDQYCIESKSLKLYLWRFRDMAVFAEALAAEIANEVMVTVKPMWVKVELTQRPRGGIEVHAVAERNR

SEQ ID NO: 43560 - protein, 129 aa, unidentified; identical to SEQ ID NO: 43559
  source 1..129: note = Acidimicrobiia bacterium
  REGION 1..129: note = tr|A0A0R2QS33|A0A0R2QS33_9ACTN NADPH-dependent 7-cyano-7-deazaguanine reductase OS=Acidimicrobiia bacterium BACL6 MAG-120910-bin40 OX=1655586 GN=queF PE=3; SV = 1

SEQ ID NO: 43561 - protein, 155 aa, Acidimicrobium ferrooxidans
  REGION 1..155: note = tr|C7M0Q2|C7M0Q2_ACIFD NADPH-dependent 7-cyano-7-deazaguanine reductase OS=Acidimicrobium ferrooxidans (strain DSM 10331 / JCM 15462 / NBRC 103882 / ICP) OX=525909 G N=queF PE=3 SV=1
MDDSITLQALGSSRQTYAYDDPDPSVLETFPTPQPSGGLVIRLFALEFTSLCPVTGQPDYGQLDIVYVPGPRCVESKSLKLYLMRFRNHGAFHEACVAQVAQDLASVLAPRYLRVIGRFNARGGIAIWPLREVVADHEDPAALRALVDLDNGARP

SEQ ID NO: 43562 - protein, 129 aa, Acidimicrobium sp.; identical to SEQ ID NO: 43559
  REGION 1..129: note = tr|A0A3B9WNX9|A0A3B9WNX9_9ACTN NADPH-dependent 7-cyano-7-deazaguanine reductase OS=Acidimicrobium sp.; OX = 1872112 GN=queF PE=3 SV=1

SEQ ID NO: 43563 - protein, 154 aa, Acidiphilium cryptum
  REGION 1..154: note = sp|A5FY70|QUEF_ACICJ NADPH-dependent 7-cyano-7-deazaguanine reductase OS=Acidiphilium cryptum (strain JF-5) OX=349163 GN=queF PE=3 SV=1
MTDTRYDALQQLGRESRMPDSPEAAVLERVAAPSRGKNYVVRFTCPEFTSLCPITGQPDFAHVVIDYIPDSWIVESKSLKLYLGSFRNHGAFHEACTLMIAERLVDLLAPRWLRIGAYWYPRGGIPIDVFWQTGAPPEGAYLPDQGVPPYRGRG

SEQ ID NO: 43564 - protein, 154 aa, Acidiphilium multivorum; identical to SEQ ID NO: 43563
  REGION 1..154: note = tr|F0IY75|F0IY75_ACIMA NADPH-dependent 7-cyano-7-deazaguanine reductase OS=Acidiphilium multivorum (strain DSM 11245 / JCM 8867 / NBRC 100883 / AIU301) OX=926570 GN= queF PE=3 SV=1

SEQ ID NO: 43565 - protein, 154 aa, Acidiphilium rubrum
  REGION 1..154: note = tr|A0A1N6RP42|A0A1N6RP42_ACIRU NADPH-dependent 7-cyano-7-deazaguanine reductase OS=Acidiphilium rubrum; OX = 526 GN=queF PE=3 SV=1
MTDERYAGLHQLGHYTKAPETPEQAELERVAAPAQGSAYVIRFTCPEFTSLCPMTGQPDFAHIVLDYIPDAWIVESKSLKLFLASFRNHGAFHEACTMMIAERLTDLLAPRWLRIGAYWYPRGGIPIDVFWQTGAPPEGVFLPDQGVAPYRGRG

SEQ ID NO: 43566 - protein, 154 aa, Acidiphilium sp.
  REGION 1..154: note = tr|A0A257R8N5|A0A257R8N5_9PROT NADPH-dependent 7-cyano-7-deazaguanine reductase OS=Acidiphilium sp. 20-67-58 OX=1970291 GN=queF PE=3 SV=1
MTDTRYDALQQLGRESRMPASPEAAVLERVAAPSQGKNYVVRFTCPEFTSLCPITGQPDFAHIVIDYIPEAWIVESKSLKLYLGSFRNHGAFHEACTLMIAERLVDLLAPRWLRIGAYWYPRGGIPIDVFWQTGAPPEGAFLPDQGVPPYRGRG

SEQ ID NO: 43567 - protein, 113 aa, Acidiphilium sp.
  REGION 1..113: note = tr|A0A257RVN9|A0A257RVN9_9PROT NADPH-dependent 7-cyano-7-deazaguanine reductase (Fragment); OS = Acidiphilium sp. 21-66-27 OX=1970294 GN=B7X09_06135; PE = 3 SV=1
RFTCPEFTSLCPITGQPDFAHIVIDYIPEAWIVESKSLKLYLSSFRNHGAFHEACTLMIAERLVDLLAPRWLRIGAYWYPRGGIPIDVFWQTGAPPEGAFLPDQGVPPYRGRG

SEQ ID NO: 43568 - protein, 138 aa, unidentified
  source 1..138: note = Acidipila dinghuensis
  REGION 1..138: note = tr|A0A4Q1SDJ1|A0A4Q1SDJ1_9BACT NADPH-dependent 7-cyano-7-deazaguanine reductase OS=Acidipila dinghuensis; OX = 1560006 GN=queF PE=3 SV=1
MSTANTQRTGYTDDHANAGLDFAFPSIDTWPNQFPAYEILIDDPEFTSVCPKTSLPDFGVIKLRYMPRERCLELKSWKEYLFCYRNLGIFQENVVNQILEDVVKACDPVWAVVTGDFRPRGGISTIVEARWPRPKVEG

SEQ ID NO: 43569 - protein, 136 aa, unidentified
  source 1..136: note = Acidipila rosea
  REGION 1..136: note = tr|A0A4R1L6Z3|A0A4R1L6Z3_9BACT NADPH-dependent 7-cyano-7-deazaguanine reductase OS=Acidipila rosea; OX = 768535 GN=queF PE=3 SV=1
MAIAPRYTDEHAEAGLNHAFPAIETWQSQFPAYEILIDDPEFTSVCPKTGLPDFGAVTLRYMPRERCLELKSYKEYLFTFRNLGIFQENVVNQVLEDVVKACDPVWAVVRGEFRPRGGISTTIEARWPRPAVETKK

SEQ ID NO: 43570 - protein, 141 aa, unidentified
  source 1..141: note = Acidipila sp.
  REGION 1..141: note = tr|A0A372ITS1|A0A372ITS1_9BACT NADPH-dependent 7-cyano-7-deazaguanine reductase OS=Acidipila sp. 4G-K13; OX = 2303751 GN=queF PE=3 SV=1
MVTAPRYTDEHAKAGLDTSFPEIETWENQFPAYEILIDDPEFTSVCPKTGLPDFGVITLRYMPRQRCLELKSWKEYLFSYRNLGIFQENIVNQVLEDVVKACDPVWAIVKGDFRPRGGISTVVEARWPRPDTASALPPARL

SEQ ID NO: 43571 - protein, 143 aa, unidentified
  source 1..143: note = Acidipila sp.
  REGION 1..143: note = tr|A0A3P0XAA7|A0A3P0XAA7_9BACT NADPH-dependent 7-cyano-7-deazaguanine reductase OS=Acidipila sp. EB88; OX = 2305226 GN=queF PE=3 SV=1
MATTTSASSASSAASPRYTDEHARAGLDTVFPEIETWENQFAGYEILIDDPEFTSVCPKTGLPDFGVIQLRYMPRHRCLELKSYKEYLFCYRNLGIFQENIVNQVLNDVVKACDPIWAHVHGNFRPRGGISTLVDARWPRPKK

SEQ ID NO: 43572 - protein, 124 aa, unidentified
  source 1..124: note = Acidisarcina polymorpha
  REGION 1..124: note = tr|A0A2Z5FU77|A0A2Z5FU77_9BACT NADPH-dependent 7-cyano-7-deazaguanine reductase OS=Acidisarcina polymorpha OX=2211140 GN=queF PE=3 SV=1
MDFTFPEIETWPNQFPGYEILVDDPEFTSVCPKTGLPDFGIVTLRYTPRERCLELKSYKEYLFCYRNLGIFQENVVNQVLEDVVKACDPVWAVVKGDFRPRGGISTTIEARWPRPKLEAAEPSK

SEQ ID NO: 43573 - protein, 153 aa, Acidisphaera rubrifaciens
  REGION 1..153: note = tr|A0A0D6P609|A0A0D6P609_9PROT NADPH-dependent 7-cyano-7-deazaguanine reductase OS=Acidisphaera rubrifaciens HS-AP3 OX=1231350 GN=queF PE=3 SV=1
MSDDLSHLTQLGRTTPLPASPEAAVLERVANPSPGRAYLVRFTCPEFTSLCPLTGQPDFAHIVLDYVPRDWIVESKSLKLYLASFRNEGAFHEACTMRIAERLVALLDPVWLRIGAYWYPRGGMPIDVFWQTGAPPDGVWVPPQDVPGYRGRG

SEQ ID NO: 43574 - protein, 130 aa, unidentified
  source 1..130: note = Acidithiobacillales bacterium
  REGION 1..130: note = tr|A0A0S8BH07|A0A0S8BH07_9PROT NADPH-dependent 7-cyano-7-deazaguanine reductase OS=Acidithiobacillales bacterium SG8_45 OX=1703383 GN=queF PE=3 SV=1
MPTKPSKDLETFENPHPERDYTIEIESPEFTCLCPKTGQPDFATLYLDYIPDRKCVELKSLKLYYWSYRDEGGFHEAVTNKILSDLVAATDPRFMRLRAEFNVRGGIYTNVVVEHRQPGWQGETPPTRVS

SEQ ID NO: 43575 - protein, 141 aa, Acidithiobacillus caldus
  REGION 1..141: note = tr|F9ZQD1|F9ZQD1_ACICS NADPH-dependent 7-cyano-7-deazaguanine reductase OS=Acidithiobacillus caldus (strain SM-1) OX=990288 GN=queF PE=3 SV=1
MPSQPSRELQHFANPHPGRDFLIHMDLPEFTCLCPLTGQPDFAHFLLDYIPDERCVELKALKVYLWSFRDEGGFHEAMTNRIADDLIRLLSPRYLRLLGRWYVRGGISTDVLVEHRAPGWDNAALLQQLGPASFTRHQPGY

SEQ ID NO: 43576 - protein, 141 aa, Acidithiobacillus caldus; identical to SEQ ID NO: 43575
  REGION 1..141: note = tr|A0A059ZZJ1|A0A059ZZJ1_ACICK NADPH-dependent 7-cyano-7-deazaguanine reductase OS=Acidithiobacillus caldus (strain ATCC 51756 / DSM 8584 / KU) OX=637389; GN = queF PE= 3 SV=1

SEQ ID NO: 43577 - protein, 141 aa, unidentified
  source 1..141: note = Acidithiobacillus ferridurans
  REGION 1..141: note = tr|A0A2Z6IJA0|A0A2Z6IJA0_9PROT NADPH-dependent 7-cyano-7-deazaguanine reductase OS=Acidithiobacillus ferridurans OX=1232575 GN=queF PE=3 SV=1
MPSQPSRELERFPNPHPERDYVVHMDLPEFTCLCPLTGQPDFAHFMLDFIPDQHNVELKSLKLYLWSFRDEGAFHEAMTNRIADDLICLINPRYLRLLGRWYVRGGITTDVLIEHRQPGWQNPDILSQLPTVRWAQHQPGH

SEQ ID NO: 43578 - protein, 141 aa, Acidithiobacillus ferrivorans
  REGION 1..141: note = tr|G0JSU0|G0JSU0_9PROT NADPH-dependent 7-cyano-7-deazaguanine reductase OS=Acidithiobacillus ferrivorans SS3 OX=743299 GN=queF PE=3 SV=1
MPSQPSKTLERFSNPHPERDYVVHMDLPEFTCLCPLTGQPDFAHFMLDFIPDQHNVELKSLKLYLWSFRDEGAFHEAMTNRIADHLIHLINPRYLRLLGRWYVRGGITTDILIEHRQPGWQNPHLLSQLPPVHWAQHQPGY

SEQ ID NO: 43579 - protein, 141 aa, Acidithiobacillus ferrivorans; identical to SEQ ID NO: 43578
  REGION 1..141: note = tr|A0A1E7XU61|A0A1E7XU61_9PROT NADPH-dependent 7-cyano-7-deazaguanine reductase OS=Acidithiobacillus ferrivorans OX=160808 GN=queF PE=3 SV=1

SEQ ID NO: 43580 - protein, 141 aa, Acidithiobacillus ferrooxidans
  REGION 1..141: note = tr|A0A179BP68|A0A179BP68_ACIFR NADPH-dependent 7-cyano-7-deazaguanine reductase OS=Acidithiobacillus ferrooxidans OX=920 GN=queF PE=3 SV=1
MPSQPSKTLERFSNPHPERDYVVHMDLPEFTCLCPLTGQPDFAHFMLDFIPDQHNVELKSLKLYLWSFRDEGAFHEAMTNRIADNLIHLINPRYLRLLGRWYVRGGITTDILIEHRQAGWENPHLLSQLPPVHWAQHQPGY

SEQ ID NO: 43581 - protein, 141 aa, Acidithiobacillus ferrooxidans
  REGION 1..141: note = sp|B7J648|QUEF_ACIF2 NADPH-dependent 7-cyano-7-deazaguanine reductase OS=Acidithiobacillus ferrooxidans (strain ATCC 23270 / DSM 14882 / CIP 104768 / NCIMB 8455) OX= 243159 GN=queF PE=3 SV=1
MPSQPSRELERFSNPHPERDYVVHMDLPEFTCLCPLTGQPDFAHFMLDFIPDQHNVELKSLKLYLWSFRDEGAFHEAMTNRIADDLIGLINPRYLRLLGRWYVRGGITTDVLIEHRQPGWQNPDILGQLPTVRWAQHQPGH

SEQ ID NO: 43582 - protein, 141 aa, Acidithiobacillus sp.
  REGION 1..141: note = tr|A0A2I1DJ06|A0A2I1DJ06_9PROT NADPH-dependent 7-cyano-7-deazaguanine reductase OS=Acidithiobacillus sp. SH OX=187490 GN=queF PE=3 SV=1
MPSQPSKALERFPNPHPERDYVVHMDMPEFTCLCPLTGQPDFAHFLLDFIPGEYNVELKSLKLYLWSFRDEGAFHEAMSNRIADDIIQLIQPRYLRLLGRWYVRGGISTDLLIEHRQPGWENPEILSQLPVVHWTRQQPGY

SEQ ID NO: 43583 - protein, 140 aa, Acidithiobacillus sp.
  REGION 1..140: note = tr|A0A3M8QTN6|A0A3M8QTN6_9PROT NADPH-dependent 7-cyano-7-deazaguanine reductase OS=Acidithiobacillus sp. CJ-2 OX=1867749 GN=queF PE=3 SV=1
MSSQPSKDLQSFPNPHPERDYCIHMDLPEFTCLCPVTGQPDFAHFLLDFIPDQRCVELKSLKLYLWSYRNEGGFHEAMTNRIADDLIALLAPRYLRLLGRWYVRGGITTDVLVEERQAGWSNPSILAQLPPVTWSAQRPG

SEQ ID NO: 43584 - protein, 141 aa, Acidithiobacillus thiooxidans
  REGION 1..141: note = tr|A0A1C2J364|A0A1C2J364_ACITH NADPH-dependent 7-cyano-7-deazaguanine reductase OS=Acidithiobacillus thiooxidans OX=930 GN=queF PE=3 SV=1
MPSQPSKSLERFPNPHPERDYVVHMDMPEFTCLCPLTGQPDFAHFMLDFIPDQHNVELKSLKLYLWSFRDEGAFHEAMSNRIADDIIQLIQPRYLRLLGRWYVRGGISTDLLIEHRQPGWENPDILGQLPGVQWTRQQPGY

SEQ ID NO: 43585 - protein, 141 aa, Acidithiobacillus thiooxidans
  REGION 1..141: note = tr|A0A543Q856|A0A543Q856_ACITH NADPH-dependent 7-cyano-7-deazaguanine reductase OS=Acidithiobacillus thiooxidans ATCC 19377 OX=637390 GN=queF PE=3 SV=1
MPSQPSKSLERFPNPHPERDYVVHMDMPEFTCLCPLTGQPDFAHFMLDFIPDQHNVELKSLKLYLWSFRDEGAFHEAMSNRIADDIIQLIQPRYLRLLGRWYVRGGISTDLLIEHRQPGWDNPDILGQLPGVQWTRQQPGY

SEQ ID NO: 43586 - protein, 193 aa, unidentified
  source 1..193: note = Acidithrix ferrooxidans
  REGION 1..193: note = tr|A0A0D8HIH7|A0A0D8HIH7_9ACTN NADPH-dependent 7-cyano-7-deazaguanine reductase OS=Acidithrix ferrooxidans OX=1280514 GN=queF PE=3 SV=1
MCDCGITKPLAVSIVKFKKTYLRNLSEIYMVSDTSKLSLLGAGSTNYEYSSPTADLLEVFDNPRPEVPFVIGLDCLEFTSLCPMTGQPDYGSIYIDYVGDKLCVESKSLKLYLVSYRNHGAFHEDCVNSIADDIVAKINPLYLRVFGDFNVRGGIAIKPLTIRRNSPMASELRDEIAELFASFDRLSARGPRG

SEQ ID NO: 43587 - protein, 131 aa, unidentified
  source 1..131: note = Acidobacteria bacterium
  REGION 1..131: note = tr|A0A1F2QRY7|A0A1F2QRY7_9BACT NADPH-dependent 7-cyano-7-deazaguanine reductase OS=Acidobacteria bacterium RIFCSPHIGHO2_01_FULL_67_28 OX=1797175 GN=queF; PE = 3 SV=1
MPEYTEKHARAGVKARLPRLETWENQFPGYAITITIPEYTAVCPRTGQPDFGTLTLRYQPRRRCLELKSLKMYILAYRDLGIFYENAVNRILRDVVAACRPAWAEVRGEFTPRGGMRATVEARYPRGRRNK

SEQ ID NO: 43588 - protein, 145 aa, unidentified
  source 1..145: note = Acidobacteria bacterium
  REGION 1..145: note = tr|A0A1Q7KNX0|A0A1Q7KNX0_9BACT NADPH-dependent 7-cyano-7-deazaguanine reductase OS=Acidobacteria bacterium 13_1_40CM_4_58_4 OX=1803453 GN=queF PE=3 SV=1
MPEYSEEQARAGITAKLPPLETWPNQFPDYVIITRFPEYSSVCPKTGLPDYGTITIQYMPKKECLELKALKMYLLSYRDLGIFYENAVNKILHDIVAAVRPEWCVVRGEFTPRGGLTTSVIARWPALQDEGKPSKMHLRRKGKST

SEQ ID NO: 43589 - protein, 137 aa, unidentified
  source 1..137: note = Acidobacteriales bacterium
  REGION 1..137: note = tr|A0A1Q7N1G9|A0A1Q7N1G9_9BACT NADPH-dependent 7-cyano-7-deazaguanine reductase OS=Acidobacteriales bacterium 13_1_40CM_3_55_5 OX=1803468 GN=queF PE=3 SV=1
MPNRQRYTTEHAEAGLDAKFPEIETWPNQFPGYEIVVDDPEFTSVCPKTGLPDFGVLTIRYMPDQHCLELRSLKEYLQSYRNLGIFQENIVNQVLEDVVRWARPVWAEVKGEFRPRGGISTVVTARWPRPKASKNGK

SEQ ID NO: 43590 - protein, 137 aa, unidentified; identical to SEQ ID NO: 43589
  source 1..137: note = Acidobacteriales bacterium
  REGION 1..137: note = tr|A0A1Q7CM85|A0A1Q7CM85_9BACT NADPH-dependent 7-cyano-7-deazaguanine reductase OS=Acidobacteriales bacterium 13_2_20CM_2_55_5 OX=1803469 GN=queF PE=3 SV=1

SEQ ID NO: 43591 - protein, 132 aa, unidentified
  source 1..132: note = Acidobacteriia bacterium
  REGION 1..132: note = tr|A0A321LLJ2|A0A321LLJ2_9BACT NADPH-dependent 7-cyano-7-deazaguanine reductase OS=Acidobacteriia bacterium AA117 OX=2169412 GN=queF PE=3 SV=1
MANRTGYTEQHAKAGLDHNFPEIDTWPNQFPAYEILVDVPEFTSVCPKTGLPDFGVLEIRYMPDKLCLELKSLKEYLLHYRNLGIFQENIVNQVLEDVVRAAKPKWVVLKGVFRPRGGIGTTVEVRWPRPKK

SEQ ID NO: 43592 - protein, 136 aa, unidentified
  source 1..136: note = Acidobacteriia bacterium
  REGION 1..136: note = tr|A0A317IMR2|A0A317IMR2_9BACT NADPH-dependent 7-cyano-7-deazaguanine reductase OS=Acidobacteriia bacterium OX=2081523 GN=queF PE=3 SV=1
MKREYTDEHAAAGVHAELPEIETWPNQYADYEIEIDMPEFTSVCPKTGLPDFGRVVLRYVPDRKCLELKSYKMYLLAYRNLGIFQENVVNRVLRDVVRVANPITATVVGEFTPRGGLGTVVTATWRRPERARRGKR

SEQ ID NO: 43593 - protein, 134 aa, Acidobacterium capsulatum
  REGION 1..134: note = tr|C1F4J2|C1F4J2_ACIC5 NADPH-dependent 7-cyano-7-deazaguanine reductase OS=Acidobacterium capsulatum (strain ATCC 51196 / DSM 11244 / JCM 7670 / NBRC 15755 / NCIMB 1 3165 / 161) OX=240015 GN=queF PE=3; SV = 1
MSTGYTDDHAKAGLDFSFPAIDTWRNQFPAYEILIDDPEFTSVCPKTGLPDFGAITLRYMPRERCLELKSWKEYLFTYRNLGIFQENIVNQVLEDVVKACDPVWAVVRGEFRPRGGISTTVEARWPRPSTGQSR

SEQ ID NO: 43594 - protein, 116 aa, Acidobacterium sp.
  REGION 1..116: note = tr|A0A2G4JL37|A0A2G4JL37_9BACT NADPH-dependent 7-cyano-7-deazaguanine reductase OS=Acidobacterium sp.; OX = 1872119 GN=queF PE=3 SV=1
MSTTSTIETFPNPRPERAFEIAIDCPEFTSMCPKTGLPDFGVIRIRYVPAARCLELKSLKYYLLEFRNKGIFYEAATNQILDDLVAACAPVRMTVIGDFTARGGITTKVTAEYTTA

SEQ ID NO: 43595 - protein, 134 aa, Acidobacterium sp.; identical to SEQ ID NO: 43593
  REGION 1..134: note = tr|A0A3D4VM67|A0A3D4VM67_9BACT NADPH-dependent 7-cyano-7-deazaguanine reductase OS=Acidobacterium sp.; OX = 1872119 GN=queF PE=3 SV=1

SEQ ID NO: 43596 - protein, 154 aa, Acidocella aminolytica
  REGION 1..154: note = tr|A0A0D6PMI1|A0A0D6PMI1_9PROT NADPH-dependent 7-cyano-7-deazaguanine reductase OS=Acidocella aminolytica 101 = DSM 11237 OX=1120923 GN=queF PE=3 SV=1
MTDDRYAELKQLGTKTEMPASPEEAVLERVPAKTGGKNAMVRFVCPEFTSLCPMTGQPDFGHIVIDYIPDEWLVESKSLKLFLQSFRNHGGFHEACSLMIAERLVDLLSPKWLRLGAYWYPRGGIPIDVFWQTGKPPEDAWIPDQGVPPYRGRG

SEQ ID NO: 43597 - protein, 154 aa, Acidocella sp.
  REGION 1..154: note = tr|A0A257QJ86|A0A257QJ86_9PROT NADPH-dependent 7-cyano-7-deazaguanine reductase OS=Acidocella sp. 20-58-15 OX=1970302 GN=queF PE=3 SV=1
MTDDRYQGLHQLGADARMPGSPEAAVLEKVPARTEGKHYMVRFTCPEFTSLCPITGQPDFAHIVIDYIPGEWLVESKSLKLFLQSFRNHGAFHEACTIMIADRIVALLNPVWLRIGGYWYPRGGIPIDVFWQTGAPPDGVWLPEQGVPSYRGRG

SEQ ID NO: 43598 - protein, 154 aa, Acidocella sp.
  REGION 1..154: note = tr|A0A257Q8U3|A0A257Q8U3_9PROT NADPH-dependent 7-cyano-7-deazaguanine reductase OS=Acidocella sp. 20-57-95 OX=1970301 GN=queF PE=3 SV=1
MTDDRYQNLNQLGAATGMPASPEAAVLERVAAKTNGKHYMVRFTCPEFTSLCPITGQPDFAHIVIDYIPGDWLVESKSLKLFLQSFRNHGAFHEACTIMIADRIIALLNPVWLRIGGYWYPRGGIPIDVFWQTGAAPEGVWLPEQAVPAYRGRG

SEQ ID NO: 43599 - protein, 156 aa, Acidomonas methanolica
  REGION 1..156: note = tr|A0A023DAK3|A0A023DAK3_ACIMT NADPH-dependent 7-cyano-7-deazaguanine reductase OS=Acidomonas methanolica NBRC 104435 OX=1231351 GN=queF PE=3 SV=1
MTTSQNDLAALTQLGKSSAVAADPSQAVLERVPSPHPERRYLVRFTAPEFTSLCPVTGQPDFAHLVIDYVPDQWIVESKSLKLYLTSFRNHGAFHEACSVAIAARLVEELSPVWLRIGAYWYPRGGIPIDVFWQTGVPPEGVWIPAQDVPGYRGRG

SEQ ID NO: 43600 - protein, 281 aa, Acidovorax anthurii
  REGION 1..281: note = tr|A0A328Z6U9|A0A328Z6U9_9BURK NADPH-dependent 7-cyano-7-deazaguanine reductase OS=Acidovorax anthurii; OX = 78229 GN=queF PE=3 SV=1
MSTPDQSQLGRAAAYADQYDASLLFPLPRKPKRDEIGITGAPPFFGADLWTAFELSWLNPRGKPQVAIAHVTVPCETPNIVESKSFKLYLNSFNGTRFADAAEVQARLRADVSEAVWRGAQHPATVGVKLVLPEMFDREPVQELDGLLLDRLDVECTQYTPAPELLHAQHGEAPVTETLVSHLLKSNCLVTGQPDWGSVRIQYSGAQIDQAGLLQYLVSFRNHNEFHEQCVERIFMDLWTRCRPIKLSVYARYTRRGGLDINPLRTSHPQALPPNVRTARQ

SEQ ID NO: 43601 - protein, 281 aa, Acidovorax avenae
  REGION 1..281: note = tr|A0A2R4DWZ2|A0A2R4DWZ2_9BURK NADPH-dependent 7-cyano-7-deazaguanine reductase OS=Acidovorax avenae subsp. avenae OX=80870 GN=queF PE=3 SV=1
MNTPDQSQLGRVSGYVDQYDSSLLFPLRRQPKRDEIGVTGAPPFFGADLWTAFELSWLNLRGKPQVALAHITVPCETPNIIESKSFKLYLNSFNNTRFTDAAEVQARIRTDISEAAWRGSDRQATVGVKLVLPEMFDREPVQELDGLLLDRLDVECTHYTPAPELLHANHGEAPVTETLTSHLLKSNCLVTGQPDWGSVRIQYSGAQIDQAGLLQYLVSFRNHNEFHEQCVERIFMDLWTRCRPIKLSVYARYTRRGGLDINPLRTSHPQALPANIRTARQ

SEQ ID NO: 43602 - protein, 281 aa, Acidovorax avenae
  REGION 1..281: note = tr|A0A2R4EJS8|A0A2R4EJS8_9BURK NADPH-dependent 7-cyano-7-deazaguanine reductase OS=Acidovorax avenae subsp. avenae OX=80870 GN=queF PE=3 SV=1
MNTPDQSQLGRVSGYVDQYDASQLFPLPRQPKRDEIGVTGAPPFFGADLWTAFELSWLNLRGKPQVALAHITVPCETPNIIESKSFKLYLNSFNNTRFADAAEVHARIRTDISEAAWRGSDRQATVGVKLVLPEMFDREPVQELDGLLLDRLDVECTHYTPAPELLHANHGEAPVTETLTSHLLKSNCLVTGQPDWGSVRIQYSGAQIDQAGLLQYLVSFRNHNEFHEQCVERIFMDLWTRCRPIKLSVYARYTRRGGLDINPLRTSHPQALPANIRTARQ

SEQ ID NO: 43603 - protein, 281 aa, Acidovorax caeni
  REGION 1..281: note = tr|A0A1I7J5P1|A0A1I7J5P1_9BURK NADPH-dependent 7-cyano-7-deazaguanine reductase OS=Acidovorax caeni; OX = 343013 GN=queF PE=3 SV=1
MNHPAQSPLGKASAYADQYDPALLFPIARAPKRAEIGITGTQPFFGADLWTAFELSWLNARGKPQVALAHVTVPCETPNIIESKSFKLYLNSFNGTRFDSSEAVRERLRADLSEAAWRGAASPGTVGVRLVAPEQFDQEPVHELSGLDLDRLDVECTHYQPEPALLTAAFDEAPVTETLTSRLLKSNCLVTGQPDWGSVQISYSGPQIDQAGLLQYIVSFRNHNEFHEQCVERIFMDITARCRPLKLTVYARYTRRGGLDINPLRTSHPQQLPRNVRTARQ

SEQ ID NO: 43604 - protein, 281 aa, unidentified
  source 1..281: note = Acidovorax carolinensis
  REGION 1..281: note = tr|A0A240TU37|A0A240TU37_9BURK NADPH-dependent 7-cyano-7-deazaguanine reductase OS=Acidovorax carolinensis OX=553814 GN=queF PE=3 SV=1
MTTPEQSQLGKASAYADQYDASLLFPIPRAGKRAEIGIAGAPPFFGADLWTAFELSWLNARGKPQVALAHITVPCETPNIVESKSFKLYLNSFNNTRFADAAEVQARIRADISEAVWRGADRPATVGVKLLLPELFDREPVHELDGLSLDRLDVECTRYQPAPDLLTAEFGEAPVSEVLTSNLLKSNCLVTGQPDWGSVQIAYSGPQINQEGLLQYIVSFRNHNEFHEQCVERIFMDLWTRCKPIKLTVYARYTRRGGLDINPLRTSHPQQLPANTRTARQ

SEQ ID NO: 43605 - protein, 281 aa, unidentified
  source 1..281: note = Acidovorax carolinensis
  REGION 1..281: note = tr|A0A240UFT2|A0A240UFT2_9BURK NADPH-dependent 7-cyano-7-deazaguanine reductase OS=Acidovorax carolinensis OX=553814 GN=queF PE=3 SV=1
MNTPEQSQLGKASAYADQYDASLLFPIPRAGKRAEIGIAGAPPFFGADLWTAFELSWLNARGKPQVALAHITVPCETPNIVESKSFKLYLNSFNNTRFADATEVQARIRADISEAVWRGADHPATVGVKLLLPELFDREPVHELDGLSLDRLDVECTRYQPAPDLLTAEFGEAPVSEVLTSNLLKSNCLVTGQPDWGSVQIAYSGPQINQEGLLQYIVSFRNHNEFHEQCVERIFMDLWTRCKPIKLTVYARYTRRGGLDINPLRTSHPQQLPANTRTARQ

SEQ ID NO: 43606 - protein, 281 aa, Acidovorax cattleyae
  REGION 1..281: note = tr|A0A1H0KHH5|A0A1H0KHH5_9BURK NADPH-dependent 7-cyano-7-deazaguanine reductase OS=Acidovorax cattleyae; OX = 80868 GN=queF PE=3 SV=1
MNTPDQSQLGRVSGYADQYDASLLFPLPRQPKRDEIGMTGAPPFFGADLWTAFELSWLNLRGKPQVALAHITVPCETPNIIESKSFKLYLNSFNSTRFTDAAEVQARIRADISEAAWRGSDRQATVGVKLVLPEMFDREPVQELDGLLLDRLDLECTHYTPAPELLHANHGEAPVTETLTSHLLKSNCLVTGQPDWGSVRIQYSGAQIDQAGLLQYLVSFRNHNEFHEQCVERIFMDLWTRCRPIKLSVYARYTRRGGLDINPLRTSHPQALPANIRTARQ

SEQ ID NO: 43607 - protein, 292 aa, unidentified
  source 1..292: note = Acidovorax cavernicola
  REGION 1..292: note = tr|A0A3A1W325|A0A3A1W325_9BURK NADPH-dependent 7-cyano-7-deazaguanine reductase OS=Acidovorax cavernicola; OX = 1675792 GN=queF PE=3 SV=1
MSHDPTKPITANTPEQSQLGRASAYADKYDPSQLFPIARATQREAMGIQAGALPFFGADLWTAFELSWLNPRGKPQVAIAHFTIPCETPNIIESKSFKLYLNSFNNTVFASADEVRERLRTDLSEAAWRGSAQPATIGVKLLAPEMFDREPVHELDGLDLDRLDIECTRYQPAPELLSSDATQAPVTETLTSRLLKSNCLVTGQPDWGSVQIRYSGPPIDQAGLLAYIVSFRNHNEFHEPCAERMFTDIWRQCQPTKLAVYARYTRRGGLDINPFRTSWPQALPVNARMARQ

SEQ ID NO: 43608 - protein, 59 aa, unidentified
  source 1..59: note = Acidovorax cavernicola
  REGION 1..59: note = tr|A0A3A1W2P8|A0A3A1W2P8_9BURK NADPH-dependent 7-cyano-7-deazaguanine reductase QueF (Fragment); OS = Acidovorax cavernicola OX=1675792 GN=D3H34_30730 PE=4; SV = 1
MNTPEHSQLGKTSAYIDQYDASLLFPLPRATKRAELGLGDQPPFFGADLWTAFELSWLN

SEQ ID NO: 43609 - protein, 281 aa, Acidovorax citrulli
  REGION 1..281: note = sp|A1TLC4|QUEF_ACIAC NADPH-dependent 7-cyano-7-deazaguanine reductase OS=Acidovorax citrulli (strain AAC00-1) OX=397945 GN=queF PE=3 SV=1
MNTPDQSQLGRVSGYADQYDASLLFPLPRQPKRHEIGVTGTPPFFGADLWTAFELSWLNLRGKPQVALAHITVPCETPNIIESKSFKLYLNSFNNTRFADAAQVQTRIRTDISEAAWRGSDRQATVGVKLVLPEMFDREPVQELDGLLLDRLDVECTHYTPAPELLHANHGEAPVTETLTSHLLKSNCLVTGQPDWGSVRIEYSGAQIDQSGLLRYLVSFRNHNEFHEQCVERIFMDLWTRCRPIKLSVYARYTRRGGLDINPLRTSHPQALPANVRTARQ

SEQ ID NO: 43610 - protein, 281 aa, Acidovorax delafieldii
  REGION 1..281: note = tr|A0A561XNC0|A0A561XNC0_ACIDE NADPH-dependent 7-cyano-7-deazaguanine reductase OS=Acidovorax delafieldii; OX = 47920 GN=queF PE=3 SV=1
MNTPEQSQLGKASAYVDQYDASLLFPIPRAGKRAEIGITGSAPFFGADLWTAFELSWLNARGKPQVALAHITVPCETPNIVESKSFKLYLNSFNNTRFADAAEVQARIRADISEAVWRGADHPATVGVKLIAPELFDQEPVHELDGLSLDRLDVECTRYQPAPDLLTATFNEAPVTETLTSNLLKSNCLVTGQPDWGSVQISYSGPQINQEGLLQYLVSFRNHNEFHEQCVERIFMDVWTRCKPIKLTVYARYTRRGGLDINPLRTSHPQALPRNVRTARQ

SEQ ID NO: 43611 - protein, 287 aa, Acidovorax delafieldii
  REGION 1..287: note = tr|C5TC75|C5TC75_ACIDE NADPH-dependent 7-cyano-7-deazaguanine reductase OS=Acidovorax delafieldii 2AN OX=573060 GN=queF PE=3 SV=1
MTCTPAMNTPEQSQLGRASAYADHYDASLLFPIARAGKRAEIGIAGAAPFFGADLWTAFELSWLNARGKPQVALAHITVPCETPNIVESKSFKLYLNSFNNTRFADAAEVQARIRADISEAVWRGAEHPATVGVKLIGPDLFDREPVHELDGLSLDRLDVECTRYQPAPDLLTAAFGEAPVSEVLTSNLLKSNCLVTGQPDWGSVQISYSGPQINQEGLLQYLVSFRSHNEFHEQCVERIFMDVWTRCKPIKLTVYARYTRRGGLDINPLRTSHPQQLPANTRTARQ

SEQ ID NO: 43612 - protein, 281 aa, unidentified
  source 1..281: note = Acidovorax ebreus
  REGION 1..281: note = sp|B9MDS3|QUEF_ACIET NADPH-dependent 7-cyano-7-deazaguanine reductase OS=Acidovorax ebreus (strain TPSY) OX=535289 GN=queF PE=3 SV=1
MNTPEHSQLGKASAYADQYDASLLFPIPRADKRAEIGIDGNAPFFGADLWTAFELSWLNLRGKPQVAIAHITVPCETPHIVESKSFKLYLNSFNNTRFGDASEVQARLRADISEAVWRGAPHPATVGVKLIAPELFDQEPVHELDGLSLDRLDVECTRYQPAPDLLTATFNEAPVTETLTSNLLKSNCLVTGQPDWGSVQISYSGPQINQEGLLQYLVSFRNHNEFHEQCVERIFMDLWTRCKPIKLKVYARYTRRGGLDINPWRTSHPQTMPKNVRTARQ

SEQ ID NO: 43613 - protein, 281 aa, unidentified
  source 1..281: note = Acidovorax kalamii
  REGION 1..281: note = tr|A0A235ESS0|A0A235ESS0_9BURK NADPH-dependent 7-cyano-7-deazaguanine reductase OS=Acidovorax kalamii; OX = 2004485 GN=queF PE=3 SV=1
MNTPEQSQLGKASAYVDQYDATLLFPIPRAGKRAEIGITGAAPFFGADLWTAFELSWLNARGKPQVALAHITVPCETPNIVESKSFKLYLNSFNNTRFADMAEVQARIRTDISEAVWRGAEHPATVGVKLVAPELFDQEPVHELDGLSLDRLDVECTRYQPAPELLTAEFNEAPVTETLTSNLLKSNCLVTGQPDWGSVQISYSGPQINQEGLLQYLVSFRDHNEFHEQCVERIFMDLWARCKPIKLTVYARYTRRGGLDINPLRTSHPQGLPRNVRTARQ

SEQ ID NO: 43614 - protein, 281 aa, Acidovorax konjaci
  REGION 1..281: note = tr|A0A1I1RTH8|A0A1I1RTH8_9BURK NADPH-dependent 7-cyano-7-deazaguanine reductase OS=Acidovorax konjaci; OX = 32040 GN=queF PE=3 SV=1
MNSPDQSQLGRASAYADQYDASLLYPLPRQPKRDEIGVTGAPPFFGADLWTAFELSWLNLRGKPQVAIAHVTVPCETPNIVESKSFKLYLNSFNNTRFADAAEVQARIRADVSEAAWRGADRPSTVGVKLVLPEMFDREPVHELDGLLLDRLDVECDRYTPAPELLQASQGEAPVTETLTSHLLKSNCLVTGQPDWGSVRIQYSGAQIDQAGLLQYLVSFRNHNEFHEQCVERIFMDVWTRCRPIKLSVYARYTRRGGLDINPLRTSHPQALPPNTRTARQ

SEQ ID NO: 43615 - protein, 283 aa, Acidovorax radicis
  REGION 1..283: note = tr|A0A561CE48|A0A561CE48_9BURK NADPH-dependent 7-cyano-7-deazaguanine reductase OS=Acidovorax radicis; OX = 758826 GN=queF PE=3 SV=1
MNDNTPEQSQLGKASAYVDQYDASLLFPIPRAGKRAEIGITAAPPFFGADLWTAFELSWLNQRGKPQVALVHITIPCETPNIVESKSFKLYLNSFNNTRFADPSEVQARIRTDVSEAAWRGAEHPATVGVRLLLPEMFDQEPVHELDGLSLDRLDVECTHYQPAPHLLHAVHDEPAVTEVLTSNLLKSNCLVTGQPDWGSVQIRYTGAPIDQERLLQYLVSFRNHNEFHEQCVERIFMDLWTRCKPLKLTVYARYTRRGGLDINPLRTSHPQALPGNVRTARQ

SEQ ID NO: 43616 - protein, 281 aa, Acidovorax soli
  REGION 1..281: note = tr|A0A1H3X498|A0A1H3X498_9BURK NADPH-dependent 7-cyano-7-deazaguanine reductase OS=Acidovorax soli; OX = 592050 GN=queF PE=3 SV=1
MTTPEQSQLGKASAYADQYDASLLFPIPRAGKRAEIGIAGAAPFFGADLWTAFELSWLNARGKPQVALAHITVPCETPNIVESKSFKLYLNSFNNTRFADAAEVQARIRADISEAVWRGAEHPATVGVKLLLPELFDREPVHELDGLSLDRLDVECTRYQPAPELLTAEFNEAPVTETLTSNLLKSNCLVTGQPDWGSVQIAYSGPQIDQEGLLQYIVSFRNHNEFHEQCVERIFMDIWTRCQPIKLTVYARYTRRGGLDINPLRTSHPQGLPRNVRTARQ

SEQ ID NO: 43617 - protein, 281 aa, Acidovorax sp.
  REGION 1..281: note = sp|A1WAZ1|QUEF_ACISJ NADPH-dependent 7-cyano-7-deazaguanine reductase OS=Acidovorax sp. (strain JS42) OX=232721 GN=queF PE=3 SV=1
MNTPEHSQLGKASAYADQYDASLLFPIPRADKRAEIGIDGNAPFFGADLWTAFELSWLNLRGKPQVAIAHITVPCETPHIVESKSFKLYLNSFNNTRFASEAEVRARIRADVSEAVWRGAEHPGTVGVTLLLPEAFDREPIHELDGLLLDRLDVECTRYQPAPELLAAHHDEAPVTETLVSHLLKSNCLVTGQPDWGSVQITYSGAQIDQAGLLQYLVSFRNHNEFHEQCVERIFMDIWTRCRPIKLAVYARYTRRGGLDINPLRTSHPQQLQRNVRTARQ

SEQ ID NO: 43618 - protein, 281 aa, Acidovorax sp.
  REGION 1..281: note = tr|A0A0A1VGW2|A0A0A1VGW2_9BURK NADPH-dependent 7-cyano-7-deazaguanine reductase OS=Acidovorax sp. MR-S7; OX = 1268622 GN=queF PE=3 SV=1
MTTPEQSQLGKASAYADQYDASLLFPLPRLPKRAEIGIAGAPPFFGADLWTAYELSWLGPRGKPQVAIAHVTVPCETPNIVESKSFKLYLNSFNNTRFASLEDVRARIRQDVSEAVWRGSPVAGTVGVKLVAPELFDQEPIHELDGLLLDRLDVECTQYTPAPELLAANHAEAPVTETLVSHLLKSNCLVTGQPDWGSVQIAYSGAQIDQAGLLQYLVSFRNHNEFHEQCVERIFMDVWTRCRPIKLAVYARYTRRGGLDINPWRTSHPQQLPRNVRTARQ

SEQ ID NO: 43619 - protein, 282 aa, Acidovorax temperans
  REGION 1..282: note = tr|A0A543L9B7|A0A543L9B7_9BURK NADPH-dependent 7-cyano-7-deazaguanine reductase OS=Acidovorax temperans; OX = 80878 GN=queF PE=3 SV=1
MTNTPEQSQLGKASAYTDQYDPTLLFPIPRAGKRAEIGIADVPPFFGADLWTAFEVSWLNLRGKPQVALVHFTIPCESPNIIESKSFKLYLNSFNNTRFGDASEVQSRLRADISEAVWRGAPHPATVGVKLIAPELFDQEPVHELDGLSLDRLDVECTRYQPAPDLLKAQFDEAPVTEVLTSNLLKSNCLVTGQPDWGSVQIRYTGPQIDQEGLLQYIVSFRNHNEFHEQCVERIFMDLWTHCKPIKLMVYARYTRRGGLDINPLRTSHPHALPANVRTARQ

SEQ ID NO: 43620 - protein, 282 aa, Acidovorax temperans
  REGION 1..282: note = tr|A0A0D7K8F5|A0A0D7K8F5_9BURK NADPH-dependent 7-cyano-7-deazaguanine reductase OS=Acidovorax temperans; OX = 80878 GN=queF PE=3 SV=1
MTNTPEQSQLGKASAYTDQYDPTLLFPIPRAGKRAEIGIADIPPFFGADLWTAFEVSWLNLRGKPQVALVHFTIPCESPNIVESKSFKLYLNSFNNTRFGDASEVQARLRADISEAVWRGAPHPATVGVKLIAPELFDQEPVHELDGLSLDRLDVECTRYQPAPDLLKAQFDEAPVTEVLTSNLLKSNCLVTGQPDWGSVQIRYTGPQIDQEGLLQYIVSFRNHNEFHEQCVERIFMDLWTRCKPIKLMVYARYTRRGGLDINPLRTSHPHALPANVRTARQ

SEQ ID NO: 43621 - protein, 281 aa, Acidovorax valerianellae
  REGION 1..281: note = tr|A0A1G6VQB7|A0A1G6VQB7_9BURK NADPH-dependent 7-cyano-7-deazaguanine reductase OS=Acidovorax valerianellae OX=187868 GN=queF PE=3 SV=1
MNTPEQSQLGRISAYADQYDASLLFPIPRAGKRAEIGIATTAPFFGADLWTAFELSWLNLRGKPQVAIAHVTVPCETLNIVESKSFKLYLNSFNNTRFADAAEVQARIRADVSEAVWRGAPQAGTVGVKLLLPELFDREPVHELDGLLLDRLDVECTQYTPAPELLSANHAETPVTEALTSHLLKSNCLVTGQPDWGSVRIHYSGPQIDQAGLLQYLVSFRNHNEFHEQCVERIFMDVWTRCKPIKLSVYARYTRRGGLDINPFRTSHPQALPANVRTARQ

SEQ ID NO: 43622 - protein, 288 aa, unidentified
  source 1..288: note = Acidovorax wautersii
  REGION 1..288: note = tr|A0A1I2CLP6|A0A1I2CLP6_9BURK NADPH-dependent 7-cyano-7-deazaguanine reductase OS=Acidovorax wautersii; OX = 1177982 GN=queF PE=3 SV=1
MSQHNDNTPERSQLGKTSAYVDQYDPSLLFPIPRAPKRAEIGLDGAAAMPFFGADLWTAFELSWLNARGKPQVALAHVTIPCETPNIIESKSFKLYLNSFNNSRFADAAEVQARLRADLSEAAWRGAASPATVGVKLLLPELFDREPVHELDGLLLDRLDIECTRYTPAPELLTAAHGEAPVTETLVSHLLKSNCLVTGQPDWGSVQIRYSGPQIEQAGLLQYLVSFRNHNEFHEQCVERIFMDVWTRCRPIKLAVYARYTRRGGLDINPLRTSHPQALPANVRTARQ

SEQ ID NO: 43623 - protein, 271 aa, unidentified
  source 1..271: note = Acinetobacter albensis
  REGION 1..271: note = tr|A0A1C4GSD2|A0A1C4GSD2_9GAMM NADPH-dependent 7-cyano-7-deazaguanine reductase OS=Acinetobacter albensis; OX = 1673609 GN=queF PE=3 SV=1
MTVELSLLGKDTHYPTQYQPDILFAIARAQSREKYAHIEGIQQGQDWWHVFEISWLNPQGIPQVAIGRISVPATSPNLLESKSLKLYFNSMNFTEFDSKETFISVVEKDLSAAAGAAVSLSLFQADDLEVSKPEGINIDDLLPERLENHPDSTLLKLDTENSEHVEVQLYSHLLRSNCPVTGQPDWGTVFIRYQGKKPCYRSILAYIISYRQHNGFHEQCVEQIFADLWQIFAPQKLMVYATYTRRGGLDINPCRVSDFTWMPRPIRLARQ

SEQ ID NO: 43624 - protein, 271 aa, unidentified
  source 1..271: note = Acinetobacter apis
  REGION 1..271: note = tr|A0A217EF95|A0A217EF95_9GAMM NADPH-dependent 7-cyano-7-deazaguanine reductase OS=Acinetobacter apis; OX = 1229165 GN=queF PE=3 SV=1
MSVEQSLLGKDTNYPTEYQPSILFPIARAPSRELYQEIEGIQLGTDWWHVFELSWLNEHAVPQVAIGRLSIPATSPYLIESKSLKLYFNSLNFTQFESKTKLIATVEHDLSHAAQATVQLELIDANGLQVDQPLGLCIDDLKPTAQSHIPDAKLLANAASNEQIEEYLHCNLLRSNCPVTGQPDWGTLFIRYEGKKICHNSLLAYILSYRQHNGFHEQCVEHIFADLWTKLQPKKLMVYAAYTRRGGLDINPCRVSQQDWLPKQPLRLARQ

SEQ ID NO: 43625 - protein, 270 aa, Acinetobacter baumannii
  REGION 1..270: note = sp|B7GZQ9|QUEF_ACIB3 NADPH-dependent 7-cyano-7-deazaguanine reductase OS=Acinetobacter baumannii (strain AB307-0294) OX=557600 GN=queF PE=3 SV=1
MSVEQSLLGKETQYPTSYQPDVLFPIARAQSREKYAHIQGITQGKDWWHVFEISWLNAHGIPQVAIGRITLPASSPNLIESKSLKLYFNSLNFTQFDSTQSFIETVEKDLSAAAGAKVELTLFQVDDLEISKPQGICIDDLMPERLEQHPDATLLKLDESGEEIEVELYSHLLRSNCPVTGQPDWGTVFIRFKGKKPCYRSLLAYIISYRQHNGFHEQCVEQIFADIWQNLQPEKLMVYATYTRRGGLDINPCRVSDLTWMPKPIRLARQ

SEQ ID NO: 43626 - protein, 270 aa, Acinetobacter baumannii
  REGION 1..270: note = sp|A3M741|QUEF_ACIBT NADPH-dependent 7-cyano-7-deazaguanine reductase OS=Acinetobacter baumannii (strain ATCC 17978 / CIP 53.77 / LMG 1025 / NCDC KC755 / 5377) OX=40 0667 GN=queF PE=3 SV=2
MSVEQSLLGKETQYPTSYQPDVLFPIARAQSREKYAHIEGITQGKDWWHVFEISWLNAHGIPQVAIGRITLPASSPNLIESKSLKLYFNSLNFTQFDSTQSFIETVEKDLSAAAGAKVELTLFQVDDLEISKPQGICIDDLMPERLEQHPDATLLKLDESDEEIEVELYSHLLRSNCPVTGQPDWGTVFIRFKGKKPCYRSILAYIISYRQHNGFHEQCVEQIFADIWQNLQPEKLMVYATYTRRGGLDINPCRVSDLTWMPKPIRLARQ

SEQ ID NO: 43627 - protein, 271 aa, Acinetobacter baylyi
  REGION 1..271: note = sp|Q6FA61|QUEF_ACIAD NADPH-dependent 7-cyano-7-deazaguanine reductase OS=Acinetobacter baylyi (strain ATCC 33305 / BD413 / ADP1) OX=62977 GN=queF PE=3; SV = 1
MSVEQSLLGKETEYPTTYSPSVLFPISRDAAREKYAQIEGISQGKDWWHVFELSWLNSDNIPQVAIGRITLPATSPYLIESKSLKLYFNSLNFHVFASKQELIDLVEKDLSQAANAKVSLELFDVDSLEISKPSGMCIDDLKPERLESHPDASLLKLDANEQHDADVTLYSHLLRSNCPVTGQPDWGTVFIRYTGRKHCYRSILAYIISYRQHNGFHEQCVEQIYADIWKNLQPEKLMVYATYTRRGGLDINPCRVSDLSWMPNPIRLARQ

SEQ ID NO: 43628 - protein, 271 aa, Acinetobacter beijerinckii
  REGION 1..271: note = tr|N9FRM6|N9FRM6_9GAMM NADPH-dependent 7-cyano-7-deazaguanine reductase OS=Acinetobacter beijerinckii CIP 110307 OX=1217648 GN=queF PE=3 SV=1
MSVEHSLLGKDTQYPTQYQPEVLFPIARAESRQQYAHVEGISQGKDWWHVFEISWLNKLGLPQVAIGRLMLPASSPNLIESKSLKLYFNSMNFTQFESQNTFIETVERDLSNAAGGKVELQLFQVDDLEISKPKGICIDDLTPERLSEHPDSSLLQLDNTAEDDVEIELYSHLLRSNCPVTGQPDWGTVFIRFKGKKPCYRSVLAYIISYRQHNGFHEQCVEQIFADIWQLLQPEKLMVYATYTRRGGLDINPCRVSDLTWMPEPTRLARQ

SEQ ID NO: 43629 - protein, 271 aa, Acinetobacter beijerinckii
  REGION 1..271: note = tr|N9E2Q8|N9E2Q8_9GAMM NADPH-dependent 7-cyano-7-deazaguanine reductase OS=Acinetobacter beijerinckii ANC 3835 OX=1217649 GN=queF PE=3 SV=1
MSVEHSLLGKDTQYPTQYQPEVLFPIARAESRQQYAHVEGITQGKDWWHVFEISWLNKLGLPQVAIGRLMLPASSPNLIESKSLKLYFNSMNFTQFESQNTFIETVERDLSNAAGGKVELQLFQVDDLEISKPKGVCIDDLTPERLSEHPDSSLLQLDNTAENDIEIELYSHLLRSNCPVTGQPDWGTVFIRFKGKKPCYRSVLAYIISYRQHNGFHEQCVEQIFADIWQLLQPEKLMVYATYTRRGGLDINPCRVSDLTWMPEPIRLARQ

SEQ ID NO: 43630 - protein, 274 aa, Acinetobacter bereziniae
  REGION 1..274: note = tr|N8X9T4|N8X9T4_ACIBZ NADPH-dependent 7-cyano-7-deazaguanine reductase OS=Acinetobacter bereziniae NIPH 3 OX=1217651 GN=queF PE=3 SV=1
MSVEQSLLGKETNYPTTYQPEILFPISRAQAREQYAEVEGIYQGQDWWHVFEISWLNAKGIPQVAIGRIALPAISPNLIESKSLKLYFNSMNFTQFDSRQAFIDTVEKDLSQAAQAPVTLTLFQVDDLDITKPTGICIDDQEPDRLVNHPDASLLEFDQNTSNTDKNVEIQLFSHLLRSNCPVTGQPDWGTVFIRYQGKKPCYRSILAYIISYRQHNGFHEQCVEQIFADIWQNLKPEKLMVYATYTRRGGLDINPCRVSDESWMPSPIRLARQ

SEQ ID NO: 43631 - protein, 274 aa, Acinetobacter bereziniae
  REGION 1..274: note = tr|A0A430GIP1|A0A430GIP1_ACIBZ NADPH-dependent 7-cyano-7-deazaguanine reductase OS=Acinetobacter bereziniae OX=106648 GN=queF PE=3 SV=1
MSVEQSLLGKETNYPTTYQPEILFPISRAQAREQYAEVEGIYQGQDWWHVFEISWLNAKGIPQVAIGRIALPATSPNLIESKSLKLYFNSMNFTQFDSRQAFIDTVEKDLSQAAQAPVTLTLFQVDDLDITKPTGICIDDQEPDRLVNHPDASLLEFDQNTSNTDKNVEIQLFSHLLRSNCPVTGQPDWGTVFIRYQGKKPCYRSILAYIISYRQHNGFHEQCVEQIFADIWQNLKPEKLMVYATYTRRGGLDINPCRVSDESWMPSPIRLARQ

SEQ ID NO: 43632 - protein, 271 aa, unidentified
  source 1..271: note = Acinetobacter bohemicus
  REGION 1..271: note = tr|A0A1I6NTG8|A0A1I6NTG8_9GAMM NADPH-dependent 7-cyano-7-deazaguanine reductase OS=Acinetobacter bohemicus OX=1435036 GN=queF PE=3 SV=1
MTVELSLLGKDTNYPTEYQPDILFPIARAPAREDYAHVEGIQQGQDWWHVFEISWLNAVGIPQVAIGRIALPASSPNLIESKSLKLYFNSMNFTSFESKDAFIATVEKDLSAAAGAPVTLSLFQADDLDISKPEGICIDDLSPERLETHPDATLLKLDTENTEIVDIQLYSHLLRSNCPVTGQPDWGTVFIRYQGKKPCYRSILAYIISYRQHNGFHEQCVEQMFADIWQNFAPEKLMVYATYTRRGGLDINPCRVSDLTWMPRPIRLARQ

SEQ ID NO: 43633 - protein, 271 aa, unidentified
  source 1..271: note = Acinetobacter bohemicus
  REGION 1..271: note = tr|N8QFR7|N8QFR7_9GAMM NADPH-dependent 7-cyano-7-deazaguanine reductase OS=Acinetobacter bohemicus ANC 3994 OX=1217715 GN=queF PE=3 SV=1
MTVELSLLGKDTNYPTEYQPDILFPIARAPAREHYAHVEGIQQGQDWWHVFEISWLNAVGIPQVAIGRLALPASSPNLIESKSLKLYFNSMNFTSFESKDAFIATVEKDLSAAAGAPVTLSLFQADDLDISKPEGICIDDLSPERLETHPDATLLKLDTENTETVDIQLYSHLLRSNCPVTGQPDWGTVFIRYQGKKPCYRSILAYIISYRQHNGFHEQCVEQMFADIWQNFAPEKLMVYATYTRRGGLDINPCRVSDLTWMPRPIRLARQ

SEQ ID NO: 43634 - protein, 272 aa, unidentified
  source 1..272: note = Acinetobacter boissieri
  REGION 1..272: note = tr|A0A1G6GRI6|A0A1G6GRI6_9GAMM NADPH-dependent 7-cyano-7-deazaguanine reductase OS=Acinetobacter boissieri OX=1219383 GN=SAMN05421733_10266 PE=3 SV=1
MSVEKSLLGKETDYPTQYQPNILFPIARAPTRQSYQNIPYIEQGMDWWHVFELSWLNTHNVPQVAIGRLSIPATSACLIESKSLKLYFNSLNFVQFDSPTQLINTVQQDLSQAAQTHVGLELIDVNGLHVSSPVGKCLDHLTPSRHAKHPDASLLALDSNEPHIIEEELHCNLLRSNCPVTGQPDWGTLFIRYEGKKIDHASLLAYIISFREHNGFHEQCVEQIFAEIWQTLQPEQLMVYAAYTRRGGLDINPCRSSNLKWLPDVPLRLARQ

SEQ ID NO: 43635 - protein, 271 aa, Acinetobacter bouvetii
  REGION 1..271: note = tr|A0A4Q7AZM7|A0A4Q7AZM7_9GAMM NADPH-dependent 7-cyano-7-deazaguanine reductase OS=Acinetobacter bouvetii; OX = 202951 GN=queF PE=3 SV=1
MSVEHSLLGKDTNYPTEYQPDILFPIARAQSRENYAHVEGIQQGKDWWHVFEISWLNHAGIPQVAIGRLILPAASPNLIESKSLKLYFNSMNFTKFDSKDAFKATVEKDLSAAAGAPVTIDLFHADGVEVSEPEGFCIDELIPAQLENHPNAALLALDAAQDENIEVQFYSHLLRSNCPVTGQPDWGTVFIRYQGKKPSYESILAYIISYRQHNGFHEQCVEQMYADIWQNLKPEKLMVYAAYTRRGGLDINPCRVSDLTWMPRPIRLARQ

SEQ ID NO: 43636 - protein, 271 aa, Acinetobacter bouvetii
  REGION 1..271: note = tr|N9DPM5|N9DPM5_9GAMM NADPH-dependent 7-cyano-7-deazaguanine reductase OS=Acinetobacter bouvetii DSM 14964 = CIP 107468 OX=1120925 GN=queF PE=3 SV=1
MSVEHSLLGKDTNYPTEYQPDILFPIARAQSRENYAHVEGIQQGKDWWHVFEISWLNHAGIPQVAIGRLTLPAASPNLIESKSLKLYFNSMNFTKFDSKDAFKATVEKDLSAAAGAPVTIDLFHADGVEVSEPEGFCIDELIPAQLENHPNAALLALDAAQDENIEVQFYSHLLRSNCPVTGQPDWGTVFIRYQGKKPSYESILAYIISYRQHNGFHEQCVEQIYADIWQNLKPEKLMVYAAYTRRGGLDINPCRVSDLTWMPRPIRLARQ

SEQ ID NO: 43637 - protein, 271 aa, Acinetobacter brisouii
  REGION 1..271: note = tr|V2UVG6|V2UVG6_9GAMM NADPH-dependent 7-cyano-7-deazaguanine reductase OS=Acinetobacter brisouii CIP 110357 OX=1341683 GN=queF PE=3 SV=1
MSVEKSLLGKDTNYPTTYQPEILFPISRSLSRESYADVAGIQQGCDWWHVFELSWLNAQGIPQVAIGRLRLPATSPNLIESKSLKLYFNSLNFMRFDSTQQLIATVEQDLSKAAEAPVQLTLIDANNLAVSQPEGQCLDQLSPQRLSEQPDASLLQHAGSGRMVEEQYYSNLLRSNCPVTGQPDWGTIFIRYRGEKVCPASLLAYIISYRQHNGFHEQCVEQIYADIWKTLKPGQLMVYAAYTRRGGLDINPCRVSTEAWLPQTPVRLARQ

SEQ ID NO: 43638 - protein, 270 aa, Acinetobacter calcoaceticus
  REGION 1..270: note = tr|A0A1A0GHE0|A0A1A0GHE0_ACICA NADPH-dependent 7-cyano-7-deazaguanine reductase OS=Acinetobacter calcoaceticus OX=471 GN=queF PE=3 SV=1
MSVEQSLLGKETQYPTNYQPDVLFPIARAQSREAYSHIEGITQGKDWWHVFEISWLNAHAIPQVAIGRITLPASSPNLIESKSLKLYFNSLNFTQFDSKQSFIETVEKDLSAAAGAKVELTLFQVDDLEISKPQGICIDDLDPERLEQHPDATLLKRDASDEEVEIELYSHLLRSNCPVTGQPDWGTVFIRFKGKKPCYRSVLAYIISYRQHNGFHEQCVEQIFADIWQNLQPEKLMVYATYTRRGGLDINPCRVSDLSWMPKPIRLARQ

SEQ ID NO: 43639 - protein, 270 aa, Acinetobacter calcoaceticus
  REGION 1..270: note = tr|N9D2F9|N9D2F9_ACICA NADPH-dependent 7-cyano-7-deazaguanine reductase OS=Acinetobacter calcoaceticus ANC 3680 OX=1217653 GN=queF PE=3 SV=1
MSVEQSLLGKETQYPTNYQPDVLFPIARAQSREAYSHIEGITQGKDWWHVFEISWLNAHAIPQVAIGRITLPASSPNLIESKSLKLYFNSLNFTQFESKQSFIETVEKDLSAAAGAKVELTLFQVDDLEISKPQGICVDDLTPERLEQHPDATLLKLDDSGEEVEVELYSHLLRSNCPVTGQPDWGTVFIRFKGKKPCYRSVLAYIISYRQHNGFHEQCVEQIFADIWQNLQPEKLMVYATYTRRGGLDINPCRVSDLSWMPKPIRLARQ

SEQ ID NO: 43640 - protein, 270 aa, Acinetobacter calcoaceticus
  REGION 1..270: note = tr|A0A2S4T7E2|A0A2S4T7E2_9GAMM NADPH-dependent 7-cyano-7-deazaguanine reductase OS=Acinetobacter calcoaceticus/baumannii complex sp. ABNIH27 OX=2080673; GN = queF PE=3SV=1
MSVEQSLLGKETQYPTSYQPDVLFPIARAQSREKYAHIEGITQGKDWWHVFEISWLNAHGIPQVAIGRITLPASSPNLIESKSLKLYFNSLNFTQFDSTQSFIETVEKDLSTAAGAKVELTLFQVDDLEISKPQGICIDDLMPERLEQHPDATLLKLDESGEEIEVELYSHLLRSNCPVTGQPDWGTVFIRFKGKKPCYRSLLAYIISYRQHNGFHEQCVEQIFADIWQNLQPEKLMVYATYTRRGGLDINPCRVSDLTWMPKPIRLARQ

SEQ ID NO: 43641 - protein, 271 aa, unidentified
  source 1..271: note = Acinetobacter celticus
  REGION 1..271: note = tr|A0A1C3CWX7|A0A1C3CWX7_9GAMM NADPH-dependent 7-cyano-7-deazaguanine reductase OS=Acinetobacter celticus; OX = 1891224 GN=queF PE=3 SV=1
MSVEHSLLGKDTNYPTAYQPDVLFPISRAPARENYAHVDAIQQGKDWWHIFEISWLNHAGIPQVAIGRLTLPASSPNLIESKSLKLYFNSMNFTQFDSKETFIATVEKDLSLVVQAPVTIDLFQADDLAITQPEGICIDELSPERLENHPDASLLKLDTENPEDIEVQLYSHLLRSNCPVTGQPDWGTVFIRYQGKKPCYRSILAYIISYRQHNGFHEQCVEQMYADIWQLLKPEKLMVYATYTRRGGLDINPCRVSDLTWMPRPIRLARQ

SEQ ID NO: 43642 - protein, 271 aa, unidentified
  source 1..271: note = Acinetobacter colistiniresistens
  REGION 1..271: note = tr|N9QUT4|N9QUT4_9GAMM NADPH-dependent 7-cyano-7-deazaguanine reductase OS=Acinetobacter colistiniresistens OX=280145 GN=queF PE=3 SV=1
MSVEHSLLGKDTQYPTQYQPDVLFPIARAESRQQYAHIEGITQGKDWWHVFEISWLNSLGLPQVAIGRLTLPASSPNLIESKSLKLYFNSMNFTQFESKEAFIETVERDLSHAAGAKVELQLFQVDDLEISKPQGICIDDLTPERLSEHPDSSLLQLDTTAEDDVEIELYSHLLRSNCPVTGQPDWGTVFIRLQGKKPCYRSILAYIISYRQHNGFHEQCVEQIFADIWQLLKPEKLMVYATYTRRGGLDINPCRVSDLSWMPEPIRLARQ

SEQ ID NO: 43643 - protein, 271 aa, unidentified
  source 1..271: note = Acinetobacter colistiniresistens
  REGION 1..271: note = tr|S3T9D2|S3T9D2_9GAMM NADPH-dependent 7-cyano-7-deazaguanine reductase OS=Acinetobacter colistiniresistens OX=280145 GN=queF PE=3 SV=1
MSVEHSLLGKDTQYPTQYQPDVLFPIARAESRQQYAHIEGITQGKDWWHVFEISWLNSLGLPQVAIGRLTLPASSPNLIESKSLKLYFNSMNFTQFESKEAFIETVERDLSHAAGAKVELQLFQVDDLEISKPQGICIDDLTPERLSEHPDSSLLQLDTTAEDDVEIELYSHLLRSNCPVTGQPDWGTVFIRLQGKKPCYRSILAYIISYRQHNGFHEQCVEQIFADIWQLLQPEKLMVYATYTRRGGLDINPCRVSDLSWMPEPIRLARQ

SEQ ID NO: 43644 - protein, 270 aa, unidentified
  source 1..270: note = Acinetobacter cumulans
  REGION 1..270: note = tr|A0A498D9E6|A0A498D9E6_9GAMM NADPH-dependent 7-cyano-7-deazaguanine reductase OS=Acinetobacter cumulans; OX = 2136182 GN=queF PE=3 SV=1
MTVEQSLLGKDTNYPTEYQPDILFPIARAPARETYAHVEGIQQGKDWWHVFEISWLNAMGIPQVAIGRLTLPASSTNLIESKSLKLYFNSMNFTKFDSKDAFIATVEKDLSQAAEAPVTIDLFAANDLAIAQPEGICIDTLQPERLEEHPDASLLQFDASDEHVEVQLYSHLLRSNCPVTGQPDWGTVFIRYKGKKPCYKSILAYIISYRQHNGFHEQCVEQMYADIWQNLKPEQLMVYATYTRRGGLDINPCRVSDPTWMPRPIRLARQ

SEQ ID NO: 43645 - protein, 270 aa, unidentified
  source 1..270: note = Acinetobacter cumulans
  REGION 1..270: note = tr|A0A3A8G380|A0A3A8G380_9GAMM NADPH-dependent 7-cyano-7-deazaguanine reductase OS=Acinetobacter cumulans; OX = 2136182 GN=queF PE=3 SV=1
MTVEQSLLGKDTNYPTEYQPDILFPIARAPARETYAHVEGIQQGKDWWHVFEISWLNAMGIPQVAIGRLTLPASSTNLIESKSLKLYFNSMNFTKFDSKDAFIATVEKDLSQAAQAPVTIDLFAANDLAIAQPEGICIDTLQPERLEEHPDASLLQFDASDEHVEVQLYSHLLRSNCPVTGQPDWGTVFIRYKGKKPCYKSILAYIISYRQHNGFHEQCVEQMYADIWQNLKPEQLMVYATYTRRGGLDINPCRVSDPTWMPRPIRLARQ

SEQ ID NO: 43646 - protein, 274 aa, unidentified
  source 1..274: note = Acinetobacter defluvii
  REGION 1..274: note = tr|A0A2S2FEV0|A0A2S2FEV0_9GAMM NADPH-dependent 7-cyano-7-deazaguanine reductase OS=Acinetobacter defluvii; OX = 1871111 GN=queF PE=3 SV=1
MTVEQSLLGKDTNYPNTYQPDILFPISRVQARENYKHVEGIYQGKDWWHIFEISWLNDHGIPQVAIGRMTLPASSEFLIESKSLKLYFNSLNFTQFASKQAFIDTVEKDLSAAAQASVTLTLFQVDELEVAKPQGICIDNQQPDCLVNHPDASLLAFDSEHENFDKSVEIQLYSHLLRSNCPVTGQPDWGTVFIRYQGKKPCYRSILAYIISYRQHNGFHEQCVEQIFADLWQNLQPEKLMVYATYTRRGGLDINPCRVSDESWMPSPVRLARQ

SEQ ID NO: 43647 - protein, 274 aa, unidentified
  source 1..274: note = Acinetobacter equi
  REGION 1..274: note = tr|A0A0N9VZM2|A0A0N9VZM2_9GAMM NADPH-dependent 7-cyano-7-deazaguanine reductase OS=Acinetobacter equi; OX = 1324350 GN=queF PE=3 SV=1
MSVEHSLLGKDTNYPTEYQPDILFPISREQAREKYSHVEGIRQGKDWWHVFEISWLNAQGIPQVAIGRITLPATSENLIESKSLKLYFNSMNFTQFDSKDAFIATVEKDLSAAAKAPVSLDLYQVDDLAISQPKGLCIDNLQPERLENHPDSSLLKLDDSTLNDENQVEVELYSHLLRSNCPVTGQPDWGTVFIRYQGKKPCYQSILAYIISYRQHNGFHEQCVEQIYADIWQILQPEKLMVYATYTRRGGLDINPCRVSDLAWMPQPIRLARQ

SEQ ID NO: 43648 - protein, 271 aa, unidentified
  source 1..271: note = Acinetobacter gandensis
  REGION 1..271: note = tr|A0A1A7R762|A0A1A7R762_9GAMM NADPH-dependent 7-cyano-7-deazaguanine reductase OS=Acinetobacter gandensis OX=1443941 GN=queF PE=3 SV=1
MSVEQSLLGKDTNYPTAYQPDILFPIARATAREQYAHVEGICQGKDWWHVFEISWLNASGVPQVAIGRLTLPASSDNLIESKSLKLYFNSMNFTQFESRDAFKATVEKDLSVAANAPVTIDLFHVDDVEISKPEGICIDDLEPTKLENHPNANLLALDENNNEEVEVQFYSHLLRSNCPVTGQPDWGTVFIRYKGSKPCYRSILAYIISYRQHNGFHEQCVEQMFADIWQNLKPSKLMVYATYTRRGGLDINPCRVSDLTWMPRPIRLARQ

SEQ ID NO: 43649 - protein, 270 aa, unidentified
  source 1..270: note = Acinetobacter genomosp.
  REGION 1..270: note = tr|A0A1V2V495|A0A1V2V495_9GAMM NADPH-dependent 7-cyano-7-deazaguanine reductase OS=Acinetobacter genomosp. 33YU OX=1675530 GN=queF PE=3 SV=1
MSVEQSLLGKETQYPTSYQPDVLFPIARAQSRENYSHIEGITQGKDWWHVFEISWLNSHGIPQVAIGRITLPASSPNLIESKSLKLYFNSLNFTQFDSKALFIETVEKDLSAAAGAKVELTLFQVDDLDISKPQGICIDDLTPERLEQHPDASLLKLDESDEEVEIELYSHLLRSNCPVTGQPDWGTVFIRFKGKKPCYRSVLAYIISYRQHNGFHEQCVEQIFADVWQNLQPEKLMVYATYTRRGGLDINPCRVSDLSWMPKPIRLARQ

SEQ ID NO: 43650 - protein, 270 aa, Acinetobacter gerneri
  REGION 1..270: note = tr|N8ZL59|N8ZL59_9GAMM NADPH-dependent 7-cyano-7-deazaguanine reductase OS=Acinetobacter gerneri DSM 14967 = CIP 107464 OX=1120926 GN=queF PE=3 SV=1
MAVEHSLLGKDTNYPTQYQPDILFPISRGEAREKYKNVKGIYKGKDWWHVFEISWLNQHGVPQVAIGRICLPASSTHLIESKSLKLYFNSLNFTQFENQQDFIKTVEQDLSKAAQADVSLTLYKVDDLAISQPQGLCIDDLEPTRLENHPDATLLSLDEHAENVEVQLYSHLLRSNCPVTGQPDWGTVFIRYQGKKPCYRSILAYIISYRQHNGFHEQCVEQIFADIWQNLQPEKLMVYATYTRRGGLDINPCRVSDESWMPEPIRLARQ

SEQ ID NO: 43651 - protein, 274 aa, Acinetobacter guillouiae
  REGION 1..274: note = tr|N8S5B0|N8S5B0_ACIGI NADPH-dependent 7-cyano-7-deazaguanine reductase OS=Acinetobacter guillouiae CIP 63.46 OX=1217655 GN=queF PE=3 SV=1
MSVEKSLLGKETDYPTTYQPEVLFPIARAQAREQYADVTGIYKGQDWWHVFEISWLNSKGIPQVAIGRIALPATSPNLIESKSLKLYFNSMNFTQFDSHQAFIGTVEKDLSAAAQAAVTLTLFQVDDLDITKPTGICIDDQEPDQLVNHPDASLLAFDQQNTQHGESVEIQLYSHLLRSNCPVTGQPDWGTVFIRYQGKKPCYRSILAYIISYRQHNGFHEQCVEQIFADIWQNLKPEKLMVYATYTRRGGLDINPCRVSDESWMPSPIRLARQ

SEQ ID NO: 43652 - protein, 274 aa, Acinetobacter guillouiae
  REGION 1..274: note = tr|N8Y894|N8Y894_ACIGI NADPH-dependent 7-cyano-7-deazaguanine reductase OS=Acinetobacter guillouiae NIPH 991 OX=1217656 GN=queF PE=3 SV=1
MSVEKSLLGKETDYPTTYQPEILFPIARAQAREQYADVAGIYKGQDWWHVFEISWLNSKGIPQVAIGRIALPATSPNLIESKSLKLYFNSMNFTQFDSHQAFINTVEKDLSAAAQAPVTLTLFQVDDLEISKPTGICIDDQEPDQLVNHPDASLLAFDQENTQHGESVEIQLYSHLLRSNCPVTGQPDWGTVFIRYQGEKPCYRSILAYIISYRQHNGFHEQCVEQIFADIWQNLKPEKLMVYATYTRRGGLDINPCRVSDESWMPSPIRLARQ

SEQ ID NO: 43653 - protein, 269 aa, Acinetobacter gyllenbergii
  REGION 1..269: note = tr|V2VAH1|V2VAH1_9GAMM NADPH-dependent 7-cyano-7-deazaguanine reductase (Fragment); OS = Acinetobacter gyllenbergii NIPH 230 OX=1217658; GN = F987_00014 PE=3 SV=1
VEHSLLGKDTQYPTQYQPDVLFPIARAESRQQYAHIEGITQGKDWWHVFEISWLNHLGLPQVAIGRLTLPASSPNLIESKSLKLYFNSMNFTQFESQQAFVETVERDLSHAAGAKVELQLFQVDDLEISKPQGICIDDLIPERLSEHPDSTLLQLDTTTEDDVEIELYSHLLRSNCPVTGQPDWGTVFIRLQGKKPCYRSILAYIISYRQHNGFHEQCVEQIFADIWQLLKPEKLMVYATYTRRGGLDINPCRVSDLSWMPEPIRLARQ

SEQ ID NO: 43654 - protein, 271 aa, Acinetobacter gyllenbergii
  REGION 1..271: note = tr|A0A1B8UGQ0|A0A1B8UGQ0_9GAMM NADPH-dependent 7-cyano-7-deazaguanine reductase OS=Acinetobacter gyllenbergii OX=134534 GN=queF PE=3 SV=1
MSVEHSLLGKDTQYPTQYQPDVLFPIARAESRQQYAHIEGITQGKDWWHVFEISWLNHLGLPQVAIGRLTLPASSPNLIESKSLKLYFNSMNFTQFESQQAFVETVERDLSHAAGAKVELQLFQVDDLEISKPQGICIDDLIPERLSEHPDSTLLQLDTTTEDDVEIELYSHLLRSNCPVTGQPDWGTVFIRLQGKKPCYRSILAYIISYRQHNGFHEQCVEQIFADIWQLLKPEKLMVYATYTRRGGLDINPCRVSDLSWMPEPIRLARQ

SEQ ID NO: 43655 - protein, 271 aa, Acinetobacter haemolyticus
  REGION 1..271: note = tr|D4XPK9|D4XPK9_ACIHA NADPH-dependent 7-cyano-7-deazaguanine reductase OS=Acinetobacter haemolyticus ATCC 19194 OX=707232 GN=queF PE=3 SV=1
MSVEHSQLGKETQYPTQYQPEVLFPISRAESRQQYADVKGITQGKDWWHVFEISWLNQLGLPQVAIGRLTLPASSPNLIESKSLKLYFNSLNFTKFDSKEAFIETVERDLSSAAGAKIELQLFQVDELEISKPQGICIDDLVPERLSEHPDSTLLQLDTTAEDDVEITLHSHLLRSNCPVTGQPDWGTIFIRFQGKKPCYRSLLAYIISYRQHNGFHEQCVEQIFADIWKLLGPQKLMVYATYTRRGGLDINPCRVSDLSWMPEPIRLARQ

SEQ ID NO: 43656 - protein, 271 aa, Acinetobacter haemolyticus
  REGION 1..271: note = tr|N9GNL7|N9GNL7_ACIHA NADPH-dependent 7-cyano-7-deazaguanine reductase OS=Acinetobacter haemolyticus NIPH 261 OX=1217986 GN=queF PE=3 SV=1
MSVEHSQLGKETQYPTQYQPEVLFPISRAESRQQYADVEGITQGKDWWHVFEISWLNQLGLPQVAIGRLTLPASSPNLIESKSLKLYFNSLNFTKFDSKEAFIETVERDLSSAAGAKIELQLFQVDELEISKPQGICIDDLVPERLSEHPDSTLLQLDTTAEDDVEITLHSHLLRSNCPVTGQPDWGTIFIRFQGKKPCYRSLLAYIISYRQHNGFHEQCVEQIFADIWKLLGPQKLMVYATYTRRGGMDINPCRVSDLSWMPEPIRLARQ

SEQ ID NO: 43657 - protein, 271 aa, unidentified
  source 1..271: note = Acinetobacter halotolerans
  REGION 1..271: note = tr|A0A4Q6X727|A0A4Q6X727_9GAMM NADPH-dependent 7-cyano-7-deazaguanine reductase OS=Acinetobacter halotolerans OX=1752076 GN=queF PE=3 SV=1
MSVEHSLLGQETQYPTQYQPEVLFPISRAESRHQYADVEGITQGKDWWHVFEISWLNPQGLPQVAIGRITLPASSPNLIESKSLKLYFNSLNFTQFASRQVFIETVQGDLSKAAGASVELQLFHVDDLEITKPTGICIDDLIPERLSEHPDATLLQLDTATPDDVEVELYSHLLRSNCPVTGQPDWGTVFIRFQGKRPCYRSILAYIISYRQHNGFHEQCVEQIFADIWQLLKPEKLMVYATYTRRGGLDINPCRVSDLSWMPEPIRLARQ

SEQ ID NO: 43658 - protein, 271 aa, unidentified
  source 1..271: note = Acinetobacter idrijaensis
  REGION 1..271: note = tr|A0A098YF20|A0A098YF20_9GAMM NADPH-dependent 7-cyano-7-deazaguanine reductase OS=Acinetobacter idrijaensis OX=1507807 GN=queF PE=3 SV=1
MSVEQSLLGKDTNYPTEYQPDVLFPISRAPAREQYAHVEAIQQGADWWHVFEISWLNSTGVPQVAIGRISLPASSPNLIESKSLKLYFNSLNFAKFESQDAFITTVQKDLSAAAEAEVKLQLFQVDELEISKPEGICIDELTPERLENHPDASLLALDSDDAAEGEIQLYSHLLRSNCPVTGQPDWGTVFIRYQGKKPCYKSILAYIISYRQHNGFHEQCVEQMFADIWQQLKPEKLMVYATYTRRGGLDINPCRVSDLTWMPRPIRLARQ

SEQ ID NO: 43659 - protein, 271 aa, unidentified
  source 1..271: note = Acinetobacter indicus
  REGION 1..271: note = tr|A0A437IZV6|A0A437IZV6_9GAMM NADPH-dependent 7-cyano-7-deazaguanine reductase OS=Acinetobacter indicus; OX = 756892 GN=queF PE=3 SV=1
MSVENSLLGKDTQYPTTYQPDVLFPIARAEAREKYAHVAGIQQGKDWWHVFEMSWLNAAGVPQVAIGRIHLPATSPNLIESKSLKLYFNSLNFSTFASTDALINTVEQDLSAAAQAQVNLELLSVDDLAISQPEGICIDDLSPTRLENHPDASLLQHDAEQEEQVEVQLYSHLLRSNCPVTGQPDWGTVFIRYQGKKPCYRSILAYIISYRQHNGFHEQCVEQMFADIWQNLNPEKLMVYATYTRRGGLDINPCRVSDLTWMPRPIRLARQ

SEQ ID NO: 43660 - protein, 271 aa, unidentified
  source 1..271: note = Acinetobacter indicus
  REGION 1..271: note = tr|A0A2L2J1I9|A0A2L2J1I9_9GAMM NADPH-dependent 7-cyano-7-deazaguanine reductase OS=Acinetobacter indicus; OX = 756892 GN=queF PE=3 SV=1
MSVENSLLGKDTQYPTTYQPDVLFPIARAEAREKYAHVAGVQQGKDWWHVFEMSWLNAAGVPQVAIGRIHLPATSPNLIESKSLKLYFNSLNFSTFASTDALINTVEQDLSAAAQAQVNLELLSVDDLEISQPEGICIDGLSPTRLENHPDASLLQHDAEQEEPVEVQLYSHLLRSNCPVTGQPDWGTVFIRYQGKKPCYRSILAYIISYRQHNGFHEQCVEQMFADIWQNLNPEKLMVYATYTRRGGLDINPCRVSDLTWMPRPIRLARQ

SEQ ID NO: 43661 - protein, 270 aa, Acinetobacter johnsonii
  REGION 1..270: note = tr|A0A380U3D0|A0A380U3D0_ACIJO NADPH-dependent 7-cyano-7-deazaguanine reductase OS=Acinetobacter johnsonii OX=40214 GN=queF PE=3 SV=1
MSVEHSLLGKDTNYPTTYQPDILFPIARATAREHYAHVEGIQQGKDWWHVFEISWLNNHGVPQVAIGRISLPATSPNLIESKSLKLYFNSMNFTQFESKAAFKATVEQDLSVAAGADVNIDLFHVDDVEISQPEGICIDELIPTQLENHPNANLLALDDAAEDVEVQIYSHLLRSNCPVTGQPDWGTVFIRYKGKKPCYNSILAYIISYRQHNGFHEQCVEQIFADIWQNLKPEKLMVYAAYTRRGGLDINPCRVSDVSWMPRPIRLARQ

SEQ ID NO: 43662 - protein, 270 aa, Acinetobacter johnsonii
  REGION 1..270: note = tr|N9CX77|N9CX77_ACIJO NADPH-dependent 7-cyano-7-deazaguanine reductase OS=Acinetobacter johnsonii ANC 3681 OX=1217662 GN=queF PE=3 SV=1
MSVEHSLLGKDTNYPTTYQPDILFPIARATAREHYAHVEGIQQGKDWWHVFEISWLNHHGVPQVAIGRISLPATSPNLIESKSLKLYFNSMNFTQFESKAAFKATVEQDLSAAAGADVQIDLFHVDDVEISQPEGICIDELTPTQLENHPNANLLTLDDAAEDVEVQIYSHLLRSNCPVTGQPDWGTVFIRYKGKKPCYNSILAYIISYRQHNGFHEQCVEQIFADIWQNLKPEKLMVYAAYTRRGGLDINPCRVSDVSWMPRPIRLARQ

SEQ ID NO: 43663 - protein, 271 aa, Acinetobacter junii
  REGION 1..271: note = tr|D0SI05|D0SI05_ACIJU NADPH-dependent 7-cyano-7-deazaguanine reductase OS=Acinetobacter junii SH205 OX=575587 GN=queF PE=3 SV=1
MSVEHSLLGKDTQYPTQYQPEVLFPIARAESRKLYAYIEGIAQGKDWWHVFEISWLNQLGLPQVAIGRLTLPANSPNLIESKSLKLYFNSMNFTQFASQQSFVETVERDLSDAAGAKVELQLFQVDDLQISKPQGICIDDLIPERLSEHPDSSLLQYDAVSEENIEVELYSHLLRSNCPVTGQPDWGTVFIRFQGKKPCYRSILTYIISYRQHNGFHEQCVEQIFADIWQHLKPEKLMVYATYTRRGGLDINPCRVSDLSWMPEPIRLARQ

SEQ ID NO: 43664 - protein, 271 aa, Acinetobacter junii
  REGION 1..271: note = tr|A0A380UMN0|A0A380UMN0_ACIJU NADPH-dependent 7-cyano-7-deazaguanine reductase OS=Acinetobacter junii; OX = 40215 GN=queF PE=3 SV=1
MSVEHSLLGKDTQYPTQYQPEVLFPIARAESRKLYADIEGIAQGKDWWHVFEISWLNQLGLPQVAIGRLTLPANSPNLIESKSLKLYFNSMNFTQFASQQSFVETVERDLSDAAGAKVELQLFQVDDLQISKPQGICIDDLIPERLSEHPDSSLLQYDAVSEENIEVELYSNLLRSNCPVTGQPDWGTVFIRFQGKKPCYRSILAYIISYRQHNGFHEQCVEQIFADIWQHLKPEKLMVYATYTRRGGLDINPCRVSDLSWMPKPIRLARQ

SEQ ID NO: 43665 - protein, 271 aa, unidentified
  source 1..271: note = Acinetobacter kookii
  REGION 1..271: note = tr|A0A1G6L4F0|A0A1G6L4F0_9GAMM NADPH-dependent 7-cyano-7-deazaguanine reductase OS=Acinetobacter kookii; OX = 1226327 GN=queF PE=3 SV=1
MSVEHSLLGKDTNYPTEYQPDILFPISRATAREKYAHVEGIQQGKDWWHVFEISWLNAAGIPQVAIGRMALPASSPNLIESKSLKLYFNSMNFTQFDSKEAFIATAEKDLSAAAGAPVTLTLFQADDLDISKPEGICIDDLSPERLENHPDASLLKLDAENSEAVEVQLYSHLLRSNCPVTGQPDWGTVFIRYQGKKPCYRSILAYIISYRQHNGFHEQCVEQMFADIWQNLEPEKLMVYATYTRRGGLDINPCRVSDATWMPRPIRLARQ

SEQ ID NO: 43666 - protein, 271 aa, unidentified
  source 1..271: note = Acinetobacter kyonggiensis
  REGION 1..271: note = tr|A0A1H3G7V8|A0A1H3G7V8_9GAMM NADPH-dependent 7-cyano-7-deazaguanine reductase OS=Acinetobacter kyonggiensis OX=595670 GN=queF PE=3 SV=1
MTVELSLLGKDTNYPTEYQPDILFPIARAPAREHYAHVEGIQQGQDWWHVFEISWLNAVGIPQVAIGRIALPASSPNLIESKSLKLYFNSMNFTSFESKEAFIATVEKDLSAAAGAPVTLSLFQADDLDIAKPEGICVDDFSPERLETHPDATLLKLDTENTGTVDIQLYSHLLRSNCPVTGQPDWGTVFIRYQGKKPCYRSILAYIISYRQHNGFHEQCVEQMFADIWQNFAPEKLMVYATYTRRGGLDINPCRVSDLTWMPRPIRLARQ

SEQ ID NO: 43667 - protein, 270 aa, unidentified
  source 1..270: note = Acinetobacter lactucae
  REGION 1..270: note = tr|A0A429KA76|A0A429KA76_9GAMM NADPH-dependent 7-cyano-7-deazaguanine reductase OS=Acinetobacter lactucae; OX = 1785128 GN=queF PE=3 SV=1
MSVEQSLLGKETQYPTNYQPDVLFPIARAQSREAYSHIEGITQGKDWWHVFEISWLNAHAIPQVAIGRITLPASSPNLIESKSLKLYFNSLNFTQFDSKQSFIETVEKDLSAAAGAKVELTLFQVDDLEISRPQGICIDDLDPERLEQHPDATLLKRDASEEEVEIELYSHLLRSNCPVTGQPDWGTVFIHFKGKKPCYRSVLAYIISYRQHNGFHEQCVEQIFADIWQNLQPEKLMVYATYTRRGGLDINPCRVSDLSWMPKPIRLARQ

SEQ ID NO: 43668 - protein, 270 aa, unidentified
  source 1..270: note = Acinetobacter lactucae
  REGION 1..270: note = tr|A0A151YMP1|A0A151YMP1_9GAMM NADPH-dependent 7-cyano-7-deazaguanine reductase OS=Acinetobacter lactucae; OX = 1785128 GN=queF PE=3 SV=1
MSVEQSLLGKETQYPTNYQPDVLFPIARAQSREAYSHIEGITQGKDWWHVFEISWLNAHAIPQVAIGRITLPASSPNLIESKSLKLYFNSLNFTQFDSKQSFIETVEKDLSAAAGAKVELTLFQVDDLEISRPQGICIDDLDPERLEQHPDATLLKRDASEEEVEIELYSHLLRSNCPVTGQPDWGTVFIRFKGKKPCYRSVLAYIISYRQHNGFHEQCVEQIFADIWQNLQPEKLMVYATYTRRGGLDINPCRVSDLSWMPKPIRLARQ

SEQ ID NO: 43669 - protein, 272 aa, unidentified
  source 1..272: note = Acinetobacter larvae
  REGION 1..272: note = tr|A0A1B2LX73|A0A1B2LX73_9GAMM NADPH-dependent 7-cyano-7-deazaguanine reductase OS=Acinetobacter larvae; OX = 1789224 GN=BFG52_03720 PE=3 SV=1
MSVEHSLLGKDTQYPTEYQPDILFPIARAQSRAAYAEIPGIYQGKDWWHIFEISWLNAQGIPQVAIGRMCLDASSEFLIESKSLKLYFNSLNFTRFDAQQDFVARVEKDLSAAAQSTVQLELYAVDALQCHEAQGICLDQLTPLQLSTHPDASLLRLDTEHNGQISEHLLYSHLLRSNCPVTGQPDWGTVFIRYKGEKPCYDSILAYIISFRQHSGFHEQCVEQIYADLWRMLQPEQLMVYAAYTRRGGLDINPCRVSDFAWMPKPIRLARQ

SEQ ID NO: 43670 - protein, 271 aa, Acinetobacter lwoffii
  REGION 1..271: note = tr|N9HIN6|N9HIN6_ACILW NADPH-dependent 7-cyano-7-deazaguanine reductase OS=Acinetobacter lwoffii ATCC 9957 = CIP 70.31 OX=1311804 GN=queF PE=3 SV=1
MSVEQSLLGKDTNYPTEYQPDVLFPISRAPAREQYAHVEAIQQGADWWHVFEISWLNSTGVPQVAIGRISLPASSPNLIESKSLKLYFNSLNFAKFESQDAFITTVEKDLSAAAEAEVKLQLFQVDELEISKPEGICIDELTPERLENHPDASLLALDSDDAAEGEIQLYSHLLRSNCPVTGQPDWGTVFIRYQGKKPCYKSILAYIISYRQHNGFHEQCVEQMFADIWQQLKPEKLMVYATYTRRGGLDINPCRVSDLTWMPRPIRLARQ

SEQ ID NO: 43671 - protein, 271 aa, Acinetobacter lwoffii
  REGION 1..271: note = tr|N9G9K3|N9G9K3_ACILW NADPH-dependent 7-cyano-7-deazaguanine reductase OS=Acinetobacter lwoffii NIPH 478 OX=1217668 GN=queF PE=3 SV=1
MSVEQSLLGKDTNYPTEYQPGVLFPISRAPAREQYAHVEAIQQGADWWHVFEISWLNSTGVPQVAIGRISLPASSPNLIESKSLKLYFNSLNFAKFESQDAFITTVEKDLSAAAEAEVKLQLFQVDELEISKPEGICIDELTPERLENHPDASLLALDSDDAAEGEIQLYSHLLRSNCPVTGQPDWGTVFIRYQGKKPCYKSILAYIISYRQHNGFHEQCVEQMFADIWQQLKPEKLMVYATYTRRGGLDINPCRVSDLTWMPRPIRLARQ

SEQ ID NO: 43672 - protein, 276 aa, unidentified
  source 1..276: note = Acinetobacter marinus
  REGION 1..276: note = tr|A0A1G6M6B5|A0A1G6M6B5_9GAMM NADPH-dependent 7-cyano-7-deazaguanine reductase OS=Acinetobacter marinus; OX = 281375 GN=SAMN05421749_10665 PE=3 SV=1
MSVDASLLGQETQYPTHYAPEILFPIARADARQAYADVQGITQGVDWWHVFEISWLDLDGMPQVAIGRLHIPATSSHLIESKSLKLYFNSFNFERYDRADFVATVEADLSKAANADVKIELFDVDALTVDQPQGICLDQVKPNVIAFHPDRSLLALESGGEYSDAEQPTIEQHYYSHLLRSNCPVTNQPDWGTLFIRYQGKKPCEASLIAYIISYRQHNGFHEQCVEQIYADLWTALQPEKLMVYAAYTRRGGLDINPCRVSDLSWMLTPVRLARQ

SEQ ID NO: 43673 - protein, 272 aa, unidentified
  source 1..272: note = Acinetobacter nectaris
  REGION 1..272: note = tr|V2TGE9|V2TGE9_9GAMM NADPH-dependent 7-cyano-7-deazaguanine reductase OS=Acinetobacter nectaris CIP 110549 OX=1392540 GN=queF PE=3 SV=1
MSVEQSLLGKETQYPTQYQPDILFPIPREPSREAYASISEVQQGNDWWHVFELSWLNSQHIPQVAIGRLNIPANSKYLIESKSLKLYFNSLNFTCFANHSELVQTVEKDLSQAAQAPITLELTHPNDLLVNQPEGSCLDHLSPQKLSQHPDASLLELDSTSSQETEEYLYSNLLRSNCPVTGQPDWGTVFIRYEGKKISHESLLAYIISFRQHNGFHEQCVEQMFAEIWQNLQPNKLMVYAAYTRRGGLDINPCRVSHLSWLPQTPLRLSRQ

SEQ ID NO: 43674 - protein, 270 aa, Acinetobacter nosocomialis
  REGION 1..270: note = tr|A0A0E2GQY5|A0A0E2GQY5_ACINO NADPH-dependent 7-cyano-7-deazaguanine reductase OS=Acinetobacter nosocomialis NIPH 386 OX=1217985 GN=queF PE=3 SV=1
MSVEQSLLGKETQYPTSYQPDVLFPIARAQSREKYSHIEGINQGKDWWHVFEISWLNSHGIPQVAIGRITLPASSPNLIESKSLKLYFNSLNFTQFGSKELFIETVEKDLSSAAGAKVELTLFQVDELDISKPQGICIDDLTPERLEQHPDASLLKLDESGEEVEIELYSHLLRSNCPVTGQPDWGTVFIRFKGKKPCYRSVLAYIISYRQHNGFHEQCVEQIFADIWQNLRPEKLMVYATYTRRGGLDINPCRVSDLSWMPKPIRLARQ

SEQ ID NO: 43675 - protein, 270 aa, Acinetobacter nosocomialis; identical to SEQ ID NO: 43674
  REGION 1..270: note = tr|A0A2T7FLX5|A0A2T7FLX5_ACINO NADPH-dependent 7-cyano-7-deazaguanine reductase OS=Acinetobacter nosocomialis OX=106654 GN=queF PE=3 SV=1

SEQ ID NO: 43676 - protein, 270 aa, unidentified
  source 1..270: note = Acinetobacter oleivorans
  REGION 1..270: note = tr|A0A2T5Q7K9|A0A2T5Q7K9_9GAMM NADPH-dependent 7-cyano-7-deazaguanine reductase OS=Acinetobacter oleivorans OX=1148157 GN=queF PE=3 SV=1
MSVEQSLLGKETQYPTNYQPDVLFPIARAQSRESYSHIEGITQGKDWWHVFEISWLNAHGIPQVAIGRITLPASSPNLIESKSLKLYFNSLNFTQFDSKESFIGTVEKDLSAAADAKVELTLFQVDDLEISKPQGICIDDLAPERLEQHPDATLLKRDESGEEVEIELYSHLLRSNCPVTGQPDWGTVFIRFKGKKPCYRSVLAYIISYRQHNGFHEQCVEQIFADIWQNLEPEKLMVYATYTRRGGLDINPCRVSDLSWMPKPIRLARQ

SEQ ID NO: 43677 - protein, 270 aa, unidentified; identical to SEQ ID NO: 43676
  source 1..270: note = Acinetobacter oleivorans
  REGION 1..270: note = tr|D8JFQ8|D8JFQ8_ACISD NADPH-dependent 7-cyano-7-deazaguanine reductase OS=Acinetobacter oleivorans (strain JCM 16667 / KCTC 23045 / DR1) OX=436717; GN = queF PE=3 SV=1

SEQ ID NO: 43678 - protein, 271 aa, Acinetobacter parvus
  REGION 1..271: note = tr|N8RG71|N8RG71_9GAMM NADPH-dependent 7-cyano-7-deazaguanine reductase OS=Acinetobacter parvus NIPH 1103 OX=1217671 GN=queF PE=3 SV=1
MSVELSLLGKDTQYPTQYQPEVLFPIARADSRQQYAHIDGISQGKDWWHVFEISWLNQLGLPQVAIGRITLPASSPNLIESKSLKLYFNSLNFTQFQSRETFIETVERDLSQVAGAKVELQLFQVDDLAISKPTGICIDELIPERLSEHPDSSLLQLDSSSQDHVEIELYSHLLRSNCPVTGQPDWGTVFIRLQGKRPCYRSMLAYIISYRQHNGFHEQCVEQIFADIWQLLQPEKLMVYATYTRRGGLDINPCRVSDLSWMPEPIRLARQ

SEQ ID NO: 43679 - protein, 271 aa, Acinetobacter parvus
  REGION 1..271: note = tr|N8QC44|N8QC44_9GAMM NADPH-dependent 7-cyano-7-deazaguanine reductase OS=Acinetobacter parvus DSM 16617 = CIP 108168 OX=981333 GN=queF PE=3 SV=1
MSVELSLLGKDTQYPTQYQPEVLFPIARADSRQQYAHIDGISQGKDWWHVFEISWLNQLGLPQVAIGRITLPASSLNLIESKSLKLYFNSLNFTQFQSRETFIETVERDLSQAAGAKIELQLFQVDDLAISKPTGICIDELIPERLSEHPDSSLLQLDSSSQDHVEIELYSHLLRSNCPVTGQPDWGTVFIRLQGKRPCYRSMLAYIISYRQHNGFHEQCVEQIFADIWQLLQPEKLMVYATYTRRGGLDINPCRVSDLSWMPEPIRLARQ

SEQ ID NO: 43680 - protein, 270 aa, unidentified
  source 1..270: note = Acinetobacter piscicola
  REGION 1..270: note = tr|A0A4Q4GUL8|A0A4Q4GUL8_9GAMM NADPH-dependent 7-cyano-7-deazaguanine reductase OS=Acinetobacter piscicola OX=2006115 GN=queF PE=3 SV=1
MTVEHSLLGKETNYPTSYQPDILFPISRAQARENYKHVEGIYKGKDWWHIFEISWLNDHGIPQVAIGRMTLPACSEFLIESKSLKLYFNSMNFTQFASQQAFIDTVEKDLSHAAQAPVTLTLFQVDQLDIAQPQGICLDEQQPDCLVNHPDASLLQLDDSEKVVEEQLFSHLLRSNCPVTGQPDWGTIFIRYRGKKPCYRSILAYIISYRQHNGFHEQCVEQIFADIWQNLQPEKLMVYATYTRRGGLDINPCRVSDESWMPSPIRLARQ

SEQ ID NO: 43681 - protein, 270 aa, Acinetobacter pittii
  REGION 1..270: note = tr|R8YPC3|R8YPC3_ACIPI NADPH-dependent 7-cyano-7-deazaguanine reductase OS=Acinetobacter pittii ANC 4050 OX=1217691 GN=queF PE=3 SV=1
MSVEQSLLGKETQYPTNYQPDVLFPIARAQSREAYSHIEGITQGKDWWHVFEISWLNAHAIPQVAIGRITLPASSPNLIESKSLKLYFNSLNFTQFDSKQSFIETVEKDLSAAAGAKVELTLFQVDDLEISKPQGICIDELNPERLEQHPDATLLKQDESNEEVEIELYSHLLRSNCPVTGQPDWGTVFIRFKGKKPCYRSILAYIISYRQHNGFHEQCVEQIFADIWQNLQPEKLMVYATYTRRGGLDINPCRVSDLSWMPKPIRLARQ

SEQ ID NO: 43682 - protein, 270 aa, Acinetobacter pittii; identical to SEQ ID NO: 43638
  REGION 1..270: note = tr|A0A143J327|A0A143J327_ACIPI NADPH-dependent 7-cyano-7-deazaguanine reductase OS=Acinetobacter pittii; OX = 48296 GN=queF PE=3 SV=1

SEQ ID NO: 43683 - protein, 270 aa, unidentified
  source 1..270: note = Acinetobacter populi
  REGION 1..270: note = tr|A0A1Z9Z175|A0A1Z9Z175_9GAMM NADPH-dependent 7-cyano-7-deazaguanine reductase OS=Acinetobacter populi; OX = 1582270 GN=queF PE=3 SV=1
MSVETSQLGKETEYPTQYAPEVLFPIARQQARQAYAAIAGIQQGTDWWHVFEISWLDLQGKPQVAIGRLHIPASSPNLIESKSLKLYFNSFNFEKLSRQQFIETVERDLTQAAGASVQLELRSVDDLAITVPEGICLDEFEPSTIEYHPNAQLLKYDSGHDDVIEQSYYSHLLRSNCPVTNQPDWGTVFIRYRGKKPCEKALLAYIISYRQHNGFHEQCVEHIFADIWTLLKPQQLMVYAAYTRRGGLDINPCRVSDLSWMPTPIRLARQ

SEQ ID NO: 43684 - protein, 271 aa, unidentified
  source 1..271: note = Acinetobacter pragensis
  REGION 1..271: note = tr|A0A151Y3Q9|A0A151Y3Q9_9GAMM NADPH-dependent 7-cyano-7-deazaguanine reductase OS=Acinetobacter pragensis OX=1806892 GN=queF PE=3 SV=1
MSVEHSLLGKDTNYPTEYQPDILFPIARAAARENYAHVEGIQQGKDWWHVFEISWLNNAGIPQVAIGRLTLPAVSPNLIESKSLKLYFNSMNFTKFNYKDEFKALVEKDLSAAAGAPVTIDLFHADDVAISQPEGICIDDLSPAHLENHPNAALLALDHAHAEDVEIQLYSHLLRSNCPVTGQPDWGTVFIRYQGKKPSYESILAYIISYRQHNGFHEQCVEQMYADIWQNLKPEKLMVYAAYTRRGGLDINPCRVSDLTWMPRPIRLARQ

SEQ ID NO: 43685 - protein, 271 aa, unidentified
  source 1..271: note = Acinetobacter proteolyticus
  REGION 1..271: note = tr|A0A2N0WE58|A0A2N0WE58_9GAMM NADPH-dependent 7-cyano-7-deazaguanine reductase OS=Acinetobacter proteolyticus OX=1776741 GN=queF PE=3 SV=1
MSVEHSLLGKDTQYPTQYQPDVLFPIARAESRQQYLHVDGITQGKDWWHVFEISWLNSFGLPQVAIGRLTLPAHSPNLIESKSLKLYFNSMNFTQFESQQAFIETVEGDLSNAAGAKVELELFQVDDLAISKPQGICIDDLIPERLSEHPDSTLLQLDTSAEDEVEIELYSHLLRSNCPVTGQPDWGTVFIRLQGKKPCYRSILAYIISYRQHNGFHEQCVEQIFADIWQLLKPEKLMVYATYTRRGGLDINPCRVSDLSWMPEPIRLARQ

SEQ ID NO: 43686 - protein, 271 aa, unidentified
  source 1..271: note = Acinetobacter proteolyticus
  REGION 1..271: note = tr|A0A1E7R8N3|A0A1E7R8N3_9GAMM NADPH-dependent 7-cyano-7-deazaguanine reductase OS=Acinetobacter proteolyticus OX=1776741 GN=queF PE=3 SV=1
MSVEHSLLGKDTQYPTQYQPDVLFPIARAESRQQYLHVDGITQGKDWWHVFEISWLNHLGLPQVAIGRLTLPAHSPNLIESKSLKLYFNSMNFTQFDSQQAFIETVEGDLSNAAGAKVELELFQVDDLAISKPQGICIDDLIPERLSEHPDSTLLQLDTSAEDEVEIELYSHLLRSNCPVTGQPDWGTVFIRLQGKKPCYRSILAYIISYRQHNGFHEQCVEQIFADIWQLLKPEKLMVYATYTRRGGLDINPCRVSDLSWMPEPIRLARQ

SEQ ID NO: 43687 - protein, 270 aa, unidentified
  source 1..270: note = Acinetobacter puyangensis
  REGION 1..270: note = tr|A0A240E4N4|A0A240E4N4_9GAMM NADPH-dependent 7-cyano-7-deazaguanine reductase OS=Acinetobacter puyangensis OX=1096779 GN=queF PE=3 SV=1
MSVETSQLGKETEYPTQYAPEVLFPIVRQQARQAYANIAGIQQGIDWWHVFEISWLDLQGKPQVAIGRLHIPASSPNLIESKSLKLYFNSFNFEKLSRQQFIDTVERDLTQAAGASVQLELRSVDDLAITIPEGICLDEFEPSTIEYHPNAQLLKHDSGHDDVIEQSYYSHLLRSNCPVTNQPDWGTVFIRYRGKKPCEKALLAYIISYRQHNGFHEQCVEHIFADIWTLLQPQQLMVYAAYTRRGGLDINPCRVSDLSWMPTPIRLARQ

SEQ ID NO: 43688 - protein, 269 aa, unidentified
  source 1..269: note = Acinetobacter qingfengensis
  REGION 1..269: note = tr|A0A1E7REK3|A0A1E7REK3_9GAMM NADPH-dependent 7-cyano-7-deazaguanine reductase OS=Acinetobacter qingfengensis OX=1262585 GN=BJI46_08200 PE=3 SV=1
MSVESSLLGQDTEYPTQYAPQVLFPIARAPSRESYTNINGITQGMDWWHIFEISWLNEHGIPQVALGRLHIPATSEYLIESKSLKLYFNSFNFEKLSRADFIRTVEKDLSSVAQANIKLQLLNVDELHISQPQGICLDLLQPTKIEFEPNASLLALDDNNHIVEQSFYSHLLRSNCPVTNQPDWGTVFIRYQGKKISEHSLLAYIISYRKHNGFHEQCVEHIFADIWQHLQPEKLMVYAAYTRRGGLDINPCRVSDPTWLPQPIRLARQ

SEQ ID NO: 43689 - protein, 270 aa, Acinetobacter radioresistens
  REGION 1..270: note = tr|A0A3F3GHP7|A0A3F3GHP7_ACIRA NADPH-dependent 7-cyano-7-deazaguanine reductase OS=Acinetobacter radioresistens NIPH 2130 OX=1217674 GN=queF PE=3 SV=1
MSVEQSLLGKDTSYPNQYQPDILFPIARAQSRADYAHIEGIQQGKDWWHIFEISWLNSHGIPQVAIGRMSLPASSPHLIESKSLKLYFNSLNFHRFGNRAIFIETVEKDLSQAAGAAVKLELFQVDALEISQPQGICIDDLIPQQLKNHPDAGLLQYADDPEEGDIQLYSHLLRSNCPVTGQPDWGTVFIRYQGKKPCYRSVLAYIISYRQHNGFHEQCVEQMFADIWQHLQPEKLMVYATYTRRGGLDINPCRVSDLTWMPNPIRLARQ

SEQ ID NO: 43690 - protein, 270 aa, Acinetobacter radioresistens
  REGION 1..270: note = tr|A0A2T1J1L9|A0A2T1J1L9_ACIRA NADPH-dependent 7-cyano-7-deazaguanine reductase OS=Acinetobacter radioresistens OX=40216 GN=queF PE=3 SV=1
MSVEQSLLGKDTSYPNQYQPDILFPIARAQSRADYAHIEGIQQGKDWWHIFEISWLNSHGIPQVAIGRMSLPASSPHLIESKSLKLYFNSLNFHRFETRAIFIEIVEKDLSQAAGAAVKLELFQVDALEISQPQGICIDDLTPQQLKNHPDAGLLQYADDHEEGEIQLYSHLLRSNCPVTGQPDWGTVFIRYQGKKPCYRSVLAYIISYRQHNGFHEQCVEQMFADIWQHLQPEKLMVYATYTRRGGLDINPCRVSDLTWMPNPIRLARQ

SEQ ID NO: 43691 - protein, 271 aa, Acinetobacter rudis
  REGION 1..271: note = tr|S3MWT2|S3MWT2_9GAMM NADPH-dependent 7-cyano-7-deazaguanine reductase OS=Acinetobacter rudis CIP 110305 OX=421052 GN=F945_02681 PE=3 SV=1
MTVELSLLGKDTVYPTEYQPDILFPIARDTAREQYKDVAGIYQGQDWWHIFEVSWLNQHAVPQVAIARMSLPASSPYLIESKSLKLYFNGLNFTRFNSQADFIATVEQDLSRAAEAQVTITLFQVDDLAISQPQGLCLDQLQPSGFSIHPDASLLKFDEEDASNKEIQLYSHLLRSNCPVTGQPDWGTIFIRYKGKKPCYQSILAYIISYRQHNGFHEQCVEQVFADIWKNLAPSQLMVYATYTRRGGLDINPCRVSDLSWMPTPIRLARQ

SEQ ID NO: 43692 - protein, 195 aa, Acinetobacter rudis
  REGION 1..195: note = tr|S3PL79|S3PL79_9GAMM Queuine synthase (Fragment); OS = Acinetobacter rudis CIP 110305 OX=421052 GN=F945_00939; PE = 4 SV=1
MTVELSLLGKDTVYPTEYQPDILFPIARDTAREQYKDVAGIYQGQDWWHIFEVSWLNQHAVPQVAIARMSLPASSPYLIESKSLKLYFNGLNFTRFNSQADFIATVEQDLSRAAEAQVTITLFQVDDLAISQPQGLCLDQLQPSGFSIHPDASLLKFDEEDASNKEIQLYSHLLRSNCPVTGQPDWGTIFIRYKG

SEQ ID NO: 43693 - protein, 271 aa, Acinetobacter schindleri
  REGION 1..271: note = tr|N9AKK2|N9AKK2_9GAMM NADPH-dependent 7-cyano-7-deazaguanine reductase OS=Acinetobacter schindleri CIP 107287 OX=1217988 GN=queF PE=3 SV=1
MSVEHSLLGKETNYPTEYQPEILYPISRAPAREKYAHIEAIQQGTDWWHIFEISWLNAAGVPQVAIGRMTLPASSPNLIESKSLKLYFNSLNFAKFESKAAFIATVEQDLSKAAEADVKLDLFHIDELDIAKPEGICLDELIPERLENHPDATLLALDNKSDENVEVQLYSHLLRSNCPVTGQPDWGTVFIRYQGKKPCYKSILAYIISYRQHNGFHEQCVEQIFADIWQNLKPEKLMVYATYTRRGGLDINPCRVSDSTWMPRPIRLARQ

SEQ ID NO: 43694 - protein, 271 aa, Acinetobacter schindleri
  REGION 1..271: note = tr|A0A1P8PL63|A0A1P8PL63_9GAMM NADPH-dependent 7-cyano-7-deazaguanine reductase OS=Acinetobacter schindleri OX=108981 GN=queF PE=3 SV=1
MSVEHSLLGKDTNYPTEYQPEILYPISRAPAREKYAHIEAIQQGTDWWHIFEISWLNAAGVPQVAIGRMTLPASSPNLIESKSLKLYFNSLNFAKFESKAAFIATVEQDLSKAAEADVKLDLFHIDELDIAKPEGICLDELIPERLENHPDATLLALDNESDENVEVQLYSHLLRSNCPVTGQPDWGTVFIRYQGKKPCYKSILAYIISYRQHNGFHEQCVEQIFADIWQNLKPEKLMVYATYTRRGGLDINPCRVSDFTWMPRPIRLARQ

SEQ ID NO: 43695 - protein, 270 aa, unidentified; identical to SEQ ID NO: 43649
  source 1..270: note = Acinetobacter seifertii
  REGION 1..270: note = tr|N8QX34|N8QX34_9GAMM NADPH-dependent 7-cyano-7-deazaguanine reductase OS=Acinetobacter seifertii OX=1530123 GN=queF PE=3 SV=1

SEQ ID NO: 43696 - protein, 270 aa, unidentified
  source 1..270: note = Acinetobacter seifertii
  REGION 1..270: note = tr|A0A2M8MMX4|A0A2M8MMX4_9GAMM NADPH-dependent 7-cyano-7-deazaguanine reductase OS=Acinetobacter seifertii OX=1530123 GN=queF PE=3 SV=1
MSVEQSLLGKETQYPTSYQPDVLFPIARAQSRENYSHIEGITQGKDWWHIFEISWLNSHGIPQVAIGRITLPASSPNLIESKSLKLYFNSLNFTQFDSKALFIETVEKDLSAAAGAKVELTLFQVDDLDISKPQGICIDDLTPERLEQHPDASLLKLDESGEEVEIELYSHLLRSNCPVTGQPDWGTVFIRFKGKKPCYRSLLAYIISYRQHNGFHEQCVEQIFADVWQNLQPEKLMVYATYTRRGGLDINPCRVSDLSWMPKPIRLARQ

SEQ ID NO: 43697 - protein, 271 aa, Acinetobacter soli
  REGION 1..271: note = tr|A0A3R8ZX20|A0A3R8ZX20_9GAMM NADPH-dependent 7-cyano-7-deazaguanine reductase OS=Acinetobacter soli; OX = 487316 GN=queF PE=3 SV=1
MSVEKSLLGKETEYPTTYEPGILFPISRSSSREQYANITGVSQGKDWWHVFELSWLNQDGIPQVAIGRITLPATSENLIESKSLKLYFNSLNFHRLVSKAALIDLVEKDLSQAANAKVGFELFDVDTLEISQPSGICIDQFKPARLESHPDASLLALNADDQSQIEVNLYSHLLRSNCPVTGQPDWGTVFIRYQGIKPCYNSILAYIISYRQHNGFHEQCVEQMYADIWQNLKPEKLMVYATYTRRGGLDINPCRVSDLSWMPSPIRLARQ

SEQ ID NO: 43698 - protein, 271 aa, Acinetobacter soli
  REGION 1..271: note = tr|N9AFQ7|N9AFQ7_9GAMM NADPH-dependent 7-cyano-7-deazaguanine reductase OS=Acinetobacter soli NIPH 2899 OX=1217677 GN=F950_02749 PE=3 SV=1
MSVEKSLLGKETEYPTTYEPGILFPISRSSSREQYANITGVSQGKDWWHVFELSWLNQDRIPQVAIGRITLPATSENLIESKSLKLYFNSLNFHRFVSKAALIDLVEKDLSQAANAKVGFELFDVDALEISQPSGICIDQFKPARLESHPDASLLALDADDQSQIEVNLYSHLLRSNCPVTGQPDWGTVFIRYQGIKPCYNSILAYIISYRQHNGFHEQCVEQMYADIWQNLKPEKLMVYATYTRRGGLDINPCRVSDLSWMPSPIRLARQ

SEQ ID NO: 43699 - protein, 271 aa, Acinetobacter sp.
  REGION 1..271: note = tr|A0A4R0DX94|A0A4R0DX94_9GAMM NADPH-dependent 7-cyano-7-deazaguanine reductase OS=Acinetobacter sp. ANC 4472 OX=2529844 GN=queF PE=3 SV=1
MSVEHSLLGKDTNYPTEYQPDILFPIARAQAREKYAHVEGIQQGKDWWHVFEISWLNAAGIPQVAIGRITLPASSPNLIESKSLKLYFNSMNFSKFDSKDTFIATVEKDLSFAAGAPVSLTLFQADDLEFSKPEGICIDDLSPERLENHPDATLLKLDPENSDEVEIQLYSHLLRSNCPVTGQPDWGTVFIRYQGKKPCYRSILAYIISYRQHNGFHEQCVEQMFVDIWQNLAPEKLMVYATYTRRGGLDINPCRVSDATWMPRPIRLARQ

SEQ ID NO: 43700 - protein, 271 aa, Acinetobacter sp.; identical to SEQ ID NO: 43658
  REGION 1..271: note = tr|A0A1E3GNR7|A0A1E3GNR7_9GAMM NADPH-dependent 7-cyano-7-deazaguanine reductase OS=Acinetobacter sp. 51m; OX = 1856846 GN=queF PE=3 SV=1

SEQ ID NO: 43701 - protein, 271 aa, Acinetobacter tandoii
  REGION 1..271: note = tr|A0A515BGY2|A0A515BGY2_9GAMM NADPH-dependent 7-cyano-7-deazaguanine reductase OS=Acinetobacter tandoii; OX = 202954 GN=queF PE=3 SV=1
MSVEHSLLGKDTQYPSTYQPDILFPIERAQARSSYAHIEGIQRGQDWWHVFEISWLNAQGIPQVAIGRLTLPATSPNLIESKSLKLYFNSLNFTQFESEAAFITTVEKDLSAAAGATVTIQLFQVDALEIHQPEGICIDDFVPERLENHPDASLLGFDSENSEQVEVQLYSHLLRSNCPVTGQPDWGTVFIRYQGKKPCYRSLLAYIISYRQHNGFHEQCVEQMYADIWQNLQPEKLMVYAAYTRRGGLDINPCRVSDLTWMPRPIRLARQ

SEQ ID NO: 43702 - protein, 271 aa, Acinetobacter tandoii
  REGION 1..271: note = tr|R9AW68|R9AW68_9GAMM NADPH-dependent 7-cyano-7-deazaguanine reductase OS=Acinetobacter tandoii DSM 14970 = CIP 107469 OX=1120927 GN=queF PE=3 SV=1
MSVEHSLLGKDTQYPSTYQPDILFPIARAQARSSYAHIEGIQQGKDWWHVFEISWLNAQGIPQVAIGRLTLPASSPNLIESKSLKLYFNSLNFTQFDSESAFVATVEKDLSAAAGATVTIQLFQVDALTIDQPEGICIDDLVPDRLENQPDASLLSLDRENTDNLEIQLYSHLLRSNCPVTGQPDWGTVFIRYQGKKPCYRSLLAYIISYRQHNGFHEQCVEQIYADIWQNLQPEKLMVYAAYTRRGGLDINPCRVSDLTWMPRPIRLARQ

SEQ ID NO: 43703 - protein, 271 aa, Acinetobacter tjernbergiae
  REGION 1..271: note = tr|V2UVV4|V2UVV4_9GAMM NADPH-dependent 7-cyano-7-deazaguanine reductase OS=Acinetobacter tjernbergiae DSM 14971 = CIP 107465 OX=1120928 GN=queF; PE = 3 SV=1
MSVEFSLLGKDTEYPTHYQPEVLFPIARAESRQQYAHIEGVTQGKDWWHIFEISWLNQIGLPQVAIGRLTLPANSPNLIESKSLKLYFNSLNFTQFESKQNFIETVEQDLSKAAGAKIELQLFQVDDLNISKPQGICIDDLIPERLSEHPDATLLQFDTTNPEHVEIELYSHLLRSNCPVTGQPDWGTVFIRFQGKKPCYRSLLAYIISYRQHNGFHEQCVEQIFADLWQLLQPEKLMVYATYTRRGGLDINPCRVSDLSWMPEPIRLARQ

SEQ ID NO: 43704 - protein, 271 aa, Acinetobacter towneri
  REGION 1..271: note = tr|N9CPP1|N9CPP1_9GAMM NADPH-dependent 7-cyano-7-deazaguanine reductase OS=Acinetobacter towneri DSM 14962 = CIP 107472 OX=1120929 GN=queF PE=3 SV=1
MSVEQSLLGKDTNYPTEYQPDILFPISRAAAREKYADVEGIQLGQDWWHVFEISWLNAAGVPQVAIGRITLPASSPNLIESKSLKLYFNSMNFTRFQSEANFIETVEHDLTAAAQAPVTLTLFKVDDLAISQPEGICIDQLTPERLEQHPDPSLLQFDLEQAEDIEVQLFSHLLRSNCPVTGQPDWGTVFIRYQGKKPCYRSILAYIISYRQHNGFHEQCVEQMFADIWQKFAPEKLMVYATYTRRGGLDINPCRVSDLTWMPRPIRLARQ

SEQ ID NO: 43705 - protein, 271 aa, Acinetobacter towneri
  REGION 1..271: note = tr|A0A1E8E541|A0A1E8E541_9GAMM NADPH-dependent 7-cyano-7-deazaguanine reductase OS=Acinetobacter towneri; OX = 202956 GN=queF PE=3 SV=1
MSVEQSLLGKDTNYPTEYQPDILFPISRAAAREKYADVEGIQLGQDWWHVFEISWLNAAGVPQVAIGRIALPASSPNLIESKSLKLYFNSMNFTRFQSEANFIETVEHDLTAAAQAPVTLTLFKVDDLAISQPEGICIDQLTPERLEQHPDPSLLQFDLEQAEDIEVQLFSHLLRSNCPVTGQPDWGTVFIRYQGKKPCYRSILAYIISYRQHNGFHEQCVEQMFADIWQKFAPEKLMVYATYTRRGGLDINPCRVSDLTWMPRPIRLARQ

SEQ ID NO: 43706 - protein, 271 aa, Acinetobacter ursingii
  REGION 1..271: note = tr|N9BZW4|N9BZW4_9GAMM NADPH-dependent 7-cyano-7-deazaguanine reductase OS=Acinetobacter ursingii ANC 3649 OX=1257043 GN=queF PE=3 SV=1
MSVEQSLLGKETEYPTEYQPSVLFPIARALSRENYADLKGITQGLDWWHVFELSWLNGLGIPQVAIGRITLPATSTNLIESKSLKLYFNSLNFHRLDSKQDLIDLVEQDLSQAANAKVTLELFDVDALEITKPQGICIDELIPEHLENHPNAGLLKLDAEQQDHVDVTLFSHLLRSNCPVTGQPDWGTVFIRFQGLKPCYRSVLAYIISYRQHNGFHEQCVEQMFADIWTHLQPEKLMVYATYTRRGGLDINPCRVSDLSWMPNPIRLARQ

SEQ ID NO: 43707 - protein, 271 aa, Acinetobacter ursingii
  REGION 1..271: note = tr|N9QRG2|N9QRG2_9GAMM NADPH-dependent 7-cyano-7-deazaguanine reductase OS=Acinetobacter ursingii NIPH 706 OX=1217716 GN=queF PE=3 SV=1
MSVEQSLLGKETEYPTEYQPSVLFPIARALSRENYADLKGITQGLDWWHVFELSWLNALGIPQVAIGRITLPATSTNLIESKSLKLYFNSLNFHRLDSKQDLIDLVEQDLSQAANAKVTLELFDVDALEITKPQGICIDDLIPEHLENHPNAGLLKLDVEQQDHVDVTLFSHLLRSNCPVTGQPDWGTVFIRFQGLKPCYRSILAYIISYRQHNGFHEQCVEQMFADIWTHLQPEKLMVYATYTRRGGLDINPCRVSDLSWMPNPIRLARQ

SEQ ID NO: 43708 - protein, 271 aa, unidentified
  source 1..271: note = Acinetobacter variabilis
  REGION 1..271: note = tr|A0A3R9AYC2|A0A3R9AYC2_9GAMM NADPH-dependent 7-cyano-7-deazaguanine reductase OS=Acinetobacter variabilis OX=70346 GN=queF PE=3 SV=1
MSVEHSLLGKDTNYPTEYQPDILFPISRAPAREKYAHVEAIQQGKDWWHVFEISWLNAAGVPQVAIGRITLPAFSPNLIESKSLKLYFNSLNFAKFDSQEAFITTVEKDLSKAAGAEITLDLFHVDELEISKPEGICIDDLTPERLENHPDASLLSLNQHSDENIEVQLYSHLLRSNCPVTGQPDWGTVFIRYQGKKPCYKSILAYIISYRQHNGFHEQCVEQMFADIWQNLKPEKLMVYATYTRRGGLDINPCRVSDSTWMPRPIRLARQ

SEQ ID NO: 43709 - protein, 271 aa, unidentified
  source 1..271: note = Acinetobacter variabilis
  REGION 1..271: note = tr|N9NQ36|N9NQ36_9GAMM NADPH-dependent 7-cyano-7-deazaguanine reductase OS=Acinetobacter variabilis OX=70346 GN=queF PE=3 SV=1
MSVEHSLLGKDTNYPTEYQPDILFPISRAPAREKYAHVEAIQQGKDWWHVFEISWLNAAGVPQVAIGRITLPAFSPNLIESKSLKLYFNSLNFAKFDSKEAFITTVEKDLSKAAGAEITLDLFHVDELEISKPEGICIDDLTPERLENHPDASLLSLDRHSDENIEVQLYSHLLRSNCPVTGQPDWGTVFIRYQGKKPCYKSILAYIISYRQHNGFHEQCVEQMFADIWQNLKPEKLMVYATYTRRGGLDINPCRVSDSTWMPRPIRLARQ

SEQ ID NO: 43710 - protein, 271 aa, Acinetobacter venetianus
  REGION 1..271: note = tr|N8YIN8|N8YIN8_ACIVR NADPH-dependent 7-cyano-7-deazaguanine reductase OS=Acinetobacter venetianus (strain ATCC 31012 / CIP 110063 / RAG-1); OX = 1191460 GN=queF PE=3SV=1
MSVEHSLLGKDTQYPTQYQPEVLFPIARAESRKQYAHIEGITQGKDWWHVFEISWLNQLGLPQVAIGRITLPASSPNLIESKSLKLYFNSLNFTQFESKQIFIETVERDLSNAAGAQIKLDLFQVDDLEISKPKGICIDDLIPERLSEHPDSTLLQLDQTTDDHVEIELYSHLLRSNCPVTGQPDWGTVFIRFQGKKPCYRSILAYIISYRQHNGFHEQCVEQIFSDIWQLLKPEKLMVYATYTRRGGLDINPCRVSDLSWMPEPIRLARQ

SEQ ID NO: 43711 - protein, 271 aa, Acinetobacter venetianus
  REGION 1..271: note = tr|A0A150HVV3|A0A150HVV3_9GAMM NADPH-dependent 7-cyano-7-deazaguanine reductase OS=Acinetobacter venetianus OX=52133 GN=queF PE=3 SV=1
MSVEHSLLGKDTQYPTQYQPEVLFPIARAESRKQYAHIEGITQGKDWWHVFEISWLNQLGLPQVATGRITLPASSPNLIESKSLKLYFNSLNFTPFESKQIFIETVERDLSNAAGAQIKLDLFQVDDLEISKPKGICIDDLIPERLSEHPDSTLLQLDQTTDDHVEIELYSHLLRSNCPVTGQPDWGTVFIRFQGKKPCYRSILAYIISYRQHNGFHEQCVEQIFSDIWQLLKPEKLMVYATYTRRGGLDINPCRVSDLSWMPEPIRLARQ

SEQ ID NO: 43712 - protein, 274 aa, unidentified
  source 1..274: note = Acinetobacter wuhouensis
  REGION 1..274: note = tr|A0A385C3Y3|A0A385C3Y3_9GAMM NADPH-dependent 7-cyano-7-deazaguanine reductase OS=Acinetobacter wuhouensis OX=1879050 GN=queF PE=3 SV=1
MSVELSLLGKDTNYPTTYQPDILFPISRAEAREQYAHVDGIYKGKDWWHVFEISWLNAKGIPQVAIGRIALPATSPNLIESKSLKLYFNSMNFTQFDSQQAFIHTVEKDLSNAAQAPVTLTLFQVDELDIAKPQGICIDDQEPDRLVNHPDASLLALDNQANKSAENVDIQLYSHLLRSNCPVTGQPDWGTVFIRYQGNKPCYRSILAYIISYRQHNGFHEQCVEQIFADIWQNLKPEKLMVYATYTRRGGLDINPYRVSDESWMPSPIRLARQ

SEQ ID NO: 43713 - protein, 274 aa, unidentified
  source 1..274: note = Acinetobacter wuhouensis
  REGION 1..274: note = tr|A0A4Q7AK03|A0A4Q7AK03_9GAMM NADPH-dependent 7-cyano-7-deazaguanine reductase OS=Acinetobacter wuhouensis OX=1879050 GN=queF PE=3 SV=1
MSVELSLLGKDTNYPTTYQPDILFPISRAEAREQYAHVDGIYKGKDWWHVFEISWLNAKGIPQVAIGRIALPATSPNLIESKSLKLYFNSMNFTQFDSQQAFIHTIEKDLSNAAQAPVTLTLFQVDELDIAKPQGICIDDQEPDRLVNHPDASLLALDNQADESAESVDIQLYSHLLRSNCPVTGQPDWGTVFIHYQGNKPCYRSILAYIISYRQHNGFHEQCVEQIFADIWQNLKPEKLMVYATYTRRGGLDINPCRVSDESWMPSPIRLARQ

SEQ ID NO: 43714 - protein, 279 aa, Actinobacillus delphinicola
  REGION 1..279: note = tr|A0A448TSB6|A0A448TSB6_9PAST NADPH-dependent 7-cyano-7-deazaguanine reductase OS=Actinobacillus delphinicola OX=51161 GN=queF PE=3 SV=1
MYQDKSLSALKLGQKTQYAKFYDPTLLQPVPRRLNREKLGIEGNVPFTIGADMWTAFELSWLNEKGLPQVAIAEVSIDFRSQNLIESKSFKLYLNSFNQTKFADFASVQSTLQKDLAECAQGEVQVVVKPLTAYAQQPIEVLHGENIDNQDICIDNYEFNAELLENCCEKDEIIEEYLVSDLLKSNCLITSQPDWGTVQIHYVGRKINREKLLRYIVSFRDHNEFHEQCVERIFCDLLHFAKPEKLTVYARYTRRGGLDINPYRSNFEAVPESIRLARQ

SEQ ID NO: 43715 - protein, 51 aa, Actinobacillus equuli
  REGION 1..51: note = tr|A0A448QSJ0|A0A448QSJ0_ACTEU 7-cyano-7-deazaguanine reductase OS=Actinobacillus equuli; OX = 718 GN=queF_1 PE=4 SV=1
MRRAYFTDLMQFAQPEKLTVYARYTRRGGLDINPFRSNFESVPQNLRMARQ

SEQ ID NO: 43716 - protein, 78 aa, Actinobacillus equuli
  REGION 1..78: note = tr|A0A448QSP0|A0A448QSP0_ACTEU 7-cyano-7-deazaguanine reductase OS=Actinobacillus equuli; OX = 718 GN=queF_2 PE=4 SV=1
MAEGEVVEETLVSHLLKSNCLITSQPDWGSVQIHYVGKKLNREKLLRYLVSFREHNEFHEQCVERILPILCNLHSRKN

SEQ ID NO: 43717 - protein, 279 aa, Actinobacillus indolicus
  REGION 1..279: note = tr|A0A4P7CI56|A0A4P7CI56_9PAST NADPH-dependent 7-cyano-7-deazaguanine reductase OS=Actinobacillus indolicus OX=51049 GN=queF PE=3 SV=1
MNYNDESLSGLTLGQKTEYKSEYDPNLLQAVPRRLNRDSLGITVEQPFTIGADIWTLYELSWLNPQGVPQVAIADVSIDFRSENLIESKSFKLYLNSFNQTRFASLEEVQQRIQADLTKCASGQISVKIYKLSDFTQQPIVDFAGECIDEQDIHIDSYQFSTEALQNIASGEVVEERLVSHLLKSNCLITSQPDWGSVQIHYVGKRLDREKLLRYIVSFREHNEFHEQCVERIFCDLMQFAKPEKLTVYARYTRRGGLDINPFRSNFESLPENQRMARQ

SEQ ID NO: 43718 - protein, 279 aa, Actinobacillus lignieresii
  REGION 1..279: note = tr|A0A380TU48|A0A380TU48_ACTLI NADPH-dependent 7-cyano-7-deazaguanine reductase OS=Actinobacillus lignieresii OX=720 GN=queF PE=3 SV=1
MNYNDKSLSALKLGQKTEYKSEYDPTLLQPVPRKLNRDGLGITEQQPFDRGADVWTCYELSWLNENGLPQVAIADVAIDFRSENLIESKSFKLYLNSFNQTKFASLEQVEQTLAKDLSQCASGQVSVKVYKLSAYTQQPIVDFAGECIDEQDIQIDSYEFSNEHLVSVAEGEVVEETLVSHLLKSNCLITSQPDWGSVQIHYVGKKLNREKLLRYLVSFREHNEFHEQCVERIFTDLIQFAQPEKLTVYARYTRRGGLDINPFRSNFESVPQNLRMARQ

SEQ ID NO: 43719 - protein, 279 aa, Actinobacillus minor
  REGION 1..279: note = tr|C5S2E3|C5S2E3_9PAST NADPH-dependent 7-cyano-7-deazaguanine reductase OS=Actinobacillus minor NM305 OX=637911 GN=queF PE=3 SV=1
MNYNDKSLSALKLGQKTEYKSEYDPSLLQPVPRKLNRDGLGITDVQLFNQGADIWTCYELSWLNLNGLPQVAIADVAVDFQSENLIESKSFKLYLNSFNQSKFASVEQVEQVLARDLSLCASGQVSVKVRKLSEYTQQPIVDFEGECIDEQDLKIESYQFSNQHLTGIAEGEVVDETLVSHLLKSNCLITSQPDWGSVQIHYVGKKLNREKLLRYLISFREHNEFHEQCVERIFTDLVQFAQPEKLTVYARYTRRGGLDINPFRSNFEPLPKNLRMARQ

SEQ ID NO: 43720 - protein, 279 aa, Actinobacillus pleuropneumoniae
  REGION 1..279: note = sp|A3N0K4|QUEF_ACTP2 NADPH-dependent 7-cyano-7-deazaguanine reductase OS=Actinobacillus pleuropneumoniae serotype 5b (strain L20) OX=416269; GN = queF PE=3 SV=1
MNYNDKSLSALKLGQKTEYKSEYDPTLLQPVPRKLNRDGLGITEQQPFDRGADVWTCYELSWLNENGLPQVAIADVAIDFRSENLIESKSFKLYLNSFNQTKFASLEQVEQTLAKDLSQCASGQVSVKVYKLSAYTQQPIVDFAGECIDEQDIQIDSYEFSNEHLASVAEGEVVEETLVSHLLKSNCLITSQPDWGSVQIHYVGKKLNREKLLRYLVSFREHNEFHEQCVERIFIDLIQFTQPEKLTVYARYTRRGGLDINPFRSNFESVPQNLRMARQ

SEQ ID NO: 43721 - protein, 279 aa, Actinobacillus pleuropneumoniae
  REGION 1..279: note = tr|A0A3S5F5U5|A0A3S5F5U5_ACTPL NADPH-dependent 7-cyano-7-deazaguanine reductase OS=Actinobacillus pleuropneumoniae OX=715 GN=queF PE=3 SV=1
MNYNDKSLSALKLGQKTEYKSEYDPTLLQPVPRKLNRDGLGITDQPPFDRGADVWTCYELSWLNENGLPQVAIADVAIDFRSENLIESKSFKLYLNSFNQTKFASLEQVEQTLAKDLSQCASGQVSVKVYKLSAYTQQPIVDFAGECIDEQDIQIDSYEFSNEHLASVAEGEVVEETLVSHLLKSNCLITSQPDWGSVQIHYVGKKLNREKLLRYLVSFREHNEFHEQCVERIFTDLIQFTQPEKLTVYARYTRRGGLDINPFRSNFESVPQNLRMARQ

SEQ ID NO: 43722 - protein, 278 aa, Actinobacillus porcinus
  REGION 1..278: note = tr|A0A4V0IFB5|A0A4V0IFB5_9PAST NADPH-dependent 7-cyano-7-deazaguanine reductase OS=Actinobacillus porcinus OX=51048 GN=queF PE=3 SV=1
MNYESQLNNLKLGQKTEYKAEYDRTLLQPVPRALNRDGLGITAQQPFTQGSDIWTAYEISWLNPKGLPQVAIADVEIDFRSENLIESKSFKLYLNSFNQTKFSTFDEVQRIMQQDLSECAKGDVKVRLNPLAFYNAQPIAQLQGECIDEQDIEIDDYGFDATLLENSVNENTVEETLVSHLLKSNCLITSQPDWGSVQIHYVGKQIDREKLLRYLVSFRQHNEFHEQCVERIFCDLMTFAKPEKLSVYARYTRRGGLDINPFRSNFETVPQNNRLARQ

SEQ ID NO: 43723 - protein, 279 aa, unidentified
  source 1..279: note = Actinobacillus porcitonsillarum
  REGION 1..279: note = tr|A0A2U8FJY0|A0A2U8FJY0_9PAST NADPH-dependent 7-cyano-7-deazaguanine reductase OS=Actinobacillus porcitonsillarum OX=189834 GN=queF PE=3 SV=1
MNYNDKSLSALKLGQKTEYKSEYDPNLLQPVPRKLNRDGLGITDVQPFNQGADIWTCYELSWLNLNGLPQVAIADVAVDFQSENLIESKSFKLYLNSFNQSKFDSFEQVEQVLVQDLSRCASGQVSVKVRKLSEYTQQPIVDFDGECIDEQNLQIDSYQFSNEHLAGIAEGEVVDETLVSHLLKSNCLITSQPDWGSVQIHYVGKKLNREKLLRYLISFREHNEFHEQCVERIFTDLMQFAQPEKLTVYARYTRRGGLDINPFRSNFEPLPKNLRMARQ

SEQ ID NO: 43724 - protein, 278 aa, unidentified
  source 1..278: note = [Actinobacillus] rossii
  REGION 1..278: note = tr|A0A380TWQ0|A0A380TWQ0_9PAST NADPH-dependent 7-cyano-7-deazaguanine reductase OS=[Actinobacillus] rossii OX=123820 GN=queF PE=3 SV=1
MNYEKQLKDLKLGQKTEYKAEYDCSLLQPVPRALNRDSLGITEKQPFTQGCDIWTAYEISWLNPKGLPQVAIADVEIDFRSLNLIESKSFKLYLNSFNQTQFVSFDEVQRIIQQDLSDCAKGDVKVRLNSLAFYDEQPIARLQGECIDEQAIEIQNYGFNSALLENCTRENLVEETLVSHLLKSNCLITNQPDWGSVQIHYVGKQIDREKLLRYIVSFRQHNEFHEQCVERIFCDLMQFAQPKKLTVYARYTRRGGLDINPFRSNFESAPTNLRLARQ

SEQ ID NO: 43725 - protein, 279 aa, Actinobacillus seminis
  REGION 1..279: note = tr|A0A263HB45|A0A263HB45_9PAST NADPH-dependent 7-cyano-7-deazaguanine reductase OS=Actinobacillus seminis; OX = 722 GN=queF PE=3 SV=1
MHYYDQSLQSLPLGKQTKYAENYDRTLLQPVPRSLNRDSLGITAQQPFTIGADIWTAYEISWLNTKGVPQVAIADVEIDCASLNLIESKSFKLYLNSFNQSKFISFDEVCHILQQDLQQCAQGEVKVRLNSLANYHCTPIASFVGDCIDEQNIEIVDYQFNPQLLQHCTGENPVDEVLVSHLLKSNCLITQQPDWGSVQIHYVGKQIDREKLLRYLISYRQHNEFHEQCVERIFCDLMQFAKPEKLTVYARYTRRGGLDINPFRSNFEPIPLNQRLARQ

SEQ ID NO: 43726 - protein, 279 aa, Actinobacillus succinogenes
  REGION 1..279: note = sp|A6VNL8|QUEF_ACTSZ NADPH-dependent 7-cyano-7-deazaguanine reductase OS=Actinobacillus succinogenes (strain ATCC 55618 / DSM 22257 / 130Z); OX = 339671 GN=queF PE=3 SV =1
MNRYDNSLSGLKLGQKTEYNAKYDRTLLQPVPRRLNRDDLGISAQQPFNQGADIWTAYEISWLNPKGLPQIAIADAEIDFRSENLVESKSFKLYLNSFNQTKFASPAEVQDTIRRDLQDCVQGEVKVRLNSVAFYTHQPIHELSGEIIDNQDIEISDYGFNAELLTNCTCDVQVEETLVSHLLKSNCLITGQPDWGTLQIRYAGNRIDREKLLRYIVSFRQHNEFHEQCVERIFCDILHYAEPEKLTVYARYTRRGGLDINPFRSNFEPVPGNFRLARQ

SEQ ID NO: 43727 - protein, 279 aa, Actinobacillus suis
  REGION 1..279: note = tr|K0G4E0|K0G4E0_ACTSU NADPH-dependent 7-cyano-7-deazaguanine reductase OS=Actinobacillus suis H91-0380 OX=696748 GN=queF PE=3 SV=1
MNYNDKSLSVLKLGQKTEYKSEYDPTLLQPVPRKLNRDGLGITEQQPFDRGADVWTCYELSWLNENGLPQVAIADVAIDFRSENLIESKSFKLYLNSFNQTKFASLEQVEQTLAKDLSQCASGQVSVKVYKLSAYTRQPIVDFAGECIDEQDIQIDSYEFSNEHLASVAEGEIVEETLVSHLLKSNCLITSQPDWGSVQIRYVGKKLNREKLLRYLVSFREHNEFHEQCVERIFTDLMQFAQPEKLTVYARYTRRGGLDINPFRSNFEAVPQNLRMARQ

SEQ ID NO: 43728 - protein, 279 aa, Actinobacillus ureae
  REGION 1..279: note = tr|E8KHM3|E8KHM3_9PAST NADPH-dependent 7-cyano-7-deazaguanine reductase OS=Actinobacillus ureae ATCC 25976 OX=887324 GN=queF PE=3 SV=1
MNYNDKSLSALKLGQKTEYKSEYDPTLLQPVPRKLNRDGLGITEQQPFDRGADVWTCYELSWLNENGLPQVAIADVAIDFRSENLIESKSFKLYLNSFNQTKFASLEQVEQTLVKDLSQCASDQVSVKVYKLSTYTQQPIVDFAGECIDEQDIQINSYEFSNEYLAGVAEGEVVEETLVSHLLKSNCLITSQPDWGSVQIHYVGKKLNREKLLRYLVSFREHNEFHEQCVERIFTDLMQFAQPKKLTVYARYTRRGGLDINPFRSNFESIPQNLRMARQ

SEQ ID NO: 43729 - protein, 136 aa, unidentified
  source 1..136: note = Actinobacteria bacterium
  REGION 1..136: note = tr|A0A1F2WST2|A0A1F2WST2_9ACTN NADPH-dependent 7-cyano-7-deazaguanine reductase OS=Actinobacteria bacterium RBG_16_64_13 OX=1797200 GN=queF PE=3 SV=1
MDASPNTDEPSELYGATAIRENTLEQWPNPHPERPYLISFDIPEFTCLCPRSGFPDFALIKIRYQPRDWIVELRSLKLYINGYRDHPISHEAAANQILDDLVSLLQPRWMRVTADFSVRGNIKTVVRVDHGVREQT

SEQ ID NO: 43730 - protein, 118 aa, unidentified
  source 1..118: note = Actinobacteria bacterium
  REGION 1..118: note = tr|A0A538IK25|A0A538IK25_9ACTN NADPH-dependent 7-cyano-7-deazaguanine reductase OS=Actinobacteria bacterium OX=1883427 GN=queF PE=3 SV=1
MLETLENRFQGRDYLVELGAPEFTSICPLTDAPDFGELTIRYVPGEKLFELKSLRDYLTSFRERKILQEEVVNEVLERLVADGAPRFVEVEGEFAARGGMTTRVVASAGELPDSWISD

SEQ ID NO: 43731 - protein, 191 aa, Adlercreutzia equolifaciens
  REGION 1..191: note = tr|A0A3E2EHV4|A0A3E2EHV4_9ACTN NADPH-dependent 7-cyano-7-deazaguanine reductase OS=Adlercreutzia equolifaciens OX=446660 GN=queF PE=3 SV=1
MAAIAAHLAREDAGPAPATAPAAASAGRDEVETRAGGVTLLGNQHTQYPTDYDPSVLETFENKHPGNDYFVKFNCPEFTSLCPITGQPDFATIYISYVPDVRMVESKSLKLYLFSFRNHGDFHEDCMNIIMKDLIALMDPKYIEVWGKFTPRGGISIDPYCNYGRPGTRWEEVAWTRLSQHDLYPEKVDNR

SEQ ID NO: 43732 - protein, 276 aa, Advenella incenata
  REGION 1..276: note = tr|A0A4Q7VE58|A0A4Q7VE58_9BURK NADPH-dependent 7-cyano-7-deazaguanine reductase OS=Advenella incenata; OX = 267800 GN=queF PE=3 SV=1
MSDSTLLHAPLGKETQYPEHYDPSLLFPIARDAGRAHLSLQPHPAWHGADIWNAYELSWLDPKGKPQVALARFFFPASSTHIIESKSFKLYLNSFNQTAMPDGDAVLARMQQDLSAAAGAPVGVTLFTPADFAIQTLGELEGTLLDTLDIDVSAYMPDAGLLQADATQSRHETLRTNLLKSNCPVTGQPDWGSLQIEYTGAAIDHASLLKYIVSYRGHNGFHEQCAEQIFCDIMHTCAPEALTVYARYTRRGGLDINPWRSTQPDFIPADARNARQ

SEQ ID NO: 43733 - protein, 276 aa, Advenella kashmirensis
  REGION 1..276: note = tr|V8QX79|V8QX79_9BURK NADPH-dependent 7-cyano-7-deazaguanine reductase OS=Advenella kashmirensis W13003 OX=1424334 GN=queF PE=3 SV=1
MTDSILHHAPLGKETHYPQHYDPSLLFPIARDAGRAQLSLQPHPQWYGADIWNAYEVSWLTPKGKPQVALARFSFPATSTHLIESKSFKLYLNSFNQTPMPDRDAVIAYMQQDLSAAAGAPVSVTLIEPADFAGQTMGELEGTLLDTLDIDVSVYHPDATLLSADASRSRHETLRSDLLKSNCPVTSQPDWGSLQIEYTGAAIDHAGLLKYIVSYREHSGFHEQCVEQIFCDIMHTCAPQALSVYARYTRRGGLDINPWRSTEPDFIPSALRNARQ

SEQ ID NO: 43734 - protein, 276 aa, Advenella kashmirensis
  REGION 1..276: note = tr|A0A356LC52|A0A356LC52_9BURK NADPH-dependent 7-cyano-7-deazaguanine reductase OS=Advenella kashmirensis; OX = 310575 GN=queF PE=3 SV=1
MSDSTLLHAPLGKETQYPEHYDPSLLFPIARDAGRAHLSLQPHPAWHGADIWNAYELSWLDPKGKPQVALARFFFPASSTHIIESKSFKLYLNSFNQTAMPDGDAVLARMQQDLSAAAGAPVSVTLFTPAYFAIQTLGELEGTLLDTLDIDISAYMPDAGLLQADATQSRHETLRSNLLKSNCPVTGQPDWGSLQIEYTGAAIDHASLLRYIVSYRGHNGFHEQCAEQIFCDIMHTCAPEALTVYARYTRRGGLDINPWRSTQPDFIPADARNARQ

SEQ ID NO: 43735 - protein, 276 aa, Advenella mimigardefordensis
  REGION 1..276: note = tr|W0PFI7|W0PFI7_9BURK NADPH-dependent 7-cyano-7-deazaguanine reductase OS=Advenella mimigardefordensis DPN7 OX=1247726 GN=queF PE=3 SV=1
MSDSTLLHAPLGKETRYADHYDPALLFPIAREAGRAHLSLQPPPAWYGADIWNAYELSWLNPKGKPQVALARFGFPASSTHIIESKSFKLYLNSFNQTPMHDSDAVRACMQQDLSAAAGGPVEVTLFAPTNFADQTLGELEGTLLDTLDIDITIYAPDAGLLQADPTQSRHETLRTNLLKSNCPVTAQPDWGSLQIEYTGAAIDHASLLKYIISYRGHNGFHEQCVEQIFCDIMQRCAPETLTVYARYTRRGGLDINPWRSTQADFIAPDARNARQ

SEQ ID NO: 43736 - protein, 276 aa, Advenella sp.
  REGION 1..276: note = tr|A0A2M9TJI9|A0A2M9TJI9_9BURK NADPH-dependent 7-cyano-7-deazaguanine reductase OS=Advenella sp. S44; OX = 1982755 GN=queF PE=3 SV=1
MSDPTLLHAPLGKETEYAEHYDPSLLFAIARDAGRAHLNLRPHPAWHGADIWNAYELSWLNTKGKPQVALARFGFPADTTHIIESKSFKLYLNSFNQTTLPDSDALLAAMQQDLSKAAGGPVDVTLFNAADFADQALGELHGTLLDTLDIDVCAYHPDPTLLQANASQSRHETLRSNLLKSNCPVTGQPDWGSLQIEYTGAAIDHASLLKYIVSYRGHNGFHEQCVEQIFCDIMQVCAPQALTVYARYTRRGGLDINPWRSTEADFTPSAGRNARQ

SEQ ID NO: 43737 - protein, 165 aa, unidentified
  source 1..165: note = Aerococcaceae bacterium
  REGION 1..165: note = tr|A0A3D0CK93|A0A3D0CK93_9LACT NADPH-dependent 7-cyano-7-deazaguanine reductase OS=Aerococcaceae bacterium OX=2053495 GN=queF PE=3 SV=1
MQGRSNEDMGNVSLLGNQGTKYLDNYAPEILESFPNKHLDNDYFVKFNCPEFTSLCPMTGQPDFATIYISYVPGEKMVESKSLKLYLFSFRNHGDFHEDCMNIIMKDLIKLMEPKYIEVWGKFTPRGGISIDPYCNYGQPGTKWEDMAWERLKNHDLYPEKVDNR

SEQ ID NO: 43738 - protein, 282 aa, Aeromonas allosaccharophila
  REGION 1..282: note = tr|A0A0T6UVM5|A0A0T6UVM5_9GAMM NADPH-dependent 7-cyano-7-deazaguanine reductase OS=Aeromonas allosaccharophila OX=656 GN=queF PE=3 SV=1
MSKQDRYAGASALTGLSLGQQSDYISQYTPSLLQPVPRSLNRDDLQLGDDLPFTGCDVWTLYELSWLNAKGKPMVAVGEVTIPATSANLIESKSFKLYLNSFNQTRCDSIEAVAAMLTKDLSACAGETVKVTLFPLDQAPHQIALLPGECIDEQDIEVDHYEFDATLLQGAAGSEQVEETLHSHLLKSNCLVTSQPDWGSVVIRYKGPKLDREKLLRYLISFRQHNEFHEQCIERIFIDLKHYCQPEQLTVYARYTRRGGLDINPFRSDFEAVPANLRLIRQ

SEQ ID NO: 43739 - protein, 282 aa, Aeromonas allosaccharophila
  REGION 1..282: note = tr|A0A1Q5VVF9|A0A1Q5VVF9_9GAMM NADPH-dependent 7-cyano-7-deazaguanine reductase OS=Aeromonas allosaccharophila OX=656 GN=queF PE=3 SV=1
MSKQDRYAGASALTGLSLGQQSDYISQYTPSLLQPVPRSLNRDDLQLGDDLPFTGCDVWTLYELSWLNAKGKPMVAVGEVTIPATSANLIESKSFKLYLNSFNQTRCDSIEAVAAMLTKDLSACAGETVKVTLFPLDQAPHQIALLPGECIDEQDIEVDTYEFDATLLQGAAGSEQVEETLHSHLLKSNCLVTSQPDWGSVVIRYKGPKLDREKLLRYLISFRQHNEFHEQCIERIFIDLKHYCQPEQLTVYARYTRRGGLDINPFRTDFEAVPANLRLIRQ

SEQ ID NO: 43740 - protein, 282 aa, unidentified
  source 1..282: note = Aeromonas cavernicola
  REGION 1..282: note = tr|A0A2H9U974|A0A2H9U974_9GAMM NADPH-dependent 7-cyano-7-deazaguanine reductase OS=Aeromonas cavernicola; OX = 1006623 GN=queF PE=3 SV=1
MSTQDRYAGASALKGLRLGQQSDYLSQYSPSLLQPVPRALNRDDLQLGATLPFAGCDMWTLYELSWLNSKGKPMVALGEVSVPATSPHLIESKSFKLYLNSFNQTRCAAIDTVAAMLQSDLSACAGAQVEVRLFSLTHAPHHIATLPGECIDDQDIEVDQYEFDASLLQGAAGQEMVEETLHSHLLKSNCLVTSQPDWGSVVIRYRGPRLDRQKLLRYLISFRQHNEFHEQCVERIFIDLKHYCQPAQLTVYARYTRRGGLDINPFRSDFEPVPTNLRLIRQ

SEQ ID NO: 43741 - protein, 282 aa, Aeromonas caviae
  REGION 1..282: note = tr|A0A3G9I6Q9|A0A3G9I6Q9_AERCA NADPH-dependent 7-cyano-7-deazaguanine reductase OS=Aeromonas caviae; OX = 648 GN=queF PE=3 SV=1
MSKQERYAGASALQGLSLGQQSAYISQYTPSLLQPVPRSLNRDDLGLRGELPFQGCDVWTLYELSWLNAKGKPVVAIGEVFVPATSPNLIESKSFKLYLNSFNQTRCDSLEAVQALLVQDLSGCAGAPVSVTLFTLDQAPHQIAQLPGECIDSLDIEVDGYEFDETLLQGAAGREIVEETLHSHLLKSNCLVTSQPDWGSVVIHYRGPRLDREKLLRYLISFRQHNEFHEQCIERIFTDLKHFCAPEQLTVHARYTRRGGLDINPFRSDWEPVPANLRLIRQ

SEQ ID NO: 43742 - protein, 282 aa, Aeromonas caviae
  REGION 1..282: note = tr|A0A443W011|A0A443W011_AERCA NADPH-dependent 7-cyano-7-deazaguanine reductase OS=Aeromonas caviae; OX = 648 GN=queF PE=3 SV=1
MSKQERYAGASALQGLSLGQQSAYISQYTPSLLQPVPRSLNRDDLGLRGELPFQGCDVWTLYELSWLNAKGKPVVAIGEVFVPATSPNLIESKSFKLYLNSFNQTRCDSLEAVQALLVQDLSGCAGAPVSVTLFTLDQAPHQIAQLPGECIDSLDIEVDGYEFDETLLQGAAGHEIVEETLHSHLLKSNCLVTSQPDWGSVVIHYRGPRLDREKLLRYLISFRQHNEFHEQCIERIFTDLKHFCAPEQLTVHARYTRRGGLDINPFRSDWEPVPANLRLIRQ

SEQ ID NO: 43743 - protein, 282 aa, unidentified
  source 1..282: note = Aeromonas dhakensis
  REGION 1..282: note = tr|K1JCX2|K1JCX2_9GAMM NADPH-dependent 7-cyano-7-deazaguanine reductase OS=Aeromonas dhakensis; OX = 196024 GN=queF PE=3 SV=1
MSKQDRYAGASALQGLSLGQQSAYISQYTPALLQPVPRSLNRDDLGLGGELPFQGCDVWTLYELSWLNAKGKPMVAVGEVSVPATSANLIESKSFKLYLNSFNQTRCDSLEAVQAMLVKDLSACAGSDVSVTLFPLAQAPHHIAALPGECIDEQDIEVDCYEFDADLLQGAAGSLEVEETLHSHLLKSNCLVTSQPDWGSVVIHYRGPQLDREKLLRYLISFRQHNEFHEQCIERIFTDLKHFCAPSQLTVYARYTRRGGLDINPFRSDWEVVPANLRLIRQ

SEQ ID NO: 43744 - protein, 282 aa, Aeromonas diversa
  REGION 1..282: note = tr|N9VP08|N9VP08_9GAMM NADPH-dependent 7-cyano-7-deazaguanine reductase OS=Aeromonas diversa CDC 2478-85 OX=1268237 GN=queF PE=3 SV=1
MTNQDRYAGAKALAGLSLGQKSDYISSYTPSLLQPVPRSLNRDDLALSDPLPFQGEDIWTLYELSWLDGKGKPVVALGEARIPATSANLIESKSFKLYLNSFNQTRCESLAAVQALLEQDLGACAGAPVSVTLWRLDEAPATIATLPGECIDDLDIEVNDYHFDTRWLEGAADGDEVEETLHSHLLKSNCLVTSQPDWGSVVIHYRGPRIDREKLLRYLISFRQHNEFHEQCVERIFTDLKSLCGCQRLTVYARYTRRGGLDINPYRSDFEHSPANIRLIRQ

SEQ ID NO: 43745 - protein, 282 aa, Aeromonas encheleia
  REGION 1..282: note = tr|A0A448KZA2|A0A448KZA2_9GAMM NADPH-dependent 7-cyano-7-deazaguanine reductase OS=Aeromonas encheleia; OX = 73010 GN=queF PE=3 SV=1
MSKQERYAGASALQGLSLGQQSAYISQYAPELLQPVPRSLNRDDLGLGETLPFQGCDVWTLYELSWLNAKGKPMVALGEVAVPATSPNLIESKSFKLYLNSFNQTRCDSLAAVQALLVKDLSACAGSEVSVTLFPLDQAPHQIAALPGECIDEQDIEIDDYEFDQTLLQGAAGTDIVEETLHSHLLKSNCLVTRQPDWGSLVIHYRGPRLDREKLLRYLISFRQHNEFHEQCIERIFIDLKHFCGPSQLTVYARYTRRGGLDINPFRSDWERVPANLRLIRQ

SEQ ID NO: 43746 - protein, 286 aa, Aeromonas enteropelogenes
  REGION 1..286: note = tr|A0A175VKY5|A0A175VKY5_AEREN NADPH-dependent 7-cyano-7-deazaguanine reductase OS=Aeromonas enteropelogenes OX=29489 GN=queF PE=3 SV=1
MSKHVSKQERYAGASALKGLTLGQQSDYISQYTPSLLQPVPRSLNRDDLQLGAELPFAGCDVWTLYELSWLNAKGKPMVAVGEVTIPATSANLIESKSFKLYLNSFNQTRCDSIEAVQAMLIKDLSACAGEAVQVTLFPLDRAPHQIATLPGECIDDQDIEIEGYEFDATLLQGAAGSEVVEETLHSHLLKSNCLVTSQPDWGSVVIRYKGPRVDREKLLRYLISFRQHNEFHEQCIERIFIDLQHYCQPQQLTVYARYTRRGGLDINPFRSDFEAVPANLRLIRQ

SEQ ID NO: 43747 - protein, 302 aa, Aeromonas hydrophila
  REGION 1..302: note = tr|A0KHE7|A0KHE7_AERHH NADPH-dependent 7-cyano-7-deazaguanine reductase OS=Aeromonas hydrophila subsp. hydrophila (strain ATCC 7966 / DSM 30187 / JCM 1027 / KCTC 235 8 / NCIMB 9240) OX=380703 GN=queF PE=3 SV=1
MPPPSGACSAIAHSTFESAHMSKQERYAGASALQGLSLGQQSAYISQYTPALLQPVPRSLNRDDLGLGGELPFQGCDVWTLYELSWLNARGKPMVAVGEVSVPATSANLIESKSFKLYLNSFNQTRCDSLEAVQAMLVKDLSACAGSDVSVTLFPLAQAPHHIAALPGECIDEQDIAVDCYEFDADLLQGAAGSQEVEETLHSHLLKSNCLVTSQPDWGSVVIHYRGPQLDREKLLRYLISFRQHNEFHEQCIERIFTDLKHFCRPSQLTVYARYTRRGGLDINPFRSDWEVVPANLRLIRQ

SEQ ID NO: 43748 - protein, 282 aa, Aeromonas hydrophila
  REGION 1..282: note = tr|A0A347A933|A0A347A933_AERHY NADPH-dependent 7-cyano-7-deazaguanine reductase OS=Aeromonas hydrophila; OX = 644 GN=queF PE=3 SV=1
MSKQERYAGASALQGLSLGQQSAYISQYTPALLQPVPRSLNRDDLGLGGELPFQGCDVWTLYELSWLNAKGKPMVAVGEVSVPATSANLIESKSFKLYLNSFNQTRCDSLEAVQAMLVKDLSACAGSDVSVTLFPLAQAPHHIAALPGECIDEQDIAVDCYEFDADLLQGAAGSQEVEETLHSHLLKSNCLVTSQPDWGSVVIHYRGPQLDREKLLRYLISFRQHNEFHEQCIERIFTDLKHFCRPSQLTVYARYTRRGGLDINPFRSDWEVVPANLRLIRQ

SEQ ID NO: 43749 - protein, 282 aa, Aeromonas jandaei
  REGION 1..282: note = tr|A0A2S5FEM3|A0A2S5FEM3_AERJA NADPH-dependent 7-cyano-7-deazaguanine reductase OS=Aeromonas jandaei; OX = 650 GN=queF PE=3 SV=1
MSKQDRYAGASALKGLSLGQQSDYISLYTPSLLQPVPRSLNRDDLKLGDDLPFTGCDVWTLYELSWLNSKGKPMVAVGEVTIPATSPNLIESKSFKLYLNSFNQTRCDSIEAVAAMLEQDLGACAGEPVKVTLFPLDRAPHQIATLPGECIDELDIEVDHYEFDADLLQGAASRELVEETLHSHLLKSNCLVTSQPDWGSVVIRYKGPQLDREKLLRYLISFRQHNEFHEQCIERIFIDLKHYCQPEQLTVYARYTRRGGLDINPFRSDFEAVPANLRLIRQ

SEQ ID NO: 43750 - protein, 282 aa, Aeromonas jandaei
  REGION 1..282: note = tr|A0A3N6WXC5|A0A3N6WXC5_AERJA NADPH-dependent 7-cyano-7-deazaguanine reductase OS=Aeromonas jandaei; OX = 650 GN=queF PE=3 SV=1
MSKQDRYAGASALKGLSLGQQSDYISQYTPSLLQPVPRSLNRDDLKLGDDLPFTGCDVWTLYELSWLNSKGKPMVAVGEVTIPATSPNLIESKSFKLYLNSFNQTRCDSIEAVAALLEQDLGACAGEPVKVTLFPLDRAPHQIATLPGECIDELDIEVDNYEFDAELLQGAASSELVEETLHSHLLKSNCLVTSQPDWGSVVIRYKGPKLDREKLLRYLISFRQHNEFHEQCIERIFIDLKHYCQPEQLTVYARYTRRGGLDINPFRSDFEAVPANLRLIRQ

SEQ ID NO: 43751 - protein, 282 aa, unidentified
  source 1..282: note = Aeromonas lusitana
  REGION 1..282: note = tr|A0A2M8HF01|A0A2M8HF01_9GAMM NADPH-dependent 7-cyano-7-deazaguanine reductase OS=Aeromonas lusitana; OX = 931529 GN=queF PE=3 SV=1
MSKQERYAGASALQGLSLGQQSAYISQYTPELLQPVPRSLNRDDLGLGEALPFQGCDVWTLYELSWLNAKGKPVVAVGEVSVPATSPNLIESKSFKLYLNSFNQTRGESLAAVQALLVKDLSACAGGEVSVTLFPLDRAPHHIATLPGECIDEQDIEIDGYEFDQTLLQGAAGTEIVEETLHSHLLKSNCLVTSQPDWGSLVIHYRGPRLDREKLLRYLISFRQHNEFHEQCIERIFIDLKHFCHPSELTVYARYTRRGGLDINPFRSDWEPVPANLRLIRQ

SEQ ID NO: 43752 - protein, 282 aa, Aeromonas media
  REGION 1..282: note = tr|A0A023RLW7|A0A023RLW7_AERME NADPH-dependent 7-cyano-7-deazaguanine reductase OS=Aeromonas media WS; OX = 1208104 GN=queF PE=3 SV=1
MSKQERYAGASALQGLSLGQQSAYISQYTPSLLQPVPRSLNRDDLGLGETLPFQGCDVWTLYELSWLNAKGKPVVALGEVAVPATSPNLIESKSFKLYLNSFNQTRCDSLEAVQALLAKDLSACAGAEVSVTLFPLDQAPHQIALLPGECIDEQDIEIDSYEFDQTLLQGAAEADIVEETLHSHLLKSNCLVTSQPDWGSLVIHYRGPRLNREKLLRYLISFRQHNEFHEQCIERIFIDLKHFCTPQQLTVYARYTRRGGLDINPFRSDWEPVPANLRLIRQ

SEQ ID NO: 43753 - protein, 280 aa, Aeromonas molluscorum
  REGION 1..280: note = tr|R1FA06|R1FA06_9GAMM NADPH-dependent 7-cyano-7-deazaguanine reductase OS=Aeromonas molluscorum 848 OX=1268236 GN=queF PE=3 SV=1
MSKQDRYANALQGLSLGQQSAYISQYSPSLLQPVPRSLNRDDLALPDPLPFQGADIWTLYELSWLNDKGKPVVALGEISVPATSLNLIESKSFKLYLNSFNQTRCTSLAAVRELLAKDLSACAGAEVAVTLYPLGQAPHQIVDLPGECIDELDIEVDNYEFDADLLAGAAGQDEVEETLHSHLLKSNCLVTSQPDWGSVLIHYRGPRLDREKLLRYLISFRQHNEFHEQCIERIFTDLKHHCAPEKLTVYARYTRRGGLDINPFRSDWEEPSENLRLIRQ

SEQ ID NO: 43754 - protein, 282 aa, unidentified
  source 1..282: note = Aeromonas rivipollensis
  REGION 1..282: note = tr|A0A2P1PEU6|A0A2P1PEU6_9GAMM NADPH-dependent 7-cyano-7-deazaguanine reductase OS=Aeromonas rivipollensis OX=948519 GN=queF PE=3 SV=1
MSKQDRYAGASALQGLSLGQQSAYISQYTPSLLQPVPRSLNRDDLGLGETLPFQGCDVWTLYELSWLNAKGKPVVALGEVAVPATSPNLIESKSFKLYLNSFNQTRCDSLAAVQALLVKDLSACAGAEVSVTLFPLDQAPHQIALLPGECIDEQDIEIDSYEFDQTLLQGAAEADIVEETLHSHLLKSNCLVTSQPDWGSLVIHYRGPRLNREKLLRYLISFRQHNEFHEQCIERIFIDLKHFCAPQQLTVYARYTRRGGLDINPFRSDWEPVPANLRLIRQ

SEQ ID NO: 43755 - protein, 282 aa, Aeromonas salmonicida
  REGION 1..282: note = sp|A4SQJ9|QUEF_AERS4 NADPH-dependent 7-cyano-7-deazaguanine reductase OS=Aeromonas salmonicida (strain A449) OX=382245 GN=queF PE=3 SV=1
MSKQEKYAGASALQGLSLGQQSAYISQYSPALLQPVPRSLNRDDLGLTGELPFQGCDVWTLYELSWLNARGKPMVAVGEVSVPAVSANLIESKSFKLYLNSFNQTRCDSLEAVQAMLVKDLSACAGSEVSVTLFPLAQAPHHIAALPGECIDEQDIEVDCYEFDANLLQGAAGNDEVEETLHSHLLKSNCLVTSQPDWGSVVIHYRGPRLDREKLLRYLISFRQHNEFHEQCIERIFTDLKLLCHPSQLTVYARYTRRGGLDINPFRSDWELPPTNLRLIRQ

SEQ ID NO: 43756 - protein, 282 aa, Aeromonas salmonicida
  REGION 1..282: note = tr|T0QSM7|T0QSM7_AERSA NADPH-dependent 7-cyano-7-deazaguanine reductase OS=Aeromonas salmonicida subsp. pectinolytica 34mel OX=1324960 GN=queF PE=3 SV=1
MSKQEKYAGASALQGLSLGQQSAYISQYSPALLQPVPRSLNRDDLGLTGELPFQGCDIWTLYELSWLNARGKPMVAVGEVSVPAVSANLIESKSFKLYLNSFNQTRCDSLEAVQAMLVKDLSACAGSEVSVTLFPLAQAPHQIAALPGECIDEQDIEVDCYEFDANLLQGAAGNEEVEETLHSHLLKSNCLVTSQPDWGSVVIHYRGPRLDREKLLRYLISFRQHNEFHEQCIERIFTDLKLLCRPSQLTVYARYTRRGGLDINPFRSDWELPPANLRLIRQ

SEQ ID NO: 43757 - protein, 282 aa, Aeromonas schubertii
  REGION 1..282: note = tr|A0A0S2SI86|A0A0S2SI86_9GAMM NADPH-dependent 7-cyano-7-deazaguanine reductase OS=Aeromonas schubertii; OX = 652 GN=queF PE=3 SV=1
MTNQDRYAGAKALAGLSLGQKSDYISSYTPSLLQPVPRSLNRDDLSLGDALPFQGEDIWTLYELSWLDSKGKPVVALGEVRIPATSTNLIESKSFKLYLNSFNQTRCESLAAVQALLEQDLGACAGAPVAVTLWHLDEAPATIATLPGECIDHLDIEVNDYHFDSAWLDGATGDEEVEETLHSHLLKSNCLVTSQPDWGSVVIHYQGPRIDREKLLRYLISFRQHNEFHEQCVERIFTDLKALCGCHRLTVYARYTRRGGLDINPFRSDFERSPANIRLIRQ

SEQ ID NO: 43758 - protein, 282 aa, Aeromonas simiae
  REGION 1..282: note = tr|A0A5J6X064|A0A5J6X064_9GAMM NADPH-dependent 7-cyano-7-deazaguanine reductase QueF OS=Aeromonas simiae; OX = 218936 GN=queF PE=4 SV=1
MTNHDRYAGAKALSQLALGQKSDYISHYTPGLLQPVPRSLNRDDLQLGDTLPFQGEDIWTLYELSWLDGKGKPVVALGEVRVPATSANLIESKSFKLYLNSFNQTRCASIDAVRALLEQDLSACAGAPVAVTLWHLHQAPATIATLPGECIDDLDIEIDDYHFSADWLSGAAQAEEVEETLHSHLLKSNCLVTAQPDWGSVVIHYRGPRIEREKLLRYLVSFRQHNEFHEQCVERIFTDLKTHCGCRQLTVYARYTRRGGLDINPFRSDFERSPANIRLIRQ

SEQ ID NO: 43759 - protein, 282 aa, Aeromonas sobria
  REGION 1..282: note = tr|A0A1S2D0J5|A0A1S2D0J5_AERSO NADPH-dependent 7-cyano-7-deazaguanine reductase OS=Aeromonas sobria; OX = 646 GN=queF PE=3 SV=1
MNKQDRYAGASALTGLSLGQQADYISQYTPSLLQPVPRSLNRDDLQLGDALPFSGCDVWTLYELSWLNAKGKPMVALGEVTIPATSANLIESKSFKLYLNSFNQTRCDSIDAVAAMLTKDLSACAGETVKVTLFPLDQAPHQIALLPGECIDEQDIEVDHYQFDAALLQGAAGSEQVEETLHSHLLKSNCLVTSQPDWGSVVIRYKGPKLDREKLLRYLISFRQHNEFHEQCIERIFIDLKHYCQPAQLTVYARYTRRGGLDINPFRSDFEVVPANLRLIRQ

SEQ ID NO: 43760 - protein, 282 aa, Aeromonas sobria
  REGION 1..282: note = tr|A0A2N3J4P4|A0A2N3J4P4_AERSO NADPH-dependent 7-cyano-7-deazaguanine reductase OS=Aeromonas sobria; OX = 646 GN=queF PE=3 SV=1
MNKQDRYAGASALTGLSLGQQADYISQYTPSLLQPVPRSLNRDDLQLGDALPFSGCDVWTLYELSWLNAKGKPMVALGEVTIPATSANLIESKSFKLYLNSFNQTRCDSIDAVAAMLTKDLSVCAGETVKVTLFPLDQAPHQIALLPGECIDEQDIEVDNYQFDAALLQGAAGSEQVEETLHSHLLKSNCLVTSQPDWGSVVIRYKGPKLDREKLLRYLISFRQHNEFHEQCIERIFIDLKHYCQPAQLTVYARYTRRGGLDINPFRSDFEAVPANLRLIRQ

SEQ ID NO: 43761 - protein, 282 aa, Aeromonas sp.
  REGION 1..282: note = tr|A0A291TES1|A0A291TES1_9GAMM NADPH-dependent 7-cyano-7-deazaguanine reductase OS=Aeromonas sp. CU5; OX = 2033033 GN=queF PE=3 SV=1
MNKQDRYAGASALTGLSLGQQADYISQYTPSLLQPVPRSLNRDDLQLGDALPFSGCDVWTLYELSWLNARGKPMVAVGEVTIPATSANLIESKSFKLYLNSFNQTRCDSIDAVAAMLTKDLSACAGETVKVTLFPLDQAPHQIALLPGECIDEQDIEVDHYQFDAALLQGAAGSEQVEETLHSHLLKSNCLVTSQPDWGSVVIRYKGPKLDREKLLRYLISFRQHNEFHEQCIERIFIDLKHYCQPAQLTVYARYTRRGGLDINPFRSDFEVVPANLRLIRQ

SEQ ID NO: 43762 - protein, 282 aa, Aeromonas sp.
  REGION 1..282: note = tr|A0A2R7NBP4|A0A2R7NBP4_9GAMM NADPH-dependent 7-cyano-7-deazaguanine reductase OS=Aeromonas sp. HMWF017; OX = 2056853 GN=queF PE=3 SV=1
MSKQDRYAGASALTGLSLGQQSDYISQYTPSLLQPVPRSLNRDDLQLGDDLPFSGCDVWTLYELSWLNAKGKPMVAVGEVAIPATSANLIESKSFKLYLNSFNQTRCDSIEAVAAMLTKDLSACAGETVKVTLFPLDKAPHQIALMPGECIDEQDIEVDNYEFDASLLQGAAGSELVEETLHSHLLKSNCLVTSQPDWGSVVIRYKGPKLDREKLLRYLISFRQHNEFHEQCIERIFIDLKHYCQPEQLTVYARYTRRGGLDINPFRSDFETVPDNLRLIRQ

SEQ ID NO: 43763 - protein, 282 aa, Aeromonas taiwanensis
  REGION 1..282: note = tr|A0A5F0K7T6|A0A5F0K7T6_9GAMM NADPH-dependent 7-cyano-7-deazaguanine reductase OS=Aeromonas taiwanensis; OX = 633417 GN=queF PE=3 SV=1
MSKQERYAGASALKGLSLGQQSAYISQYTPSLLQPVPRSLNRDDLGLGETLPFEGCDVWTLYELSWLNAKGKPVVALGEVAVPAASPNLVESKSFKLYLNSFNQTRCDSIEAVQALLTQDLSACAGAPVSVTLFPLDEAPHRIAQLPGECIDDQDIEVDHYEFDETLLQGAAGAEVVEETLHSHLLKSNCLVTSQPDWGSVVIRYRGPRLDQEKLLRYLISFRQHNEFHEQCIERIFTDLKHFCAPTQLTVYARYTRRGGLDINPFRSDWEAVPENLRLIRQ

SEQ ID NO: 43764 - protein, 282 aa, Aeromonas veronii
  REGION 1..282: note = tr|A0A2T4N781|A0A2T4N781_9GAMM NADPH-dependent 7-cyano-7-deazaguanine reductase OS=Aeromonas veronii; OX = 654 GN=queF PE=3 SV=1
MSKQDRYAGASALTGLSLGQQSDYISQYTPSLLQPVPRSLNRDDLQLGDDLPFSGCDVWTLYELSWLNAKGKPMVAVGEVAIPATSANLIESKSFKLYLNSFNQTRCDSIEAVAAMLTRDLSACAGETVKVTLFPLDKAPHQIALLPGECIDEQDIEVDNYEFDASLLQGAAGSDQVEETLHSHLLKSNCLVTSQPDWGSVVICYKGPKLDREKLLRYLISFRQHNEFHEQCIERIFIDLKHYCQPEQLTVYARYTRRGGLDINPFRSDFETVPANLRLIRQ

SEQ ID NO: 43765 - protein, 282 aa, Aeromonas veronii
  REGION 1..282: note = tr|A0A3A9IMT6|A0A3A9IMT6_9GAMM NADPH-dependent 7-cyano-7-deazaguanine reductase OS=Aeromonas veronii; OX = 654 GN=queF PE=3 SV=1
MSKQDRYAGASALTGLSLGQQSDYISQYTPSLLQPVPRSLNRNDLKLGDDLPFSGCDVWTLYELSWLNAKGKPMVAVGEVAIPATSANLIESKSFKLYLNSFNQTRCDSIEVVAAMLTKDLSACAGETVKVTLFPLDKAPHQIAQLPGECIDEQDIEVDNYEFDASLLQGAAGSELVEETLHSHLLKSNCLVTSQPDWGSVVIRYKGPKLDREKLLRYLISFRQHNEFHEQCIERIFIDLKHYCQPEQLTVYARYTRRGGLDINPFRSDFEAVPANLRLIRQ

SEQ ID NO: 43766 - protein, 282 aa, Aestuariibacter sp.
  REGION 1..282: note = tr|A0A506RT79|A0A506RT79_9ALTE NADPH-dependent 7-cyano-7-deazaguanine reductase OS=Aestuariibacter sp. GS-14 OX=2590670 GN=queF PE=3 SV=1
MTEHTKKTELSLPTHLTLGQSVDYIENYTPGLLQSVPRSLSRDQIGVSHPLPFEGVDIWNGYELSWLNSKGKPQVAILQCRVPVTSDNLIESKSFKLYLNSFNQTRFDSRDEVLACLQNDLSECANAPVTVTLLGPDQFDAMPVNNLTGTCIDDLDIDVAHYSPMPSLLTCDETQQAEETLVSHLLKSNCLITSQPDWASIQIKYQGPKIDHEGLLAYLISFRQHNEFHEQCIERIYCDLMAFCKPLKLAVYARYTRRGGLDINPLRSNYTSEIENSRQARQ

SEQ ID NO: 43767 - protein, 141 aa, unidentified
  source 1..141: note = Aestuariispira insulae
  REGION 1..141: note = tr|A0A3D9HSC2|A0A3D9HSC2_9PROT 7-cyano-7-deazaguanine reductase OS=Aestuariispira insulae; OX = 1461337 GN=DFP90_102434 PE=4 SV=1
MTAKDESQLLERGDMPDRIKRQSTLETAPNPNPAVDYLCELSVKAVDDYATVHLFYVPDKLLLTTQAFELYLHEFDRHAFASLEELALTILDDLNNELVARWIQIRVEADAKGLDRGHRVMVEDRQPKWDNGFLLARLAGF

SEQ ID NO: 43768 - protein, 155 aa, unidentified
  source 1..155: note = Aestuariispira insulae
  REGION 1..155: note = tr|A0A3D9HGM3|A0A3D9HGM3_9PROT NADPH-dependent 7-cyano-7-deazaguanine reductase OS=Aestuariispira insulae; OX = 1461337 GN=queF PE=3 SV=1
MSNETIYDGLTQLGGDSKLPDRPEDAVLEKVPNPQEGTGYLVRFTAPEFTSLCPITGQPDFAHLMIDYVPEKWLVESKSLKLFLGSFRNHGAFHEDCTVSIGKRLVELLEPRWLRIGGYWYPRGGIPIDVFYQTGEQPRDVWIPDQGVPPYRGRG

SEQ ID NO: 43769 - protein, 154 aa, unidentified
  source 1..154: note = Aestuariivirga litoralis
  REGION 1..154: note = tr|A0A2W2BUF3|A0A2W2BUF3_9RHIZ NADPH-dependent 7-cyano-7-deazaguanine reductase OS=Aestuariivirga litoralis OX=2650924 GN=queF PE=3 SV=1
MQKTDVSGLTQLGAATPAPASPDEAVIERVPNSQQDVDYLVRFVAPEFTSMCPMTNQPDFAHLVIDYVPDQWLVESKSLKLFLGSFRDHGSFHEDCTIGIARRLVTELSPRWLRIGGYWYPRGGIPIDVFWQTGDAPAGVWIPDQGVAPYRGRG

SEQ ID NO: 43770 - protein, 159 aa, Afipia broomeae
  REGION 1..159: note = tr|K8P9E2|K8P9E2_9BRAD NADPH-dependent 7-cyano-7-deazaguanine reductase OS=Afipia broomeae ATCC 49717 OX=883078 GN=queF PE=3 SV=1
MSRKPRAAKAAGTSLQLGQQVEAPASPDTAKLDRVPNPHTDTKYVARFTMPEFTSICPVTGQPDFAILVIDYVPNKWLVESKSLKLYLNSFRNVGSFHEDCTVSIGKRLTKLLAPRWLRIGGYFYPRGGMPIDVFWQAGKLPATVWVPDQGVPPYRGRG

SEQ ID NO: 43771 - protein, 197 aa, Afipia broomeae
  REGION 1..197: note = tr|A0A2M8ZI68|A0A2M8ZI68_9BRAD NADPH-dependent 7-cyano-7-deazaguanine reductase OS=Afipia broomeae; OX = 56946 GN=queF PE=3 SV=1
MEGMGAWRRFYSKAWGQKRPPHRVTLMSQLANTAPTETIMSKTPRKSSKSEGLQLGRAVKWPDTPEQAKLDRVPNPQADTNYVVRFTAPEFTSLCPITGQPDFAHLVIDYVPGQWLLESKSLKLYVASFRNHGAFHEDCTVAIGKRISSEIKPKWLRIGGYWYPRGGIPIDVFWQTGRLPKGMWVPEQGVAPYRGRG

SEQ ID NO: 43772 - protein, 165 aa, Afipia clevelandensis
  REGION 1..165: note = tr|K8PLF6|K8PLF6_9BRAD NADPH-dependent 7-cyano-7-deazaguanine reductase OS=Afipia clevelandensis ATCC 49720 OX=883079 GN=queF PE=3 SV=1
MSKKPRITKAKTASLQEPASLQLGHQVEMPASPEAAKLDRVPNPHPKDNYLVRFVAPEFTSLCPITGQPDFAHLVIDYVPDQWLVESKALKLYLSSFRNHGAFHEDCTVGIGKRLVKEIKPRWLRIGGYWYPRGGIPIDVFWQTGKLPSGVWVPDQGVAPYRGRG

SEQ ID NO: 43773 - protein, 158 aa, Afipia felis
  REGION 1..158: note = tr|A0A090MQP5|A0A090MQP5_AFIFE NADPH-dependent 7-cyano-7-deazaguanine reductase OS=Afipia felis OX=1035; GN = queF PE=3 SV=1
MSRKPRKSAVKAPLQLGRPVTLPASPDKAKLDRVPNPHPGTGYLVRFAAPEFTSLCPITGQPDFAHLVIDYVPGDWLVESKALKLYLASFRNHGAFHEYCTVAIGKRLVREIKPTWLRIGGYWYPRGGIPIDVFWQTGKLPKNIWVPDQGVPPYRGRG

SEQ ID NO: 43774 - protein, 158 aa, Afipia felis
  REGION 1..158: note = tr|A0A380W7L9|A0A380W7L9_AFIFE NADPH-dependent 7-cyano-7-deazaguanine reductase OS=Afipia felis OX=1035; GN = queF PE=3 SV=1
MSRKPRKTATKAPLQLGRPVTLPASPEEAQLDRVPNPHPGTGYLVRFAAPEFTSLCPITGQPDFAHLVIDYVPGQWLVESKALKLYLASFRNHGSFHEDCTVEIGKRLVREIKPTWLRIGGYWYPRGGIPIDVFWQTGKLPKNVWVPDQGVPPYRGRG

SEQ ID NO: 43775 - protein, 159 aa, Afipia massiliensis
  REGION 1..159: note = tr|A0A4U6BTN4|A0A4U6BTN4_9BRAD NADPH-dependent 7-cyano-7-deazaguanine reductase OS=Afipia massiliensis; OX = 211460 GN=queF PE=3 SV=1
MSRKPRITKAAASSLQLGQQVETPASPEQALLDRVPNPHSDTNYVARFTMPEFTSICPVTGQPDFAILVIDYVPNKWLVESKSLKLYLNSFRNVGSFHEDCTVSIGKRLTKLLAPRWLRIGGYFYPRGGMPIDVFWQAGKLPANVWVPDQGVAPYRGRG

SEQ ID NO: 43776 - protein, 159 aa, Afipia sp.
  REGION 1..159: note = tr|A0A1G9XAN9|A0A1G9XAN9_9BRAD NADPH-dependent 7-cyano-7-deazaguanine reductase OS=Afipia sp. GAS231; OX = 1882747 GN=queF PE=3 SV=1
MSKSPAKAKKSSAGLQLGRAVQWPDSPEKAKLDRVPNPQADTNYVVRFTAPEFTSLCPVTGQPDFAHLMIDYVPGSWLLESKSLKLYVASFRNHGAFHEDCTVMIGKRIAAEIKPKYLRIGGYWYPRGGIPIDVFWQTGKLPKGMWMPDQGVAPYRGRG

SEQ ID NO: 43777 - protein, 159 aa, Afipia sp.
  REGION 1..159: note = tr|A0A5C8D421|A0A5C8D421_9BRAD NADPH-dependent 7-cyano-7-deazaguanine reductase OS=Afipia sp. OX=1871052; GN = queF PE=3 SV=1
MARKSSKKNSPDARLQLGKQVGMPASPDAAQLDRVPNPHPKDNYLVRFVAPEFTSLCPITAQPDFAHLVIDYVPDQWLVESKALKLYLSSFRNHGAFHEDCTVGIDKRLVKEIRPRWLRIGGYWYPRGGIPIDVFWQTGKLPSGVWVPDQGVAPYRGRG

SEQ ID NO: 43778 - protein, 287 aa, Agarivorans albus
  REGION 1..287: note = tr|R9PJB3|R9PJB3_AGAAL NADPH-dependent 7-cyano-7-deazaguanine reductase OS=Agarivorans albus MKT 106 OX=1331007 GN=queF PE=3 SV=1
MKKQPLNTSQQLKDSLSLGKPTDYISHYSPELLQGVPRTLNRQQINLDESQALPFTGYDLWNLYELSWLTPSGLPVVAVAEVKVAASSRCLIESKSFKLYLNSFNQSHFKNVDEVAATLEKDLQHCAEGDVEVKLLPISSEMDSRPIPGVNIDQQEISISNYELDPNLLENAADPQHVVNETLNSHLLKSNCLITNQPDWASVYIDYQGSKINQEALLRYLVSFRQHNEFHEQCVERIFCDIMQFCKPSTLTVYARYTRRGGLDINPMRSNDPKVDEKLGNWRLLRQ

SEQ ID NO: 43779 - protein, 287 aa, Agarivorans sp.
  REGION 1..287: note = tr|A0A4D4IRN6|A0A4D4IRN6_9ALTE NADPH-dependent 7-cyano-7-deazaguanine reductase OS=Agarivorans sp. Toyoura001 OX=2283141 GN=queF PE=3 SV=1
MKKQPLNTSEQLKDSLSLGKPTDYISHYSPSLLQGVPRTLNRQQIRLDESQDLPFNGYDLWNLYELSWLNDNGLPVVAVAEVKIAASSRCLIESKSFKLYLNSFNQSHFSDFSAVEKILEKDLSHCAEGEVNVTILPISSAMDNSAMPGDNIDNQDIAIDNYELDPSLLENACDRHQRVTETLNSHLLKSNCLVTNQPDWASVYIHYNGPKIEQEALLRYLISFRQHNEFHEQCVERIFTDLMHYCQPSKLTVYARYTRRGGLDINPMRSNDPEATARLGNWRLLRQ

SEQ ID NO: 43780 - protein, 163 aa, unidentified
  source 1..163: note = Agathobacter ruminis
  REGION 1..163: note = tr|A0A2G3E2A6|A0A2G3E2A6_9FIRM NADPH-dependent 7-cyano-7-deazaguanine reductase OS=Agathobacter ruminis; OX = 1712665 GN=queF PE=3 SV=1
MADRKDEGTLTLLGNKNNTYPDNYAPEMLQTFINKHPDNDYFVKFNCPEFTSLCPITGQPDFANIIISYVPGEKMVESKSLKLYLFSFRNHGDFHEDCVNIIMKDLIRLMDPKYIEVWGKFTPRGGISIDPYCNYGKPGTKWEDIAFNRLANHDLYPEKVDNR

SEQ ID NO: 43781 - protein, 165 aa, unidentified
  source 1..165: note = Agathobaculum butyriciproducens
  REGION 1..165: note = tr|A0A2U1BEQ1|A0A2U1BEQ1_9FIRM NADPH-dependent 7-cyano-7-deazaguanine reductase OS=Agathobaculum butyriciproducens OX=1628085 GN=queF PE=3 SV=1
MTGRNKEELNGVTLLGSQKNQYPSDYAPEMLETFPNKHPDNDYFVKFNCPEFTSLCPMTGQPDFATIYISYVPGERMVESKSLKLYLFSFRNHGDFHEDCVNIIMKDLIRLMDPKYIEVWGKFTPRGGISIDPYCNYGKPGTRWEEVAFERLTHHDLYPEKVDNR

SEQ ID NO: 43782 - protein, 165 aa, unidentified
  source 1..165: note = Agathobaculum butyriciproducens
  REGION 1..165: note = tr|A0A3E2XYP9|A0A3E2XYP9_9FIRM NADPH-dependent 7-cyano-7-deazaguanine reductase OS=Agathobaculum butyriciproducens OX=1628085 GN=queF PE=3 SV=1
MTGRKKEELNGVTLLGSQKNKYPSDYAPEMLETFPNKHPDNDYFVKFNCPEFTSLCPMTGQPDFATIYISYVPGERMVESKSLKLYLFSFRNHGDFHEDCVNIIMKDLIRLMDPKYIEVWGKFTPRGGISIDPYCNYGKPGTRWEEVAFERLTHHDLYPEKVDNR

SEQ ID NO: 43783 - protein, 279 aa, Aggregatibacter actinomycetemcomitans
  REGION 1..279: note = tr|G4A819|G4A819_AGGAC NADPH-dependent 7-cyano-7-deazaguanine reductase OS=Aggregatibacter actinomycetemcomitans serotype e str. SC1083 OX=907488; GN = queF PE=3 SV=1
MHYQDPSLNALKLGQQTKYAEKYDRTLLQPVPRRLNRDTLGITQTQPFSIGTDIWTAYEISWLNPKGVPQVAIADVQIDFRSENLIESKSFKLYLNSFNQTKFADFAEVQHILQQDLQNCAKGEVKVRLNSLANYTNQPIVALHGDGIDGLDIDIEDYAFNADLLENCTNGDIVEETLVSHLLKSNCLITQQPDWGSLQIHYVGKQINREQLLRYIISFRQHNEFHEQCVERIFCDLMHYAKPEKLTVYARYTRRGGLDINPYRSNFEPLPPNLRLARQ

SEQ ID NO: 43784 - protein, 279 aa, Aggregatibacter actinomycetemcomitans
  REGION 1..279: note = tr|A0A142FXH7|A0A142FXH7_AGGAC NADPH-dependent 7-cyano-7-deazaguanine reductase OS=Aggregatibacter actinomycetemcomitans OX=714 GN=queF PE=3 SV=1
MHYQDPSLNALKLGQQTKYAEKYDRTLLQPVPRHLNRDALGITQIQPFSIGADIWTAYEISWLNPKGVPQVAIADVQIDFCSGNLIESKSFKLYLNSFNQTKFADLADVQHILQQDLQDCAKGEVKVRLNSLVNYTAQPIAAFHGDCIDGLDIDIEDYAFNAEWLKGCTNSDIVEETLVSHLLKSNCLITHQPDWGSLQIHYVGKQINREQLLRYIISFRQHNEFHEQCVERIFCDLMHYAKPEKLTVYARYTRRGGLDINPYRSNFEPLPPNLRLARQ

SEQ ID NO: 43785 - protein, 279 aa, Aggregatibacter aphrophilus
  REGION 1..279: note = tr|A0A3S4U0I3|A0A3S4U0I3_AGGAP NADPH-dependent 7-cyano-7-deazaguanine reductase OS=Aggregatibacter aphrophilus ATCC 33389 OX=985008 GN=queF PE=3 SV=1
MHYQDKSLNALKLGQQTKYAEKYDRTLLQPVPRHLNRDMLNITTTQPFTIGADIWTAYEISWLNQKGVPQVAIADVSIDFRSENLIESKSFKLYLNSFNQTQFANFNEVQQILQQDLQDCAKGEVKVRLNSLTDYTQQPIVALAGSCIDGLDIEIEDYAFNAELLKDCTNDNIVEETLVSHLLKSNCLITQQPDWGSLQIHYVGKQINREQLLRYIISFRKHNEFHEQCVERIFCDLMHFAAPEKLTVYARYTRRGGLDINPYRSNFEPLPPNLRLARQ

SEQ ID NO: 43786 - protein, 279 aa, Aggregatibacter aphrophilus
  REGION 1..279: note = tr|A0A3M6PFA3|A0A3M6PFA3_AGGAP NADPH-dependent 7-cyano-7-deazaguanine reductase OS=Aggregatibacter aphrophilus OX=732 GN=queF PE=3 SV=1
MHYQDKSLNALKLGQQTKYAEKYDRTLLQPVPRHLNRDMLNITTTQPFTIGADIWTAYEISWLNPKGVPQVAIADVSIDFRSENLIESKSFKLYLNSFNQTQFANFDEVQQILQQDLQDCAKGEVKVRLNSLTDYTQQPIAALDGDCIDGLDIEIEDYAFNAELLKNCTSDNIIEETLVSHLLKSNCLITQQPDWGSLQIHYVGKQINREQLLRYIISFRQHNEFHEQCVERIFCDLMHFAAPEKLTVYARYTRRGGLDINPYRSNFEPLPPNLRLARQ

SEQ ID NO: 43787 - protein, 279 aa, Aggregatibacter segnis
  REGION 1..279: note = tr|A0A369Y471|A0A369Y471_9PAST NADPH-dependent 7-cyano-7-deazaguanine reductase OS=Aggregatibacter segnis; OX = 739 GN=queF PE=3 SV=1
MHYQDPSLNALKLGQQTQYAEKYDRTLLQPVPRHLNRDTLGITQTQPFSIGADIWTAYEISWLNPKGVPQVAIADVQIDFCSENLIESKSFKLYLNSFNQTKFADAAEVQHILQQDLQDCAKGEVKVQLNSLADYTAQPIVALLGECIDELDIEIQDYAFNAELLKNCTGDNVVEETLVSHLLKSNCLITQQPDWGSLQIHYVGKQINREQLLRYIISFRQHNEFHEQCVERIFCDLMQYAKPEKLTVYARYTRRGGLDINPYRSNFEALPQNLRLARQ

SEQ ID NO: 43788 - protein, 287 aa, Aggregatibacter segnis
  REGION 1..287: note = tr|E6KXX5|E6KXX5_9PAST NADPH-dependent 7-cyano-7-deazaguanine reductase OS=Aggregatibacter segnis ATCC 33393 OX=888057 GN=queF PE=3 SV=1
MALAIRKTMHYQDPSLNALKLGQQTQYAEKYDRTLLQPVPRHLNRDTLGITQTQPFSIGADIWTAYEISWLNLKGVPQVAIADVQIDFCSENLIESKSFKLYLNSFNQTKFADAAEVQHILQQDLQDCAKGEVKVQLNSLANYTAQPIVALSGECIDELDIEIQDYAFNAELLKNCTGDNVVEETLVSHLLKSNCLITQQPDWGSLQIHYVGKQINREQLLRYIISFRQHNEFHEQCVERIFCDLMQYAKPEKLTVYARYTRRGGLDINPYRSNFEALPQNLRLARQ

SEQ ID NO: 43789 - protein, 295 aa, Aggregatibacter sp.
  REGION 1..295: note = tr|U1QY77|U1QY77_9PAST NADPH-dependent 7-cyano-7-deazaguanine reductase OS=Aggregatibacter sp. oral taxon 458 str. W10330 OX=1321772 GN=queF PE=3 SV=1
MASCQPYFNDKISKLPMHYQDKSLNALKLGQQTKYAEKYDRTLLQPVPRRLNRDQLNITATQPFTIGADIWTAYEISWLNPKGVPQVAIADVSIDFRSKNLIESKSFKLYLNSFNQTTFADFADVQQTLQRDLQDCAQGEANVRLNSLADYTAQPIVALSGDCIDAQDIEVRDYAFNAALLNHCTGDHLVEETLVSHLLKSNCLITQQPDWGSLQIHYVGKQINREQLLRYIISFRQHNEFHEQCVERIFCDLMQYAKPEKLTVYARYTRRGGLDINPYRSNFEPLPQNLRLARQ

SEQ ID NO: 43790 - protein, 271 aa, Agitococcus lubricus
  REGION 1..271: note = tr|A0A2T5IZ11|A0A2T5IZ11_9LACT 7-cyano-7-deazaguanine reductase OS=Agitococcus lubricus; OX = 1077255 GN=C8N29_108137 PE=3 SV=1
MFGYQKTALGKDTEYYRDYRPQVLCPLPRQDGRAALGLIGDLPFQGVDIWHNYEASWLNAKGKPQVAIVQLTIPAQSPYLIESKSLKLYFNSLNFHRFDSAHAYSALVVKDLSQAAGAPVSLEFLAVDQRYQSQGLTGTCLDDLDISCDDYVLTDTHLALATPTTHVEETVYSHLLRSNCPVTNQPDWGSVRIHYRGQQLDHTALLRYLISFREHNDFHEQCVERIFVDIMRHCQPQCLTVQAYYTRRGGLDINPFRSTHEQAHFQRLIRQ

SEQ ID NO: 43791 - protein, 154 aa, unidentified
  source 1..154: note = Agrobacterium albertimagni
  REGION 1..154: note = tr|K2Q8I4|K2Q8I4_9RHIZ NADPH-dependent 7-cyano-7-deazaguanine reductase OS=Agrobacterium albertimagni AOL15 OX=1156935 GN=queF PE=3 SV=1
MSKTDTSGLTQLGQSVDAPTSPEAATLERVPNGNAGTDYVVRFTAPEFTSLCPMTGQPDFAHIVIDYIPGDWLVESKSLKLFLFSFRNHGAFHEDCSVYIAKRIVELLDPKWLRIGAYWYPRGGIPIDVFWQTGEPPKGVWLPEQGVATYRGRG

SEQ ID NO: 43792 - protein, 154 aa, unidentified
  source 1..154: note = Agrobacterium arsenijevicii
  REGION 1..154: note = tr|A0A0D8KQ30|A0A0D8KQ30_9RHIZ NADPH-dependent 7-cyano-7-deazaguanine reductase OS=Agrobacterium arsenijevicii OX=1585697 GN=queF PE=3 SV=1
MSVTDVSSLSQLGTKVDTPESPEKAILEKVPNGNAGTDYVVRFTAPEFTSLCPMTGQPDFAHIVIDYIAGDFLVESKSLKLFLQSFRNHGAFHEDCSVYIARRLVELLQPKWLRIGAYWYPRGGIPIDVFWQTGPVPEGVWLPDQGVPTYRGRG

SEQ ID NO: 43793 - protein, 154 aa, unidentified
  source 1..154: note = Agrobacterium bohemicum
  REGION 1..154: note = tr|A0A135P380|A0A135P380_9RHIZ NADPH-dependent 7-cyano-7-deazaguanine reductase OS=Agrobacterium bohemicum OX=2052828 GN=queF PE=3 SV=1
MSVTDVSGLSQLGAQVASPESPEKAVLEKVPNGNAGTDYVVRFTAPEFTSLCPMTGQPDFAHIVIDYIPGDFLVESKSLKLFLHAFRNHGAFHEDCSIYIAKRLVDLLQPKWLRIGAYWYPRGGIPIDVFWQTGAPLQGVWLPEQGVATYRGRG

SEQ ID NO: 43794 - protein, 154 aa, unidentified
  source 1..154: note = Agrobacterium deltaense
  REGION 1..154: note = tr|A0A1S7TIR3|A0A1S7TIR3_9RHIZ NADPH-dependent 7-cyano-7-deazaguanine reductase OS=Agrobacterium deltaense NCPPB 1641 OX=1183425 GN=queF PE=3 SV=1
MSVTDVSGLSQLGTKVDTPESPEKAVLEKVPNGNAGTDYVVRFTAPEFTSLCPMTGQPDFAHIVIDYIPGDFLVESKSLKLFLQSFRNHGAFHEDCSVYIARRLVELLQPKWLRIGAYWYPRGGIPIDVFWQTGPVPEGVWLPDQGVPTYRGRG

SEQ ID NO: 43795 - protein, 154 aa, unidentified
  source 1..154: note = Agrobacterium deltaense
  REGION 1..154: note = tr|A0A1S7NV85|A0A1S7NV85_9RHIZ NADPH-dependent 7-cyano-7-deazaguanine reductase OS=Agrobacterium deltaense Zutra 3/1 OX=1183427 GN=queF PE=3 SV=1
MSVTDVSGLSQLGTKVDTPESPEKAVLEKVPNGNAGTDYVVRFTAPEFTSLCPMTGQPDFAHIVIDYIPGDFLVESKSLKLFLQSFRNHGAFHEDCSVYIARRLVELLQPKWLRIGAYWYPRGGIPIDVFWQTGPAPEGVWLPDQGVPTYRGRG

SEQ ID NO: 43796 - protein, 154 aa, unidentified
  source 1..154: note = Agrobacterium fabrum
  REGION 1..154: note = tr|A0A1S7NP39|A0A1S7NP39_9RHIZ NADPH-dependent 7-cyano-7-deazaguanine reductase OS=Agrobacterium fabrum str. J-07 OX=1183433 GN=queF PE=3 SV=1
MSVTDVSGLSQLGTKVDTPESPEKAVLEKVPNGNAGTDYVVRFTAPEFTSLCPMTGQPDFAHIVIDYIPGEFLVESKSLKLFLQSFRNHGAFHEDCSVYIAKRLVELLQPKWLRIGAYWYPRGGIPIDVFWQTGAAPEGVWLPDQGVAPYRGRG

SEQ ID NO: 43797 - protein, 154 aa, unidentified
  source 1..154: note = Agrobacterium fabrum
  REGION 1..154: note = sp|Q8UD54|QUEF_AGRFC NADPH-dependent 7-cyano-7-deazaguanine reductase OS=Agrobacterium fabrum (strain C58 / ATCC 33970) OX=176299 GN=queF PE=3 SV=2
MSVTDVSGLSQLGTKVDTPESPEKAVLEKVPNGNAGTDYVVRFTAPEFTSLCPMTGQPDFAHIVIDYIPGDFLVESKSLKLFLQSFRNHGAFHEDCSVYIAKRLVELLQPKWLRIGAYWYPRGGIPIDVFWQTGAAPEGVWLPDQGVAPYRGRG

SEQ ID NO: 43798 - protein, 154 aa, unidentified
  source 1..154: note = Agrobacterium genomosp.
  REGION 1..154: note = tr|A0A1S7NPZ0|A0A1S7NPZ0_9RHIZ NADPH-dependent 7-cyano-7-deazaguanine reductase OS=Agrobacterium genomosp. 3 str. CFBP 6623 OX=1183432 GN=queF PE=3 SV=1
MSVTDVSSLSQLGTKVDTPESPEKAILEKVPNGNAGTDYVVRFTAPEFTSLCPMTGQPDFAHIVIDYIPGDFLVESKSLKLFLQSFRNHGAFHEDCSVYIAKRLVELLQPKWLRIGAYWYPRGGIPIDVFWQTGAAPEGVWLPDQGVAPYRGRG

SEQ ID NO: 43799 - protein, 154 aa, unidentified
  source 1..154: note = Agrobacterium genomosp.
  REGION 1..154: note = tr|A0A1S7PYQ8|A0A1S7PYQ8_9RHIZ NADPH-dependent 7-cyano-7-deazaguanine reductase OS=Agrobacterium genomosp. 13 str. CFBP 6927 OX=1183428 GN=queF PE=3 SV=1
MSVTDVSGLSQLGTKVDTPESPEKAILEKVPNGNAGTDYVVRFTAPEFTSLCPMTGQPDFAHIVIDYIPGDFLVESKSLKLFLQSFRNHGAFHEDCSVYIAKRLVDLLQPKWLRIGAYWYPRGGIPIDVFWQTGAVPEGVWLPDQGVAPYRGRG

SEQ ID NO: 43800 - protein, 154 aa, unidentified
  source 1..154: note = Agrobacterium larrymoorei
  REGION 1..154: note = tr|A0A4D7DS80|A0A4D7DS80_9RHIZ NADPH-dependent 7-cyano-7-deazaguanine reductase OS=Agrobacterium larrymoorei OX=160699 GN=queF PE=3 SV=1
MSVTDVSGLSQLGAQVASPENPESAVLEKVPNGNAGTDYVVRFTAPEFTSLCPMTGQPDFAHIVIDYIPGDFLVESKSLKLFLHSFRNHGAFHEDCSVYIAKRLVELLAPKWLRIGAYWYPRGGIPIDVFWQTGPAPEGVWLPDQGVATYRGRG

SEQ ID NO: 43801 - protein, 154 aa, unidentified
  source 1..154: note = Agrobacterium radiobacter
  REGION 1..154: note = tr|W1LDR3|W1LDR3_RHIRD NADPH-dependent 7-cyano-7-deazaguanine reductase OS=Agrobacterium radiobacter DSM 30147 OX=1336745 GN=queF PE=3 SV=1
MSVTDVSGLSQLGTKVDTPESPEKAVLEKVPNGNAGTDYVVRFTAPEFTSLCPMTGQPDFAHIVIDYIAGDFLVESKSLKLFLQSFRNHGAFHEDCSVYIAKRLVELLQPKWLRIGAYWYPRGGIPIDVFWQTGPVPEGVWLPDQGVPTYRGRG

SEQ ID NO: 43802 - protein, 154 aa, unidentified
  source 1..154: note = Agrobacterium radiobacter
  REGION 1..154: note = sp|B9J7E0|QUEF_AGRRK NADPH-dependent 7-cyano-7-deazaguanine reductase OS=Agrobacterium radiobacter (strain K84 / ATCC BAA-868) OX=311403 GN=queF; PE = 3 SV=1
MPKTDVSGLSMLGNQTETAANPEVAVLEKVPAGYAGTDYVVRFTAPEFTSLCPMTGQPDFAHIVIDYVPNEWLVESKSLKLFLHSFRNHGAFHEDCSIYIAKRLVELLEPKWLRIGAYWYPRGGIPIDVFWQTGKPPEGVWLPDQGVQPYRGRG

SEQ ID NO: 43803 - protein, 154 aa, unidentified
  source 1..154: note = Agrobacterium rhizogenes
  REGION 1..154: note = tr|A0A2T7VJU0|A0A2T7VJU0_AGRRH NADPH-dependent 7-cyano-7-deazaguanine reductase OS=Agrobacterium rhizogenes OX=359 GN=queF PE=3 SV=1
MSVTDVSGLSQLGAQVAAPENPESAVLERVPNGNAGTDYVVRFTAPEFTSLCPMTGQPDFAHIVIDYIPGDFLVESKSLKLFLHSFRNHGAFHEDCSIYIAKRLVDLLAPKWLRIGAYWYPRGGIPIDVFWQTGPAPEGVWLPDQGVATYRGRG

SEQ ID NO: 43804 - protein, 154 aa, unidentified
  source 1..154: note = Agrobacterium rhizogenes
  REGION 1..154: note = tr|A0A546XLB0|A0A546XLB0_AGRRH NADPH-dependent 7-cyano-7-deazaguanine reductase OS=Agrobacterium rhizogenes OX=359 GN=queF PE=3 SV=1
MSVTDVSGLSQLGTKVDTPESPEKAILEKVPNGNAGTDYVVRFTAPEFTSLCPMTGQPDFAHIVIDYIPGDFLVESKSLKLFLQSFRNHGAFHEDCSVYIAKRLVELLQPKWLRIGAYWYPRGGIPIDVFWQTGAAPEGVWLPDQGVPTYRGRG

SEQ ID NO: 43805 - protein, 154 aa, unidentified
  source 1..154: note = Agrobacterium rosae
  REGION 1..154: note = tr|A0A2S4EHQ1|A0A2S4EHQ1_9RHIZ NADPH-dependent 7-cyano-7-deazaguanine reductase OS=Agrobacterium rosae; OX = 1972867 GN=queF PE=3 SV=1
MSVTDVSGLSQLGAQVAAPESPEKAVLEKVPNGNAGTDYVVRFTAPEFTSLCPMTGQPDFAHIVIDYIPGDFLVESKSLKLFLHAFRNHGAFHEDCSVYIAKRLVDLLAPKWLRIGAYWYPRGGIPIDVFWQTGAPPEGVWLPDQGVATYRGRG

SEQ ID NO: 43806 - protein, 154 aa, unidentified
  source 1..154: note = Agrobacterium rubi
  REGION 1..154: note = tr|A0A1B9U233|A0A1B9U233_9RHIZ NADPH-dependent 7-cyano-7-deazaguanine reductase OS=Agrobacterium rubi; OX = 28099 GN=queF PE=3 SV=1
MSVTDVSGLSQLGAQVASPESPEKAVLEKVPNGNAGTDYVVRFTAPEFTSLCPMTGQPDFAHIVIDYIPGDSLVESKSLKLFLHAFRNHGAFHEDCSVYIAKRLVELLAPKWLRIGAYWYPRGGIPIDVFWQTGAPPEGVWLPEQGVATYRGRG

SEQ ID NO: 43807 - protein, 154 aa, unidentified
  source 1..154: note = Agrobacterium rubi
  REGION 1..154: note = tr|A0A081CQW3|A0A081CQW3_9RHIZ NADPH-dependent 7-cyano-7-deazaguanine reductase OS=Agrobacterium rubi TR3 = NBRC 13261 OX=1368415 GN=queF PE=3 SV=1
MSVTDVSGLSQLGAQVASPESPEKAVLEKVPNGNAGTDYVVRFTAPEFTSLCPMTGQPDFAHIVIDYIPGDFLVESKSLKLFLHAFRNHGAFHEDCSVYIAKRLVELLAPKWLRIGAYWYPRGGIPIDVFWQTGAPPEGVWLPEQGVATYRGRG

SEQ ID NO: 43808 - protein, 154 aa, unidentified
  source 1..154: note = Agrobacterium salinitolerans
  REGION 1..154: note = tr|A0A546X8R8|A0A546X8R8_9RHIZ NADPH-dependent 7-cyano-7-deazaguanine reductase OS=Agrobacterium salinitolerans OX=1183413 GN=queF PE=3 SV=1
MSVTDVSGLSQLGTKVDTPESPEKAVLEKVPNGNAGTDYVVRFTAPEFTSLCPMTGQPDFAHIVIDYIPGDFLVESKSLKLFLQSFRNHGAFHEDCSVYIAKRLVELLQPKWLRIGAYWYPRGGIPIDVFWQTGPAPEGLWLPDQGVPTYRGRG

SEQ ID NO: 43809 - protein, 154 aa, unidentified
  source 1..154: note = Agrobacterium salinitolerans
  REGION 1..154: note = tr|A0A1S7U3D0|A0A1S7U3D0_9RHIZ NADPH-dependent 7-cyano-7-deazaguanine reductase OS=Agrobacterium salinitolerans str. Hayward 0363 OX=1183434 GN=queF PE=3; SV = 1
MSVTDVSGLSQLGTKVDTPESPEKAVLEKVPNGNAGTDYVVRFTAPEFTSLCPMTGQPDFAHIVIDYIPGDFLVESKSLKLFLQSFRNHGAFHEDCSVFIAKRLVELLQPKWLRIGAYWYPRGGIPIDVFWQTGPAPEGVWLPDQGVSTYRGRG

SEQ ID NO: 43810 - protein, 154 aa, unidentified
  source 1..154: note = Agrobacterium sp.
  REGION 1..154: note = tr|A0A3R9CGW3|A0A3R9CGW3_9RHIZ NADPH-dependent 7-cyano-7-deazaguanine reductase OS=Agrobacterium sp. FDAARGOS_525 OX=2420311 GN=queF PE=3 SV=1
MSVTDVSGLSQLGTKVDTPESPEKAVLEKVPNGNAGTDYVVRFTAPEFTSLCPMTGQPDFAHIVIDYIPGDFLVESKSLKLFLQSFRNHGAFHEDCSVYIAKRLVELLQPKWLRIGAYWYPRGGIPIDVFWQTGPAPEGVWLPDQGVATYRGRG

SEQ ID NO: 43811 - protein, 154 aa, unidentified; identical to SEQ ID NO: 43810
  source 1..154: note = Agrobacterium sp.
  REGION 1..154: note = tr|A0A349XVZ2|A0A349XVZ2_AGRSP NADPH-dependent 7-cyano-7-deazaguanine reductase OS=Agrobacterium sp.; OX = 361 GN=queF PE=3 SV=1

SEQ ID NO: 43812 - protein, 154 aa, unidentified; identical to SEQ ID NO: 43810
  source 1..154: note = Agrobacterium tumefaciens
  REGION 1..154: note = tr|A0A1S7NY14|A0A1S7NY14_RHIRD NADPH-dependent 7-cyano-7-deazaguanine reductase OS=Agrobacterium tumefaciens str. Kerr 14 OX=1183424 GN=queF PE=3 SV=1

SEQ ID NO: 43813 - protein, 154 aa, unidentified
  source 1..154: note = Agrobacterium tumefaciens
  REGION 1..154: note = tr|H0H7S6|H0H7S6_RHIRD NADPH-dependent 7-cyano-7-deazaguanine reductase OS=Agrobacterium tumefaciens 5A OX=1107544 GN=queF PE=3 SV=1
MSVTDVSSLSQLGAKVDMPESPEKAILEKVPNGNAGTDYVVRFTAPEFTSLCPMTGQPDFAHIVIDYIAGDFLVESKSLKLFLQSFRNHGAFHEDCSVYIARRLVELLQPKWLRIGAYWYPRGGIPIDVFWQTGPVPEGVWLPDQGVPTYRGRG

SEQ ID NO: 43814 - protein, 154 aa, unidentified
  source 1..154: note = Agrobacterium vitis
  REGION 1..154: note = tr|A0A1S2DSG2|A0A1S2DSG2_AGRVI NADPH-dependent 7-cyano-7-deazaguanine reductase OS=Agrobacterium vitis; OX = 373 GN=queF PE=3 SV=1
MSKTDVSGLSQLGRQVDAPTSPETAVLERVPNTNAGTDYVVRFTAPEFTSLCPMTGQPDFAHIVIDYIPGDFLVESKSLKLFMTSFRNHGSFHEDCSIYIAKRLVELLDPKWLRIGAYWYPRGGIPIDVFWQTGEAPKGVWLPDQGVPTYRGRG

SEQ ID NO: 43815 - protein, 154 aa, unidentified
  source 1..154: note = Agrobacterium vitis
  REGION 1..154: note = tr|A0A368NK40|A0A368NK40_AGRVI NADPH-dependent 7-cyano-7-deazaguanine reductase OS=Agrobacterium vitis; OX = 373 GN=queF PE=3 SV=1
MSKTDVSGLSQLGRQVDAPTSPESAVLERVPNTNAGTDYVVRFTAPEFTSLCPMTGQPDFAHIVIDYIPGDFLVESKSLKLFMTSFRNHGSFHEDCSIYIAKRLVELLDPKWLRIGAYWYPRGGIPIDVFWQTGEAPTGVWLPDQGVPTYRGRG

SEQ ID NO: 43816 - protein, 275 aa, Agromyces sp.
  REGION 1..275: note = tr|A0A542JSI7|A0A542JSI7_9PSED NADPH-dependent 7-cyano-7-deazaguanine reductase OS=Agromyces sp. SLBN-50; OX = 744977 GN=queF PE=3 SV=1
MQHPAEHSPLGKSSEYVSQYAPELLFPISRTTKWAELGLETGKLPYQGMDYWNCYELSWLTPSGKPVVAIGEFAIPADSPNIIESKSFKLYLNSLNQSAYADAAEVERLLARDLSACAGAPVAVRVRGLDEVAAEGVAALPGRCIDALEIAVSDYAHPRPELLRCADEVVEETLYSHLLKSNCPVTGQPDWGTLVVDYRGPRLDAASLLAYVVSFRQHQDFHEQCVERVFLDLQRLLQPERLTVYARYVRRGGLDINPYRSTEAIAPDNRRLVRQ

SEQ ID NO: 43817 - protein, 129 aa, unidentified
  source 1..129: note = Ahniella affigens
  REGION 1..129: note = tr|A0A2P1PQJ5|A0A2P1PQJ5_9GAMM NADPH-dependent 7-cyano-7-deazaguanine reductase OS=Ahniella affigens; OX = 2021234 GN=queF PE=3 SV=1
MSTKPSKTLETFPNPEPKRDYTIRMRIPEFTCLCPKTGQPDFATMHLEYIPDKTCVELKSLKLYMWSFREEGAFHEAVTNKILEDLAKATKPRFMRLTAEWYVRGGIYTTVVAEHAAKGFKPKPKIELP

SEQ ID NO: 43818 - protein, 152 aa, Ahrensia sp.
  REGION 1..152: note = tr|A0A2E2RMK5|A0A2E2RMK5_9RHOB NADPH-dependent 7-cyano-7-deazaguanine reductase OS=Ahrensia sp.; OX = 1872419 GN=queF PE=3 SV=1
MDPDIHTTQLGKAVEIPQSPEEAVLERVPNPHADTNYVARFVAPEFTSICPVTGQPDFAHLVIDYVPDQWLFESKSLKLFLTSFRNHGAFHEDCTVGIGKRLVDLLEPRWFRIGGYWYPRGGIPIDVFWQHGTLPEGVWAPDQGVAPYRGRG

SEQ ID NO: 43819 - protein, 279 aa, Aidingimonas halophila
  REGION 1..279: note = tr|A0A1H3EP94|A0A1H3EP94_9GAMM NADPH-dependent 7-cyano-7-deazaguanine reductase OS=Aidingimonas halophila; OX = 574349 GN=queF PE=3 SV=1
MSSQDRPDSLHNAPLGQASDYPAHYDAGLLYPIARETSRAALDLDGKPLPFIGADEWTAFELSWLDRRGKPRVAIARFTLPATSRYLIESKSWKLYLNSFNQTAFDDAKAVHDTLVRDLTAAAGASVAVELFDVDDESLGTRRLPGECLDGLDIDIRDYTPNPTLLSAGKDTVEESLHSHLLKSNCPVTGQPDWGSVLIRYRGPRLDREGLLRYLVSYRQHQDFHEHCVERIFCDLMTQARPARLFVLARYVRRGGLDINPWRATPGEAPPASLRLARQ

SEQ ID NO: 43820 - protein, 135 aa, unidentified
  source 1..135: note = Akkermansia glycaniphila
  REGION 1..135: note = tr|A0A1C7PC19|A0A1C7PC19_9BACT NADPH-dependent 7-cyano-7-deazaguanine reductase OS=Akkermansia glycaniphila OX=1679444 GN=queF PE=3 SV=1
MSDLTLLGQHSSFFTSPDDAKLEAFPNRSPQRAYTIVLDTHEFSSLCPVTGQPDSCHLTITYSPAEHCVETKSLKYYLAAYRNYPAFNEQIVNRILDDLIAAIHPAWMKIEGRFGARGGIQLTTIAEHQPENRPL

SEQ ID NO: 43821 - protein, 135 aa, Akkermansia muciniphila
  REGION 1..135: note = tr|A0A2N8HGZ1|A0A2N8HGZ1_9BACT NADPH-dependent 7-cyano-7-deazaguanine reductase OS=Akkermansia muciniphila OX=239935 GN=queF PE=3 SV=1
MSEPLTLLGSQSSFFTSPDDAKLESFPNRGTRPYTITLDTHEFSSLCPVTGQPDSCHLVITYVPDEKCVETKSLKYYLASYRNYPAFNEQIVNRITDDLVAAISPRWLKVEGRFSPRGGIQLTAMAEHNPENRPL

SEQ ID NO: 43822 - protein, 131 aa, Akkermansia muciniphila
  REGION 1..131: note = tr|A0A2N8IT67|A0A2N8IT67_9BACT NADPH-dependent 7-cyano-7-deazaguanine reductase OS=Akkermansia muciniphila OX=239935 GN=queF PE=3 SV=1
MTLLGSQSSFFTNPDDARLESFPNRGTRPYTITLDTHEFSSLCPVTGQPDSCHLTITYVPAEKCVETKSLKYYLASYRNYPAFNEQIVNRITDDLVAAISPRWLKVEGRFSPRGGIQLTATAEHNPENRPL

SEQ ID NO: 43823 - protein, 135 aa, Akkermansia sp.
  REGION 1..135: note = tr|A0A5B6C6K7|A0A5B6C6K7_9BACT NADPH-dependent 7-cyano-7-deazaguanine reductase OS=Akkermansia sp. BIOML-A33 OX=2584589 GN=queF PE=3 SV=1
MSDNLTLLGSQSSFFTSPDDAKLESFPNRGTRPYTIMLDTHEFSSLCPVTGQPDSCHLTITYVPDGHCVETKSLKYYLASYRNYPAFNEQIVNRITDDLVAAISPRWLKVEGRFSPRGGIQLTAMAEHNPENRPL

SEQ ID NO: 43824 - protein, 135 aa, Akkermansia sp.; identical to SEQ ID NO: 43823
  REGION 1..135: note = tr|A0A5B6HLF2|A0A5B6HLF2_9BACT NADPH-dependent 7-cyano-7-deazaguanine reductase OS=Akkermansia sp. BIOML-A3 OX=2584559 GN=queF PE=3 SV=1

SEQ ID NO: 43825 - protein, 285 aa, Albidiferax sp.
  REGION 1..285: note = tr|A0A1H0W3M8|A0A1H0W3M8_9BURK NADPH-dependent 7-cyano-7-deazaguanine reductase OS=Albidiferax sp. OV413; OX = 1855285 GN=queF PE=3 SV=1
MASPNTPEQSQLGKSSAYIDQYDASLLFPIPRAVKRAEIGLADKAAPFFGADLWTAFELSWLNLRGKPQVALAHITVPCETPNIVESKSFKLYLNSFNNTRFADAAMVQARIRADISEAAWRGSDTPSSVGVRILLPEMFDREPVHELDGLSLDRLDMDFDTYSPDPSLLSAALDEAPVSEVLTSNLLKSNCLVTGQPDWGSVQISYSGPQIDQAGLLKYLVSFRNHNEFHEQCVERIFMELWTRCKPIKLSVYARYTRRGGLDINPYRTSHPGALPGNIRTARQ

SEQ ID NO: 43826 - protein, 154 aa, Albidovulum inexpectatum
  REGION 1..154: note = tr|A0A2S5JLT1|A0A2S5JLT1_9RHOB NADPH-dependent 7-cyano-7-deazaguanine reductase OS=Albidovulum inexpectatum OX=196587 GN=queF PE=3 SV=1
MAKTDVSGLTQLGAKAEMPKSPEEAILEKVPASNSGLNYVVRFTAPEFTSLCPLTGQPDFAHIVIDYIPGEWLVESKSLKLFLHSFRNHGAFHEDCTIEIAKRLVDLLNPVWLRIGAYWYPRGGIPIDVFWQTGSAPEGAWIPDQGVAPYRGRG

SEQ ID NO: 43827 - protein, 153 aa, Albimonas donghaensis
  REGION 1..153: note = tr|A0A1H2WLW6|A0A1H2WLW6_9RHOB NADPH-dependent 7-cyano-7-deazaguanine reductase OS=Albimonas donghaensis; OX = 356660 GN=queF PE=3 SV=1
MTDDLAAITTLGQAAEQPASPEEARLDPVPNPQRGELFLARFVAPEFTSLCPVTGQPDFAHLVIDYAPDEFLIESKSLKLFLTSFRNHGAFHEDCTVSIGKRIAAVAKPTWIRIAGYWYPRGGIPIDVFWQSGPAPEGLWVPDTGVAPYRGRG

SEQ ID NO: 43828 - protein, 152 aa, unidentified
  source 1..152: note = Albimonas pacifica
  REGION 1..152: note = tr|A0A1I3F6C7|A0A1I3F6C7_9RHOB NADPH-dependent 7-cyano-7-deazaguanine reductase OS=Albimonas pacifica; OX = 1114924 GN=queF PE=3 SV=1
MPELSEITTLGRTVETPASPEAAVIDVVPNPQQGTLFAARFVAPEFTSLCPVTGQPDFGHLVIDYAPDASLIESKSLKLFLTSFRNHGAFHEDCTVGIGRRLAEAAKPLWLRIGGYWYPRGGIPIDVFWQTGAPPEGLWLPDQGVPPYRGRG

SEQ ID NO: 43829 - protein, 282 aa, unidentified
  source 1..282: note = Alcaligenaceae bacterium
  REGION 1..282: note = tr|A0A354K3H3|A0A354K3H3_9BURK NADPH-dependent 7-cyano-7-deazaguanine reductase OS=Alcaligenaceae bacterium OX=2021368 GN=queF PE=3 SV=1
MTDFLQHAPLGQTVLYPSQYDAGLLFPIPRAEARSQIGIAGSALPFTGWDLWNAYEMSWLNAKGLPQVGILRARVPLDSANIIESKSFKLYLNSFNQTRFDHPQAVIDLLTKDLSDAAAGTVEIDLIGPERFGLEIFGEFDGINLDLQDVEIDQYQTDPTLLELDRHPKSNEAGHVTEQLFSRLLKSNCPVTGQPDWACVQIIYSGKPIDHAGLLKYIVSFRMHSGFHENCVERIFSDIMNRCAPATLSVFARYTRRGGLDINPWRATPGMPAPQWRRSARQ

SEQ ID NO: 43830 - protein, 274 aa, unidentified
  source 1..274: note = Alcaligenaceae bacterium
  REGION 1..274: note = tr|A0A2D8B6Y7|A0A2D8B6Y7_9BURK NADPH-dependent 7-cyano-7-deazaguanine reductase OS=Alcaligenaceae bacterium OX=2021368 GN=queF PE=3 SV=1
MSSSSLDQAPLGRDVAYPAHYDPSILFPVNRETNRAQLPFIPNWAGADIWHAYEVSWLNARGKPIVAMARFIVPHNSPNIIESKSFKLYLNSFNESRFNSMNHVQQRLEKDLSAVAGAHIEVALTDLHDIQTIQCAPLEGLNIDDADVDIEHYQPNAGLLKCTTNPQPVNETLTSDLLKSNCPVTGQPDWGSLQIQYQGPQIDRESLLKYIVSLRQHAEFHEHCVEKIYCDIWQACQPEFLFVYACYTRRGGLDINPWRSSGPLVFEPARTPRQ

SEQ ID NO: 43831 - protein, 275 aa, Alcaligenes aquatilis
  REGION 1..275: note = tr|A0A427M0Z1|A0A427M0Z1_9BURK NADPH-dependent 7-cyano-7-deazaguanine reductase OS=Alcaligenes aquatilis; OX = 323284 GN=queF PE=3 SV=1
MSNTSPLKDSPLGHDVVYPTRYDPSVLFGIERSLNRQTLRVPEQWHGADIWNGYEISWLNPKGKPVVALARFVIPWNSPRIVESKSFKLYLNSFNDELVEDIASLVQRMEQDLSAVAGAAVNVTLIPLSALNGQPIAQLEGHCIDELDISIQDYTPQSGLLKCLPDAPIVTESLVSDLLKSNCPVTGQPDWGSVQVRYTGPQIDPASLLRYIVSLRRHTEFHEHCVERLYSDIQQSCQPERLLVYARYTRRGGLDINPWRSSHADSVQEPRLARQ

SEQ ID NO: 43832 - protein, 275 aa, Alcaligenes aquatilis
  REGION 1..275: note = tr|A0A3G2HX22|A0A3G2HX22_9BURK NADPH-dependent 7-cyano-7-deazaguanine reductase OS=Alcaligenes aquatilis; OX = 323284 GN=queF PE=3 SV=1
MSNTSPLKDSPLGHDVVYPTRYDPSVLFGIERSLNRQTLRVPEQWHGADIWNGYEISWLNPKGKPVVALARFVIPWNSPRIVESKSFKLYLNSFNDELVEDIASLVQRMEQDLSAVAGAAVNVTLIPLSALTGQPIAQLEGHCIDELDISIQDYTPQSGLLQCLPDAPIVTESLVSDLLKSNCPVTGQPDWGSVQVRYTGPQIDPASLLRYIVSLRRHTEFHEHCVERLYSDIQQSCQPERLLVYARYTRRGGLDINPWRSSHADSVQEPRLARQ

SEQ ID NO: 43833 - protein, 275 aa, Alcaligenes faecalis
  REGION 1..275: note = tr|A0A2U2BNZ2|A0A2U2BNZ2_ALCFA NADPH-dependent 7-cyano-7-deazaguanine reductase OS=Alcaligenes faecalis; OX = 511 GN=queF PE=3 SV=1
MSNTSPLKDSPLGHDVVYPTQYDPSVLFGIERSLNRQTLQVPEQWHGADIWNGYEISWLNPKGKPVVALARFVIPWNSPRIIESKSFKLYLNSFNDEVVEDMASLVQRMEHDLSAVAGAAVNVTLIPLGALNGQPISQLEGHCIDELDISIQDYTPQSGLLKCLPNAPIVTESLVSDLLKSNCPVTGQPDWGSVQVRYTGPQIDPASLLRYIVSLRRHTEFHEHCVERLYSDILQSCQPERLLVYARYTRRGGLDINPWRSSHTDSVDEPRLARQ

SEQ ID NO: 43834 - protein, 275 aa, Alcaligenes faecalis
  REGION 1..275: note = tr|A0A4P8JGH1|A0A4P8JGH1_ALCFA NADPH-dependent 7-cyano-7-deazaguanine reductase OS=Alcaligenes faecalis; OX = 511 GN=queF PE=3 SV=1
MSNNSPLKDSPLGHDVVYPTQYDPSVLFGIERSLNRQALQLPEQWHGADIWNGYEMSWLNPKGKPVVALARFVIPWNSPRIIESKSFKLYLNSFNDEVVEDMASFVQRMEQDLSVVAGAAVNVTLIPLKALNGQPIRQLEGHCIDELDISIQDYTPQSGLLQCLPDAPIVTESLVSDLLKSNCPVTGQPDWGSVQVRYTGPQIDPASLLRYIVSLRRHTEFHEHCVERLYSDIQQSCKPERLLVYARYTRRGGLDINPWRSSHADSVEEPRLARQ

SEQ ID NO: 43835 - protein, 275 aa, Alcaligenes sp.
  REGION 1..275: note = tr|U1XXJ7|U1XXJ7_9BURK NADPH-dependent 7-cyano-7-deazaguanine reductase OS=Alcaligenes sp. EGD-AK7 OX=1386079 GN=queF PE=3 SV=1
MSNNSPLKDSPLGHDVVYPTQYDPSVLFGIERSLNRQALQLPEQWHGADIWNGYEISWLNPKGKPVVALARFVIPWNSPRIIESKSFKLYLNSFNDEVVEDVASLVQRMEQDLSAVAGAAVNVTLIPLKALNGQPIRQLEGHCIDELDISIQDYTPQSGLLQCLPDAPIVTESLVSDLLKSNCPVTGQPDWGSVQVRYTGLQIDPASLLRYIVSLRRHTEFHEHCVERLYSDIQQSCQPERLLVYARYTRRGGLDINPWRSSHADSVDEPRLARQ

SEQ ID NO: 43836 - protein, 274 aa, unidentified
  source 1..274: note = Alcaligenes xylosoxydans
  REGION 1..274: note = tr|A0A0M7LZ69|A0A0M7LZ69_ALCXX NADPH-dependent 7-cyano-7-deazaguanine reductase OS=Alcaligenes xylosoxydans xylosoxydans OX=85698 GN=queF PE=3 SV=1
MTLSHGPLGQSVTYVSQYDPSLLFPIARAHNREALNLATGPLPFIGVDLWNAYELSWLDAKGKPRVAMATFSVPADSPNIIESKSFKLYLNSFNQTRLVNSAALRGRLERDLSAAAGAPVGLDFILPQRFGELRMGELDGIYIDKLDIEIDTYEPAPELLRNRPGDVVEETLCSRLLKSNCPVTGQPDWASVQIRYRGQPIDRESLLRYVISFRQHAEFHEHCVERIFTDIMQACAPEQLTVYARYTRRGGLDINPWRSNVETTPPADVRTVRQ

SEQ ID NO: 43837 - protein, 274 aa, unidentified
  source 1..274: note = Alcaligenes xylosoxydans
  REGION 1..274: note = tr|A0A5C2NFV5|A0A5C2NFV5_ALCXX NADPH-dependent 7-cyano-7-deazaguanine reductase OS=Alcaligenes xylosoxydans xylosoxydans OX=85698 GN=queF PE=3 SV=1
MTLSHGPLGQSVTYVSQYDPSLLFPIARAHNREALNLATGPLPFTGVDLWNAYELSWLDAKGKPRVAMATFSVPADSPNIIESKSFKLYLNSFNQTRLVNSAALRGRLERDLSAAAGAPVGLDFILPQRFGELRMGELDGIYIDKLDIEIDTYEPAPELLRNRPGDVVEETLCSRLLKSNCPVTGQPDWASVQIRYRGQPIDRESLLRYVVSFRQHAEFHEHCVERIFTDIMQACAPEQLTVYARYTRRGGLDINPWRSNVETAPPADVRTVRQ

SEQ ID NO: 43838 - protein, 274 aa, unidentified
  source 1..274: note = Alcanivoracaceae bacterium
  REGION 1..274: note = tr|A0A2E2DI19|A0A2E2DI19_9GAMM NADPH-dependent 7-cyano-7-deazaguanine reductase OS=Alcanivoracaceae bacterium OX=2024895 GN=queF PE=3 SV=1
MSYLKETPLGRSSEYVDEYTPSLLCPVPRWDARESLELEDTSLPFHGTDIWNAYELSWLNEKGKPIVAMCELRIPCTTPNIVESKSLKLYLNSFANSRFDDRDKVRAAIEKDVAQTVGGNIEVLLYSLEESAGFPTWEDRGECVDNIDLNFEHYEYNPELLLCDQGAEQTGQLYSHLLRSHCPVTNQPDWATVVIRYTGRAISPASFLRYVVSLRNHQGFHEQIIEQMFVDLMSQCSPRHLTVYGRFTRRGGIDINPFRSNSEQPLPNRRTIRQ

SEQ ID NO: 43839 - protein, 273 aa, unidentified
  source 1..273: note = Alcanivoracaceae bacterium
  REGION 1..273: note = tr|A0A3L8B2C1|A0A3L8B2C1_9GAMM NADPH-dependent 7-cyano-7-deazaguanine reductase OS=Alcanivoracaceae bacterium GenoA1_TS13_700 OX=2072747 GN=queF PE=3 SV=1
MTEQQHGPLGVASTYPDQYDPAQLHAIARAAGREAIGVDDGPLPFYGEDIWNAYELSWLNEKGKPMVAMMELRVPFDSPNIVESKSFKLYLGSFNQWPVQSPQALAHIIERDVSDVVGAPVSVELTPLFQSGGFALATLPGKCIDDLDVDVAVYEVDADLLLTLEGDTSEAYHSHLLRSCCPVTGQPDWASVVIEYQGTKICEEGLLKYLISFRNNQEFHEQCVERIFMDISRQCAPERLTVYARYTRRGGIDINPVRSSEPVQQANLRLIRQ

SEQ ID NO: 43840 - protein, 274 aa, Alcanivorax borkumensis
  REGION 1..274: note = sp|Q0VR70|QUEF_ALCBS NADPH-dependent 7-cyano-7-deazaguanine reductase OS=Alcanivorax borkumensis (strain ATCC 700651 / DSM 11573 / NCIMB 13689 / SK2) OX=393595 GN=qu eF PE=3 SV=1
MSYLKETPLGRSSEYVDQYMPSLLCPVPRWDAREGLELESATLPFHGSDIWNAYELSWLNEKGKPIVAMCELRVPCTTPNIVESKSLKLYLNSFANTRFQSRDAVRAAIEKDVAQTAGGNIEVLLFSLQESAGFPVWEDRGDCVDNIDLNFEHYEYRPDLLLCDQGPEQTGQLYSHLLRSHCPVTDQPDWATVVVRYTGRAISPASFLRYVVSLRNHQGFHEQIIEQMFVDLMTQCSPRHLTVYGRFTRRGGIDINPFRSNSEQPLPNRRTIRQ

SEQ ID NO: 43841 - protein, 273 aa, Alcanivorax dieselolei
  REGION 1..273: note = tr|K0CDY1|K0CDY1_ALCDB NADPH-dependent 7-cyano-7-deazaguanine reductase OS=Alcanivorax dieselolei (strain DSM 16502 / CGMCC 1.3690 / B-5) OX=930169 GN=queF; PE = 3 SV=1
MSYLQDAPLGQTSEYVDQYAPELLYPVPRALARESLALTGTLPFRGEDLWTGYELSWLEQGGKPRVALVEVRVPCTSDNIIESKSLKLYLNSFANSRYADADSVREIITADLGEVAGEAVTVRIWSLEEAAAQSVWHSDGVCVDELDLTIDTFEYNPALLTTTTGEVHQGELYSHLLRSHCPVTNQPDWGTVVVRYEGAPIDPGGFLRYVVSLRNHQGFHEQIVEQMFVDLQRQCAPAKLSVLGRFTRRGGLDINPFRSNFEPAPANRRTIRQ

SEQ ID NO: 43842 - protein, 274 aa, Alcanivorax hongdengensis
  REGION 1..274: note = tr|L0WAM5|L0WAM5_9GAMM NADPH-dependent 7-cyano-7-deazaguanine reductase OS=Alcanivorax hongdengensis A-11-3 OX=1177179 GN=queF PE=3 SV=1
MSYLKDTPLGRTSEYSDEYMPALLCPVPRWDARESLELDDTNLPFHGSDLWTAYELSWLNEKGKPLVALAELRIPCFSPNIVESKSLKLYLNSFANSRFDSQDAVRTAIEKDVSQIVGVPIEVLIFSLADAANIPPWEDRGQCVDTLDVGFEHYDYRPELLLADQGAEQNGQLYSHLLRSHCPVTNQPDWATVVVRYTGRAISPASFLRYVVSLRNHQGFHEQIIEQMYMDLMRQCQPRHLTVYGRFTRRGGIDINPFRSNFEQALPNRRTVRQ

SEQ ID NO: 43843 - protein, 279 aa, Alcanivorax jadensis
  REGION 1..279: note = tr|A0A095TGV4|A0A095TGV4_9GAMM NADPH-dependent 7-cyano-7-deazaguanine reductase OS=Alcanivorax jadensis T9 OX=1177181 GN=queF PE=3 SV=1
MSYLKETPLGRSTDYVDEYTPSLLCPVPRWDARESLELEALGDEDTSLPFHGTDIWNAYELSWLNEKGKPVVALCELRIPCTTPNIVESKSLKLYLNSFANTRFENRDQVRAAIEKDVAQTVGGNMEVLLHSLEESAGFPVWEDRGQCVDNIDIGFEHYEYRPDLLLCDQGAEQTGQLYSHLLRSHCPVTNQPDWATVVVRYTGRAISPASFLRYVVSLRNHQGFHEQIIEQMFVDLMRQCSPRHLTVYGRFTRRGGIDINPFRSNSEQPLPNRRTIRQ

SEQ ID NO: 43844 - protein, 274 aa, unidentified
  source 1..274: note = Alcanivorax nanhaiticus
  REGION 1..274: note = tr|A0A095UVV2|A0A095UVV2_9GAMM NADPH-dependent 7-cyano-7-deazaguanine reductase OS=Alcanivorax nanhaiticus OX=1177154 GN=queF PE=3 SV=1
MSYLKDTPLGRSSDYVDEYTPALLCPVPRWDARESLELEDTALPFHGTDIWNAYELSWLTEKGKPVVAMCELRIPCTTPNIVESKSLKLYLNSFANTRFEKREEVRAAIEKDVAHVVGGDIEVLLFSLEDAATLPLWEDKGQCVDTIDLNFEHYNYNPELLLCDQGPEQTGQLYSHLLRSHCPVTNQPDWATVVVRYTGRAISPASFLRYVVSLRNHQGFHEQIIEQMFVDLMAQCSPRHLTVYGRFTRRGGIDINPFRSNSEQALPNRRTVRQ

SEQ ID NO: 43845 - protein, 275 aa, Alcanivorax pacificus
  REGION 1..275: note = tr|A0A0B4XMT4|A0A0B4XMT4_9GAMM NADPH-dependent 7-cyano-7-deazaguanine reductase OS=Alcanivorax pacificus W11-5 OX=391936 GN=queF PE=3 SV=1
MGNPFSDTPLGRKTDYLDQYTPSLLCPIPRWDAREALEMADAHLPFHGMDVWNAYELSWLDNRGKPVVAMAEIRVSCTSRNLVESKSLKLYLNSFANTRFADRRAVQQAMEKDLSSAADGAVEVRVLTLEEAARQPMWEAQGTALDHIDLDIDQFEHDASLLMTEQGPERTELLYSHLLRSRCPVTAQPDWATVIIRYTGTPISHASLLRYLISFRNHNGFHEQVVEQIFLDIQRECAPRHLSVNGRFTRRGGLDINPFRSNFEELPPNLRVVRQ

SEQ ID NO: 43846 - protein, 274 aa, unidentified; identical to SEQ ID NO: 43838
  source 1..274: note = Alcanivorax profundi
  REGION 1..274: note = tr|A0A418Y241|A0A418Y241_9GAMM NADPH-dependent 7-cyano-7-deazaguanine reductase OS=Alcanivorax profundi; OX = 2338368 GN=queF PE=3 SV=1

SEQ ID NO: 43847 - protein, 279 aa, Alcanivorax sp.
  REGION 1..279: note = tr|A0A2E4YJJ7|A0A2E4YJJ7_9GAMM NADPH-dependent 7-cyano-7-deazaguanine reductase OS=Alcanivorax sp.; OX = 1872427 GN=queF PE=3 SV=1
  VARIANT 66: note = Xaa can be any naturally occurring amino acid
  VARIANT 113: note = Xaa can be any naturally occurring amino acid
MSFLNDTPLGRTSAFIDQYTPSLLCPVPRWDARESLDLDTAAEGEPRLPFHGQDIWNAYELSWLNXRGKPVVAMAELVVPCISPNIIESKSLKLYLNSFANTRFASREAVIKXIAGDLAQVAGAPVDVRVMSMEEAARAAVWDDHGDSVDHLDVAFEHFEYRPDLLFTEQGPERNGALVSHLLRSHCPVTNQPDWGTVQVRYTGAEISPASFLRYVVSLRNHQGFHEQIIEQMFVDLKRQCAPRHLSVYGRFTRRGGLDINPFRSDYEDLPRNLRTIRQ

SEQ ID NO: 43848 - protein, 279 aa, Alcanivorax sp.
  REGION 1..279: note = tr|A0A2E9TMS6|A0A2E9TMS6_9GAMM NADPH-dependent 7-cyano-7-deazaguanine reductase OS=Alcanivorax sp.; OX = 1872427 GN=queF PE=3 SV=1
MSYLKETPLGRSTDYVDEYMPSLLCPVPRWDARESLELEELGDEDTSLPFHGTDIWNAYELSWLNEKGKPVVALCELRIPCTTPNIVESKSLKLYLNSFANTRFESRDKVRAAIEKDVAQTVGGNMEVLLYSLEESAGFPVWEDRGQCVDNIDIGFEHYEYRPDLLLCDQGAEQTGQLYSHLLRSHCPVTNQPDWATVVVRYTGRAISPASFLRYVVSLRNHQGFHEQIIEQMFVDLMRQCSPRHLTVYGRFTRRGGIDINPFRSNSEQPLPNRRTIRQ

SEQ ID NO: 43849 - protein, 281 aa, Alicycliphilus denitrificans
  REGION 1..281: note = tr|A0A3R7ED91|A0A3R7ED91_9BURK NADPH-dependent 7-cyano-7-deazaguanine reductase OS=Alicycliphilus denitrificans OX=179636 GN=queF PE=3 SV=1
MTTPEQSQLGRASAYADQYDASLLFPLPRAPKRAEIGIAGEPPFFGADLWTAYELSWLNPRGKPQVAIAHITVPCETPNIVESKSLKLYLNSFNGTRFASLDEVRARIRQDVSEAAWRGASTAGTVGVRIVTPDLFAQERVHEQDGLLLDRLDIECTRYQPAPELLKANHDEAPVTETLVSHLLKSNCLVTGQPDWGSVQIAYSGAQIDQEGLLQYIVSFRGHNEFHEQCVERIFMDVWQRCRPIKLAVYARYTRRGGLDINPLRTSHPQPMPANVRTARQ

SEQ ID NO: 43850 - protein, 281 aa, Alicycliphilus denitrificans
  REGION 1..281: note = tr|E8TZA0|E8TZA0_ALIDB NADPH-dependent 7-cyano-7-deazaguanine reductase OS=Alicycliphilus denitrificans (strain DSM 18852 / JCM 14587 / BC); OX = 596153 GN=queF PE=3 SV =1
MTTPEQSQLGRASAYADQYDASLLFPLPRAPKRAEIGIAGDPPFFGADLWTAYELSWLNSRGKPQVAIAHITVPCETPNIVESKSLKLYLNSFNSTRFASLDEVRARIRQDLSEAAWRGASITGTVGVRLVTPDLFAQERVHEQDGLLLDRLDIECTRYQPAPELLKANHDEAPVTETLVSHLLKSNCLVTGQPDWGSVQIAYSGAQIDQEGLLQYIVSFRGHNEFHEQCVERIFMDVWQRCRPIKLAVYARYTRRGGLDINPLRTSHPQPMPANVRTARQ

SEQ ID NO: 43851 - protein, 281 aa, Alicycliphilus sp.
  REGION 1..281: note = tr|A0A5C8BVY4|A0A5C8BVY4_9BURK NADPH-dependent 7-cyano-7-deazaguanine reductase OS=Alicycliphilus sp.; OX = 1872437 GN=queF PE=3 SV=1
MSTPEQSQLGKASAYADQYDAALLFPIPRQPKRAEIGIAGAPSFFGADLWTAYELSWLNLRGKPQVAIAHITVPCETPNIVESKSFKLYLNSFNNTRFASLDEVRARIRQDVSEAAWRGAAHAGTVGVRLVTPDQFDAEQVHELDGLLLDRLDIECTQYQPAPELLKANHDEAPVTETLVSHLLKSNCLVTGQPDWGSVQIAYSGAQIDQEGLLQYIVSFRNHNEFHEQCVERIFMDIWQRCRPIKLAVYARYTRRGGLDINPLRTSAPMPLPANRRTARQ

SEQ ID NO: 43852 - protein, 281 aa, Alicycliphilus sp.; identical to SEQ ID NO: 43850
  REGION 1..281: note = tr|A0A0E9LGU0|A0A0E9LGU0_9BURK NADPH-dependent 7-cyano-7-deazaguanine reductase OS=Alicycliphilus sp. B1; OX = 1603291 GN=queF PE=3 SV=1

SEQ ID NO: 43853 - protein, 117 aa, Alicyclobacillus acidocaldarius
  REGION 1..117: note = tr|B7DV68|B7DV68_9BACL NADPH-dependent 7-cyano-7-deazaguanine reductase OS=Alicyclobacillus acidocaldarius LAA1 OX=543302 GN=queF PE=3 SV=1
MLNQPSKTLVTVPNPHPDRRYTVEMETQEFTTLCPMTGQPDFATIYIQYEPDQKLVELKSLKLYLWSYRNEASYHEDCVNRILNDFVAAAEPHYAKVVGDFTIRGGIHTKVTVEYRK

SEQ ID NO: 43854 - protein, 117 aa, Alicyclobacillus acidocaldarius; identical to SEQ ID NO: 43853
  REGION 1..117: note = tr|F8IFC5|F8IFC5_ALIAT NADPH-dependent 7-cyano-7-deazaguanine reductase OS=Alicyclobacillus acidocaldarius (strain Tc-4-1) OX=1048834 GN=queF PE=3 SV=1

SEQ ID NO: 43855 - protein, 119 aa, Alicyclobacillus acidoterrestris
  REGION 1..119: note = tr|A0A512CRN9|A0A512CRN9_9BACL NADPH-dependent 7-cyano-7-deazaguanine reductase OS=Alicyclobacillus acidoterrestris OX=1450 GN=queF PE=3 SV=1
MDMLTQPTKELVTVPNPHPNRVYTVEMECAEFTTLCPMTGQPDFATIYIQYQPAEKIVELKSLKLYLWSFRNEANYHEACINRILDDFVAVSQPRYAKVVGDFTIRGGIHTKVTVEYTA

SEQ ID NO: 43856 - protein, 119 aa, Alicyclobacillus acidoterrestris; identical to SEQ ID NO: 43855
  REGION 1..119: note = tr|T0BND1|T0BND1_ALIAG NADPH-dependent 7-cyano-7-deazaguanine reductase OS=Alicyclobacillus acidoterrestris (strain ATCC 49025 / DSM 3922 / CIP 106132 / NCIMB 13137/ GD3B) OX=1356854 GN=queF PE=3 SV=1

SEQ ID NO: 43857 - protein, 124 aa, Alicyclobacillus ferrooxydans
  REGION 1..124: note = tr|A0A0P9CWV5|A0A0P9CWV5_9BACL NADPH-dependent 7-cyano-7-deazaguanine reductase OS=Alicyclobacillus ferrooxydans OX=471514 GN=queF PE=3 SV=1
MEGLLVSTQPTKELVVVPNPHPDKVYDVEMSTNEFTTLCPMTGQPDFATVTVVYQPADHLVELKSLKLYLWSFRNEGHFHEDVTNIILNDFVAAAQPRMARVTTDFTVRGGIHTKVTTEYRRPE

SEQ ID NO: 43858 - protein, 117 aa, Alicyclobacillus hesperidum
  REGION 1..117: note = tr|J9HFC8|J9HFC8_9BACL NADPH-dependent 7-cyano-7-deazaguanine reductase OS=Alicyclobacillus hesperidum URH17-3-68 OX=1200346 GN=queF PE=3 SV=1
MLNQPSKTLVTVPNPHPDRVYTVEMETAEFTTLCPMTGQPDFATIHIEYQPHEKLVELKSLKLYLWSYRNEASYHEDCVNRILNDFVAAAEPRSAKVVGDFTIRGGIHTKVTVEYTK

SEQ ID NO: 43859 - protein, 117 aa, Alicyclobacillus hesperidum; identical to SEQ ID NO: 43858
  REGION 1..117: note = tr|A0A1H2Q163|A0A1H2Q163_9BACL NADPH-dependent 7-cyano-7-deazaguanine reductase OS=Alicyclobacillus hesperidum OX=89784 GN=queF PE=3 SV=1

SEQ ID NO: 43860 - protein, 121 aa, Alicyclobacillus macrosporangiidus
  REGION 1..121: note = tr|A0A1I7L4H5|A0A1I7L4H5_9BACL NADPH-dependent 7-cyano-7-deazaguanine reductase OS=Alicyclobacillus macrosporangiidus OX=392015 GN=queF PE=3 SV=1
MPTQPSKELVVVPNPHPDRVYDVEMSTPEFTTVCPMTGQPDFATITIHYQPGPFLVELKSLKLYLWSFRNEGHFHEDVTNIILNDFVAAAKPRYCRVTGDFTVRGGIHTKVTVEYRQPDPA

SEQ ID NO: 43861 - protein, 119 aa, unidentified
  source 1..119: note = Alicyclobacillus montanus
  REGION 1..119: note = tr|A0A1M6K3C8|A0A1M6K3C8_9BACL NADPH-dependent 7-cyano-7-deazaguanine reductase OS=Alicyclobacillus montanus OX=1830138 GN=queF PE=3 SV=1
MLTQPTRELVVVPNPHPTRVYTVEMDCPEFTTLCPMTGQPDFATIYIQYQPGEHLVELKSLKLYLWSFRNEAHYHEDVTNLILNDFVAAAKPRYAKVVADFTVRGGIHTKVTVEYSETN

SEQ ID NO: 43862 - protein, 117 aa, Alicyclobacillus sacchari
  REGION 1..117: note = tr|A0A4R8LTI2|A0A4R8LTI2_9BACL NADPH-dependent 7-cyano-7-deazaguanine reductase OS=Alicyclobacillus sacchari OX=392010 GN=queF PE=3 SV=1
MLNQPNKTLVTVPNPHPDRVYTVEMETAEFTTLCPMTGQPDFATIYIEYQPHEKLVELKSLKLYLWSYRNEASYHEDCVNRILNDFVAAAEPRSAKVVGDFTIRGGIHTKVTVEYTK

SEQ ID NO: 43863 - protein, 117 aa, Alicyclobacillus sp.
  REGION 1..117: note = tr|A0A1F2YDY9|A0A1F2YDY9_9BACL NADPH-dependent 7-cyano-7-deazaguanine reductase (Fragment); OS = Alicyclobacillus sp. RIFOXYA1_FULL_53_8 OX=1797236; GN = A2201_11415 PE=3SV=1
MPTQPTKELIVVPNPHPTRVYDVEMSTPEFTTLCPMTGQPDFATITIQYQPGEFLVELKSLKLYLWSFRNEGHFHEDVTNMILNDFVRASQPRFARVIGDFTVRGGISTKVTVEYRN

SEQ ID NO: 43864 - protein, 117 aa, unidentified
  source 1..117: note = Alicyclobacillus tengchongensis
  REGION 1..117: note = tr|A0A0V0PSL6|A0A0V0PSL6_9BACL NADPH-dependent 7-cyano-7-deazaguanine reductase OS=Alicyclobacillus tengchongensis OX=368812 GN=queF PE=3 SV=1
MLNQPSKMLVTVPNPHPDRVYTVEMETAEFTTLCPMTGQPDFATIYIEYQPHEKLVELKSLKLYLWSYRNEASYHEDCVNRILNDFVAAAEPRSAKVVGDFTIRGGIHTKVTVEYTK

SEQ ID NO: 43865 - protein, 117 aa, Alicyclobacillus vulcanalis
  REGION 1..117: note = tr|A0A1N7L1X7|A0A1N7L1X7_9BACL NADPH-dependent 7-cyano-7-deazaguanine reductase OS=Alicyclobacillus vulcanalis OX=252246 GN=queF PE=3 SV=1
MFNQPSKSLVTVPNPHPDRRYTVEMETQEFTTLCPMTGQPDFATIYIQYEPDQKLVELKSLKLYLWSYRNETSYHEDCVNRILNDFVAAAEPHYAKVVGDFTIRGGIHTKVTVEYRK

SEQ ID NO: 43866 - protein, 295 aa, unidentified
  source 1..295: note = Aliidiomarina haloalkalitolerans
  REGION 1..295: note = tr|A0A432VXT0|A0A432VXT0_9GAMM NADPH-dependent 7-cyano-7-deazaguanine reductase OS=Aliidiomarina haloalkalitolerans OX=859059 GN=queF PE=3 SV=1
MPTSSPKPKSAALAHLKLGQNTDYPQHFDAGLLQPVPRQLNRDDLGIDASTLPFVGVDVWTCYELSWLQPNGVPAVVIAEVAVPATSPNLIESKSFKLYLNGFNQSTFANHAAVQQQLEHDLSGCAGAPVSVVFFTLDEYSQRGIQALPGHCIDGEDITIQDYDYQPDILLEIQAPTTAAEQTASETGELHSHVLKSNCLITNQPDWGSVYIYYTGKPIRRDVLLAYLVSFRNHNEFHEQCVERIYCDLQRYGEFSDLLVVARYTRRGGLDINPLRCSDSALLDHPVLRSRLARQ

SEQ ID NO: 43867 - protein, 284 aa, unidentified
  source 1..284: note = Aliidiomarina iranensis
  REGION 1..284: note = tr|A0A432W0N6|A0A432W0N6_9GAMM NADPH-dependent 7-cyano-7-deazaguanine reductase OS=Aliidiomarina iranensis OX=1434071 GN=queF PE=3 SV=1
MPVSSKNPMADLKLGTATEYPTQYDASLLQPVPRQLNRSSIGVADESLPFAGRDLWTCYEVSWLQPTGVPKVVIAEVEVPATSRNLIESKSFKLYLNSYNQSVFASTDEVLENLTRDLSACAEAPVEVRIYSLDSYTQHGIMNFAAECIDDEPVQINDYDYAPNLLATAAGTERVSEQLCSHLLKSNCLITNQPDWGSVYIAYTGPKIDRQALLRYLISFRNHNEFHEQCVERIYTDLMQHAGCESLQVLARYTRRGGLDINPIRHSGNSSIDSKLLRGRLARQ

SEQ ID NO: 43868 - protein, 286 aa, unidentified
  source 1..286: note = Aliidiomarina maris
  REGION 1..286: note = tr|A0A327WWA6|A0A327WWA6_9GAMM NADPH-dependent 7-cyano-7-deazaguanine reductase OS=Aliidiomarina maris; OX = 531312 GN=queF PE=3 SV=1
MPDQNPNPLAHLTLGQATDYQDQYNPKLLQAVPRALNREPIDIGVNGAELPFIGVDLWTGYEVSWLNSKGLPQIAIAVFSVPAYSPNLIESKSFKLYLNSFNQTRIDDWSTVTERMVADLSVCAGASVDVQLLTLGQFAAQYPIQAVAGESLDTQDIQIDGYDYTPAMLRSDPDVIVEEILTSDLLKSNCLITNQPDWGSVRIAYKGPQIARDTLLQYLVSFRSHNEFHEQCVERIFQDLMRYCACHSLTVEARYTRRGGLDINPVRASHDRHDYKNSISSRTVRQ

SEQ ID NO: 43869 - protein, 280 aa, unidentified
  source 1..280: note = Aliidiomarina minuta
  REGION 1..280: note = tr|A0A432W5R1|A0A432W5R1_9GAMM NADPH-dependent 7-cyano-7-deazaguanine reductase OS=Aliidiomarina minuta; OX = 880057 GN=queF PE=3 SV=1
MPTTGNHNSMSNLSLGQATEYSQQYNSELLQPVPRALNRTPIGINEQNLPFYGYDEWTGYELSWLNSKGLPQVAIARFTVPVTSTNLIESKSFKLYLNSFNQSRFNDWQQVQTLMQQDLSACAAGPVTVQLYPLAEFAQESISNLPGIHLDSLDISINSYDYNPGLLRQKSGSEIEETLTSDLLKSNCLITNQPDWGSVSIAYKGPQIEHESLLAYLVSFRNHNEFHEQCVERIFQDLMQHCGCLELTVCARYTRRGGLDINPLRSTQKQWPQFRRTVRQ

SEQ ID NO: 43870 - protein, 289 aa, unidentified
  source 1..289: note = Aliidiomarina sanyensis
  REGION 1..289: note = tr|A0A432WR66|A0A432WR66_9GAMM NADPH-dependent 7-cyano-7-deazaguanine reductase OS=Aliidiomarina sanyensis OX=1249555 GN=queF PE=3 SV=1
MPENHNTAMGHLTLGQVTDYPEHFDANLLHPVPRALNREEIELRDDALPFEGVDLWTGYELSWLQPSGVPAVAILEVEVPVTSPNLIESKSFKLYLNGFNQTTFPSTEAVQHQLQTDLSACAGVPVAVRIYSLDAYTARSIHHWESQCIDQAPLTVSTYDYAPELLQNICDPSGQVTTEQLHSHLLKSNCLITNQPDWGSVYIHYQGPKLNPSVLLAYLISFRSHNEFHEQCVERIYTDLMKYAKCESLLVLARYTRRGGLDINPLRYSHGQNLVLDPELLLRRRLVRQ

SEQ ID NO: 43871 - protein, 294 aa, unidentified
  source 1..294: note = Aliidiomarina shirensis
  REGION 1..294: note = tr|A0A432WWQ8|A0A432WWQ8_9GAMM NADPH-dependent 7-cyano-7-deazaguanine reductase OS=Aliidiomarina shirensis OX=1048642 GN=queF PE=3 SV=1
MPVSPKDPMADLKLGEATEYPAHYDADLLQPVPRQLNRSSIGVVDDALPFAGRDLWTCYELSWLQPNGVPKVAIAEVEVPATSANLIESKSFKLYLNGYNQSTFASEEVVLQQLTRDLSSCAGAPVEVRIYSLDAYTQHGLTNFAADCIDNENVNITTYDYEPELLNGLITSATSGAGSAAYEIVSEKLCSHLLKSNCLITNQPDWGSVYIEYTGPKINRAALLGYLISFRNHNEFHEQCVERIHTDLMQHARCESLTVFARYTRRGGLDINPVRHTRNNTIDSRLFRGRLARQ

SEQ ID NO: 43872 - protein, 287 aa, unidentified
  source 1..287: note = Aliidiomarina soli
  REGION 1..287: note = tr|A0A432WLI6|A0A432WLI6_9GAMM NADPH-dependent 7-cyano-7-deazaguanine reductase OS=Aliidiomarina soli; OX = 1928574 GN=queF PE=3 SV=1
MPAKQPNDAMANLTLGQTTEYPEQYDASLLQPVPRSLNRLPIGIDDNDLPFHGVDEWTGYELSWLTSKGLPQVAIARFLVPVSSPNLIESKSFKLYLNSFNQSRFADWQQVQQTMAVDLGHCAGAPVEVLLYSLEEFAARPIAALAGQSIDQQDIEIEHYQYQPELLQLVNGHAEQGETADVSEVLYSDLLKSNCLITNQPDWGSVSIAYSGPQIDRASLLRYLVSFRGHNEFHEQCVERIFQDLRQHCRCQHLTITARYTRRGGLDINPLRSTSKTWPESRRGVRQ

SEQ ID NO: 43873 - protein, 289 aa, Aliidiomarina sp.
  REGION 1..289: note = tr|A0A552X3E5|A0A552X3E5_9GAMM NADPH-dependent 7-cyano-7-deazaguanine reductase OS=Aliidiomarina sp. IM1326 OX=2593535 GN=queF PE=3 SV=1
MPENPEALMQHLSLGQATEYPSGYDPQLLQPVPRQLNRSQIGLTDTSLPFVGRDLWTGYELSWLKPSGVPEVAILEVEVPATSPNLIESKSFKLYLNGFNQSVFASDEAVAEQLQKDLSVCAGSAVQVRIYRLDEYSQRGISQWQGACIDQQEVNANCYDYNPSLLNSLCDPHGEIVTEHLHSHLLKSNCLITNQPDWGSVYIAYQGPKMCQKTLLQYIISFRNHNEFHEQCVERIFTDLMHYGHCHSLVVSARYTRRGGLDINPLRSTHQQQIVANEGELLQGRLVRQ

SEQ ID NO: 43874 - protein, 277 aa, Aliidiomarina taiwanensis
  REGION 1..277: note = tr|A0A432XAM3|A0A432XAM3_9GAMM NADPH-dependent 7-cyano-7-deazaguanine reductase OS=Aliidiomarina taiwanensis OX=946228 GN=queF PE=3 SV=1
MPTNKPMDQLSLGKATEYPQHYNPQLLQAVPRSLNREQLGLTNQALPFQGVDIWTAYEVSWLNTKGLPQVAIAEVEVPADSPYLIESKSFKLYLNSLNQHAIADKNMLQTLLEKDLSHCAGEPVQVRLYALAEYAAKGVHTPQGHCIDQQDIQIEHFHYNPTVLAIESQQVVTESLYSDLLKSNCLITEQPDWGTLHIEYSGPQINRESLLRYIVGFRNHNEFHEQCVERIYMDMMTHLHPLLLTVQARYTRRGGLDINPLRTNFKKSNTLSRTVRQ

SEQ ID NO: 43875 - protein, 283 aa, unidentified
  source 1..283: note = Aliiglaciecola lipolytica
  REGION 1..283: note = tr|K6WY14|K6WY14_9ALTE NADPH-dependent 7-cyano-7-deazaguanine reductase OS=Aliiglaciecola lipolytica E3 OX=1127673 GN=queF PE=3 SV=1
MTNKTDEIVKSSQQLKNLTLGKSVEYIQTYSPGLLQAVPRSISRDAIGLTGKLPFHGDDIWNGYELSWLNSRGKPQIALMKCVVPFDSPNLIESKSFKLYLNSFNQTKVKSVETLSAMLQKDLTACAGRKVQVKVILPSEFADQKIENLPGLNIDDLDIEFTEYNLEPSVLRTSNNHVDETLNSNLLKSNCLITNQPDWGSVMIRYAGPQINHESLLRYLVSFRMHNEFHEQCVERIFEDISQYCHSTKLTVYARYTRRGGLDINPFRSNFEATYDLARQARQ

SEQ ID NO: 43876 - protein, 283 aa, unidentified
  source 1..283: note = Aliiglaciecola sp.
  REGION 1..283: note = tr|A0A553L1A8|A0A553L1A8_9ALTE NADPH-dependent 7-cyano-7-deazaguanine reductase OS=Aliiglaciecola sp. M165 OX=2593649 GN=queF PE=3 SV=1
MTKDLSKTFSKNDPLSALSLGKPVEYSDQYNPELLQPVPRALSRDEIGLSADLPFHGEDLWTAYELSWLNSKNKPQVAILECTVPYDSPNLIESKSFKLYLNSFNQTKVASHQVLQSMLQRDLSACAGRNVQVGLILPNQFNKLDIEDLQGVCIDELDIEINNFELTPEILSTGSNDVSETLMSNLLKSNCLITNQPDWASVLIKYEGPQIDRENLLRYLISFRMHNEFHEQCVERIFCDIKQYCAPNKLSVYARYTRRGGLDINPFRSDFEHQYTRVRQARQ

SEQ ID NO: 43877 - protein, 144 aa, unidentified
  source 1..144: note = Aliikangiella marina
  REGION 1..144: note = tr|A0A545TI92|A0A545TI92_9GAMM 7-cyano-7-deazaguanine reductase OS=Aliikangiella marina; OX = 1712262 GN=FLL45_03065 PE=4 SV=1
MGSNIKTYEAIDSSLLIALPNPSNQAYEINIKIPEFTFLGVQEQPDFATFYLTFYPKDKIIELKALKHYVYQLRDIVVSYERLINIFYDHLIEVYKPERLRVVMNCNPRGGISSKLTIDSDWKSRGGEEKYRDWQDVNEWHRLD

SEQ ID NO: 43878 - protein, 291 aa, unidentified
  source 1..291: note = Aliikangiella marina
  REGION 1..291: note = tr|A0A545T2X2|A0A545T2X2_9GAMM NADPH-dependent 7-cyano-7-deazaguanine reductase OS=Aliikangiella marina; OX = 1712262 GN=queF PE=3 SV=1
MPKVKSSPLSRYPNPIRAALKMSEIPLGKSTQYISVYTPELLFPILRSEKRDELDNRFLDFKGKDIWNAFEISWLNPKGLPKIAIGVFEFDAGTPKIIESKSFKLYLNSFNQSRFSSLAEVQSIMAKDLSAACGGEVSVELIEPANFNRNAISQLEGEVIDDIDIEIAEYAYNPSLLANSTSDEHTSEVLVSHLLKSNCLITSQPDWASIQIRYTGSKIDRAKLLAYLISFRSHNEFHEQCVERIFADIKSLCAPEKLTVYARYTRRGGLDINPWRSDFELDIENVRLARQ

SEQ ID NO: 43879 - protein, 274 aa, unidentified
  source 1..274: note = Aliikangiella sp.
  REGION 1..274: note = tr|A0A545TSU6|A0A545TSU6_9GAMM NADPH-dependent 7-cyano-7-deazaguanine reductase OS=Aliikangiella sp. M105; OX = 2592383 GN=queF PE=3 SV=1
MTVVTENPLGKPTLYISQYSPELLFPIPRSEKRDELDSRFLQFNGEDVWNAYEISWLNPKGLPQVAIAEFRVSAGSEFIVESKSFKLYLNSFNQTSFESSEKVAAILTTDLSRATGKPVSVKLCSPQEFDLFAVSEFNGELIDHQDIEIDNYDYQPELLINACRPDSLVEETLVSHLLKSNCLITSQPDWASIQIRYFGPQIDRAKLLAYLVSFRSHNEFHEQCVERIFCDLKKFCEPQKLSVYARYTRRGGLDINPWRSDFEVKMTNTRLARQ

SEQ ID NO: 43880 - protein, 145 aa, unidentified
  source 1..145: note = Aliikangiella sp.
  REGION 1..145: note = tr|A0A545UA88|A0A545UA88_9GAMM 7-cyano-7-deazaguanine reductase OS=Aliikangiella sp. M105; OX = 2592383 GN=FLL46_15820 PE=4 SV=1
MSSKLKTYQEIHKDMLVALPNPSSQAYEINIKIPEFTFLGVQEQPDFATIFLTMYPGPKIIELKALKLYVYQLRDIVVSYERLINIFYDHLIEVYQPERLRMVMNCNPRGGISSRLTIDSDWKSRGGNEKYKDWMPDVDEWQRLD

SEQ ID NO: 43881 - protein, 154 aa, unidentified
  source 1..154: note = Aliiroseovarius crassostreae
  REGION 1..154: note = tr|A0A0P7I5K0|A0A0P7I5K0_9RHOB NADPH-dependent 7-cyano-7-deazaguanine reductase OS=Aliiroseovarius crassostreae OX=154981 GN=queF PE=3 SV=1
MTDSIYANLKQLGGDTVMPNSPEEAVLERVQNPQADTAYNVRFTAPEFTSLCPMTGQPDFAHLVIDYVPGDWLVESKSLKLFLGAFRNHGAFHEDCTVSIGRRLHEFLDPQWLRIGGYWYPRGGIPIDVFWQSGPKPDSVWIPDQGVPPYRGRG

SEQ ID NO: 43882 - protein, 281 aa, Aliivibrio finisterrensis
  REGION 1..281: note = tr|A0A4Q5KEP5|A0A4Q5KEP5_9GAMM NADPH-dependent 7-cyano-7-deazaguanine reductase OS=Aliivibrio finisterrensis OX=511998 GN=queF PE=3 SV=1
MTKYTNADELKSLTLGQKTEYKHNYEPELLQAVPRSLNRDDLDLGNELPFQGCDVWTLYELSWLNQNGLPQVAVGDVTLPATSPNLVESKSFKLYLNSFNQTKFASWDDVTSTLIKDLSACAGGEVTVEIHPVQAYSQQPIVDMTGECIDNQDIVIDNYEFDAEYLESSTSDDVVEETLHSHLLKSNCLITNQPDWGSVEISYTGNKIDREKLLRYLISFRQHNEFHEQCVERIYTDIMKFCKPNSLTVFARYTRRGGLDINPFRSSHLEKPEHNLRLARQ

SEQ ID NO: 43883 - protein, 281 aa, Aliivibrio finisterrensis
  REGION 1..281: note = tr|A0A4Q5KY34|A0A4Q5KY34_9GAMM NADPH-dependent 7-cyano-7-deazaguanine reductase OS=Aliivibrio finisterrensis OX=511998 GN=queF PE=3 SV=1
MTKYTNADELKSLTLGQKTEYKHNYEPELLQAVPRSLNRDDLDLGNELPFQGCDVWTLYELSWLNQNGLPQVAVGDVTLPATSPNLVESKSFKLYLNSFNQTKFASWDDVTSTLIKDLSACAGGEVKVEIHPVQAYSQQPIVDMTGECIDNQDIVIDNYEFDAEYLESSTSDDVVEETLHSHLLKSNCLITNQPDWGSVEISYTGNKIDREKLLRYLISFRQHNEFHEQCVERIYTDIMKFCKPNSLTVFARYTRRGGLDINPFRSSHLEKPEHNLRLARQ

SEQ ID NO: 43884 - protein, 281 aa, Aliivibrio fischeri
  REGION 1..281: note = sp|Q5E7A3|QUEF_ALIF1 NADPH-dependent 7-cyano-7-deazaguanine reductase OS=Aliivibrio fischeri (strain ATCC 700601 / ES114) OX=312309 GN=queF PE=3 SV=1
MTKYTNADELKSLTLGQKTEYKHTYEPELLQAVPRSLNRDDLALGDELPFVGCDVWTLYELSWLNQNGLPQVAVGEVALPATSPNLVESKSFKLYLNSFNQTKFTSWDEVKETLVKDLSACAGETVKVDIFPVQRYSQQPIVDMQGECIDDQDIIIDDYEFNAAYLESSTSDVNIEETLHSHLLKSNCLITNQPDWGSVEIQYKGKKIDREKLLRYLISFRQHNEFHEQCVERIYTDIMKYCAPESLTVFARYTRRGGLDINPFRSSHLLAPKDNLRLARQ

SEQ ID NO: 43885 - protein, 281 aa, Aliivibrio fischeri
  REGION 1..281: note = tr|A0A510UPL6|A0A510UPL6_ALIFS NADPH-dependent 7-cyano-7-deazaguanine reductase OS=Aliivibrio fischeri; OX = 668 GN=queF PE=3 SV=1
MTKYTNADELKSLTLGQKTEYKHTYEPELLQAVPRSLNRDDLALGDELPFVGCDVWTLYELSWLNQNGLPQVAVGEVALPATSPNLVESKSFKLYLNSFNQTKFTSWDEVKETLVKDLSACAGETVKVDVFPVQRYSQQPIVDMQGECIDDQDIIIDDYEFNAAYLESSTSDVCIEETLHSHLLKSNCLITNQPDWGSVEIQYKGKKIDREKLLRYLISFRQHNEFHEQCVERIYTDIMKYCAPESLTVFARYTRRGGLDINPFRSSHLLAPKDNLRLARQ

SEQ ID NO: 43886 - protein, 281 aa, Aliivibrio logei
  REGION 1..281: note = tr|A0A1B9NYR5|A0A1B9NYR5_ALILO NADPH-dependent 7-cyano-7-deazaguanine reductase OS=Aliivibrio logei; OX = 688 GN=queF PE=3 SV=1
MTKYTNADELKSLTLGQKTEYKHSYEPELLQAVPRSLNRDDLALGDELPFVGCDVWTLYELSWLNQNGLPQVAIGDVVLPATSPNLVESKSFKLYLNSFNQTKFSSWEDVTSTLIKDLSVCAGEDVMVNIHPVQAYSQQPIVDMQGECIDNQDIVINSYEFDANYLESSTSEKMVNEVLHSHLLKSNCLITNQPDWGSVEINYEGNKIDREKLLRYLISFRQHNEFHEQCVERIYTDIMKFCSPKSLTVFARYTRRGGLDINPFRSSHLVKPEHNRRLARQ

SEQ ID NO: 43887 - protein, 281 aa, Aliivibrio salmonicida
  REGION 1..281: note = sp|B6EGG7|QUEF_ALISL NADPH-dependent 7-cyano-7-deazaguanine reductase OS=Aliivibrio salmonicida (strain LFI1238) OX=316275 GN=queF PE=3 SV=1
MTKYTNADELKSLTLGQKTEYKHSYEPELLQAVPRSLNRDDLALGDELPFVGCDVWTLYELSWLNQNGLPQVAIGDVVLPATSPNLVESKSFKLYLNSFNQTKFSSWEDVTSTLIKDLSVCAGEEVMVNIHPVQAYSQQPIVDMQGECIDNQDIVIDSYEFDANYLESSTSEKMVNEVLHSHLLKSNCLITNQPDWGSVEINYEGNKIDHEKLLRYLISFRQHNEFHEQCVERIYTDIMKFCSPKSLTVFARYTRRGGLDINPFRSSHLIKPEHNLRLARQ

SEQ ID NO: 43888 - protein, 281 aa, Aliivibrio sifiae
  REGION 1..281: note = tr|A0A2S7XKE5|A0A2S7XKE5_9GAMM NADPH-dependent 7-cyano-7-deazaguanine reductase OS=Aliivibrio sifiae; OX = 566293 GN=queF PE=3 SV=1
MTKYTNADELKSLTLGQKTEYKHSYEPELLQAVPRSLNRDDLELGDELPFVGCDVWTLYELSWLNQNGLPQVAIGDVTLPATSPNLVESKSFKLYLNSFNQTKFSSWDEVTRTLIKDLSACAGGDVKVEIHPVQAYSQQPIIDMKGECIDNQDIIIDDYEFDADYLQSSTLEENVSETLHSHLLKSNCLITNQPDWGSVEINYDGKKIDREKLLRYLISFRQHNEFHEQCVERIYTDIMKYCKPGSLTVYARYTRRGGLDINPFRSSHLAKPEHNLRLARQ

SEQ ID NO: 43889 - protein, 281 aa, Aliivibrio sifiae
  REGION 1..281: note = tr|A0A2S7XBF9|A0A2S7XBF9_9GAMM NADPH-dependent 7-cyano-7-deazaguanine reductase OS=Aliivibrio sifiae; OX = 566293 GN=queF PE=3 SV=1
MTKYTNADELKSLTLGQKTEYKHSYEPELLQAVPRSLNRDDLELGDELPFVGCDVWTLYELSWLNQNGLPQVAVGDVTLPATSPNLVESKSFKLYLNSFNQTKFSSWNEVTRTLIQDLSACAGGEVTVEMHPVQAYSQQPIVDMQGECIDNQDIVIDDYEFDAEYLQSSTLEEMVSETLHSHLLKSNCLITNQPDWGSVEINYEGKKIDREKLLRYLISFRQHNEFHEQCVERIYTDIMKYCKPNSLTVFARYTRRGGLDINPFRSSYLAKPEHNLRLARQ

SEQ ID NO: 43890 - protein, 281 aa, Aliivibrio sp.
  REGION 1..281: note = tr|A0A1B9PLM7|A0A1B9PLM7_9GAMM NADPH-dependent 7-cyano-7-deazaguanine reductase OS=Aliivibrio sp. 1S175; OX = 1840087 GN=queF PE=3 SV=1
MTKYTNADELKSLTLGQKTEYKHSYEPELLQAVPRSLNRDDLKLGDELPFVGCDVWTLYELSWLNQSGLPQVAVGDVVLPATSPNLVESKSFKLYLNSFNQTKFSSWDEVTRTLIKDLSACAGEEVKVEIHPVQAYSQQPIVDMQGECIDNQDIIIDSYEFDANYLESSTSEEMVNEVLHSHLLKSNCLITNQPDWGSVEINYDGKKIDREKLLRYLISFRQHNEFHEQCVERIYTDIMKFCKPTSLTVFARYTRRGGLDINPFRSSHLAKPEHNLRLARQ

SEQ ID NO: 43891 - protein, 281 aa, Aliivibrio wodanis
  REGION 1..281: note = tr|A0A090KGC4|A0A090KGC4_9GAMM NADPH-dependent 7-cyano-7-deazaguanine reductase OS=Aliivibrio wodanis; OX = 80852 GN=queF PE=3 SV=1
MTKYTNADELKSLTLGQKTEYKHSYEPELLQAVPRSLNRDDLDLSNELPFVGCDVWTLYELSWLNQNGLPQVAVGDVTLPATSPNLVESKSFKLYLNSFNQTKFSSWDDVTRTLIKDLSACAGGNVKVEIHPVQTYSQQPIVDMTGECIDNQDIVIDNYEFDAEYLQSSISEEFVEETLHSHLLKSNCLITNQPDWGSVEISYVGNKIDREKLLRYLISFRQHNEFHEQCVERIYTDIMKFCKPSSLTVFARYTRRGGLDINPFRSSHLAEPEHNLRLARQ

SEQ ID NO: 43892 - protein, 279 aa, Alishewanella aestuarii
  REGION 1..279: note = tr|J1Q4X5|J1Q4X5_9ALTE NADPH-dependent 7-cyano-7-deazaguanine reductase OS=Alishewanella aestuarii B11 OX=1197174 GN=queF PE=3 SV=1
MTKSHTDVLAELSLGKITEYVDQYDAALLQAVPRSLGREAIGLSQQLPFVGQDIWHGYELSWLNSKGKPQVALATFVVPFDSPNLIESKSFKLYLNSFNQSRFTDVGQVYQTMQGDLSACAGKTVKVSLHNVSEIMTFQPTWIPGVCLDELDISVEQYQYQPALLALDPARGQVEEKLHSHLLKSNCLITSQPDWASVFIHYRGTALSHEALLKYLISFRSHNEFHEQCVERIYNDIWQLAKPDFLAVYARYTRRGGLDINPLRSSEPYSPPNIRLSRQ

SEQ ID NO: 43893 - protein, 279 aa, Alishewanella agri
  REGION 1..279: note = tr|I9P2S5|I9P2S5_9ALTE NADPH-dependent 7-cyano-7-deazaguanine reductase OS=Alishewanella agri BL06 OX=1195246 GN=queF PE=3 SV=1
MTKSHSDVLAELSLGKITDYVDQYDATLLQAVPRSLGREAIGLGQQLPFVGQDIWHGYELSWLNSKGKPQVALATFVVPYDSPNLIESKSFKLYLNSFNQSRFADVGQVYQTMQRDLSACAGGNVKVSLHNVSEIMTFQPTWIPGICLDELDIEVDQYQYQASLLQLDPARGQVDEKLHSHLLKSNCLITSQPDWASVFIHYRGTALSHEALLKYLISFRSHNEFHEQCVERIYNDIWQLAKPDFLAVYARYTRRGGLDINPLRSSEPYSPPNIRLSRQ

SEQ ID NO: 43894 - protein, 279 aa, Alishewanella jeotgali
  REGION 1..279: note = tr|H3ZHC5|H3ZHC5_9ALTE NADPH-dependent 7-cyano-7-deazaguanine reductase OS=Alishewanella jeotgali KCTC 22429 OX=1129374 GN=queF PE=3 SV=1
MTRSHTDVLAELSLGKITEYVDQYDAALLQAVPRSLGRDAIGLGQQLPFVGQDIWHGYELSWLNSKGKPQVALATFVVPFDSPNLIESKSFKLYLNSFNQSRFADVGQVYQTMQRDLSACAGKTVKVSLHNVSEIMTFQPTWIPGVCLDELDISVDQYQYQPALLALDPARGQVEEKLHSHLLKSNCLITSQPDWASVFIHYRGAALSHEALLKYLISFRSHNEFHEQCVERIYNDIWQLAKPDFLAVYARYTRRGGLDINPLRSSEPYSPPNIRLSRQ

SEQ ID NO: 43895 - protein, 279 aa, Alishewanella sp.
  REGION 1..279: note = tr|A0A1C2C3T3|A0A1C2C3T3_9ALTE NADPH-dependent 7-cyano-7-deazaguanine reductase OS=Alishewanella sp. HH-ZS OX=1856684 GN=queF PE=3 SV=1
MTKSHTDVLAELSLGKITEYVDQYDAALLQAVPRSLGREAIGLGQQLPFVGQDIWHGYELSWLNSKGKPQVALATFVVPFDSPNLIESKSFKLYLNSFNQSRFADVGQVYQTMQRDLSACAGKTVKVSLHNVSEIMTFQPTWIPGVCLDELDISVDQYQYQPALLALDPARGQVEEKLHSHLLKSNCLITSQPDWASVFIHYRGTALSHEALLKYLISFRSHNEFHEQCVERIYNDIWQLAKPDFLAVYARYTRRGGLDINPLRSSEPYSPPNIRLSRQ

SEQ ID NO: 43896 - protein, 279 aa, Alishewanella sp.
  REGION 1..279: note = tr|A0A259NYU7|A0A259NYU7_9ALTE NADPH-dependent 7-cyano-7-deazaguanine reductase OS=Alishewanella sp. 34-51-39 OX=1970316 GN=queF PE=3 SV=1
MTKSHSDVLAELSLGKITDYVDQYDATLLQAVPRSLGREAIGLGQELPFVGQDIWHGYELSWLNSKGKPQVALATFVVPYDSPNLIESKSFKLYLNSFNQSRFADVGQVYQTMQRDLSACAGGNVKVSLHNVSEIMTFQPTWIPGICLDELDIEVDQYQYQASLLQLDPARGQVDEKLHSHLLKSNCLITSQPDWASVFIHYRGTALSHEALLKYLISFRSHNEFHEQCVERIYNDIWQLAKPDFLAVYARYTRRGGLDINPLRSSEPYSPPNIRLSRQ

SEQ ID NO: 43897 - protein, 153 aa, Alistipes sp.
  REGION 1..153: note = tr|R6XRA2|R6XRA2_9BACT NADPH-dependent 7-cyano-7-deazaguanine reductase OS=Alistipes sp. CAG:435; OX = 1262695 GN=queF PE=3 SV=1
MAEGRELEGLQSLGKKTEYKSDYAPEVLETFVNKHQDNDYWVRFNCPEFTSLCPITGQPDFAEIRISYIPDIRMVESKSLKLYLFSFRNHGDFHEDCVNKIMKDLIKLMDPKYIEVTGLFTPRGGISIYPYANYGRPGTKYEALAQQRFATHE

SEQ ID NO: 43898 - protein, 153 aa, Alistipes sp.
  REGION 1..153: note = tr|R5BAZ3|R5BAZ3_9BACT NADPH-dependent 7-cyano-7-deazaguanine reductase OS=Alistipes sp. CAG:514; OX = 1262696 GN=queF PE=3 SV=1
MAEGRESEGLKSLGRKTEYRSDYAPEVLETFVNKHQDNDYWVRFNCPEFTSLCPITGQPDFAEIRISYIPDVRMVESKSLKLYLFSFRNHGDFHEDCVNKIMKDLIKLMDPKYIEVTGLFTPRGGISIHPYANYGRPGTKYETLAERRFATHE

SEQ ID NO: 43899 - protein, 141 aa, unidentified
  source 1..141: note = Aliterella atlantica
  REGION 1..141: note = tr|A0A0D8ZV23|A0A0D8ZV23_9CYAN NADPH-dependent 7-cyano-7-deazaguanine reductase OS=Aliterella atlantica CENA595 OX=1618023 GN=queF PE=3 SV=1
MQELSEQSSAETQSPTVELKYGEREIETGKLITFPNPRVGRRYDIHVTLPEFTCKCPFSGYPDFATIYITYVPDKSVVELKAIKLYINSYRDRYISHEESINQILDDFVAACDPLEAYVKGDFSPRGNVHTVIEVRHQKPV

SEQ ID NO: 43900 - protein, 135 aa, Alkalibacillus haloalkaliphilus
  REGION 1..135: note = tr|A0A511W017|A0A511W017_9BACI NADPH-dependent 7-cyano-7-deazaguanine reductase OS=Alkalibacillus haloalkaliphilus OX=94136 GN=queF PE=3 SV=1
MSENYYLPRSGPMPRPDSVKEGREILKDEAFEAPNVQTITFKALEFTAVCPKTGQPDFGQVEITYTPNEKCIESKSLKFYLWSYRDEGAYCESLAAQIADDFVYAIDPLNVEVTVYQSARGGIELTTKAVRNRDE

SEQ ID NO: 43901 - protein, 165 aa, Alkalibacterium olivapovliticus
  REGION 1..165: note = tr|A0A2T0W8B6|A0A2T0W8B6_9LACT NADPH-dependent 7-cyano-7-deazaguanine reductase OS=Alkalibacterium olivapovliticus OX=99907 GN=queF PE=3 SV=1
MTGRNEEELNGVTHLGNQQVEYKMDYAPEVLESFDNKHPENDYFVKFNCPEFTSLCPITGQPDFATIYISYVPGEKMVESKSLKLYLFSFRNHGDFHEDCMNIIMKDLIKLMDPKYIEVWGKFTPRGGISIDPYCNYGKPGTRFEEVAWNRLANHDMYPETIDNR

SEQ ID NO: 43902 - protein, 165 aa, Alkalibacterium pelagium
  REGION 1..165: note = tr|A0A1H7M2X2|A0A1H7M2X2_9LACT NADPH-dependent 7-cyano-7-deazaguanine reductase OS=Alkalibacterium pelagium OX=426702 GN=queF PE=3 SV=1
MTGRNENELTGLSHLGNQQVSYSMDYAPEVLESFDNKHPDNDYFVKFNCPEFTSLCPITGQPDFATIYISYVPGEKMVESKSLKLYLFSFRNHGDFHEDCMNIIMKDLIKLMDPKYIEVWGKFTPRGGISIDPYCNYGKPGTRWEDVAWNRLANHDLYPETIDNR

SEQ ID NO: 43903 - protein, 165 aa, Alkalibacterium sp.
  REGION 1..165: note = tr|A0A011RQA4|A0A011RQA4_9LACT NADPH-dependent 7-cyano-7-deazaguanine reductase OS=Alkalibacterium sp. AK22 OX=1229520 GN=queF PE=3 SV=1
MSGRNEKELTGLSHLGSQQVSYSMTYAPEVLESFDNKHPDNDYFVKFNCPEFTSLCPITSQPDFATIYISYVPGEKMVESKSLKLYLFSFRNHGDFHEDCMNIIMKDLIKLMDPKYIEVWGKFTPRGGISIDPYCNYGKPRTRFEEVAWNRLANHDLYPETIDNR

SEQ ID NO: 43904 - protein, 165 aa, Alkalibacterium thalassium
  REGION 1..165: note = tr|A0A1G9EG57|A0A1G9EG57_9LACT NADPH-dependent 7-cyano-7-deazaguanine reductase OS=Alkalibacterium thalassium OX=426701 GN=queF PE=3 SV=1
MTGRNENELTGLSHLGSQQVSYSMDYAPEVLESFDNKHPDNDYFVKFNCPEFTSLCPITGQPDFATIYISYVPGEKMVESKSLKLYLFSFRNHGDFHEDCMNIIMKDLIKLMDPKYIEVWGKFTPRGGISIDPYCNYGKPGTRWEDVAWNRLANHDLYPETIDNR

SEQ ID NO: 43905 - protein, 162 aa, unidentified
  source 1..162: note = Alkalicoccus halolimnae
  REGION 1..162: note = tr|A0A5C7F9T8|A0A5C7F9T8_9BACI NADPH-dependent 7-cyano-7-deazaguanine reductase OS=Alkalicoccus halolimnae OX=1667239 GN=queF PE=3 SV=1
MAHNREEEVNLLGNMNVEYKMDYDPSILESFENRHPNRDYFVKFNCPEFTSLCPKTGQPDFATIYISYIPDEKMVESKSLKLYLFSFRNHGDFHEDCMNNILNDLVDLMDPRYIEVWGKFTPRGGISIDPYVNYGKKGTKYEKMAEHRLMNHDLYPEKIDHR

SEQ ID NO: 43906 - protein, 162 aa, unidentified
  source 1..162: note = Alkalicoccus saliphilus
  REGION 1..162: note = tr|A0A2T4U2Y1|A0A2T4U2Y1_9BACI NADPH-dependent 7-cyano-7-deazaguanine reductase OS=Alkalicoccus saliphilus OX=200989 GN=queF PE=3 SV=1
MAHNRDEEVDLLGNTNVDYKMDYDPSILESFENRHQNRDYFVKFNCPEFTSLCPKTGQPDFATIYISYIPEKDMVESKSLKLYLFSFRNHGDFHEDCMNTIMNDLIELMDPRYIEVLGKFTPRGGISIDPYTNYGRPGTKYEKMAEHRMMNHDLYPENIDHR

SEQ ID NO: 43907 - protein, 130 aa, Alkalilimnicola ehrlichii
  REGION 1..130: note = tr|A0A3E0WX20|A0A3E0WX20_9GAMM NADPH-dependent 7-cyano-7-deazaguanine reductase OS=Alkalilimnicola ehrlichii OX=351052 GN=queF PE=3 SV=1
MSTQPSTELETFANPTPERDYTIRIRIPEFTCLCPKTGQPDFATLYLDYIPEARCVELKALKLYIWSFRDRGAFHEAITNEILSDLVRALEPRYMRLRAEFNVRGGIYTDVVAEHRAEGWTPPIPVQLPF

SEQ ID NO: 43908 - protein, 129 aa, Alkalilimnicola ehrlichii
  REGION 1..129: note = sp|Q0AAV5|QUEF_ALKEH NADPH-dependent 7-cyano-7-deazaguanine reductase OS=Alkalilimnicola ehrlichii (strain ATCC BAA-1101 / DSM 17681 / MLHE-1); OX = 187272 GN=queF PE=3SV=1
MSTQPSKDLETFPNPRPERDFVLHMRIPEFTCLCPKTGQPDFATIHLDYVPDERCVELKSLKLYMWSFRDQGAFHEAITNEILDDLVRATEPRYMKVTAEFYVRGGIYTTVVAEHRKPGWAPAPKVELA

SEQ ID NO: 43909 - protein, 279 aa, Alkalimonas amylolytica
  REGION 1..279: note = tr|A0A1H4FAC3|A0A1H4FAC3_ALKAM NADPH-dependent 7-cyano-7-deazaguanine reductase OS=Alkalimonas amylolytica OX=152573 GN=queF PE=3 SV=1
MTKLEPELQQQLSLGKVTGYASDYAPELLQAVPRSVGRNELQLTAELPFLGQDIWHAYELSWLNHKGKPVVALATFVVPFDSPNLIESKSFKLYLNSLNQTRFADLGQVFRLLQQDLSACAGAKVDITLHNVNELQPFQPTWIQGSCLDDLDIEVSEYLYQPKQLKLKADATLRDEKVFSHLLKSNCLITNQPDWASVFIHYRGKAICHESLLRYLIGFRQHNEFHEQCVERIFTDIWRQCQPEFLAVYARYTRRGGLDINPLRSSEPYPVPVIRLTRQ

SEQ ID NO: 43910 - protein, 159 aa, unidentified
  source 1..159: note = Alkalinema sp.
  REGION 1..159: note = tr|A0A251WN44|A0A251WN44_9CYAN NADPH-dependent 7-cyano-7-deazaguanine reductase OS=Alkalinema sp. CACIAM 70d OX=1934309 GN=queF PE=3 SV=1
MVEPTTEANQATTMKYGEREIEEGKLITFPNPRPGREYNISITLPEFTCKCPFSGYPDFATIHVNYVPDEKVVELKAIKLYVNGYRDKYISHEESVNQILDDLVAACDPLEMTVKGDFQPRGNVHTVVEVQHRKAHRNSNATIEPAEKGKKGKKDKGKK

SEQ ID NO: 43911 - protein, 166 aa, unidentified
  source 1..166: note = Alkaliphilus metalliredigens
  REGION 1..166: note = sp|A6TWD9|QUEF_ALKMQ NADPH-dependent 7-cyano-7-deazaguanine reductase OS=Alkaliphilus metalliredigens (strain QYMF) OX=293826 GN=queF PE=3 SV=1
MMSGRTDEELKGVTLLGNQSVKYQYQYNPDILESFGNKHPENDYFVKLNFPEFTSLCPKTGQPDFAAIYISYVPDKLLVESKSLKLYLFSFRNQGDFHEDCINIIMKDLIRLMDPKYIEVWGKFTPRGGISIDPYCNHGKKGTKWETMAEKRIQWHDMNPENINNR

SEQ ID NO: 43912 - protein, 129 aa, Alkalispirillum mobile
  REGION 1..129: note = tr|A0A498C6Q3|A0A498C6Q3_9GAMM NADPH-dependent 7-cyano-7-deazaguanine reductase OS=Alkalispirillum mobile; OX = 85925 GN=queF PE=3 SV=1
MSTQPSKELETFPNPRPERDFVLHMRVPEFTCLCPKTGQPDFATIYLDYVPDERCVELKSLKLYMWSFRDQGAFHEAITNEMLDDLVRATAPRYMKVTAEFYVRGGIYTTVVAEHRKPGWQPEPKVELA

SEQ ID NO: 43913 - protein, 293 aa, unidentified
  source 1..293: note = Alkalitalea saponilacus
  REGION 1..293: note = tr|A0A1T5H8T7|A0A1T5H8T7_9BACT 7-cyano-7-deazaguanine reductase OS=Alkalitalea saponilacus OX=889453 GN=SAMN03080601_02138 PE=4 SV=1
MQPIEAKILGQQIAYPQKYSPEILVAVPRSLNREIYKIDDNDLPFKGFDIWHAYELSFLTTKGLPVTGVLKLKYPSNSTFLVESKSLKLYLNGFNMERFGNDSETGVEEVVKIIKTDLSGLLKTDVETAFFNESLGLTSHFDFHDFKLLETLDEIQNIEFNAFNETPELLKPSDKLSGKIKVATHLLRSNCKITNQPDWGSAFILMKAEQLPELTGLLQYLVSIRNENHFHEEICEMIYNRLWDKFSPEELMVACIYTRRGGIDICPVRANNEELFPKFLCNAKELSAKMLRQ

SEQ ID NO: 43914 - protein, 146 aa, unidentified
  source 1..146: note = Alkalitalea saponilacus
  REGION 1..146: note = tr|A0A1T5F851|A0A1T5F851_9BACT NADPH-dependent 7-cyano-7-deazaguanine reductase OS=Alkalitalea saponilacus OX=889453 GN=SAMN03080601_01515 PE=3 SV=1
MERKTLTYKDIDASILKSLPNPTGEAYEIKIKIPEFTFLGVKEQPDFADVFLTFYPKKKIIELKALKQYVYHLRNITVSYERLINVFYDHIMEAYEPERVRVVMVFNPRGGISSKLTIDSDWKVRGGEEKFGDWKNNMEDQWTVTL

SEQ ID NO: 43915 - protein, 272 aa, Alkanindiges illinoisensis
  REGION 1..272: note = tr|A0A4Y7XE54|A0A4Y7XE54_9GAMM NADPH-dependent 7-cyano-7-deazaguanine reductase OS=Alkanindiges illinoisensis OX=197183 GN=queF PE=3 SV=1
MSVEQSLLGQTTSYPTEYAPDILFPIARAPSRQAYAQINGIAQGMDWWHAFELSWLDLENKPQVAIGRLHIPASSEFLIESKSLKLYFNSLNFKNFASTQAFVDCVEQDLSRAANASVRLELYDADALQVSQPSGFCLDQLTPNGVSPHPHCSLLKLEQAADQQVIETSLYSHLLRSNCPVTGQPDWGTLFIRYEGTKPCYSSLLAYIISYRQHSGFHEQCVEQIFADIWQQLQPERLMVYAAYTRRGGLDINPCRVSDPAWLPSPIRLARQ

SEQ ID NO: 43916 - protein, 272 aa, Alkanindiges sp.
  REGION 1..272: note = tr|A0A1S8CVN3|A0A1S8CVN3_9GAMM NADPH-dependent 7-cyano-7-deazaguanine reductase OS=Alkanindiges sp. H1; OX = 1907941 GN=BKE30_08745 PE=3 SV=1
MSVEQSLLGQTTSYPTEYAPEILFPIARAPSRQAYATIHGIAQGMDWWHAFELSWMDLHNKPQVAIGRLHIPASSEFLIESKSLKLYFNSLNFKNFASTQAFIDCVEQDLSRIANASVRLELYDADALLVSQPVGFCLDPLVPDGFSVHPDRTLLKLDSSADRQVIETSLYSHLLRSNCPVTGQPDWGTLFIKYQGIKPCYSSLLAYIISYRQHSGFHEQCVEQIFADIWQQLQPERLMVYAAYTRRGGLDINPCRVSDLDWLPSPIRLARQ

SEQ ID NO: 43917 - protein, 163 aa, Allisonella histaminiformans
  REGION 1..163: note = tr|A0A1G5WDC1|A0A1G5WDC1_9FIRM NADPH-dependent 7-cyano-7-deazaguanine reductase OS=Allisonella histaminiformans OX=209880 GN=queF PE=3 SV=1
MEKREGLDELTLLGNQHTRYEYDYNPDYLERIPNKHKDRDYFIKFNCPEFTSLCPKTGQPDFATIYISYIPGDFMVESKSLKLYLFSFRNHGDFHEDCVNIIMDDLINLLQPRYIEVWGKFLPRGGLSIDPYCNHGMKGTKWEEFAAYRLREHDIYPETIHNR

SEQ ID NO: 43918 - protein, 170 aa, Allochromatium vinosum
  REGION 1..170: note = tr|Q1W3D3|Q1W3D3_ALLVI NADPH-dependent 7-cyano-7-deazaguanine reductase OS=Allochromatium vinosum; OX = 1049 GN=queF PE=3 SV=1
MFLEKRPRPARRRTKDYIIGAQPADRVDGRPIPVSSVESLFMPSAPSKSLETFPNPQPERDYTIRIRVPEFTCLCPKTGQPDFAELMLEYVPEQKCVELKALKTYVWSYRDEGAFHEAVTNRILGDLVEATAPRFMRLTAEFNVRGGIYTTVVAEHRAADWQPPVPVTLP

SEQ ID NO: 43919 - protein, 129 aa, Allochromatium vinosum
  REGION 1..129: note = tr|D3RVA4|D3RVA4_ALLVD NADPH-dependent 7-cyano-7-deazaguanine reductase OS=Allochromatium vinosum (strain ATCC 17899 / DSM 180 / NBRC 103801 / NCIMB 10441 / D) OX=57 2477 GN=queF PE=3 SV=1
MPSAPSKSLETFPNPQPERDYTIRIRVPEFTCLCPKTGQPDFAELMLEYVPEQKCVELKALKTYVWSYRDEGAFHEAVTNRILGDLVEATAPRFMRLTAEFNVRGGIYTTVVAEHRAADWQPPVPVTLP

SEQ ID NO: 43920 - protein, 129 aa, Allochromatium warmingii
  REGION 1..129: note = tr|A0A1H3DMG8|A0A1H3DMG8_ALLWA NADPH-dependent 7-cyano-7-deazaguanine reductase OS=Allochromatium warmingii OX=61595 GN=queF PE=3 SV=1
MPSAPSKSLETFPNPQPERDYTIRIRVPEFTCLCPKTGQPDFAELTLEYVPEQHCVELKSLKTYVWSYRDEGGFHEAVTNRILGDLVEATAPRFMRLTAEFNVRGGIYTTVVVEHRAADWQPPQPVMLP

SEQ ID NO: 43921 - protein, 154 aa, unidentified
  source 1..154: note = Alloprevotella rava
  REGION 1..154: note = tr|G5GA88|G5GA88_9BACT NADPH-dependent 7-cyano-7-deazaguanine reductase OS=Alloprevotella rava F0323 OX=679199 GN=queF PE=3 SV=1
MASNRENEGLNTLGRKTEYKSDYAPEVLESFVNKHPDNDYWVRFNCPEFTSLCPITGQPDFAEIRISYIPDVRMVESKSLKLYLFSFRNHGDFHEDCVNVIMKDLIKLMDPKYIEVTGLFTPRGGISIFPYANYGRKGTKYEKLAEYRLQQHDL

SEQ ID NO: 43922 - protein, 154 aa, unidentified
  source 1..154: note = Alloprevotella sp.
  REGION 1..154: note = tr|A0A3P1ZBS0|A0A3P1ZBS0_9BACT NADPH-dependent 7-cyano-7-deazaguanine reductase OS=Alloprevotella sp. OH1205_COT-284 OX=2491043 GN=queF PE=3 SV=1
MSSRETEGLQHLGSQGTQYPTDYAPELLESFVNKHQDNDYWVRFNCPEFTSLCPITGQPDFAEIRIAYIPDVRMVESKSLKLYLFSFRNHGDFHEDCVNVIMKDLIRLMDPKYIEVTGLFTPRGGISIYPYANYGRPGTKFEALAEHRLRQHDL

SEQ ID NO: 43923 - protein, 154 aa, unidentified
  source 1..154: note = Alloprevotella sp.
  REGION 1..154: note = tr|A0A496KK53|A0A496KK53_9BACT NADPH-dependent 7-cyano-7-deazaguanine reductase OS=Alloprevotella sp.; OX = 1872471 GN=queF PE=3 SV=1
MSQRETEGLQHLGSQGTQYPTDYAPEMLESFVNKHQENDYWVRFNCPEFTSLCPITGQPDFAEIRISYIPDVKMVESKSLKLYLFSFRNHGDFHEDCVNVIMKDLIRLMDPKYIEVTGLFTPRGGISIYPYANYGKPGTRYEELAAYRLQQHDL

SEQ ID NO: 43924 - protein, 160 aa, unidentified
  source 1..160: note = Alloprevotella tannerae
  REGION 1..160: note = tr|C9LKB0|C9LKB0_9BACT NADPH-dependent 7-cyano-7-deazaguanine reductase OS=Alloprevotella tannerae ATCC 51259 OX=626522 GN=queF PE=3 SV=1
MPHKNHKQMNRELDNLHALGQKTDYKMDYAPEVLEVFENKHPDNDYWVRFNCPEFTSLCPITGQPDFAELRISYMPDKRMVESKSLKLYLFSFRNHGDFHEDCVNVIMKDLIRLMDPKYIEVCGLFTPRGGISIFPYANYGRPGTKYEEMARHRLEQHDL

SEQ ID NO: 43925 - protein, 153 aa, unidentified
  source 1..153: note = Unknown
  REGION 1..153: note = tr|A0A1V1PTT7|A0A1V1PTT7_9PROT NADPH-dependent 7-cyano-7-deazaguanine reductase OS=alpha proteobacterium U9-1i OX=1605283 GN=queF PE=3 SV=1
MTSDPKGLSQLGGKAAIPASPDKAVLERAPNPHPGTLYLARFSAPEFTSICPVTGQPDFGILVIDYAPNDWIVESKSLKLFLQSFRNHGAFHEDCTVGVAKRIIDAIDPIWLRIGGYWNPRGGIPIDVFWQTGAAPEGLWLPEQGVGTYRGRD

SEQ ID NO: 43926 - protein, 146 aa, unidentified
  source 1..146: note = Unknown
  REGION 1..146: note = tr|A0A2A5XRU2|A0A2A5XRU2_9PROT NADPH-dependent 7-cyano-7-deazaguanine reductase OS=alpha proteobacterium MED-G09 OX=2007301 GN=queF PE=3 SV=1
MKHLGKQSKQPTSPNIKILDKVKNNNVGSNYVIRLIQPEFTCLCPITGQPDFAHIVIDYIPNKWIVESKSLKLFFNSYRDSKSFHENTTIEIVQSINKLLNPVWIRIGGYWYPRGGIPIDIFWQNKNPPKSAWVPEQEVTPYRGRG

SEQ ID NO: 43927 - protein, 155 aa, unidentified
  source 1..155: note = Alphaproteobacteria bacterium
  REGION 1..155: note = tr|A0A257HNU7|A0A257HNU7_9PROT NADPH-dependent 7-cyano-7-deazaguanine reductase OS=Alphaproteobacteria bacterium PA1 OX=2015569 GN=queF PE=3 SV=1
MSNSSIYEGLGTLGQDVRGYASPEEAVLERVANPHPGTAYLARFVAPEFTSLCPVTGQPDFAHLVIDYVPSDWLVESKSLKLFLTSFRNHGAFHEDCTVAIGKRLVELLAPTWLRIGGYWYPRGGIPIDVFYATGPAPEGVWIPDQGVPPYRGRG

SEQ ID NO: 43928 - protein, 156 aa, unidentified
  source 1..156: note = Alphaproteobacteria bacterium
  REGION 1..156: note = tr|A0A2N3DKG0|A0A2N3DKG0_9PROT NADPH-dependent 7-cyano-7-deazaguanine reductase OS=Alphaproteobacteria bacterium HGW-Alphaproteobacteria-13 OX=2013659 GN=queF; PE = 3 S V=1
MSDSTPAPLAPKHLGQSSELPASPQAAVLDYVPNPRAGELYLVRFAAPEFTSLCPVTGQPDFAHLVIDYAPDETIVESKSLKLFLGAFRNHAGFHEDCTVGIGRRLTDEMRPRWLRIGGYWYPRGGIPIDVFWQSGPPPEGLWLPDQGVAPYRGRG

SEQ ID NO: 43929 - protein, 149 aa, unidentified
  source 1..149: note = Alsobacter sp.
  REGION 1..149: note = tr|A0A2T1HXM3|A0A2T1HXM3_9RHIZ NADPH-dependent 7-cyano-7-deazaguanine reductase OS=Alsobacter sp. SH9; OX = 2109933 GN=queF PE=3 SV=1
MAIETTQLGKPSALPASPEEAVLDRVPNPHPDTLYLARFTAPEFTSICPVTGQPDFGILVIDYAPKGWLVESKSLKLYLNSFRNHGAFHEDCTVGIGKRLVELLEPQWLRIGGYWFPRGGIPIDVFWQTGEPPKSLWLPDQGVPPYRAR

SEQ ID NO: 43930 - protein, 153 aa, unidentified
  source 1..153: note = Altererythrobacter aquimixticola
  REGION 1..153: note = tr|A0A4T3F2P2|A0A4T3F2P2_9SPHN NADPH-dependent 7-cyano-7-deazaguanine reductase OS=Altererythrobacter aquimixticola OX=2489173 GN=queF PE=3 SV=1
MTDDTPQPLHLGQQSALPASPDEAVLDYVPNPRPGSLYLVRFAAPEFTSLCPVTGAPDFAHLVIDYAPGETIVESKSLKLFLGSFRNHNGFHEDVTVGIGERLFREMEPRWLRIGGYWYPRGGIPIDVFWQSGPPPEGLWLPDQGVAPYRGRG

SEQ ID NO: 43931 - protein, 155 aa, unidentified
  source 1..155: note = Altererythrobacter atlanticus
  REGION 1..155: note = tr|A0A0F7KT71|A0A0F7KT71_9SPHN NADPH-dependent 7-cyano-7-deazaguanine reductase OS=Altererythrobacter atlanticus OX=1267766 GN=queF PE=3 SV=1
MSNHSETGSPRHLGQQSALPESPESAELDYVPNPRAGSLYCIRFAAPEFTSLCPVTGQPDFAHLVIDYAPERTIVESKSLKLFLGSFRNHCGFHEDVTVGIGQRLFNEMEPRWLRIGGYWYPRGGIPIDVFWQSGTPPEGLWLPDQGVAPYRGRG

SEQ ID NO: 43932 - protein, 162 aa, Altererythrobacter dongtanensis
  REGION 1..162: note = tr|A0A1B2ADB6|A0A1B2ADB6_9SPHN NADPH-dependent 7-cyano-7-deazaguanine reductase OS=Altererythrobacter dongtanensis OX=692370 GN=queF PE=3 SV=1
MKRDSRQMRGMSDTPATMHLGQTSALPASPQEAVLDYVPNPRAGMLYLVRFAAPEFTSLCPVTGQPDFAHLVIDYAPGETIVESKSLKLFLGSFRNHCGFHEDVTVGIGQRLAEEMKPRWLRIGGYWYPRGGIPIDVFWQTGTPPEGLWVPEQGVQGYRGRG

SEQ ID NO: 43933 - protein, 152 aa, Altererythrobacter epoxidivorans
  REGION 1..152: note = tr|A0A0M4M8T2|A0A0M4M8T2_9SPHN NADPH-dependent 7-cyano-7-deazaguanine reductase OS=Altererythrobacter epoxidivorans OX=361183 GN=queF PE=3 SV=1
MSDTPETLHLGQTSALPASPEEAQLDYPANPRKGSLYLVRFAAPEFTSLCPVTGQPDFAHIVIDYAPGDTIVESKSLKLFLGSFRNHSGFHEDVTVGIGQRLVEEMKPKWLRIGGYWYPRGGIPIDVFWQTGAPPEGLWVPDQGVASYRGRG

SEQ ID NO: 43934 - protein, 152 aa, Altererythrobacter ishigakiensis
  REGION 1..152: note = tr|A0A562UV68|A0A562UV68_9SPHN NADPH-dependent 7-cyano-7-deazaguanine reductase OS=Altererythrobacter ishigakiensis OX=476157 GN=queF PE=3 SV=1
MSDQPSPQFLGKQTELPASPEQAQLDYVPNPREGTLYLVRFAAPEFTSLCPVTGQPDFAHLVIDYAPGNTIVESKSLKLFLGSFRNHNGFHEDVTVGIGQRLAAEMKPKWLRIGGYWYPRGGIPIDVFWQSGPIPEGLWVPEQGVQGYRGRG

SEQ ID NO: 43935 - protein, 152 aa, Altererythrobacter marensis
  REGION 1..152: note = tr|A0A0G3XAB0|A0A0G3XAB0_9SPHN NADPH-dependent 7-cyano-7-deazaguanine reductase OS=Altererythrobacter marensis OX=543877 GN=queF PE=3 SV=1
MSDTPGTLHLGQASTLPPSPEEARLDYVPNPRDEALYLVRFAAPEFTSLCPVTGQPDFAHLVIDYAPGKTIVESKSLKLYLGSFRNHCGFHEDVTVGIGQRLAAEMKPKWLRIGGYWYPRGGIPIDVFWQSGPPPEALWVPDQGVASYRGRG

SEQ ID NO: 43936 - protein, 156 aa, Altererythrobacter marensis
  REGION 1..156: note = tr|A0A2W5AG89|A0A2W5AG89_9SPHN NADPH-dependent 7-cyano-7-deazaguanine reductase OS=Altererythrobacter marensis OX=543877 GN=queF PE=3 SV=1
MDDTPDRPAAPLHLGQASTLPASPDAAVLDYVPNPRTGTLYLVRFAAPEFTSLCPVTGQPDFAHLVIDYAPGETIVESKSLKLFLGSFRNHAGFHEDVTVGIGQRLAEEMRPQWLRIGGYWYPRGGIPIDVFWQTGTPPAGLWVPDQGVQPYRGRG

SEQ ID NO: 43937 - protein, 154 aa, Altererythrobacter namhicola
  REGION 1..154: note = tr|A0A1C7DAJ2|A0A1C7DAJ2_9SPHN NADPH-dependent 7-cyano-7-deazaguanine reductase OS=Altererythrobacter namhicola OX=645517 GN=queF PE=3 SV=1
MSGKSDNAPRQLGQQTPLPGSPAEAELDYVPNPRPGTQYLIRFAAPEFTSLCPVTSQPDFAHIVIDYVPGETIVESKSLKLFLGSFRNHNGFHEDVTVGIGQRLFTEMQPEWLRIGGYWYPRGGIPIDIFWQSAAPPEGLWLPDQGVASYRGRG

SEQ ID NO: 43938 - protein, 151 aa, Altererythrobacter sp.
  REGION 1..151: note = tr|A0A1Q3MCN6|A0A1Q3MCN6_9SPHN NADPH-dependent 7-cyano-7-deazaguanine reductase OS=Altererythrobacter sp. 66-12 OX=1895714 GN=queF PE=3 SV=1
MSEQTPRVLGRAAELPASPEAAELDYVPNPRAGTLYLVRFAAPEFTSLCPITGQPDFAHLVIDYAPGETIVESKSLKLFLGAFRNHGGFHEDVTVGIGQRLFSEMQPRWLRIGGYWYPRGGIPIDVFWQSGAPPEGLWLPDQGVASYRGRG

SEQ ID NO: 43939 - protein, 152 aa, Altererythrobacter sp.
  REGION 1..152: note = tr|A0A2E1Y8S7|A0A2E1Y8S7_9SPHN NADPH-dependent 7-cyano-7-deazaguanine reductase OS=Altererythrobacter sp.; OX = 1872480 GN=queF PE=3 SV=1
MSDTVTPKFLGENSPLPASPEEAELDYVSNPRTGQLYMVRFAAPEFTSLCPVTGQPDFAHLVLDYAPDATIVESKSLKLFLGSFRNHCGFHEDVTVGIGQRLFEEMKPKWLRIGGYWYPRGGIPIDVFWQSGAAPDGLWVPDQGVSSYRGRG

SEQ ID NO: 43940 - protein, 156 aa, unidentified
  source 1..156: note = Altererythrobacter xiamenensis
  REGION 1..156: note = tr|A0A1Y6ELU3|A0A1Y6ELU3_9SPHN NADPH-dependent 7-cyano-7-deazaguanine reductase OS=Altererythrobacter xiamenensis OX=1316679 GN=queF PE=3 SV=1
MSDTPPKTPDTLHLGQTSSLPASPEEAKLDYVPNPRSGALYLVRFAAPEFTSLCPVTGAPDFAHLVIDYAPGETIVESKSLKLFLGAFRNHNGFHEDVTVGIGQRLAEEMQPRWLRIGGYWYPRGGIPIDVFWQTGTPPEGLWVPEQGVPGYRGRG

SEQ ID NO: 43941 - protein, 163 aa, unidentified
  source 1..163: note = Alteribacillus bidgolensis
  REGION 1..163: note = tr|A0A1G8MJW9|A0A1G8MJW9_9BACI NADPH-dependent 7-cyano-7-deazaguanine reductase OS=Alteribacillus bidgolensis OX=930129 GN=queF PE=3 SV=1
MPEGKGVEHLSHLGSEDTSYTFEYDPSLLETFENNHPNRDYFVKFNCPEFTTLCPKTGQPDFAALYISYIPEKKMVESKSLKLYLFSYRNHGGFHEDAINMIVNDLVELMDPRYLEVWGKFTPRGGISIDPYVNYGRSGTKYEEMASQRLLYHDMHPENIDNR

SEQ ID NO: 43942 - protein, 164 aa, unidentified
  source 1..164: note = Alteribacillus iranensis
  REGION 1..164: note = tr|A0A1I2CUM7|A0A1I2CUM7_9BACI NADPH-dependent 7-cyano-7-deazaguanine reductase OS=Alteribacillus iranensis OX=930128 GN=queF PE=3 SV=1
MMTERKGVENLSHLGSEDTKYTFEYDPTLLETFENNHPNRDYFVKFNCPEFTTLCPKTGQPDFGTIYISYIPDEKMVESKSLKLYLFSFRNHGGFHEDAMNVILNDLLELMDPRYIEVWGKFTPRGGISIDPYVNYGKPGTKYEDMAAQRLMYHDMYPEKIDNR

SEQ ID NO: 43943 - protein, 163 aa, unidentified
  source 1..163: note = Alteribacillus persepolensis
  REGION 1..163: note = tr|A0A1G8GIQ8|A0A1G8GIQ8_9BACI NADPH-dependent 7-cyano-7-deazaguanine reductase OS=Alteribacillus persepolensis OX=568899 GN=queF PE=3 SV=1
MNERNGVEDLSHLGSEKTSYTFQYDPSLLETFENNHPNRDYFVKFNCPEFTTLCPKTGQPDFATLYISYIPDKKMVESKSLKLYLFSFRDHGGFHEDAINVIVNDLVELMDPRYLEVWGKFTPRGGISIDPYANYGRPGTKYEEMASTRLLYHDMYPETITNR

SEQ ID NO: 43944 - protein, 250 aa, unidentified
  source 1..250: note = Alteromonadaceae bacterium
  REGION 1..250: note = tr|A0A3R7VD24|A0A3R7VD24_9ALTE NADPH-dependent 7-cyano-7-deazaguanine reductase QueF OS=Alteromonadaceae bacterium TMED101 OX=1986649 GN=CBC61_003490 PE=4 SV=1
  VARIANT 30: note = Xaa can be any naturally occurring amino acid
MTGVLGTKVAAPQQYAPDILERIDRHSGRXGIDNASRYVSTGHDIWHCYELSWLLPGENVSYLVGALIIPASSAYTVESKSLKLYLNSLNAHEFVSDEAAVSCVEADLSTLTGAKVTLTTTDPSALNVSTVPLSDVQITPRDTKGTEIYRCSGFRSLCPVTAQPDWASLCIEMSSAAYDQREVERAIASLRNHQGFHEQCVEDLYSRLENALLPAELHVVGFFQRRGGVDITPWRSSAALPPCLTRLYEQ

SEQ ID NO: 43945 - protein, 275 aa, unidentified
  source 1..275: note = Alteromonadaceae bacterium
  REGION 1..275: note = tr|A0A495D6T1|A0A495D6T1_9ALTE NADPH-dependent 7-cyano-7-deazaguanine reductase OS=Alteromonadaceae bacterium 2052S.S.stab0a.01 OX=1304900 GN=queF PE=3 SV=1
MAGIKLGQTSAYSDHYNPELLEPIPRSLSRAGLVDGQVLPFVGVDIWNGYELSWLRPGGLPAVAMARFEVPADSEAIIESKSFKYYLNSFNQTVFESPVAVQAAMTRDLSAAAGGNVRVVLLPVAGGDAFADFGGQCVDDLDISLDRYQPDAGLLAFDSDERVDDGQLHSHLLKSNCPVTGQPDWASVWVGYSGKRLSAEGLLRYLVSFRQHQDFHEHCVEKIFTDLMATGELTSLAVYARYTRRGGLDINPYRATADRGASLPDALQGLRLARQ

SEQ ID NO: 43946 - protein, 281 aa, unidentified
  source 1..281: note = Alteromonadales bacterium
  REGION 1..281: note = tr|A0Y508|A0Y508_9GAMM NADPH-dependent 7-cyano-7-deazaguanine reductase OS=Alteromonadales bacterium TW-7 OX=156578 GN=queF PE=3 SV=1
MTDYSNSPDLKGSVLGQSTEYVDDYTPSLLFPIARKLNRDALNIDEAELPFKGQDIWTGYELSWLNAKGKPQVAVALFTFACQSSHIIESKSFKLYLNSFNQTRFESINTVKQHLIDDLSGAVNSPVQVTLYKADDFNCLPCTALPGECIDDLDIEIDNYDIDAYSLKAHSDEIVTETLNSHLLKSNCLITSQPDWASIIIRYTGEKICRESLLRYLISFRTHNEFHEQCVERIYSDLTTQLNIKELEVYARYTRRGGLDINPYRSTHYNETPFAVKINRQ

SEQ ID NO: 43947 - protein, 285 aa, unidentified
  source 1..285: note = Alteromonadales bacterium
  REGION 1..285: note = tr|A0A2N0WRM1|A0A2N0WRM1_9GAMM NADPH-dependent 7-cyano-7-deazaguanine reductase OS=Alteromonadales bacterium alter-6D02 OX=2058087 GN=queF PE=3 SV=1
MTTKSPYDNAPELASLTLGKQTDYDNSFDEKLLQAVPRALNRNELNLGQTLPFHGDDIWTGYELSWLNAKGKPVVAMANFKVPCQSNNLIESKSFKLYLNSYNQQRFNDADEVTAQLTKDLSVCAESNVTVEIILAHQFATQRIISAAGHCIDDLDITIDDYQFSTDFLAHSDNSNQPLVSETLHSNLLKSNCLITNQPDWGTVEISYHGRQIDHEALLRYLISFRQHNEFHEQCVERIFTDLMRFCHCDKLTVYARYTRRGGLDINPFRSNFEETPSNQRQARQ

SEQ ID NO: 43948 - protein, 282 aa, unidentified
  source 1..282: note = Alteromonas aestuariivivens
  REGION 1..282: note = tr|A0A3D8M4C7|A0A3D8M4C7_9ALTE NADPH-dependent 7-cyano-7-deazaguanine reductase OS=Alteromonas aestuariivivens OX=1938339 GN=queF PE=3 SV=1
MTDSSTSNLFPLPEHLTLGKTVQYEEHYNPKLLQNVPRALGRSTLNFDESNLPFMGVDIWNGYELSWLNMKGKPNVAILECRVPITSPNLVESKSFKLYLNSFNQTRFNSVDEVRQCLEKDLSDCAGESVAVTIYQAHQFSKLSMGEMNGTLIDDLDIEVTRYQPDKTLVSTCDHEVEETLVSHLLKSNCLITSQPDWASIQIHYKGKGIEHESLLKYLIAFRQHNEFHEQCVERIFCDLMEQCQPEKLAVYARYTRRGGLDINPFRANFDACIGNERHARQ

SEQ ID NO: 43949 - protein, 283 aa, unidentified
  source 1..283: note = Alteromonas australica
  REGION 1..283: note = tr|A0A075P425|A0A075P425_9ALTE NADPH-dependent 7-cyano-7-deazaguanine reductase OS=Alteromonas australica; OX = 589873 GN=queF PE=3 SV=1
MTDNVKDNLTVSAPDGLSLGKQVEYEFHYNPDLLQGVPRSLSRDTLSLNPLNLPFSGNDTWTGYELSWLTPKGKPQVAILECRVPITSPNLIESKSFKLYLNSFNQSKFENANAVKDVIQSDLSACAGSEVDVALVLPSQFASLSFKEFEGELLDDLDVEINEYSPNTAFLSQSDKNVEESLVSHLLKSNCLITSQPDWASVIIRYQGKAINREGLLKYLISFRQHNEFHEQCVERIFCDILAHCEVDKLTVCARYTRRGGLDINPFRSNFEAPYPNFRQARQ

SEQ ID NO: 43950 - protein, 279 aa, unidentified
  source 1..279: note = Alteromonas confluentis
  REGION 1..279: note = tr|A0A1E7Z659|A0A1E7Z659_9ALTE NADPH-dependent 7-cyano-7-deazaguanine reductase OS=Alteromonas confluentis OX=1656094 GN=queF PE=3 SV=1
MTNPISFQVPSDLTLGKTVEYESQYNPALLQGVPRSLSRDTISLNADALPFHGCDIWTGYELSWLNAKGKPQVAIMECRVPITSCNLIESKSFKLYLNSFNQTAFDSTTQVKERLEADLSNCAGEAVTVTLYLSNAFSSLSMAEFDGDVIDDLDVTIDSYSPDATLLQTSANNVSEKLVSHLLKSNCLITSQPDWASIQIAYQGEQINRESLLKYLIGFRQHNEFHEQCVERIFSDIMTHCKPEKLTVYARYTRRGGLDINPYRSNFEQPGKNVRSARQ

SEQ ID NO: 43951 - protein, 281 aa, unidentified
  source 1..281: note = Alteromonas lipolytica
  REGION 1..281: note = tr|A0A1E8FEV0|A0A1E8FEV0_9ALTE NADPH-dependent 7-cyano-7-deazaguanine reductase OS=Alteromonas lipolytica; OX = 1856405 GN=queF PE=3 SV=1
MTTKQTATPSLPANLTLGQKVDYIEQYSPSLLQGVPRTLSRDQIGVSHPLPFDGIDIWNGYELSWLNPKGKPQVAILQCRVPINSANLIESKSFKLYLNSFNQSVFSGKDEITEVITRDLSACAEAPVEVQLFPASAFSQLNLGELSGTVIDDLDIEIHDYQPNPQLLKTTGGAATSETLVSHLLKSNCLITSQPDWASVQIHYEGEPIDHAGLLAYLISFRRHNEFHEQCIERIFCDVMAQCHPVKLAVYARYTRRGGLDINPMRSNCDFSVTNDRLARQ

SEQ ID NO: 43952 - protein, 286 aa, Alteromonas macleodii
  REGION 1..286: note = tr|A0A2K9IEN1|A0A2K9IEN1_ALTMA NADPH-dependent 7-cyano-7-deazaguanine reductase OS=Alteromonas macleodii; OX = 28108 GN=queF PE=3 SV=1
MSTDNSPQKITISAPDDLSLGKQVDYEFEYNPDLLQGVPRSLSRDTLNLAGSGLPFDGIDTWTGYELSWLNLKGKPNVAILECHVPITSKNLIESKSFKLYLNSFNQTKFASAEDVRQVLQADLSACAGEPVEVKLILPEQFSSLQFQEFNGTLLDSLDVEIDQYSPNTQYLTVAKSEAGVQETLVSHLLKSNCLITSQPDWASIQVRYEGKAIEHEGLLKYLISFRQHNEFHEQCVERIYNDIMKHCQPDKLTVCARYTRRGGLDINPFRSNYEAPYANHRQARQ

SEQ ID NO: 43953 - protein, 286 aa, Alteromonas macleodii
  REGION 1..286: note = tr|A0A126PX25|A0A126PX25_ALTMA NADPH-dependent 7-cyano-7-deazaguanine reductase OS=Alteromonas macleodii; OX = 28108 GN=queF PE=3 SV=1
MSTDNSPQKITISAPDDLSLGKQVDYEFEYNPDLLQGVPRSLSRDTLNLASSGLPFDGIDTWTGYELSWLNLKGKPNVAILECHVPITSKNLIESKSFKLYLNSFNQTKFASVEDVRQVLQADLSACAGEPVEVKLILPEQFSSLQFQEFNGTLLDSLDVEIDQYSPNTQYLTVAKNETGVQETLVSHLLKSNCLITSQPDWASIQIRYEGRAIEHEGLLKYLISFRQHNEFHEQCVERIYNDIMKHCQPDKLTVCARYTRRGGLDINPFRSNYEAPYANHRQARQ

SEQ ID NO: 43954 - protein, 277 aa, Alteromonas marina
  REGION 1..277: note = tr|A0A0B3Y0L7|A0A0B3Y0L7_9ALTE NADPH-dependent 7-cyano-7-deazaguanine reductase OS=Alteromonas marina; OX = 203795 GN=queF PE=3 SV=1
MTISAPDDLSLGKQVDYEFEYNPDLLQGVPRSLSRDTLNLAGSGLPFDGIDTWTGYELSWLNLKGKPNVAILECHVPITSKNLIESKSFKLYLNSFNQTKFASAEDVRQVLQADLSACAGEPVEVKLILPEQFSSLQFQEFNGTLLDSLDVEIDQYSPNTQYLTVAKNETGVEETLVSHLLKSNCLITSQPDWASIQIRYKGNAIEHEGLLKYLISFRQHNEFHEQCVERIYNDIMQHCQPDKLTVCARYTRRGGLDINPFRSNYEAPYANHRQARQ

SEQ ID NO: 43955 - protein, 286 aa, unidentified
  source 1..286: note = Alteromonas mediterranea
  REGION 1..286: note = tr|S5AD87|S5AD87_9ALTE NADPH-dependent 7-cyano-7-deazaguanine reductase OS=Alteromonas mediterranea 615 OX=1300253 GN=queF PE=3 SV=1
MSTDNSPNKIIITAPDDLSLGKQVDYEFEYNPSLLQGVPRSLSRDTLNLTGAKLPFSGIDTWTGYELSWLNLKGKPNVAILECHVPITSENLIESKSFKLYLNSFNQTKFRSAEDVQKVLQRDLSACAGEPVNVNLILPKQFTELQFKEFEGTLLDELDVDIETYSPTTQYLFTSKDDKKAKETLVSHLLKSNCLITSQPDWASIQIKYEGKAIEHEGLLKYLISFRQHNEFHEQCVERIYNDIMFHCKPDKLTVCARYTRRGGLDINPFRSNYEAPYANHRQARQ

SEQ ID NO: 43956 - protein, 286 aa, unidentified
  source 1..286: note = Alteromonas mediterranea
  REGION 1..286: note = tr|F2GBX5|F2GBX5_ALTMD NADPH-dependent 7-cyano-7-deazaguanine reductase OS=Alteromonas mediterranea (strain DSM 17117 / CIP 110805 / LMG 28347 / Deep ecotype) OX=177 4373 GN=queF PE=3 SV=1
MSTDNSPNKIIITAPDDLSLGKQVDYEFEYNPSLLQGVPRSLSRDTLNLTGAELPFSGIDTWTGYELSWLNLKGKPNVAILECHVPITSENLIESKSFKLYLNSFNQTKFRSAEDVQKVLQKDLSACAGEPVNVNLILPKQFTELQFKEFEGTLLDELDVDIETYSPTTQYLFTSKDDKKVKETLVSHLLKSNCLITSQPDWASIQIKYEGKAIEHEGLLKYLISFRQHNEFHEQCVERIYNDIMFHCKPDKLTVCARYTRRGGLDINPFRSNYEAPYANHRQARQ

SEQ ID NO: 43957 - protein, 283 aa, unidentified
  source 1..283: note = Alteromonas naphthalenivorans
  REGION 1..283: note = tr|F5Z4L8|F5Z4L8_ALTNA NADPH-dependent 7-cyano-7-deazaguanine reductase OS=Alteromonas naphthalenivorans OX=715451 GN=queF PE=3 SV=1
MTSKVNDKISISAPKDLSLGKQVEYEFHYNPNLLQGVPRSLSRDTLSLNAEALPFTGIDTWTGYELSWLNKKGKPHVALLECNVPITSANLIESKSFKLYLNSFNQTAFESPEDVRATLASDLSKCAGEPVMVSLTLPNQFNTLTFKEFEGVLLDELDISVETYEPDTSLLKVTDEKKAESLVSHLLKSNCLITSQPDWASVQIRYEGRSIDHEGLLKYLISFRQHNEFHEQCVERIYCDIMQHCQPEKLTVCARYTRRGGLDINPFRSNFETPYANKRQARQ

SEQ ID NO: 43958 - protein, 279 aa, unidentified
  source 1..279: note = Alteromonas pelagimontana
  REGION 1..279: note = tr|A0A2A6AVS0|A0A2A6AVS0_9ALTE NADPH-dependent 7-cyano-7-deazaguanine reductase OS=Alteromonas pelagimontana OX=1858656 GN=queF PE=3 SV=1
MNSSTTFTLPTHLTLGKTVEYETVYNPALLQSVPRSLGRDAIGLDEDAIPFSGSDVWTGYELSWLNAKGKPQVAMLECSVPVTSPNLIESKSFKLYLNSFNQTRFSSVESVQQTLTKDLSGCAGEQVYAAVVLPEKFTGLKIQEFSGKVIDDLDIEVTNYTPENQSLWCEDDSAAETLISHLLKSNCLITSQPDWASILIKYEGQKINEESLLRYLIGFRQHNEFHEQCVERIFCDILARCQPKKLTVYARYTRRGGLDINPFRSNFELPYPNHRLARQ

SEQ ID NO: 43959 - protein, 286 aa, Alteromonas sp.
  REGION 1..286: note = tr|A0A2V3VD16|A0A2V3VD16_9ALTE NADPH-dependent 7-cyano-7-deazaguanine reductase OS=Alteromonas sp. I10; OX = 1938740 GN=queF PE=3 SV=1
MSTDNSPQKITISAPDDLSLGKQVDYEFEYNPGLLQGVPRSLSRDTLNLAGSGLPFDGIDTWTGYELSWLNLKGKPNVAILECHVPITSKNLIESKSFKLYLNSFNQTKFASAEDVQQVLQADLSACAGEPVEVKLILPEQFSSLQFQEFNGTLLDSLDVEIDQYSPNTQYLTVMKSEAGVQETLVSHLLKSNCLITSQPDWASIQIRYEGKAIEHEGLLKYLISFRQHNEFHEQCVERIYNDIMQHCQPDKLTVCARYTRRGGLDINPFRSNYEAPYANHRQARQ

SEQ ID NO: 43960 - protein, 283 aa, Alteromonas sp.
  REGION 1..283: note = tr|A0A5H3A3T0|A0A5H3A3T0_9ALTE NADPH-dependent 7-cyano-7-deazaguanine reductase OS=Alteromonas sp. I4; OX = 2652380 GN=queF PE=4 SV=1
MTELSKQKKELSLPTHLTLGQSVDYIEQYTPDLLQSVPRSLSRDQIGVTAPLPFEGVDIWNGYELSWLNAKGKPQVAILQCRVPVTSANLIESKSFKLYLNSFNQTKFNSREDVSACLEKDLSACADAPVAVTLFGPEQFDDLPVKNLTGTCIDELDIDVTRYSPAPSLLNSDTSQHAEETLVSHLLKSNCLITSQPDWASIQIRYQGPKIDHEGLLAYLISFRQHNEFHEQCIERIYCDLMARCKPLKLAVYARYTRRGGLDINPLRSNYTVDIENDRQARQ

SEQ ID NO: 43961 - protein, 283 aa, Alteromonas stellipolaris
  REGION 1..283: note = tr|A0A0S1YMC6|A0A0S1YMC6_9ALTE NADPH-dependent 7-cyano-7-deazaguanine reductase OS=Alteromonas stellipolaris LMG 21856 OX=1160720 GN=queF PE=3 SV=1
MTSKVNDRISISAPKDLSLGKQVEYEFHYNPDLLQGVPRSLSRDTLSLNADALPFTGIDTWTGYELSWLNKKGKPNVALLECYVPITSANLIESKSFKLYLNSFNQTAFESPEDVRATLASDLSKCAGEPVVVNLTLPNQFNTLTFKEFEGVLLDELDIAVETYEPDTSLLKVTGDKKAETLVSHLLKSNCLITSQPDWASVQIRYEGNGLDHEGLLKYLISFRQHNEFHEQCVERIYCDIMQHCQPKKLTVCARYTRRGGLDINPFRSNFETPYANKRQARQ

SEQ ID NO: 43962 - protein, 156 aa, Alysiella crassa
  REGION 1..156: note = tr|A0A376BKI9|A0A376BKI9_9NEIS NADPH-dependent 7-cyano-7-deazaguanine reductase OS=Alysiella crassa; OX = 153491 GN=queF PE=3 SV=1
MRNEQELHGLTLLGNQKTEYRSDYAPEVLEAFDNKHPDNDYFVKFVCPEFTSLCPMTGQPDFATIVIRYIPDVKMVESKSLKLYLFSFRNHGDFHEDCVNIIMKDLIQLMNPKYIEVFGEFTPRGGIAIHPFANYGRAGTPFEQMARERLFAHDMQ

SEQ ID NO: 43963 - protein, 156 aa, Alysiella filiformis
  REGION 1..156: note = tr|A0A286E6P8|A0A286E6P8_9NEIS NADPH-dependent 7-cyano-7-deazaguanine reductase OS=Alysiella filiformis DSM 16848 OX=1120981 GN=queF PE=3 SV=1
MRNEQELHGLTLLGNQKTEYRSDYAPEVLEAFDNKHPDNDYFVKFVCPEFTSLCPMTGQPDFATIVIRYIPDVKMVESKSLKLYLFSFRNHGDFHEDCVNIIMKDLIKLMNPKYIEVFGEFTPRGGIAIHPFANYGRAGTPFEQMARERLFAHDMQ

SEQ ID NO: 43964 - protein, 275 aa, unidentified
  source 1..275: note = Amantichitinum ursilacus
  REGION 1..275: note = tr|A0A0N0GQP8|A0A0N0GQP8_9NEIS NADPH-dependent 7-cyano-7-deazaguanine reductase OS=Amantichitinum ursilacus OX=857265 GN=queF PE=3 SV=1
MSDAQFSPLGKAVSYKTEYDPTLLFPIPRQGKRDEIGVTGALPFMGVDIWNAFELSWLNARGKPQVALAVFHIPADSPNIVESKSFKLYLNSFNQTRLESVDALQALLAQDISAATGGSVQVQITLPDAFGKEKMADLAGYCIDNLDIDIDTYEPSPQLLHCDELDSPVDESLTSNLLKSNCLVTGQPDWASVQIRYVGAPINRESLLRYLISFRNHNEFHEQCVERIFMDIMRTCKPIKLAVYARYTRRGGLDINPYRCNFSGPPPGNIRTARQ

SEQ ID NO: 43965 - protein, 153 aa, Aminobacter aminovorans
  REGION 1..153: note = tr|A0A142M9T0|A0A142M9T0_AMIAI NADPH-dependent 7-cyano-7-deazaguanine reductase OS=Aminobacter aminovorans OX=83263 GN=queF PE=3 SV=1
MTITDSLTQLGTQVQTPASPETAVLETVPYDRLGGPPAIVRFTCPEFTSLCPVTGQPDFAHIVIDYAPDRLLVESKSLKLFMVSFRNHGAFHEDCTVMIGRRVVAATKPLWLRIAGYWYPRGGIPIDVFWQTGRPPEGVWLPDTGVAPYRGRG

SEQ ID NO: 43966 - protein, 153 aa, Aminobacter aminovorans
  REGION 1..153: note = tr|A0A380WNU4|A0A380WNU4_AMIAI NADPH-dependent 7-cyano-7-deazaguanine reductase OS=Aminobacter aminovorans OX=83263 GN=queF PE=3 SV=1
MTNTDTLTQLGTHVQTPTSPETAVLETVPYDRLGGPPAIVRFTCPEFTSLCPVTGQPDFAHIVIDYAPDRMLVESKSLKLFMVSFRNHGAFHEDCTVMIGRRVVAATKPLWLRIAGYWYPRGGIPIDVFWQTGRPPEGVWLPETGVAPYRGRG

SEQ ID NO: 43967 - protein, 161 aa, Aminobacter sp.
  REGION 1..161: note = tr|A0A316H4Y1|A0A316H4Y1_9RHIZ NADPH-dependent 7-cyano-7-deazaguanine reductase OS=Aminobacter sp. AP02; OX = 2135737 GN=queF PE=3 SV=1
MAILKSHPMTVTDTLTQLGTRVETPTSPETAVLETVPYERVGGPPAIVRFACPEFTSLCPVTGQPDFAHIVIDYAPDRLLVESKSLKLFMVSFRNHGAFHEDCTVMIGRRIVEATKPLWLRIAGYWYPRGGIPIDVFWQTGAPPEGSWLPDTGVAPYRGRG

SEQ ID NO: 43968 - protein, 153 aa, Aminobacter sp.
  REGION 1..153: note = tr|A0A2S0XNH0|A0A2S0XNH0_9RHIZ NADPH-dependent 7-cyano-7-deazaguanine reductase OS=Aminobacter sp. MSH1; OX = 374606 GN=queF PE=3 SV=1
MTITDTLTQLGTKVETPTSPETAVLETVPYTRVEGPPAIVRFTCPEFTSLCPVTGQPDFAHIVIDYAPDKMLVESKSLKLFMVSFRNHGAFHEDCTVMIGRRVVEATKPLWLRIAGYWYPRGGIPIDVFWQTGTPPEGSWLPETGVAPYRGRG

SEQ ID NO: 43969 - protein, 139 aa, Ammoniphilus oxalaticus
  REGION 1..139: note = tr|A0A419SEJ0|A0A419SEJ0_9BACL NADPH-dependent 7-cyano-7-deazaguanine reductase OS=Ammoniphilus oxalaticus OX=66863 GN=queF PE=3 SV=1
MARVEHDYDKYQGIRFDTQDESVILVNILETIPYEYVGKRTEVNIPTNEFTSVCPWSGLPDFADIKIMFVPNKELIEMKSLKYYLTSYRNVGIYQEHATNRILNDLVACCDPLYMKIEADWNKRGGLGTTVVVEYTRED

SEQ ID NO: 43970 - protein, 139 aa, Ammoniphilus sp.
  REGION 1..139: note = tr|A0A4Q1SUL0|A0A4Q1SUL0_9BACL NADPH-dependent 7-cyano-7-deazaguanine reductase OS=Ammoniphilus sp. CFH 90114 OX=2493665 GN=queF PE=3 SV=1
MAKVEHNHDKYKGIRFDIQDESVILVDILETIPYEYIGKRTEVMIPTNEFTSVCPWSGLPDFADIRITYVPNEELIEMKSLKYYLTSYRNVGIYQEHATNRILEDLVKCCDPLYMKIDADWNARGGLGTKVVVEYTKEG

SEQ ID NO: 43971 - protein, 235 aa, unidentified
  source 1..235: note = Amoebophilaceae bacterium
  REGION 1..235: note = tr|A0A3R7WAI8|A0A3R7WAI8_9BACT QueF_N domain-containing protein OS=Amoebophilaceae bacterium TMED152 OX=1986680 GN=CBD12_000485 PE=4 SV=1
MANLLGKKTPYPQNFSPNLLFPIERKEQRKSLKTKMFNGEDIWNIHELLWIDNNNIHHHDEISISVPCTSPNIVESKSLKLFINSLIHERFESISGVKKIIKHHLESLIKTDIELRDVYKKPDAKVLNVKKSQGIKHDPTNLSPAELFCFRGFRSLCPVTQQPDIADIFIDGAFNKADQDNIAAYLGSFFEKEAFHELCIEQIVEDLKSYDYQFSRIEGCFERRGGIAIIPRRYS

SEQ ID NO: 43972 - protein, 165 aa, unidentified
  source 1..165: note = Amphibacillus marinus
  REGION 1..165: note = tr|A0A1H8MI82|A0A1H8MI82_9BACI NADPH-dependent 7-cyano-7-deazaguanine reductase OS=Amphibacillus marinus; OX = 872970 GN=queF PE=3 SV=1
MQGRKDHELKDLSLLGNQETRYSFDYTPEVLETFDNKHVNRDYFVKFNCPEFTTLCPKTNQPDFGAVYISYIPSEKMVESKSLKLYLFSFRNHGDFHEDSMNIIMNDLIKLMKPRYIEVWGKFTPRGGISIDPYCNYGVPGTKYEQIADHRMMNHDLYPEKIDNR

SEQ ID NO: 43973 - protein, 164 aa, unidentified
  source 1..164: note = Amphiplicatus metriothermophilus
  REGION 1..164: note = tr|A0A239PP19|A0A239PP19_9PROT NADPH-dependent 7-cyano-7-deazaguanine reductase OS=Amphiplicatus metriothermophilus OX=1519374 GN=queF PE=3 SV=1
MPKANATRRAARKPAAGDLSLLGKQAALPASPDEARLETVPNPHPDALYLARFVAPEFTSLCPVTGQPDFAHLVIDYAPAKLIVESKSLKLFLASFRNHGAFHEDCVVTIAKRLVAATRPRWLRIGGYWYPRGGIPIDVFYQTGEPPAGLWLPDQGVPAYRGRG

SEQ ID NO: 43974 - protein, 275 aa, Amphritea atlantica
  REGION 1..275: note = tr|A0A1H9H6I3|A0A1H9H6I3_9GAMM NADPH-dependent 7-cyano-7-deazaguanine reductase OS=Amphritea atlantica; OX = 355243 GN=queF PE=3 SV=1
MKDHQKGLEHAPLGADTQYINQYDASLLYPIARHLNWQSQGVERSELPFQGCDIWNAYEVSWLNNRGKPVARLAEFRIPADSDNIIESKSFKLYLNSFNLTRFDSEAQVLARMTEDLSTAAGGRVEVLLKPLDNSEPISAFEGDCLDELDIEVSDYSPTPERLKATGELVSESLYSHLLKSNCPVTGQPDWASIVIGYRGPAIDREGLLQYLISYREHGDFHEQCVESIFMDIWNRCKPEALTVYARYLRRGGLDINPWRSSQAGQPDNLRLSRQ

SEQ ID NO: 43975 - protein, 275 aa, Amphritea balenae
  REGION 1..275: note = tr|A0A3P1SX02|A0A3P1SX02_9GAMM NADPH-dependent 7-cyano-7-deazaguanine reductase OS=Amphritea balenae; OX = 452629 GN=queF PE=3 SV=1
MKNTESGLEHAPLGADTEYVNQYDASLLYPIARHLNWQAQGVDRTSLPFNGTDIWNAYEVSWLNNKGKPVVRLAEFRIPASSTNIIESKSFKLYLNSFNLTRFASEDEVVQQMVTDLSAAAEGQVEVILTNLDSKADIRQFSGECLDELDIEIADYTPTPERLSASGDKVDEALYSHLLKSNCPVTGQPDWASISIEYSGAAIDRAGLLQYLISYREHGDFHEQCVESIFMDIWSRCKPTELTVYARYLRRGGLDINPYRSSLQGRPDNLRLSRQ

SEQ ID NO: 43976 - protein, 275 aa, Amphritea sp.
  REGION 1..275: note = tr|A0A430KNB2|A0A430KNB2_9GAMM NADPH-dependent 7-cyano-7-deazaguanine reductase OS=Amphritea sp. MCCC 1K03512 OX=2490544 GN=queF PE=3 SV=1
MKDQQSALDHAPLGADTEYVNQYDASLLYPIARDLNWQAQGVERRALPFQGCDIWNAYEVSWLDSRGKPVVRLAEFRIPAASTHIIESKSFKLYLNSFNLTRFANEAEVQTRMVADLSATAGGEVGVLLRSVDNRDAMSQFAGECLDELDIEVSDYSPAPQRLSAAGDVVEETLYSHLLKSNCPVTGQPDWASISIEYRGPSIDRAGLLQYLISYREHGDFHEQCVESIFMDIWRVCQPEKLTVYARYLRRGGLDINPWRSSEAGEPVNLRLSRQ

SEQ ID NO: 43977 - protein, 115 aa, Amycolatopsis decaplanina
  REGION 1..115: note = tr|M2Z299|M2Z299_9PSEU NADPH-dependent 7-cyano-7-deazaguanine reductase OS=Amycolatopsis decaplanina DSM 44594 OX=1284240 GN=queF PE=3 SV=1
MDAGGLETFPAPAGIGVVRFRTAELTAFCPVTAQPDLYAMDFGYLPDDRCLESKSFKLYLHSFRDRGIFCETLAVTLLQDLVAVLRPRAATVRLEQQVRGGLVLHAQADHEGGVR

SEQ ID NO: 43978 - protein, 142 aa, Anabaena cylindrica
  REGION 1..142: note = tr|K9ZCP0|K9ZCP0_ANACC NADPH-dependent 7-cyano-7-deazaguanine reductase OS=Anabaena cylindrica (strain ATCC 27899 / PCC 7122) OX=272123 GN=queF PE=3 SV=1
MSNTLPETVTPANPEMKYGEREIAEGKLITFPNPRVGRRYDISITLPEFTCKCPFSGYPDFATIYITYIPDERVVELKALKLYINSYRDRYISHEETANQILDDFVAACEPLEVTVKTDFTPRGNVHTVVEVKHIKEKEEIF

SEQ ID NO: 43979 - protein, 138 aa, Anabaena sp.
  REGION 1..138: note = tr|A0A1B7WLG1|A0A1B7WLG1_9NOST NADPH-dependent 7-cyano-7-deazaguanine reductase OS=Anabaena sp. CRKS33; OX = 1710888 GN=queF PE=3 SV=1
MSNFAPETLPPVIPEMKYGEREIAEGKLITFPNPRIGRRYDINITLPEFTCKCPFSGYPDFATIYISYIPDQRVVELKALKLYINSYRDRYISHEETANQILDDFVAACDPLEVTVKTDFTPRGNVHTVVEVKHQKGV

SEQ ID NO: 43980 - protein, 151 aa, Anabaena sp.
  REGION 1..151: note = tr|A0A1B7VDK1|A0A1B7VDK1_9NOST NADPH-dependent 7-cyano-7-deazaguanine reductase OS=Anabaena sp. AL09; OX = 1710891 GN=queF PE=3 SV=1
MSNFAPETVSPASQEMKYGEREIAEGKLITFPNPRIGRRYDVNITLPEFTCKCPFSGYPDFATIYITYIPDERVVELKALKLYINSYRDRYISHEETANQILDDFVAACDPLEVTVKTDFTPRGNVHTVVEVKHQKGVYSRSQESGVRSQE

SEQ ID NO: 43981 - protein, 132 aa, Anabaenopsis circularis
  REGION 1..132: note = tr|A0A1Z4GLH0|A0A1Z4GLH0_9CYAN NADPH-dependent 7-cyano-7-deazaguanine reductase OS=Anabaenopsis circularis NIES-21 OX=1085406 GN=queF PE=3 SV=1
MTNDTSEVKYGERNIAEGNLITFPNPRVGRRYDINITLPEFTCKCPFSGYPDFATIYITYIPDERVVELKALKLYINSYRDRYISHEESANQILDDIVAACDPLEITVKADFSPRGNVHTVIEVRHQKASAN

SEQ ID NO: 43982 - protein, 163 aa, Anaerobacillus alkalidiazotrophicus
  REGION 1..163: note = tr|A0A1S2MBA4|A0A1S2MBA4_9BACI NADPH-dependent 7-cyano-7-deazaguanine reductase OS=Anaerobacillus alkalidiazotrophicus OX=472963 GN=queF PE=3 SV=1
MRKDHELEGVSLLGNQNVEYKFEYDKSILETFENKHLDNDYWVKFNCPEFTSLCPKTGQPDFATIYISYIPSEKMVESKSLKLYLFSFRNQGDFHEDCINIIMKDLIELMDPKYIEVWGKFTPRGGISIDPYANYGKKGTMFEEMAKQRMFNHDMYPEKVDNR

SEQ ID NO: 43983 - protein, 163 aa, Anaerobacillus alkalilacustris
  REGION 1..163: note = tr|A0A1S2LXI1|A0A1S2LXI1_9BACI NADPH-dependent 7-cyano-7-deazaguanine reductase OS=Anaerobacillus alkalilacustris OX=393763 GN=queF PE=3 SV=1
MRKDHELEGVSLLGNQNVEYKFEYDKSILETFENKHLDNDYWVKFNCPEFTSLCPKTGQPDFATIYISYIPSEKMVESKSLKLYLFSFRNQGDFHEDCINIIMKDLIELMDPKYIEVWGKFTPRGGISIDPYANYGKKGTMFEEMAKQRMFNHDMYPEKIDNR

SEQ ID NO: 43984 - protein, 163 aa, unidentified
  source 1..163: note = Anaerobacillus isosaccharinicus
  REGION 1..163: note = tr|A0A1S2MFM5|A0A1S2MFM5_9BACI NADPH-dependent 7-cyano-7-deazaguanine reductase OS=Anaerobacillus isosaccharinicus OX=1532552 GN=queF PE=3 SV=1
MRKDHELEGVSLLGNQNVPYKFEYDKSILETFENKHNDNDYWVKFNCPEFTSLCPKTGQPDFAAIYISYIPSEKMVESKSLKLYLFSFRNQGDFHEDCINIIMKDLIELMDPKYIEVWGKFTPRGGISIDPYANYGKKDTMFEDMAKQRLFNHDMYPEKIDNR

SEQ ID NO: 43985 - protein, 135 aa, unidentified
  source 1..135: note = Anaerobacillus macyae
  REGION 1..135: note = tr|A0A0J6CSS8|A0A0J6CSS8_9BACI NADPH-dependent 7-cyano-7-deazaguanine reductase OS=Anaerobacillus macyae; OX = 157733 GN=queF PE=3 SV=1
MDKAWLPSSGPMPRPESVEQAREVIKNEAFDAPNVQEITFNALEFTAVCPKTGQPDFGRVEISYVPDEKCIESKSLKFYLWSYRDEGSFCETLAARIADDVVYAIDPLKVTITVYQSARGGIELKTTAVREKPNS

SEQ ID NO: 43986 - protein, 277 aa, Anaerobiospirillum thomasii
  REGION 1..277: note = tr|A0A2X0V5Y5|A0A2X0V5Y5_9GAMM NADPH-dependent 7-cyano-7-deazaguanine reductase OS=Anaerobiospirillum thomasii OX=179995 GN=queF PE=4 SV=1
MELTHLGHNSRYYSQYNPSLLEPIMRHLPRAAFSTDTSIGYDLWRLYEITYLNARGIPCIVMGSIKINAASQFTVESKSLKLYIGSFTNTKFLSLSHVKETIERDLHKVTASKVEVELYPPEDMSFMPEKLPGICIDDSASDIKLDFDTINPTLLKYSQSDNDEDKAVSSRTYHSNIVRTLCPVTSQPDFASVVISYTGRAIDTTALFAYLCSYRHHQGFHEACTENIYNDLKNVLNPDGLCVAASFTRRGGIDINPCRADSLDLTCKCSHIRTLRQ

SEQ ID NO: 43987 - protein, 165 aa, unidentified
  source 1..165: note = Anaerobium acetethylicum
  REGION 1..165: note = tr|A0A1D3TN88|A0A1D3TN88_9FIRM NADPH-dependent 7-cyano-7-deazaguanine reductase OS=Anaerobium acetethylicum OX=1619234 GN=queF PE=3 SV=1
MSGRNTEELNGVTQLGNQGTRYPDDYAPEMLETFINKHPENDYFVKFNCPEFTSLCPMTGQPDFATLYISYVPSERMVESKSLKLYLFSFRNHGDFHEDCVNIIMKDLIRLMDPKYIEVWGKFTPRGGISIDPYCNYGKKGTRWEEIAFNRLAGHDMYPEKVDNR

SEQ ID NO: 43988 - protein, 164 aa, unidentified
  source 1..164: note = Anaerobutyricum hallii
  REGION 1..164: note = tr|C0EV21|C0EV21_9FIRM NADPH-dependent 7-cyano-7-deazaguanine reductase OS=Anaerobutyricum hallii DSM 3353 OX=411469 GN=queF PE=3 SV=1
MSREKEELQGVTLLGNQKTKYPQDYAPEMLETFINKHQDHDYFVKFNCPEFTSLCPMTGQPDFATIYISYVPDVKMVESKSLKLYLFSFRNHGDFHEDCVNIIMKDLIKLMDPKYIEVWGKFTPRGGISIDPYTNYGKPGTMWEQVATERLVHHDLYPEKVDNR

SEQ ID NO: 43989 - protein, 164 aa, unidentified
  source 1..164: note = Anaerobutyricum hallii
  REGION 1..164: note = tr|A0A374NN30|A0A374NN30_9FIRM NADPH-dependent 7-cyano-7-deazaguanine reductase OS=Anaerobutyricum hallii; OX = 39488 GN=queF PE=3 SV=1
MSREKEELQGVTLLGNQKTKYPQDYAPEMLETFINKHQDHDYFVKFNCPEFTSLCPMTGQPDFATIYISYVPDVKMVESKSLKLYLFSFRNHGDFHEDCVNIIMKDLIKLMDPKYIEVWGKFTPRGGISIDPYTNYGKPGTMWEQVATDRLVHHDLYPEKVDNR

SEQ ID NO: 43990 - protein, 163 aa, unidentified
  source 1..163: note = Anaerococcus nagyae
  REGION 1..163: note = tr|A0A3E2TJB4|A0A3E2TJB4_9FIRM NADPH-dependent 7-cyano-7-deazaguanine reductase OS=Anaerococcus nagyae; OX = 1755241 GN=queF PE=3 SV=1
MRKEDDMKDITLLGNQDNKYPDDYAPEVLEVFDNKHPDNDYFVKFNCPEFTSLCPITGQPDFATIYISYVPSEKMVESKSLKLYLFSFRNHGDFHEDCMNIIMKDLIKLMAPKYIEVWGKFTPRGGISIDPYCNYGKKGTKWEEIAFNRLANHDLYPEKVDNR

SEQ ID NO: 43991 - protein, 157 aa, Anaeroglobus geminatus
  REGION 1..157: note = tr|G9YHD3|G9YHD3_9FIRM NADPH-dependent 7-cyano-7-deazaguanine reductase OS=Anaeroglobus geminatus F0357 OX=861450 GN=queF PE=3 SV=1
MEKLTLLGNNGVTYAGGYNPGILEVFENKHRGHDYFVKFNCPEFTGLCPVTGQPDFGTIIVAYVPDMKMVESKSLKLYLFSFRNHGAFHEDCVNLIMKDLITLMEPKYIEVQGKFLPRGGISIDPYCNCGKAGTRWEEVAWKRLAEHDMYPEKVDNR

SEQ ID NO: 43992 - protein, 94 aa, unidentified
  source 1..94: note = Anaerolineaceae bacterium
  REGION 1..94: note = tr|A0A1W9WET5|A0A1W9WET5_9CHLR NADPH-dependent 7-cyano-7-deazaguanine reductase OS=Anaerolineaceae bacterium 4572_78 OX=1972460 GN=B6242_05435 PE=3 SV=1
MSFCPVTGQPDFNKVIIEYAPDKLCVESKSLKLYLWTFRESYIFGEGLANEIAKNIFEAVMPRWCKITIIHTTRRLDLLCFVYRNNLFSKLHDW

SEQ ID NO: 43993 - protein, 137 aa, unidentified
  source 1..137: note = Anaerolineaceae bacterium
  REGION 1..137: note = tr|A0A2E9PU58|A0A2E9PU58_9CHLR NADPH-dependent 7-cyano-7-deazaguanine reductase OS=Anaerolineaceae bacterium OX=2024896 GN=queF PE=3 SV=1
  VARIANT 71: note = Xaa can be any naturally occurring amino acid
  VARIANT 87: note = Xaa can be any naturally occurring amino acid
  VARIANT 105..106: note = Xaa can be any naturally occurring amino acid
  VARIANT 120: note = Xaa can be any naturally occurring amino acid
  VARIANT 136: note = Xaa can be any naturally occurring amino acid
MANITENPDLDGLTLLGRDAQPSRRLETFPNRHPDRDYTIKLRTKEFTCVCPATGQPDFAALTIEYVPVEXILESKSLKLYLWSFRXEGIFHEHVANTILDDLVXXLEPRWCKVTAAFSXRGGIGITVDAEHQRPXA

SEQ ID NO: 43994 - protein, 130 aa, unidentified
  source 1..130: note = Anaerolineae bacterium
  REGION 1..130: note = tr|A0A0S8BLR4|A0A0S8BLR4_9CHLR NADPH-dependent 7-cyano-7-deazaguanine reductase OS=Anaerolineae bacterium SG8_19 OX=1703386 GN=queF PE=3 SV=1
MTLLGRETTQPSKQLETFPNRHPGRDYTVTLTTDEFTCVCPATGQPDFARITVRYIPDQRIVESKSLKLYFWSYRNEGIFHEHVTNVILDDLVAALEPRWCEVIADFGIRGGIAISVRAEYKKPEKQVNT

SEQ ID NO: 43995 - protein, 136 aa, unidentified
  source 1..136: note = Anaerolineae bacterium
  REGION 1..136: note = tr|A0A0S8ICI4|A0A0S8ICI4_9CHLR NADPH-dependent 7-cyano-7-deazaguanine reductase OS=Anaerolineae bacterium SM23_ 63 OX=1703387 GN=queF PE=3 SV=1
MTKEADLEGLTLLGKDAKPSKELETFPNHHPDRRYTVRLESDEFTCLCPATGQPDFANITVEYIPNKKILESKSFKLYLWSYRNEGVFHEHVTNTILDDLIAALDPHWCRVIGGFNIRGGIYITVEAEHGRREEKG

SEQ ID NO: 43996 - protein, 140 aa, unidentified
  source 1..140: note = Anaerolineales bacterium
  REGION 1..140: note = tr|A0A523XM28|A0A523XM28_9CHLR NADPH-dependent 7-cyano-7-deazaguanine reductase OS=Anaerolineales bacterium OX=2073117 GN=queF PE=3 SV=1
MKKTMTEASDLEDLTLLGREAKPSKRLETFPNRHPDRRYVVRLETEEFTCLCPATGQPDFASILVEYIPNQKILESKSFKLYLWSYRNEGVFHEHVTNKILDDLVAALEPHWCRVVSIFNIRGGINITVEAEHGAREGIN

SEQ ID NO: 43997 - protein, 134 aa, unidentified
  source 1..134: note = Anaerolineales bacterium
  REGION 1..134: note = tr|A0A523U3A1|A0A523U3A1_9CHLR NADPH-dependent 7-cyano-7-deazaguanine reductase OS=Anaerolineales bacterium OX=2073117 GN=queF PE=3 SV=1
MTEASDLDGLTILGGKVEPDRKLETFPNHHPDRLYIVRFETDEFTCICPATGQPDFARITVEYIPAEKILESKSFKLYLWSYRNEGVFHEHVSNLILDDLVKALEPRWCRVSGRFNVRGGIVITVEAEHGEREE

SEQ ID NO: 43998 - protein, 122 aa, Anaeromyxobacter dehalogenans
  REGION 1..122: note = sp|B8JAR2|QUEF_ANAD2 NADPH-dependent 7-cyano-7-deazaguanine reductase OS=Anaeromyxobacter dehalogenans (strain 2CP-1 / ATCC BAA-258) OX=455488; GN = queF PE=3 SV=1
MPTQPSRDLQTFPNPKPGRPFEIAMECPEFTCVCPMTGQPDFATIRLRYVPAERCVELKSLKLYLWSFRNEGTFHEAVTNRICDDLVAALAPRWIEVVGDFAVRGGIHTVVTARHGERPAGV

SEQ ID NO: 43999 - protein, 122 aa, Anaeromyxobacter dehalogenans
  REGION 1..122: note = sp|Q2IH01|QUEF_ANADE NADPH-dependent 7-cyano-7-deazaguanine reductase OS=Anaeromyxobacter dehalogenans (strain 2CP-C) OX=290397 GN=queF PE=3 SV=2
MPTQPSRDLQTFPNPKPGRPFEIAMECPEFTCVCPMTGQPDFATIRLRYVPAERCVELKSLKLYLWSFRDEGTFHEAVTNRICDDLVAALAPRWIEVVGDFAVRGGIHTVVTARHGERPAGV

SEQ ID NO: 44000 - protein, 122 aa, Anaeromyxobacter sp.
  REGION 1..122: note = tr|A0A0D6QPN8|A0A0D6QPN8_9DELT NADPH-dependent 7-cyano-7-deazaguanine reductase OS=Anaeromyxobacter sp. PSR-1 OX=1300915 GN=queF PE=3 SV=1
MPTQPSRDLQTFPNPKPGRPFEIAMECPEFTCVCPMTGQPDFATIRLRYVPAERCVELKSLKLYLWSFRDEGTFHEAVTNRICDDLVAALAPRWIEVVGDFAVRGGIHTVVTARHGEKPAGV

SEQ ID NO: 44001 - protein, 122 aa, Anaeromyxobacter sp.
  REGION 1..122: note = sp|A7H750|QUEF_ANADF NADPH-dependent 7-cyano-7-deazaguanine reductase OS=Anaeromyxobacter sp. (strain Fw109-5) OX=404589 GN=queF PE=3 SV=1
MPTKPARDLQTFPNPKPDRPYEIAMECPEFTCVCPVTGQPDFATIRLRYVPAERCVELKSLKLYLWSFRDEGTFHEAVTNRICDDIVQAIAPRWIEVVGDFAVRGGIHTVVTARHGERPAGV

SEQ ID NO: 44002 - protein, 165 aa, unidentified
  source 1..165: note = Anaerospora hongkongensis
  REGION 1..165: note = tr|A0A4V2Q8T5|A0A4V2Q8T5_9FIRM NADPH-dependent 7-cyano-7-deazaguanine reductase OS=Anaerospora hongkongensis OX=244830 GN=queF PE=3 SV=1
MSGRKAEELQGVTLLGNQGTGYSYQYDPGVLESFVNKHPGNDYFVKFNCPEFTSLCPMTGQPDFATIYISLVPDQRLVESKSLKLYLFSFRNHGDFHEDCVNIIMKDLIALLDPKYIEVWGKFTPRGGISIDPFCNYGKPGTRWEEAAQKRLFYHDMNPEKVDNR

SEQ ID NO: 44003 - protein, 165 aa, unidentified
  source 1..165: note = Anaerosporomusa subterranea
  REGION 1..165: note = tr|A0A154BPU4|A0A154BPU4_ANASB NADPH-dependent 7-cyano-7-deazaguanine reductase OS=Anaerosporomusa subterranea OX=1794912 GN=queF PE=3 SV=1
MQGRTKAELAGISLLGNQAIDYKFGYDPAVLESFANKHPGNDYFVKFNCPEFTSLCPMTGQPDFATIYISYVPDKLLVESKSLKLYLFSFRNHGDFHEDCVNKIMKDLVELLDPKYIEVWGKFTPRGGISIDPYCNYGKEGTKWQAAAEKRLMYHDMYPEIINNR

SEQ ID NO: 44004 - protein, 165 aa, Anaerostipes caccae
  REGION 1..165: note = tr|B0MAR7|B0MAR7_ANACD NADPH-dependent 7-cyano-7-deazaguanine reductase OS=Anaerostipes caccae (strain DSM 14662 / NCIMB 13811 / L1-92) OX=411490 GN=queF; PE = 3 SV=1
MSGRTNVELGGITLLGNQQTKYPDDYAPEVLETFPNKHPENDYFVKFNAPEFTSLCPMTGQPDFATIYISYVPGERMVESKSLKLYLYSFRNHGDFHEDCMNIIMKDLIKLMDPKYIEVWGKFTPRGGISIDPYCNYGRKGTPWEQIAFDRLAHHDMYPEKVDNR

SEQ ID NO: 44005 - protein, 165 aa, unidentified
  source 1..165: note = Anaerostipes hadrus
  REGION 1..165: note = tr|A0A173WSF0|A0A173WSF0_ANAHA NADPH-dependent 7-cyano-7-deazaguanine reductase OS=Anaerostipes hadrus; OX = 649756 GN=queF PE=3 SV=1
MSGREGQELEGITLLGNQKTKYPDDYAPEVLETFENKHPDNDYFVKFNAPEFTSLCPITGQPDFATIYISYVPGERMVESKSLKLYLYSFRNHGDFHEDCMNIIMKDLIKLMDPKYIEVWGKFTPRGGISIDPYCNYGKPGTKWEEVAWNRLSNHDLYPEKIDNR

SEQ ID NO: 44006 - protein, 165 aa, unidentified
  source 1..165: note = Anaerostipes hadrus
  REGION 1..165: note = tr|D4MUF6|D4MUF6_ANAHA NADPH-dependent 7-cyano-7-deazaguanine reductase OS=Anaerostipes hadrus; OX = 649756 GN=queF PE=3 SV=1
MSGRKSQELEGITLLGNQKTKYPDDYAPEVLETFENKHPENDYFVKFNAPEFTSLCPITGQPDFATIYISYVPGERMVESKSLKLYLYSFRNHGDFHEDCMNIIMKDLIKLMDPKYIEVWGKFTPRGGISIDPYCNYGRPGTKWEDVAWNRLSNHDLYPEKVDNR

SEQ ID NO: 44007 - protein, 165 aa, unidentified
  source 1..165: note = Anaerostipes rhamnosivorans
  REGION 1..165: note = tr|A0A4P8IF45|A0A4P8IF45_9FIRM NADPH-dependent 7-cyano-7-deazaguanine reductase OS=Anaerostipes rhamnosivorans OX=1229621 GN=queF PE=3 SV=1
MSGRTNVELGGITLLGNQQTKYPDDYAPEVLETFPNKHPDNDYFVKFNAPEFTSLCPMTGQPDFATVYISYVPGERMVESKSLKLYLYSFRNHGDFHEDCMNIIMKDLIKLMDPKYIEVWGKFTPRGGISIDPYCNYGKKGTPWEQIAFDRLAHHDMYPEKVDNR

SEQ ID NO: 44008 - protein, 165 aa, Anaerostipes sp.
  REGION 1..165: note = tr|R6RK33|R6RK33_9FIRM NADPH-dependent 7-cyano-7-deazaguanine reductase OS=Anaerostipes sp. CAG:276 OX=1262699 GN=queF PE=3 SV=1
MSGRTNVELGGITLLGNQQTKYPDDYAPEVLETFPNKHPENDYFVKFNAPEFTSLCPMTGQPDFATVYISYVPGERMVESKSLKLYLYSFRNHGDFHEDCMNIIMKDLIKLMDPKYIEVWGKFTPRGGISIDPYCNYGRKGTPWEQIAFDRLAHHDMYPEKVDNR

SEQ ID NO: 44009 - protein, 165 aa, Anaerostipes sp.
  REGION 1..165: note = tr|A0A1Q9K2S7|A0A1Q9K2S7_9FIRM NADPH-dependent 7-cyano-7-deazaguanine reductase OS=Anaerostipes sp. 992a; OX = 1261637 GN=queF PE=3 SV=1
MSGRNKEELEGVTLLGNQKTKYADDYAPEVLETFPNKHPENDYFVKFNCPEFTSLCPMTGQPDFATIYISYVPGERMVESKSLKLYLFSFRNHGDFHEDCVNIIMKDLIRLMDPKYIEVWGKFTPRGGISIDPYCNYGKEGTVWKEVAFNRLANHDLYPEKVDNR

SEQ ID NO: 44010 - protein, 156 aa, Anaerotruncus sp.
  REGION 1..156: note = tr|A0A3A9HU92|A0A3A9HU92_9FIRM NADPH-dependent 7-cyano-7-deazaguanine reductase OS=Anaerotruncus sp. 1XD22-93 OX=2320082 GN=queF PE=3 SV=1
MSQLHALGKQTEYQTDYAPEVLESFENKHMDNDYFVKFNCPEFTSLCPITGQPDFATIYISYVPDRKMVESKSLKLYLFSYRNHGDFHEDCCNKIMKDLINLMEPKYIEVWGKFLPRGGISIDPYCNYGKKGTKWEEMAYDRLAHHDMYPEKVDNR

SEQ ID NO: 44011 - protein, 165 aa, Anaerovibrio lipolyticus
  REGION 1..165: note = tr|A0A1M6BHW7|A0A1M6BHW7_9FIRM NADPH-dependent 7-cyano-7-deazaguanine reductase OS=Anaerovibrio lipolyticus DSM 3074 OX=1120997 GN=queF PE=3 SV=1
MPRDKEEMPEITLLGNQNTKYGFEYDPGVLETFDNKHPDNDYWVKFNCPEFTSLCPITGQPDFATIYISYVPDIKMVESKSLKLYLFSFRNHGDFHEDVVNIIKKDLIKLMNPKYIEVWGKFLPRGGISIDPYTNYGRPGTKFEELAWHRFQQHDLAFMDKVDNR

SEQ ID NO: 44012 - protein, 165 aa, Anaerovibrio lipolyticus; identical to SEQ ID NO: 44011
  REGION 1..165: note = tr|A0A0B2JXW0|A0A0B2JXW0_9FIRM NADPH-dependent 7-cyano-7-deazaguanine reductase OS=Anaerovibrio lipolyticus OX=82374 GN=queF PE=3 SV=1

SEQ ID NO: 44013 - protein, 165 aa, Anaerovibrio sp.
  REGION 1..165: note = tr|A0A3D4ALS3|A0A3D4ALS3_9FIRM NADPH-dependent 7-cyano-7-deazaguanine reductase OS=Anaerovibrio sp.; OX = 1872532 GN=queF PE=3 SV=1
MPRNKEDMPEITLLGNQNTKYGFEYDPGVLETFDNKHPDNDYWVKFNCPEFTSLCPITGQPDFATIYISYVPDIKMVESKSLKLYLFSFRNHGDFHEDVVNIIKKDLIKLMNPKYIEVWGKFLPRGGISIDPYTNYGRPGTKFEELAWHRFQQHDLAFMDKVDNR

SEQ ID NO: 44014 - protein, 165 aa, Anaerovibrio sp.
  REGION 1..165: note = tr|A0A1X1Q4C8|A0A1X1Q4C8_9FIRM NADPH-dependent 7-cyano-7-deazaguanine reductase OS=Anaerovibrio sp. JC8; OX = 1240085 GN=queF PE=3 SV=1
MPRDKENMPEITLLGNQNTKYGFEYDPGVLETFDNKHPDNDYWVKFNCPEFTSLCPITGQPDFATIYISYVPDIKMVESKSLKLYLFSFRNHGDFHEDVVNIIKKDLIKLMNPKYIEVWGKFLPRGGISIDPYTNYGRPGTKFEELAWHRFQQHDLAFMDKVDNR

SEQ ID NO: 44015 - protein, 165 aa, Anaerovirgula multivorans
  REGION 1..165: note = tr|A0A239EB94|A0A239EB94_9FIRM NADPH-dependent 7-cyano-7-deazaguanine reductase OS=Anaerovirgula multivorans OX=312168 GN=queF PE=3 SV=1
MEGRNEKELQEVTLLGNQGVKYNYDYDPAVLESFVNKHPENDYFVKFNCPEFTSLCPKTGQPDFATIYISYVPDNLLVESKSLKLYLLSFRNHGDFHEDCVNIIMKDLIKLMDPKYIEVWGKFTPRGGISIDPYCNYGKEGTKWEGMAEKRLLWHDMYPEKIDNR

SEQ ID NO: 44016 - protein, 153 aa, Ancylobacter aquaticus
  REGION 1..153: note = tr|A0A4R1ICV4|A0A4R1ICV4_ANCAQ NADPH-dependent 7-cyano-7-deazaguanine reductase OS=Ancylobacter aquaticus; OX = 100 GN=queF PE=3 SV=1
MNHVSDGTTQLGRATALPASPEQAVLERVSNPHPGTNYVARFTAPEFTSLCPVTGQPDFAQLVIDYVPGDWLVESKSLKLYLGSFRNHGAFHEDCTVAIGLRLHDLLAPRWLRIGGYWYPRGGIPIDVFWQSSAPLEGVWLPDQGVAPYRGRG

SEQ ID NO: 44017 - protein, 153 aa, Ancylobacter aquaticus
  REGION 1..153: note = tr|A0A431QE72|A0A431QE72_ANCAQ NADPH-dependent 7-cyano-7-deazaguanine reductase OS=Ancylobacter aquaticus; OX = 100 GN=queF PE=3 SV=1
MNDIADGTTQLGRATALPASPEEAVLERVPNPHPGTNYVARFTAPEFTSLCPVTGQPDFAQLVIDYVPDGWLVESKSLKLYLGSFRNHGAFHEDCTVAIGLRLHELLAPRWLRIGGYWYPRGGIPIDVFWQSGAPLDGVWLPDQGVAPYRGRG

SEQ ID NO: 44018 - protein, 153 aa, Ancylobacter rudongensis
  REGION 1..153: note = tr|A0A1G4QBM0|A0A1G4QBM0_9RHIZ NADPH-dependent 7-cyano-7-deazaguanine reductase OS=Ancylobacter rudongensis OX=177413 GN=queF PE=3 SV=1
MNDIADGTTQLGRATALPASPEEAVLERVPNPHPGTNYVARFTAPEFTSLCPVTGQPDFAQLVIDYVPDGWLVESKSLKLYLGSFRNHGAFHEDCTVAIGLRLHELLSPRWLRIGGYWYPRGGIPIDVFWQSGAPLDGVWLPDQGVAPYRGRG

SEQ ID NO: 44019 - protein, 275 aa, Andreprevotia lacus
  REGION 1..275: note = tr|A0A1W1XPQ8|A0A1W1XPQ8_9NEIS NADPH-dependent 7-cyano-7-deazaguanine reductase OS=Andreprevotia lacus DSM 23236 OX=1121001 GN=queF PE=3 SV=1
MSDPQQSPLGKAVSYITEYDPALLFPIPRQGKRDEIGLTGTLPFMGVDIWNGYELSWLNARGKPQVATAVFQVPAQSANIIESKSFKLYLNSFNQTRLDNVEALATLLRDDLSQAVQAPVQVELFEPERWAGLKFAELDGYNIDNLDIEVETYSPQPGLLKCDEADAPVDEVLVSNLLKSNCLVTGQPDWASVQIRYIGQPINRESLLRYLISFRNHNEFHEQCVERIFTDIQRDCKPIKLAVYARYTRRGGLDINPYRCNFNAPAPTNLRTARQ

SEQ ID NO: 44020 - protein, 143 aa, Aneurinibacillus aneurinilyticus
  REGION 1..143: note = tr|U1WZS7|U1WZS7_ANEAE NADPH-dependent 7-cyano-7-deazaguanine reductase OS=Aneurinibacillus aneurinilyticus ATCC 12856 OX=649747 GN=queF PE=3 SV=1
MMSQIQHDYDKYNKIRFDTQDRSAIMEEILETIPYEYVGKKTEVTIPTNEFTSVCPWSGLPDFADIKIIFIPNEKLIEMKSLKFYLTSYRNVGIYQEHVTNKILEDLVKVAEPLYMRVEALWNARGGLGTEVVVEYRKEGYEG

SEQ ID NO: 44021 - protein, 143 aa, Aneurinibacillus danicus
  REGION 1..143: note = tr|A0A511VAL8|A0A511VAL8_9BACL NADPH-dependent 7-cyano-7-deazaguanine reductase OS=Aneurinibacillus danicus OX=267746 GN=queF PE=3 SV=1
MMSQTEHNYDKYNKIRFDIQDRSAIMEDILETIPYEYVGKKTEVTIPTSEFTSVCPWSGLPDFADIRIIFVPNEKLIEMKSLKFYLTSYRNVGIYQEHATNKILEDLVRVADPLYMRVEATWNARGGLGTEVVVEYRKEGYEG

SEQ ID NO: 44022 - protein, 142 aa, Aneurinibacillus migulanus
  REGION 1..142: note = tr|A0A0D1WKG3|A0A0D1WKG3_ANEMI NADPH-dependent 7-cyano-7-deazaguanine reductase OS=Aneurinibacillus migulanus OX=47500 GN=queF PE=3 SV=1
MSQVQHDYDKYNKIRFDTQERSAIMEEILETIPYEYIGKKTEVTIPTNEFTSVCPWSGLPDFADIKIIFIPNEKLIEMKSLKFYLTSYRNVGIYQEHVTNKILEDLVKVADPLYMRVEALWNARGGLGTEVVVEYRKEGYEG

SEQ ID NO: 44023 - protein, 142 aa, unidentified
  source 1..142: note = Aneurinibacillus soli
  REGION 1..142: note = tr|A0A0U5C9N0|A0A0U5C9N0_9BACL NADPH-dependent 7-cyano-7-deazaguanine reductase OS=Aneurinibacillus soli; OX = 1500254 GN=queF PE=3 SV=1
MSTVEHNHEKYNKIRFDTQDETAILVDILETIPYEYAGKKTEIVIPTNEFTSVCPWSGLPDFADIQIAFVPNEKLVEMKSLKFYLTSYRNVGIYQEHATNRILNDLVALCDPLYMKITALWNARGGLGTEVVVEYRKEGYEG

SEQ ID NO: 44024 - protein, 163 aa, Aneurinibacillus sp.
  REGION 1..163: note = tr|A0A0X8D540|A0A0X8D540_9BACL NADPH-dependent 7-cyano-7-deazaguanine reductase OS=Aneurinibacillus sp. XH2 OX=1450761 GN=queF PE=3 SV=1
MRDIHTETEITLLGNQNVEYPSNYCPDLLESFENLHPDVDYFVKFNCPEFTSLCPITKQPDFATIHISYVPDKRLVESKSLKLYLFSFRNHGDFHEDCVNKIMKDLINLLEPKYIEVWGKFLPRGGISIDPYVNWGKEGTRWKQVAEHRLFNHDLNPEKITNR

SEQ ID NO: 44025 - protein, 142 aa, Aneurinibacillus sp.
  REGION 1..142: note = tr|A0A109QHH7|A0A109QHH7_9BACL NADPH-dependent 7-cyano-7-deazaguanine reductase OS=Aneurinibacillus sp. XH2 OX=1450761 GN=queF PE=3 SV=1
MAQVEHNHAKYNNIRFDIQDESAIMVDILETIPYEYVGKKTEVTIPTSEFTSVCPWSGLPDFADIKITFIPNEKLIEMKSLKYYLTSYRNVGIYQEHATNKILEDLVKLADPLYMRVEAIWNARGGLGTEVIVEYRKEGYEG

SEQ ID NO: 44026 - protein, 142 aa, Aneurinibacillus thermoaerophilus; identical to SEQ ID NO: 44025
  REGION 1..142: note = tr|A0A1G7WYG1|A0A1G7WYG1_ANETH NADPH-dependent 7-cyano-7-deazaguanine reductase OS=Aneurinibacillus thermoaerophilus OX=143495 GN=queF PE=3 SV=1

SEQ ID NO: 44027 - protein, 163 aa, Aneurinibacillus thermoaerophilus; identical to SEQ ID NO: 44024
  REGION 1..163: note = tr|A0A1G8BKU8|A0A1G8BKU8_ANETH NADPH-dependent 7-cyano-7-deazaguanine reductase OS=Aneurinibacillus thermoaerophilus OX=143495 GN=queF PE=3 SV=1

SEQ ID NO: 44028 - protein, 165 aa, Anoxybacillus amylolyticus
  REGION 1..165: note = tr|A0A4R1G5K3|A0A4R1G5K3_9BACI NADPH-dependent 7-cyano-7-deazaguanine reductase OS=Anoxybacillus amylolyticus OX=294699 GN=queF PE=3 SV=1
MAGRKEEELKDLTLLGNQGTTYSFTYNPNLLEVFDNKHPDRDYFVKFNCPEFTTLCPKTGQPDFATIYISYIPDKKCVESKSLKLYLFSFRNHGDFHEDCVNIIMNDLIKVMEPRYIEVWGKFTPRGGISIDPYCNWGRPGTKYEKMAEYRLLNHDLYPEKVDNR

SEQ ID NO: 44029 - protein, 171 aa, Anoxybacillus amylolyticus
  REGION 1..171: note = tr|A0A161HYD5|A0A161HYD5_9BACI NADPH-dependent 7-cyano-7-deazaguanine reductase OS=Anoxybacillus amylolyticus OX=294699 GN=queF PE=3 SV=1
MKGEKTMAGRKDEELQGVTLLGNQGTKYLFEYSPEVLEVFDNKHPDRDYFVKFNCPEFTSLCPKTNQPDFATIYISYIPDKKCVESKSLKLYLFSFRNHGDFHEDCVNIIMNDLINVMDPRYIEVWGKFTPRGGISIDPYCNWGRPGTKYEKMAEYRLMNHDLYPEKVDNR

SEQ ID NO: 44030 - protein, 163 aa, Anoxybacillus ayderensis
  REGION 1..163: note = tr|A0A1X6MBW2|A0A1X6MBW2_9BACI NADPH-dependent 7-cyano-7-deazaguanine reductase OS=Anoxybacillus ayderensis OX=265546 GN=queF PE=3 SV=1
MRKDEELQGVTLLGNQGTKYVFEYSPDILEVFDNKHPDRDYFVKFNCPEFTSLCPKTNQPDFATIYISYIPDKKCVESKSLKLYLFSFRNHGDFHEDCVNIIMNDLIRVMEPRYIEVWGKFTPRGGISIDPYCNWGRPGTKYEKMAEYRLLNHDLYPEKVDNR

SEQ ID NO: 44031 - protein, 110 aa, Anoxybacillus ayderensis
  REGION 1..110: note = tr|A0A0D0HQY8|A0A0D0HQY8_9BACI NADPH-dependent 7-cyano-7-deazaguanine reductase OS=Anoxybacillus ayderensis OX=265546 GN=queF PE=3 SV=1
MPKTGQPDFATIYISYIPDKKCVESKSLKLYLFSFRNHGDFHEDCVNIIMNDLIRVMEPRYIEVWGKFTPRGGISIDPYCNWGRPGTKYEKMAEYRLLNHDLYPEKVDNR

SEQ ID NO: 44032 - protein, 163 aa, Anoxybacillus flavithermus
  REGION 1..163: note = tr|A0A178T4S6|A0A178T4S6_9BACI NADPH-dependent 7-cyano-7-deazaguanine reductase OS=Anoxybacillus flavithermus OX=33934 GN=queF PE=3 SV=1
MRKDEELQGVTLLGNQGTKYVFEYSPDILEVFDNKHPDRDYFVKFNCPEFTSLCPKTNQPDFATIYISYIPDKKCVESKSLKLYLFSFRNHGDFHEDCVNIIMNDLIRVMEPRYIEVWGKFTPRGGISIDPYCNWGRPGTKYEQMAEYRLLNHDLYPEKVDNR

SEQ ID NO: 44033 - protein, 163 aa, Anoxybacillus flavithermus
  REGION 1..163: note = tr|R4G1B8|R4G1B8_9BACI NADPH-dependent 7-cyano-7-deazaguanine reductase OS=Anoxybacillus flavithermus NBRC 109594 OX=1315967 GN=queF PE=3 SV=1
MRKEEELQGVTLLGNQGTKYVFEYSPDILEVFDNKHPDRDYFVKFNCPEFTSLCPKTNQPDFATIYISYIPDKKCVESKSLKLYLFSFRNHGDFHEDCVNIIMNDLIRVMEPRYIEVWGKFTPRGGISIDPYCNWGRPGTKYEQMAEYRLLNHDLYPEKVDNR

SEQ ID NO: 44034 - protein, 163 aa, Anoxybacillus gonensis; identical to SEQ ID NO: 44032
  REGION 1..163: note = tr|M5QNW8|M5QNW8_9BACI NADPH-dependent 7-cyano-7-deazaguanine reductase OS=Anoxybacillus gonensis; OX = 198467 GN=queF PE=3 SV=1

SEQ ID NO: 44035 - protein, 163 aa, Anoxybacillus pushchinoensis; identical to SEQ ID NO: 44032
  REGION 1..163: note = tr|A0A1I0U0B3|A0A1I0U0B3_9BACI NADPH-dependent 7-cyano-7-deazaguanine reductase OS=Anoxybacillus pushchinoensis OX=150248 GN=queF PE=3 SV=1

SEQ ID NO: 44036 - protein, 58 aa, Anoxybacillus sp.
  REGION 1..58: note = tr|A0A167UN35|A0A167UN35_9BACI NADPH-dependent 7-cyano-7-deazaguanine reductase domain protein; OS = Anoxybacillus sp. B7M1 OX=1490057 GN=queF PE=4 SV=1
MMSGRKEEELQGVTLLGNQGTKYLFEYSPEILEVFDNKHPDRDYFVKFNCPEFTSLCQ

SEQ ID NO: 44037 - protein, 97 aa, Anoxybacillus sp.
  REGION 1..97: note = tr|A0A0B0HF17|A0A0B0HF17_9BACI NADPH-dependent 7-cyano-7-deazaguanine reductase OS=Anoxybacillus sp. BCO1; OX = 1548750 GN=queF_2 PE=3 SV=1
MPKTGQPDFATIYISYIPDKKCVESKSLKLYLFSFRNHGDFHEDCVNIIMNDLIRVMEPRYIEVWGNLHRAAAFRLTRIATGVARERNTNKWRNIAY

SEQ ID NO: 44038 - protein, 110 aa, unidentified
  source 1..110: note = Anoxybacillus suryakundensis
  REGION 1..110: note = tr|A0A0K6GK49|A0A0K6GK49_9BACI NADPH-dependent 7-cyano-7-deazaguanine reductase OS=Anoxybacillus suryakundensis OX=1325335 GN=queF PE=3 SV=1
MPKTGQPDFATIYISYIPDKKCVESKSLKLYLFSFRNHGDFHEDCVNIIMNDLIRVMEPRYIEVWGKFTPRGGISIDPYCNWGRPGTKYEQMAEYRLLNHDLYPEKVDNR

SEQ ID NO: 44039 - protein, 110 aa, Anoxybacillus thermarum; identical to SEQ ID NO: 44038
  REGION 1..110: note = tr|A0A0D0QAG0|A0A0D0QAG0_9BACI NADPH-dependent 7-cyano-7-deazaguanine reductase OS=Anoxybacillus thermarum OX=404937 GN=queF PE=3 SV=1

SEQ ID NO: 44040 - protein, 110 aa, unidentified
  source 1..110: note = Anoxybacillus vitaminiphilus
  REGION 1..110: note = tr|A0A327YYX9|A0A327YYX9_9BACI NADPH-dependent 7-cyano-7-deazaguanine reductase OS=Anoxybacillus vitaminiphilus OX=581036 GN=queF PE=3 SV=1
MPKTGQPDFATIYISYIPDKKCVESKSLKLYLFSFRNHGDFHEDCVNIIMNDLIKVMEPRYIEVWGKFTPRGGISIDPYCNWGRPGTKYEKMAEYRLLNHDLYPEKVDNR

SEQ ID NO: 44041 - protein, 138 aa, Aphanizomenon flosaquae
  REGION 1..138: note = tr|A0A1B7VY35|A0A1B7VY35_APHFL NADPH-dependent 7-cyano-7-deazaguanine reductase OS=Aphanizomenon flos-aquae LD13 OX=1710894 GN=queF PE=3 SV=1
MSSFAPETDSPASQEMKYGEREIMEGNLITFPNPRIGRRYDINITLPEFTCKCPFSGYPDFATIYISYIPDQRVVELKALKLYINSYRDRYISHEETANQILDDFVAACNPLELIVKTDFTPRGNVHTVVEVKYLQGS

SEQ ID NO: 44042 - protein, 138 aa, Aphanizomenon flosaquae; identical to SEQ ID NO: 44041
  REGION 1..138: note = tr|A0A1B7X289|A0A1B7X289_APHFL NADPH-dependent 7-cyano-7-deazaguanine reductase OS=Aphanizomenon flos-aquae WA102 OX=1710896 GN=queF PE=3 SV=1

SEQ ID NO: 44043 - protein, 130 aa, unidentified
  source 1..130: note = Aphanocapsa feldmannii
  REGION 1..130: note = tr|A0A524RIB8|A0A524RIB8_9CYAN NADPH-dependent 7-cyano-7-deazaguanine reductase OS=Aphanocapsa feldmannii 288cV OX=2507555 GN=queF PE=3 SV=1
MTESTQTPLYGERSIAAGELICFDNPRPGRPYDIEIELPEFTCKCPFSGYPDFAVLRLRYQPGPRVLELKALKLYVNRWRDVAISHEEVVNRMLDDVVAACDPGWMELVADFNPRGNVHTVISVHHGEPR

SEQ ID NO: 44044 - protein, 130 aa, unidentified; identical to SEQ ID NO: 44043
  source 1..130: note = Aphanocapsa feldmannii
  REGION 1..130: note = tr|A0A524RLT5|A0A524RLT5_9CYAN NADPH-dependent 7-cyano-7-deazaguanine reductase OS=Aphanocapsa feldmannii 277cV OX=2507553 GN=queF PE=3 SV=1

SEQ ID NO: 44045 - protein, 138 aa, unidentified
  source 1..138: note = Aphanothece cf.
  REGION 1..138: note = tr|A0A2T1EZU0|A0A2T1EZU0_9CHRO NADPH-dependent 7-cyano-7-deazaguanine reductase OS=Aphanothece cf. minutissima CCALA 015 OX=2107695 GN=queF PE=3 SV=1
MASGVADQPQTVTPLYGERAIAEAQLVCFANPREGRAYEVSIELPEFTCTCPFSGYPDFAVLRLLYQPGPRVLELKALKLYVNSYRHRSISHEEAANRILDDLVAACDPLWMQLEADFNPRGNVHTVVRVSHGERRPC

SEQ ID NO: 44046 - protein, 130 aa, unidentified
  source 1..130: note = Aphanothece hegewaldii
  REGION 1..130: note = tr|A0A2T1LU86|A0A2T1LU86_9CHRO NADPH-dependent 7-cyano-7-deazaguanine reductase OS=Aphanothece hegewaldii CCALA 016 OX=2107694 GN=queF PE=3 SV=1
MSQTSSETELKYGERNILEGELITFPNPRIGRRYEIHITLPEFTCKCPFSGHPDFATIYITYIPNEKIMELKALKLYINSYRDRYISHEEVINVILDDFVAACDPLDVKIKGDFNPRGNVHMAVYIHYKK

SEQ ID NO: 44047 - protein, 136 aa, unidentified
  source 1..136: note = Aphanothece sacrum
  REGION 1..136: note = tr|A0A401IHJ5|A0A401IHJ5_APHSA NADPH-dependent 7-cyano-7-deazaguanine reductase OS=Aphanothece sacrum FPU1 OX=1920663 GN=queF PE=3 SV=1
MTLVPDSESTTLKYGERAIIEGQLITFPNPRIGRKYDIQVTLPEFTCKCPFSGYPDFATIYLTYVPNEKVVELKSLKLYINSYRDRYISHEECVNQILDDFVAACDPLEVTLKGDFSPRGNVHTIIEVCYQKSNSY

SEQ ID NO: 44048 - protein, 150 aa, Aquabacter spiritensis
  REGION 1..150: note = tr|A0A4R3LPP6|A0A4R3LPP6_9RHIZ NADPH-dependent 7-cyano-7-deazaguanine reductase OS=Aquabacter spiritensis; OX = 933073 GN=queF PE=3 SV=1
MTEETLQLGRQVALPASPEAAVLESVPNPHSDTFYVARFTCPEFTSLCPVTGQPDFAHLVIDYVPHRRLVESKSLKLFLAAYRNHGAFHEDCTIDIAKRLVGLVAPHYLRIAGYWAPRGGIPIDVFWQTGTLPAGVWLPEPGVSPYRMRG

SEQ ID NO: 44049 - protein, 154 aa, Aquabacterium commune
  REGION 1..154: note = tr|A0A4R6R135|A0A4R6R135_9BURK NADPH-dependent 7-cyano-7-deazaguanine reductase OS=Aquabacterium commune; OX = 70586 GN=queF PE=3 SV=1
MAKPISVSTRAKPATPPSAPSRSLDVFPNPAPERDYVIQFQVPEFTCFCPLTGQPDFAHFTIDCIADKLCIELKSLKMYMWSYRNDGAFHEKVTNDILTDMVKAINPRYIRITAKWYVRGGIYTNVVVDHRKKGWKPAPKVDLPQLGPETGMLG

SEQ ID NO: 44050 - protein, 175 aa, unidentified
  source 1..175: note = Aquabacterium olei
  REGION 1..175: note = tr|A0A2U8FRG8|A0A2U8FRG8_9BURK NADPH-dependent 7-cyano-7-deazaguanine reductase OS=Aquabacterium olei; OX = 1296669 GN=queF PE=3 SV=1
MAKKASSTAAKAPARARKTAPTEADLVVGERTAPAVPPSVPSRQLDVFPNPAPQRDYVIQFQVPEFTCFCPLTKQPDFAHFTIDCIADELCVELKSLKMYMWSYRNEGAFHEKVTNDILEDIVKAIDPRYLRITAKWYVRGGIYTNVVVEHRKKGWKPAPRVELPQHNAETGLLG

SEQ ID NO: 44051 - protein, 160 aa, Aquabacterium sp.
  REGION 1..160: note = tr|A0A4Q9GVP0|A0A4Q9GVP0_9BURK NADPH-dependent 7-cyano-7-deazaguanine reductase OS=Aquabacterium sp. KMB7; OX = 2528630 GN=queF PE=3 SV=1
MAKKAPAAPAVKVGTRAKPATAPSAPSKHLDVFPNPAPERDYVIQFQIPEFTCFCPLTGQPDFAHFVVDCIADKLCIELKSLKMYMWSYRNEGAFHEKVTNDILSDMVKAINPRYLRITAKWYVRGGIYTNVVVEHRKKGWKPAPKVDLPNLGHETGMMG

SEQ ID NO: 44052 - protein, 148 aa, Aquabacterium sp.
  REGION 1..148: note = tr|A0A0A0DUA9|A0A0A0DUA9_9BURK NADPH-dependent 7-cyano-7-deazaguanine reductase OS=Aquabacterium sp. NJ1; OX = 1538295 GN=queF PE=3 SV=1
MGERAKPATPPSTPSRSLDVFPNPAPERDYVIQFQVPEFTCFCPLTGQPDFAHFTIDCIADKLCIELKSLKMYMWSYRNDGAFHEKVTNDILTDMVKAINPRYLRITAKWYVRGGIYTNVVVEHRKKGWKPAPRVDLPQHNAETGLLG

SEQ ID NO: 44053 - protein, 156 aa, Aquamicrobium sp.
  REGION 1..156: note = tr|A0A4U6BZ93|A0A4U6BZ93_9RHIZ NADPH-dependent 7-cyano-7-deazaguanine reductase OS=Aquamicrobium sp. LC103 OX=1120658 GN=queF PE=3 SV=1
MTDKTDIYANLTQLGGATALPEGPEEAVLEKVPNPQQGTPYCVRFTAPEFTSLCPITGQPDFAHLVIDYVPGQWLVESKSLKLYLGSFRNHGAFHEDCTVSIGKRLVDLLAPEWLRIGGYWYPRGGIPIDVFYQTGPAPQAVWIPDQGVAPYRGRG

SEQ ID NO: 44054 - protein, 143 aa, Aquaspirillum sp.
  REGION 1..143: note = tr|A0A1U9JRD0|A0A1U9JRD0_9NEIS NADPH-dependent 7-cyano-7-deazaguanine reductase OS=Aquaspirillum sp. LM1; OX = 1938604 GN=queF PE=3 SV=1
MNLHEQLHHLGSGTVYRYDQPDASLLERFPNPFAQGALNPAGVTGTLNITCPEFTSLCPVTGQPDFATLVIDMEPDQWCVESKSLKLYLGSFRMHGEFHESCICRIANDLVALLQPHWLRVEGRFTPRGGIPLWPKAEYRRPV

SEQ ID NO: 44055 - protein, 165 aa, unidentified
  source 1..165: note = Aquibacillus sp.
  REGION 1..165: note = tr|A0A516KDT2|A0A516KDT2_9BACI NADPH-dependent 7-cyano-7-deazaguanine reductase OS=Aquibacillus sp. TKL69; OX = 2594883 GN=queF PE=3 SV=1
MAGRRDDDLKDLTLLGNQATSYAFDYAPEVLETFDNKHVNRDYFVKFNCPEFTTLCPKTGQPDFGTVYISYIPDEKMVESKSLKLYLFSFRNHGDFHEDSMNIIMNDLIDLMNPRYIEVWGKFTPRGGISIDPYCNYGRPGTKFEKMADHRMMNHDMYPEKIDNR

SEQ ID NO: 44056 - protein, 274 aa, Aquicella lusitana
  REGION 1..274: note = tr|A0A370GX73|A0A370GX73_9COXI NADPH-dependent 7-cyano-7-deazaguanine reductase OS=Aquicella lusitana; OX = 254246 GN=queF PE=3 SV=1
MRNIDLSQAPLGKSATYHSHYKRDLLFTLPRKTKREEIGIAGTLPFQGNDIWNGFELSWLNTKGKPVVAMAEFIIPCESPRLIESKSFKLYLNSFNNTQFDSYATVENLLVRDLSEAAGASITVTLLPLSHAPALLQRQFEGVSLDEQDIICDRYTPEPRYLKTDNETVTETLYSDLLKSNCLVTGQPDWASLQITYTGKKINHAGLLQYIVSFRDHNEFHEQCVERIFVDISTYCRPERLLVYARYTRRGGLDINPYRANYPIHLKNIRLCRQ

SEQ ID NO: 44057 - protein, 277 aa, Aquicella siphonis
  REGION 1..277: note = tr|A0A5E4PKD6|A0A5E4PKD6_9COXI NADPH-dependent 7-cyano-7-deazaguanine reductase OS=Aquicella siphonis; OX = 254247 GN=queF PE=3 SV=1
MKQIHAELTNAPLGKSSGYISTYQPDLLFPIPRQSKREEIGITGALPFQGQDIWNAFEVSWLNQKGKPAVAAAEFIFPCDSPRLVESKSFKLYLNSLNNTSFESIAMVEKTLGKDLSSAAGASVGVRLIPLALASDQIARQFSGTCLDEMDIECDTYHTRPEYLDTENDIVTETLYSDLLKSNCLVTGQPDWGSVQITYTGKKINHAGLLRYIVSFRNHDEFHEQCVERIFMDILRRCQPDRLLVYARYTRRGGLDINPYRANYFIPAMENLRLVRQ

SEQ ID NO: 44058 - protein, 129 aa, unidentified
  source 1..129: note = Aquifex aeolicus
  REGION 1..129: note = sp|O67073|QUEF_AQUAE NADPH-dependent 7-cyano-7-deazaguanine reductase OS=Aquifex aeolicus (strain VF5) OX=224324 GN=queF PE=3 SV=1
MEAKEKKYGEIEIEKAQLEAWPNPNPERDYMIEITFPEFTCLCPRSGYPDFATIKIRYIPDKYIVELKSLKLWLNKFRNRYISHEAATNEIYQALYDLLKPRFLEVVGDFHPRGNVHTVVRVRSDENYG

SEQ ID NO: 44059 - protein, 129 aa, Aquifex sp.
  REGION 1..129: note = tr|A0A432PV35|A0A432PV35_9AQUI NADPH-dependent 7-cyano-7-deazaguanine reductase OS=Aquifex sp. OX=313370; GN = queF PE=3 SV=1
MDVKEKKYGEIEIEKAELEPWPNPNPERDYVIEITFPEFTCLCPRSGYPDFATIKIRYIPDKYIVELKSLKLWLNKFRNRYISHEAATNEIYKALYDLLKPRFLEVIGDFHPRGNVHTVVKVRSDGKYE

SEQ ID NO: 44060 - protein, 129 aa, Aquifex sp.
  REGION 1..129: note = tr|A0A432PU24|A0A432PU24_9AQUI NADPH-dependent 7-cyano-7-deazaguanine reductase OS=Aquifex sp. OX=313370; GN = queF PE=3 SV=1
MEVREKKYGELEIERAELEAWPNPSPERDYMIEITFPEFTCLCPRSGYPDFATIKIRYIPDKYIVELKSLKLWLNKFRNRYISHEAATNEIYKALYDLLKPRFLEVIGDFHPRGNVHTVVRVRSDEKYG

SEQ ID NO: 44061 - protein, 155 aa, unidentified
  source 1..155: note = Aquificaceae bacterium
  REGION 1..155: note = tr|A0A432F6C1|A0A432F6C1_9AQUI NADPH-dependent 7-cyano-7-deazaguanine reductase OS=Aquificaceae bacterium; OX = 2053503 GN=queF PE=3 SV=1
MSDENIYKNLQQLGGETKLPDSPETALLESVTNPQADIDYVVRFTAPEFTSLCPMTGQPDFAHLMIDYIPAAKLVESKSLKLYLGSFRNHGAFHEDCTVSIARRLIDEIAPKWLRIGGYWYPRGGMPIDVFFAHGEVPKGVWIPEQGVPPYRGRG

SEQ ID NO: 44062 - protein, 129 aa, unidentified
  source 1..129: note = Aquificaceae bacterium
  REGION 1..129: note = tr|A0A350D0A5|A0A350D0A5_9AQUI NADPH-dependent 7-cyano-7-deazaguanine reductase OS=Aquificaceae bacterium; OX = 2053503 GN=queF PE=3 SV=1
MNSMEKKYGEIAIEQAELEPWDNPTPERNYMIEITFPEFSCLCPRSGYPDYATIKIRYIPDKKIVELRSLKLWLNKFRNRYISHEQATNEIYSALYELLKPRFLEVIGDFNPRGNVHTVIKIRSDENYG

SEQ ID NO: 44063 - protein, 126 aa, unidentified
  source 1..126: note = Aquificae bacterium
  REGION 1..126: note = tr|A0A3M2B366|A0A3M2B366_9BACT NADPH-dependent 7-cyano-7-deazaguanine reductase OS=Aquificae bacterium; OX = 2202151 GN=queF PE=3 SV=1
MEKKYGELAIERAELEPWENPNPERDYMIEITFPEFSCLCPRSGYPDYATIRIRYIPDRYIVELRSLKLWLNKFRNRYISHEQATNEIYTALYELLKPRFLEVVGDFNPRGNVHTVVRVRSDGSYL

SEQ ID NO: 44064 - protein, 128 aa, unidentified
  source 1..128: note = Aquificae bacterium
  REGION 1..128: note = tr|A0A3M0WIF5|A0A3M0WIF5_9BACT NADPH-dependent 7-cyano-7-deazaguanine reductase OS=Aquificae bacterium; OX = 2202151 GN=queF PE=3 SV=1
MKYGEKEILEAKLEPWPNPNPEKNYRINITFPEFSCLCPRSGYPDYATIKITYIPDKYIVELKSLKLYLNKYRNQYISHEEATNKIYDDLYNLLKPRFLEVVGDWNPRGNVKTIITVSSEEQVEKSSD

SEQ ID NO: 44065 - protein, 154 aa, unidentified
  source 1..154: note = Aquimixticola soesokkakensis
  REGION 1..154: note = tr|A0A1Y5TFL9|A0A1Y5TFL9_9RHOB NADPH-dependent 7-cyano-7-deazaguanine reductase OS=Aquimixticola soesokkakensis OX=1519096 GN=queF PE=3 SV=1
MVKTDTSGLTQLGANAGLPASPQEAVLERVPHSNAGERYVVRFTAPEFTSLCPMTGQPDFAHIMIDYVPRDWLVESKSLKLFLGSFRNHGAFHEDCSVHIGKRIVELLDPEWLRIGAYWYPRGGIPIDVFWATGPEPQGIWIPEQGVPPYRGRG

SEQ ID NO: 44066 - protein, 305 aa, Aquimonas voraii
  REGION 1..305: note = tr|A0A1G6XZQ0|A0A1G6XZQ0_9GAMM NADPH-dependent 7-cyano-7-deazaguanine reductase OS=Aquimonas voraii; OX = 265719 GN=queF PE=3 SV=1
MLFTPCAGMGRKSPRKAAARIRAMTTHSSGDFHSAAHASTLGKTVEYADHYDASRLFPIPRAAKRSELGIEAPPPFAGVDIWNAWELSWLDPRGKPKVAIAEIRVPADSPCIIESKSFKLYLNGFNQERIDGRDEVQARIEADLSQAAGAPVRVKLKTLDEAAAEPMAEPAGFCIDEIETDIDVYGPPRPELLSAGDDVVDELLVSRLLKSNCPVTGQPDWASVQIGYRGPRIDREGLLRYLVSFRRHDDFHEQCVERIFVDLMRRCAPERLTVQARYTRRGGLDINPWRSTLPGEPGNVRGARQ

SEQ ID NO: 44067 - protein, 129 aa, Aquisalimonas asiatica
  REGION 1..129: note = tr|A0A1H8UKI2|A0A1H8UKI2_9GAMM NADPH-dependent 7-cyano-7-deazaguanine reductase OS=Aquisalimonas asiatica; OX = 406100 GN=queF PE=3 SV=1
MSTQPSRELETFPNPQPERDYTIRMRIPEFTCLCPKTGQPDFATIHLEYVPDRDCVELKSLKLYIWSFRDQGAFHEQVTHDMLSDLVAATKPRFMRVTGEFYVRGGIDTTVIAEHRAPGWTPPQPVVLP

SEQ ID NO: 44068 - protein, 116 aa, Aquisphaera giovannonii
  REGION 1..116: note = tr|A0A5B9WC49|A0A5B9WC49_9BACT NADPH-dependent 7-cyano-7-deazaguanine reductase OS=Aquisphaera giovannonii OX=406548 GN=queF PE=3 SV=1
MPAAVETFPNQFPQREYEIEITCPEFTAVCPKTGQPDFGTIVITYVPAEACLELKSLKLYLFAFRDRGIFYEHSINTILDDLAASCRPRRMKVVGLFNPRGGITSKITASMEAAAR

SEQ ID NO: 44069 - protein, 279 aa, Aquitalea magnusonii
  REGION 1..279: note = tr|A0A3G9GFZ4|A0A3G9GFZ4_9NEIS NADPH-dependent 7-cyano-7-deazaguanine reductase OS=Aquitalea magnusonii; OX = 332411 GN=queF PE=3 SV=1
MTTPHLTPDLSPLGKTVSYQDQYDASLLFPIARKMKRDEIGVDQQALPFAGVDIWTGFELSWLNARGKPQVGIATFRIPADSPNLIESKSFKLYLNSYNQTRIASLEELQAQLALDLSNAAGAAVTVSVLLPQDFAAERIAELDGDYIDEQDIAVDNYAPCPDILRADTGNIVSETLCSNLLKSNCLVTGQPDWGSVQIRYTGPQLDREALLRYLIGFRQHNEFHEQCVERIFTDILRACAPQQLTVYARYTRRGGLDINPWRSNAEQAPLDNTRTARQ

SEQ ID NO: 44070 - protein, 279 aa, Aquitalea magnusonii
  REGION 1..279: note = tr|A0A318IZG6|A0A318IZG6_9NEIS NADPH-dependent 7-cyano-7-deazaguanine reductase OS=Aquitalea magnusonii; OX = 332411 GN=queF PE=3 SV=1
MQPQAMSPEQSPLGKTVSYQDQYDASLLFPIPRQMKRDEIGVDEQALPFAGVDIWTGFELSWLNARGKPQVGIATFRIPADSPNLIESKSFKLYLNSYNQTRIASLAELQAQLALDLSNAAGGTVTVSVQLPQDFAAERIAELDGDYIDEQDIAVDHYAPCPEILRADTGNIVSETLCSNLLKSNCLVTGQPDWGSVQIRYTGPQLDREALLRYLIGFRQHNEFHEQCVERIFTDILRACAPQQLTVYARYTRRGGLDINPWRSNWESAPTANTRTARQ

SEQ ID NO: 44071 - protein, 279 aa, Aquitalea sp.
  REGION 1..279: note = tr|A0A454JKB6|A0A454JKB6_9NEIS NADPH-dependent 7-cyano-7-deazaguanine reductase OS=Aquitalea sp. MWU14-2217 OX=2480983 GN=queF PE=3 SV=1
MKPQAMSPEQSPLGKTVSYQDQYDASLLFPIPRKMKRDEIGVNEQALPFAGVDIWTGFELSWLNARGKPQVGIATFRIPADSPNLIESKSFKLYLNSYNQTRIASLEELQAQLALDLSNAAGGAVSVSVQLPQDFAAERIAELAGDYIDALDIAVDNYAPCPEILRADSSHIVSETLCSNLLKSNCLVTGQPDWGSVQISYTGPQLDREALLRYLIGFRQHNEFHEQCVERIFTDILRACAPQQLTVYARYTRRGGLDINPWRSNAAEPPQHNTRTARQ

SEQ ID NO: 44072 - protein, 279 aa, Aquitalea sp.
  REGION 1..279: note = tr|A0A3N7F6T3|A0A3N7F6T3_9NEIS NADPH-dependent 7-cyano-7-deazaguanine reductase OS=Aquitalea sp. FJL05; OX = 2153366 GN=queF PE=3 SV=1
MKPQAMSPEQSPLGKTVSYQDEYDASLLFPIPRKMKRDEIGVNEQALPFAGVDIWTGFELSWLNARGKPQVGIATFRIPADSPNLIESKSFKLYLNSYNQTRIASLAELQAQLALDLSNAAGRQVSVSVQLPQDFAAECIAELDGDYIDEQDIAVDNYAPCPDILRADSGNIVSETLCSNLLKSNCLVTGQPDWGSVQISYTGPKLEREGLLRYLIGFRQHNEFHEQCVERIFTDILRACAPQQLTVYARYTRRGGLDINPWRSNCAEPPRHNTRTARQ

SEQ ID NO: 44073 - protein, 152 aa, unidentified
  source 1..152: note = Arboricoccus pini
  REGION 1..152: note = tr|A0A212PWS1|A0A212PWS1_9PROT NADPH-dependent 7-cyano-7-deazaguanine reductase OS=Arboricoccus pini; OX = 1963835 GN=queF PE=3 SV=1
MSDPSNLSQLGRPAAPAASPEQAVLERVPNPHPGTVYLVRFTAPEFTSLCPVTGQPDFAHLVLDYVPGDWLVESKSLKLYLTSFRNHGAFHEDCTVGIAKRLIAEIMPTWLRIGGYWYPRGGIPIDVFYQSGRPPTGLWLPEQGVPAYRGRG

SEQ ID NO: 44074 - protein, 125 aa, Archangium gephyra
  REGION 1..125: note = tr|A0A2W5VGY8|A0A2W5VGY8_9DELT NADPH-dependent 7-cyano-7-deazaguanine reductase OS=Archangium gephyra; OX = 48 GN=queF PE=3 SV=1
MPSQPSKKLEVFDNPAPVRDYEIVFDCPEFTCLCPLTGQPDFAHLKISYTPDEKCIESKSLKLFLWSFRNEGCFHERATNEILDALVKACSPRKMTVFGHWFVRGGISTDVTCTFEKKAKSKKKK

SEQ ID NO: 44075 - protein, 134 aa, Archangium gephyra
  REGION 1..134: note = tr|A0A0G3A664|A0A0G3A664_9DELT NADPH-dependent 7-cyano-7-deazaguanine reductase OS=Archangium gephyra; OX = 48 GN=queF PE=3 SV=1
MSSKPTKELKTFPNPAADRDYEIAFDVPEFTCLCPLTGQPDFAKFKIRYVPDELCVELKSLKLYMWSYRDEGAFHEKVTNTIADDIVRAIQPRKLTVEGDFFVRGGIGTLVTVTHEKKGQGAKPAKKSAPARRK

SEQ ID NO: 44076 - protein, 135 aa, Archangium sp.
  REGION 1..135: note = tr|A0A1Q3HW86|A0A1Q3HW86_9DELT NADPH-dependent 7-cyano-7-deazaguanine reductase OS=Archangium sp. Cb G35; OX = 1920190 GN=queF PE=3 SV=1
MPSQPTKELKTFPNPAQDRDYEIAFDVPEFTCLCPLTGQPDFAKFKIRYVPDELCVELKSLKLYMWSYRDEGAFHEKVTNTIADDIVRAIKPRKLTVEGDFFVRGGIGTLVTVTHEKKGRGAKPAAKKSAPARRK

SEQ ID NO: 44077 - protein, 134 aa, unidentified
  source 1..134: note = Archangium violaceum
  REGION 1..134: note = tr|A0A084SKB0|A0A084SKB0_9DELT NADPH-dependent 7-cyano-7-deazaguanine reductase OS=Archangium violaceum Cb vi76 OX=1406225 GN=queF PE=3 SV=1
MPSQPTKELKTFPNPARDRDYEIAFDVPEFTCLCPLTGQPDFAKFKIRYVPDELCVELKSLKLYMWSYRDEGAFHEKVTNTIADDIVRAIKPRKLTVEGDFFVRGGIGTLVTVTHEKKGRGAKAAKKSAPARRK

SEQ ID NO: 44078 - protein, 125 aa, unidentified
  source 1..125: note = Arcobacter anaerophilus
  REGION 1..125: note = tr|A0A4Q0Y1F4|A0A4Q0Y1F4_9PROT NADPH-dependent 7-cyano-7-deazaguanine reductase OS=Arcobacter anaerophilus OX=877500 GN=queF PE=3 SV=1
MKYGEKEIVEFDINNEDNFWPNINEKNYTINIELPEFMAKCPRSGYPDFATIKLEYIPDKLVIELKALKLYINSFMYREVSHENSANEIFDTLYGKLKPKYMKVIADFKPRGNVHTVIEIDSDKM

SEQ ID NO: 44079 - protein, 127 aa, unidentified
  source 1..127: note = Arcobacter aquimarinus
  REGION 1..127: note = tr|A0A4V1LCA6|A0A4V1LCA6_9PROT NADPH-dependent 7-cyano-7-deazaguanine reductase OS=Arcobacter aquimarinus; OX = 1315211 GN=queF PE=3 SV=1
MEIKYGEQEILDFNIDNEENFWPNQHEKNYVIDIELPEFMAKCPRSGYPDFATIKIQYTPNKKVIELKALKIYINSFMNRYISHENSANEIFDILYTKLEPKWLKVIADFKPRGNVHTVIEIDSSKM

SEQ ID NO: 44080 - protein, 125 aa, unidentified
  source 1..125: note = Arcobacter bivalviorum
  REGION 1..125: note = tr|A0A345IU23|A0A345IU23_9PROT NADPH-dependent 7-cyano-7-deazaguanine reductase OS=Arcobacter bivalviorum; OX = 663364 GN=queF PE=3 SV=1
MKYGEKEIVEFDINKEEHFWPNNHSKNYVIDIELPEFMAKCPRSGYPDFATIKLKYIPNERVIELKALKLYINSFMFREVSHENSANEIFDTLYEKLQPKWMKVVADFKPRGNVHTVIEIDSDKM

SEQ ID NO: 44081 - protein, 127 aa, Arcobacter butzleri
  REGION 1..127: note = tr|A0A2W5C908|A0A2W5C908_9PROT NADPH-dependent 7-cyano-7-deazaguanine reductase OS=Arcobacter butzleri; OX = 28197 GN=queF PE=3 SV=1
MEIKYGEKEILEFDINNEENFWPNENSKNYIIDIELPEFMAKCPRSGYPDFATIKIQYTPNKKVIELKALKIYINSFMNRYISHENSANEIFDTLYTKLEPKWLKVIADFKPRGNVHTVIEIDSAKL

SEQ ID NO: 44082 - protein, 127 aa, Arcobacter butzleri; identical to SEQ ID NO: 44081
  REGION 1..127: note = tr|A0A0G9L2B8|A0A0G9L2B8_9PROT NADPH-dependent 7-cyano-7-deazaguanine reductase OS=Arcobacter butzleri L355 OX=1447263 GN=queF PE=3 SV=1

SEQ ID NO: 44083 - protein, 127 aa, unidentified
  source 1..127: note = Arcobacter canalis
  REGION 1..127: note = tr|A0A2G1CSF6|A0A2G1CSF6_9PROT NADPH-dependent 7-cyano-7-deazaguanine reductase OS=Arcobacter canalis; OX = 1912871 GN=queF PE=3 SV=1
MEMKYGEKEIVEFDINNEEHYWPNKNEKNYIINIELPEFMAKCPRSGYPDFATIKLQYTPNKKVIELKALKIYINTFMYREVSHENSANEIFDTLYEKLEPKWMKVVADFKPRGNVHTVIEIDSAKM

SEQ ID NO: 44084 - protein, 127 aa, Arcobacter cibarius
  REGION 1..127: note = tr|A0A5J6RIY1|A0A5J6RIY1_9PROT 7-cyano-7-deazaguanine reductase OS=Arcobacter cibarius; OX = 255507 GN=queF PE=4 SV=1
MEIKYGEKEILEFDINNSENFWPNEHEKNYTIDIELPEFMAKCPRSGYPDFATIKIQYIPNKRVIELKALKIYINSFMNRYISHENSANEIFDTLFNKLEPKWLKVIADFKPRGNVHTIIEIDSSKI

SEQ ID NO: 44085 - protein, 127 aa, unidentified
  source 1..127: note = Arcobacter cloacae
  REGION 1..127: note = tr|A0A4Q0V664|A0A4Q0V664_9PROT NADPH-dependent 7-cyano-7-deazaguanine reductase OS=Arcobacter cloacae; OX = 1054034 GN=queF PE=3 SV=1
MEIKYGEQEILDFNIDNEENFWPNKHEKNYVIDIELPEFMAKCPRSGYPDFATIKIQYTPNKRVIELKALKIYINSFMNRYISHENSANEIFDTLYTKLEPKWLKVIADFKPRGNVHTVIEIDSSKM

SEQ ID NO: 44086 - protein, 127 aa, unidentified
  source 1..127: note = Arcobacter cloacae
  REGION 1..127: note = tr|A0A4Q0ZG07|A0A4Q0ZG07_9PROT NADPH-dependent 7-cyano-7-deazaguanine reductase OS=Arcobacter cloacae; OX = 1054034 GN=queF PE=3 SV=1
MEIKYGEQEILDFNIDNEENFWPNQHEKNYVIDIELPEFMAKCPRSGYPDFATIKIQYTPNKRVIELKALKIYINSFMNRYISHENSANEIFDTLYTKLEPKWLKVIADFKPRGNVHTVIEIDSSKM

SEQ ID NO: 44087 - protein, 127 aa, Arcobacter cryaerophilus
  REGION 1..127: note = tr|A0A494T9H0|A0A494T9H0_9PROT NADPH-dependent 7-cyano-7-deazaguanine reductase OS=Arcobacter cryaerophilus D2610 OX=1032071 GN=queF PE=3 SV=1
MEIKYGEKEILEFDINNEENFWPNEHDKNYIIDIELPEFMAKCPRSGYPDFATIKIQYTPNKRVIELKALKIYINSFMNRYISHENSANEIFDTLFSKLEPKWLKVVADFKPRGNVHTVIEIDSSKI

SEQ ID NO: 44088 - protein, 142 aa, Arcobacter cryaerophilus
  REGION 1..142: note = tr|A0A2S9SJP0|A0A2S9SJP0_9PROT NADPH-dependent 7-cyano-7-deazaguanine reductase QueF (Fragment); OS = Arcobacter cryaerophilus OX=28198 GN=queF PE=4 SV=1
GCDVWTLYELSWLNARGKPMVAVGEVSVPAVSANLIESKSFKLYLNSFNQTRCDSLEAVQAMLVKDLSACAGSEVSVTLFPLAQAPHHIAALPGECIDEQDIEVDCYEFDANLLQGAAGNDQVEETLHSHLLKATCLVTLQP

SEQ ID NO: 44089 - protein, 127 aa, Arcobacter defluvii
  REGION 1..127: note = tr|A0A4Q0UKH7|A0A4Q0UKH7_9PROT NADPH-dependent 7-cyano-7-deazaguanine reductase OS=Arcobacter defluvii; OX = 873191 GN=queF PE=3 SV=1
MEIKYGEKEILEFDINKDENFWPNEHDKNYIIDIELPEFMAKCPRSGYPDFATIKIQYTPNKKVIELKALKIYINSFMNRYISHENSANEIFDTLNSKLEPKWLKVIADFKPRGNVHTVIEIDSSKL

SEQ ID NO: 44090 - protein, 125 aa, unidentified
  source 1..125: note = Arcobacter ebronensis
  REGION 1..125: note = tr|A0A4Q1ARB7|A0A4Q1ARB7_9PROT NADPH-dependent 7-cyano-7-deazaguanine reductase OS=Arcobacter ebronensis; OX = 1462615 GN=queF PE=3 SV=1
MKYGEKEIVDFDINKEENFWPNKNEKNYTINIELPEFMAKCPRSGYPDFATIKIEYIPEKLVIELKALKIYINTFMYREVSHEDVANEIFDTLYDKLKPRFLKVIADFKPRGNVHTVIEIDSSKM

SEQ ID NO: 44091 - protein, 127 aa, Arcobacter ellisii
  REGION 1..127: note = tr|A0A347U4D5|A0A347U4D5_9PROT NADPH-dependent 7-cyano-7-deazaguanine reductase OS=Arcobacter ellisii; OX = 913109 GN=queF PE=3 SV=1
MEIKYGEKEILEFDINNEVNFWPNEHDKNYIIDIELPEFMAKCPRSGYPDFATIKIQYTPNKRVIELKALKIYINSFMNRYISHENSANEIFDTLNSKLEPKWLKVIADFKPRGNVHTVIEIDSSKL

SEQ ID NO: 44092 - protein, 127 aa, Arcobacter halophilus
  REGION 1..127: note = tr|A0A2N1J0T4|A0A2N1J0T4_9PROT NADPH-dependent 7-cyano-7-deazaguanine reductase OS=Arcobacter halophilus; OX = 197482 GN=queF PE=3 SV=1
MEMKYGEKEIVEFDINNEEHYWPNKNDKNYIIDIELPEFMAKCPRSGYPDFATIKLQYTPNKKVIELKALKIYINTFMYREVSHENSANEIFDTLYEKLQPKWMKVVADFKPRGNVHTVIEIDSAKM

SEQ ID NO: 44093 - protein, 127 aa, Arcobacter marinus; identical to SEQ ID NO: 44083
  REGION 1..127: note = tr|A0A1T5BI25|A0A1T5BI25_9PROT NADPH-dependent 7-cyano-7-deazaguanine reductase OS=Arcobacter marinus; OX = 505249 GN=queF PE=3 SV=1

SEQ ID NO: 44094 - protein, 127 aa, Arcobacter marinus
  REGION 1..127: note = tr|A0A347TGT3|A0A347TGT3_9PROT NADPH-dependent 7-cyano-7-deazaguanine reductase OS=Arcobacter marinus; OX = 505249 GN=queF PE=3 SV=1
MEMKYGEKEIVEFDINNEEHYWPNKNEKNYIINIELPEFMAKCPRSGYPDFATIKLQYTPNKKVIELKALKIYINTFIYREVSHENSANEIFDTLYEKLEPKWMKVVADFKPRGNVHTVIEIDSAKM

SEQ ID NO: 44095 - protein, 127 aa, Arcobacter molluscorum
  REGION 1..127: note = tr|A0A2G1DHQ7|A0A2G1DHQ7_9PROT NADPH-dependent 7-cyano-7-deazaguanine reductase OS=Arcobacter molluscorum LMG 25693 OX=870501 GN=queF PE=3 SV=1
MEMKYGEKEIVEFDINNSEHYWPNNNEKNYKIDIELPEFMAKCPRSGYPDFATIKLEYIPNKKLIELKAIKIYINTFMYREISHENSANEIFDTLYKNLEPRWMKVTADFKPRGNVHTVIEIDSSKM

SEQ ID NO: 44096 - protein, 127 aa, Arcobacter mytili
  REGION 1..127: note = tr|A0A345J1F7|A0A345J1F7_9PROT NADPH-dependent 7-cyano-7-deazaguanine reductase OS=Arcobacter mytili LMG 24559 OX=1032238 GN=queF PE=3 SV=1
MEMKYGEKEIVEFDINSKEHYWPNNNEKNYIIDIELPEFMAKCPRSGYPDFATIKLQYTPNKKLIELKALKLYINTFMFREVSHENSANEIFDTLYKNLEPRWMKVVADFKPRGNVHTVIEIDSAKM

SEQ ID NO: 44097 - protein, 125 aa, Arcobacter nitrofigilis
  REGION 1..125: note = tr|D5V3H9|D5V3H9_ARCNC NADPH-dependent 7-cyano-7-deazaguanine reductase OS=Arcobacter nitrofigilis (strain ATCC 33309 / DSM 7299 / LMG 7604 / NCTC 12251 / CI) OX=572 480 GN=queF PE=3 SV=1
MKYGEKEIVEFDINKEENFWPNKNDKNYVINIELPEFMAKCPRSGYPDFATIFIHYTPNKKVIELKALKLYINSFMLREVSHENGANEIFDTLMEKLEPKWLKVIADFKPRGNVHTVIEIDSAKL

SEQ ID NO: 44098 - protein, 127 aa, unidentified
  source 1..127: note = Arcobacter pacificus
  REGION 1..127: note = tr|A0A5C2H2J8|A0A5C2H2J8_9PROT NADPH-dependent 7-cyano-7-deazaguanine reductase OS=Arcobacter pacificus; OX = 1080223 GN=queF PE=3 SV=1
MEIKYGEQEILDFDINSEENFWPNNHEKNYVIKIELPEFMAKCPRSGYPDFATIYLEYTPDKLVIELKALKIYINSFMFRHVSHENSINEIFDTLYNKLQPKWMKVIGDFKPRGNVHTVIEIDSSKM

SEQ ID NO: 44099 - protein, 127 aa, Arcobacter skirrowii
  REGION 1..127: note = tr|A0A2U2C3N5|A0A2U2C3N5_9PROT NADPH-dependent 7-cyano-7-deazaguanine reductase OS=Arcobacter skirrowii; OX = 28200 GN=queF PE=3 SV=1
MEIKYGEKEILEFDINNPENFWPNQHDKNYIIDIELPEFMAKCPRSGYPDFATIKIQYRPNKRVIELKALKIYINSFMNRYISHENSANEIFDTLFSKLEPKWLKVVADFKPRGNVHTVIEIDSSKL

SEQ ID NO: 44100 - protein, 127 aa, Arcobacter skirrowii
  REGION 1..127: note = tr|A0A4V1LB81|A0A4V1LB81_9PROT NADPH-dependent 7-cyano-7-deazaguanine reductase OS=Arcobacter skirrowii CCUG 10374 OX=1032239 GN=queF PE=3 SV=1
MEIKYGEKEILEFDINNPENFWPNQHDKNYIIDIELPEFMAKCPRSGYPDFATIKIQYTPNKRVIELKALKIYINSFMNRYISHENSANEIFDTLFSKLEPKWLKVVADFKPRGNVHTVIEIDSSKL

SEQ ID NO: 44101 - protein, 127 aa, Arcobacter sp.
  REGION 1..127: note = tr|A0A2D5JC75|A0A2D5JC75_9PROT NADPH-dependent 7-cyano-7-deazaguanine reductase OS=Arcobacter sp.; OX = 1872629 GN=queF PE=3 SV=1
MEMKYGEKEIREFDINNDENFWPNKNKKNYIIDIELPEFMAKCPRSGYPDFAEIKIQYTPDEKVIELKALKIYINTFMFREVSHENSANEIFDTLYENLKPKWLKVIADFKPRGNVHTVIEIDSAKM

SEQ ID NO: 44102 - protein, 125 aa, Arcobacter sp.
  REGION 1..125: note = tr|A0A2N6G569|A0A2N6G569_9PROT NADPH-dependent 7-cyano-7-deazaguanine reductase OS=Arcobacter sp.; OX = 1872629 GN=queF PE=3 SV=1
MKYGEKEIVEFDINKEENFWPNENDKNYVINIELPEFMAKCPRSGYPDFATIFLHYTPNKTVIELKALKLYINSFMIREISHENVANEIFDTLMEKLEPRWLKVVADFKPRGNVHTVIEIDSNKL

SEQ ID NO: 44103 - protein, 127 aa, unidentified
  source 1..127: note = Arcobacter suis
  REGION 1..127: note = tr|A0A443TPZ7|A0A443TPZ7_9PROT NADPH-dependent 7-cyano-7-deazaguanine reductase OS=Arcobacter suis; OX = 1278212 GN=queF PE=3 SV=1
MEMKYGEREILEFDINKEENFWPNIHEKNYIIDIELPEFMAKCPRSGYPDFATIKIQYSPNKRVIELKALKIYINSFMFREVSHENSINEIFDTLYAKLEPKWMKVIGDFKPRGNVHTVIEIDSSKF

SEQ ID NO: 44104 - protein, 127 aa, Arcobacter trophiarum
  REGION 1..127: note = tr|A0A4Q0ZZ23|A0A4Q0ZZ23_9PROT NADPH-dependent 7-cyano-7-deazaguanine reductase OS=Arcobacter trophiarum LMG 25534 OX=1032241 GN=queF PE=3 SV=1
MEIKYGEKEILEFDINNPENFWPNEHNKNYIIDIELPEFVAKCPRSGYPDFATIKIQYTPNKSVIELKALKIYINSFMNRYISHENSANEIFDTLFSKLEPKWLKVIADFKPRGNVHTIIEIDSSKI

SEQ ID NO: 44105 - protein, 127 aa, unidentified
  source 1..127: note = Arcobacter venerupis
  REGION 1..127: note = tr|A0A443TSY5|A0A443TSY5_9PROT NADPH-dependent 7-cyano-7-deazaguanine reductase OS=Arcobacter venerupis; OX = 1054033 GN=queF PE=3 SV=1
MEMKYGEKEIREFDINKEENFWPNAHEKNYIIDIELPEFMAKCPRSGYPDFATIKLQYTPNKKVIELKALKIYINTFMFREVSHENSINEIFDTLYAKLEPKWMKVIGDFKPRGNVHTVIEIDSSKF

SEQ ID NO: 44106 - protein, 283 aa, Arenicella xantha
  REGION 1..283: note = tr|A0A395JPI3|A0A395JPI3_9GAMM NADPH-dependent 7-cyano-7-deazaguanine reductase OS=Arenicella xantha; OX = 644221 GN=queF PE=3 SV=1
MTQYSDKPELNALTLGQATAYVSAYTPSLLQAVPRQLNRQELGVVEEQPFAGEDVWHAYELSWLNPRGKPIVALARFSFAASTVNLVESKSFKLYLNSFNQSRFESHAAVREALLRDLANVAVGPVTVELIAPDDVQTLVTMPLPGKCIDELDIDIDAYQLAPNVLRLRESDAVVSETLHSHLLKSNCLITNQPDWASVIIEYQGAPIDHESLLRYLVSFRLHNEFHEQCVERIYMDILNVCQPSRLAVQALYTRRGGLDICPFRASKANQGVVSPRRRINRQ

SEQ ID NO: 44107 - protein, 275 aa, unidentified
  source 1..275: note = Arenimonas caeni
  REGION 1..275: note = tr|A0A2P6M7F3|A0A2P6M7F3_9GAMM NADPH-dependent 7-cyano-7-deazaguanine reductase OS=Arenimonas caeni; OX = 2058085 GN=queF PE=3 SV=1
MSSPEASQLGKPTAYGSDYDPGLLFPIPRAQARAALGLGEDLPFVGADLWNAYELSWLDGRGKPRVALAELRVPAASPNLVESKSLKLYLGSYAMARFTDTDALRAQLVADLSAAAGAPVSVVLTPAGSNNVALIENLEGDVIDDLPIEVSHYGPPRPDFLSADPELKADEVLVSHLLRSNCPVTGQPDWASVQIRYAGPRIARDGLLRYLVSYRQHSDFHESCVERIFMDILGRCAPTRLAVYARYTRRGGLDINPFRATPGLPLPGNPRTNRQ

SEQ ID NO: 44108 - protein, 275 aa, Arenimonas composti
  REGION 1..275: note = tr|A0A091C1P4|A0A091C1P4_9GAMM NADPH-dependent 7-cyano-7-deazaguanine reductase OS=Arenimonas composti TR7-09 = DSM 18010 OX=1121013 GN=queF PE=3 SV=1
MTSPELSPLGKPVGYGADYDPSLLFPIPRAQQRAALGLDAELPFTGVDFWNAYELSWLDSRGKPRVAMAELRVPAASPNLIESKSLKLYLGSYAQQQFGDTDSLRAQLVRDLGEACGAPVTVVLTPVASNNAAIIENLEGEVIDDLPVEITHYGPPRPDFLQVDDEKKVDEVLVSHLFRSNCPVTGQPDWASLQIRYAGPRILRDGLLRYLVSYRMHADFHEQCVERIFMDLMQHCTPSRLAVYARYTRRGGLDINPFRATPGLPLPGNPRTARQ

SEQ ID NO: 44109 - protein, 275 aa, Arenimonas donghaensis
  REGION 1..275: note = tr|A0A087MGK0|A0A087MGK0_9GAMM NADPH-dependent 7-cyano-7-deazaguanine reductase OS=Arenimonas donghaensis DSM 18148 = HO3-R19 OX=1121014 GN=queF PE=3 SV=1
MTSPELSPLGKAVAYGGDYDPSLLFPIARAQSRATLGLGNDLPFGGVDFWNAYELSWLDGRGKPRVALAELRVPAASPNIIESKSLKLYLGSYAMARFSDTDSLRAQLVADLSAASGATVSVVLTPAGSNNVALIENLEGDLIDDLPIDISHYGPPRPDFLACDEETRADEILVSHLLKSNCPVTGQPDWASVQIRYAGPRIARDGLLRYLVSYRQHSDFHESCVERIFMDLMQHCAPTRLAVYARYTRRGGLDINPFRATPGLPLPGNPRTNRQ

SEQ ID NO: 44110 - protein, 275 aa, Arenimonas malthae
  REGION 1..275: note = tr|A0A091B5G3|A0A091B5G3_9GAMM NADPH-dependent 7-cyano-7-deazaguanine reductase OS=Arenimonas malthae CC-JY-1 OX=1384054 GN=queF PE=3 SV=1
MTSPESSLLGKPVSYNADYDPNLLFPIPRAGQREALGIGDELPFVGVDFWNAYELSWLDNRGKPRVALAELRVPAASPNLIESKSLKLYLGSCAMARFADADTLRAQLVADLSAAAGAPVSVVLTPAGSSNAALIENLEGDSIDDLPVEISHYGPPKPEFLSSDPELKADEVLVSHLLKSNCPVTGQPDWASVQIRYAGPRIARDGLLRYLVSYRQHSDFHESCVERIFMDILRQCSPTRLAVYARYTRRGGLDINPFRATPGLPLPGNPRTNRQ

SEQ ID NO: 44111 - protein, 275 aa, unidentified
  source 1..275: note = Arenimonas metalli
  REGION 1..275: note = tr|A0A091BP77|A0A091BP77_9GAMM NADPH-dependent 7-cyano-7-deazaguanine reductase OS=Arenimonas metalli CF5-1 OX=1384056 GN=queF PE=3 SV=1
MTSPELSPLGKAVEYGNDYDPSLLFPIARATQRAALGLGEELPFVGVDFWNAYELSWLDGRGKPRVALAEFRVQAASPNIIESKSFKLYLGSYAQARFSDTDALRAQLVRDLSEASGAPVSVVLTPASTNNTALIETLEGDLIDDLPIEISHYGPPRPDFLSSDPELKADEILVSHLLKSNCPVTGQPDWASVQIRYAGPRIARDGLLRYLVSFRNHSDFHEQCVERIFMDLMQHCAPTRLAVYARYTRRGGLDINPFRATPGLPLPGNPRTARQ

SEQ ID NO: 44112 - protein, 275 aa, Arenimonas oryziterrae
  REGION 1..275: note = tr|A0A091BHX1|A0A091BHX1_9GAMM NADPH-dependent 7-cyano-7-deazaguanine reductase OS=Arenimonas oryziterrae DSM 21050 = YC6267 OX=1121015 GN=queF PE=3 SV=1
MDPLDQSSLGKPVVYAGSYDPGLLFPIARADKRAELGIGADLPFIGIDIWNAFELSWLDARGKPRVAIAEFRVPAESPNIVESKSFKLYLNSYMQTRVPDTDTLRAQLARDLGAAAGAPVSVVLTTPTAKQAAPVGPLEGEVIDDLPIEVTHYGPPRPDLLYVNPEAMVEETLVSHLLKSNCPVTGQPDWASLQIHYTGARLGRDGLLRYLVSFREHNDFHEQCVERVFMDILRECAPSRLSVYARYTRRGGLDINPFRCTPGWLMPENIRTSRQ

SEQ ID NO: 44113 - protein, 275 aa, Arenimonas sp.
  REGION 1..275: note = tr|A0A2D8B9G3|A0A2D8B9G3_9GAMM NADPH-dependent 7-cyano-7-deazaguanine reductase OS=Arenimonas sp.; OX = 1872635 GN=queF PE=3 SV=1
MTSPELSPLGKAVEYGGDYDPSLLFPIARAQSRATLGLGDELPFGGVDFWNAYELSWLDGRGKPRVALAELRVPAASPNIIESKSLKLYLGSYAMARFADTDALRTQLVGDLTQAAGAPVSVVLTPAGSNNVALIENLEGDLIDDLPIEISHYGPPRPDFLSCDAETKADEILVSHLLKSNCPVTGQPDWASVQIRYAGPRIARDGLLRYLVSFRQHSDFHESCVERIFMDLMQHCAPTRLAVYARYTRRGGLDINPFRATPGLPLPGNPRTNRQ

SEQ ID NO: 44114 - protein, 275 aa, Arenimonas sp.
  REGION 1..275: note = tr|A0A5B2Z880|A0A5B2Z880_9GAMM NADPH-dependent 7-cyano-7-deazaguanine reductase OS=Arenimonas sp. 3729k; OX = 2608255 GN=queF PE=3 SV=1
MSSPDLGPLGRAVAYPAEYDPGLLFPIARATGRAALGLEGELPFTGVDLWNAYELSWLDARGKPRVALAELRVPAASSHLIESKSLKLYLGSYAQARFADTDSLRAQLVRDLSAVAGAPVSVVLTPAASANAAAIEALEGEPIDDLPLEIGHYGPPQPDFLSADPDLRADEVLVSHLLKSNCPVTGQPDWASVQIRYAGPRIARDGLLRYLVSYRLHRDFHEQCVERIFMDILQRCRPQRLAVYARYTRRGGLDINPFRATPGMPLPGNPRTARQ

SEQ ID NO: 44115 - protein, 121 aa, unidentified
  source 1..121: note = Armatimonadetes bacterium
  REGION 1..121: note = tr|A0A399X1H8|A0A399X1H8_9BACT NADPH-dependent 7-cyano-7-deazaguanine reductase OS=Armatimonadetes bacterium OX=2033014 GN=queF PE=3 SV=1
MSRELLETFPNPRPGREYTIEHVAPEFTSLCPKTGQPDFATITLTYAPAELCVELKSLKMYYHSFRNKGIFYEAVVNEMLDDFVAAFDPLWIEVRGEFHVRGGISSVVVAQSSRAEEPPNR

SEQ ID NO: 44116 - protein, 123 aa, unidentified
  source 1..123: note = Armatimonadetes bacterium
  REGION 1..123: note = tr|A0A1Q7RD58|A0A1Q7RD58_9BACT NADPH-dependent 7-cyano-7-deazaguanine reductase OS=Armatimonadetes bacterium 13_1_40CM_3_65_7 OX=1805024 GN=queF PE=3 SV=1
MRDPEEVRSDLLDTFPYEYPGSPATVEISTEEFTAVCPWSGLPDFGGVTVRYLPRERVLELRSFKYYLLSYRNVGIYQEHAANRILADLVRACAPGWMELELDYRVRGGVHTVVRVRWPGAGP

SEQ ID NO: 44117 - protein, 283 aa, unidentified
  source 1..283: note = Aromatoleum aromaticum
  REGION 1..283: note = sp|Q5P6G9|QUEF_AROAE NADPH-dependent 7-cyano-7-deazaguanine reductase OS=Aromatoleum aromaticum (strain EbN1) OX=76114 GN=queF PE=3 SV=1
MNPSDTHDHGAEASPLGQSVVYRDSYAPELLFPIARQIKRDELGLAPDTLPFVGEDLWNAYELSWLNSRGKPVAAIGTFRVPVTSPRLIESKSLKLYLNSFNQHRFVDPTLVHDTLTRDLSTAAGAPVAVSIEVLSRRPTRVFGYPHGVLLDEIDIEIDTYRTDPAFLQSDFNADEVSETLYSHLLKSNCLVTGQPDWGTIVLRYIGPPIDRAGLLRYIVSFRSHNEFHEQCVERIFCDVLRRCAPRHLAVWARYTRRGGLDINPFRSTGHFTQFDNIAEVRQ

SEQ ID NO: 44118 - protein, 281 aa, unidentified
  source 1..281: note = Arsenophonus endosymbiont
  REGION 1..281: note = tr|A0A4V1M2G0|A0A4V1M2G0_9GAMM NADPH-dependent 7-cyano-7-deazaguanine reductase OS=Arsenophonus endosymbiont of Bemisia tabaci Asia II 3 OX=1868623; GN = queF PE=3 SV=1
MPLDQDNGELQHLTLGKKTEYQDNYAPHLLQAVPRRLNRQPLGLSSDRLPFHGADIWTLYELSWLNSRGVPQVAIGHVTISANSINLIESKSFKLYLNSFNQNQFISWQKVEKQLTQDLTACAAGDVTIKLQPLTMFANQTIHNLSGECIDEQEIEITDYEFNRDYLNNATTNIKAEETLVSHLLKSNCLITNQPDWGSIQIHYCGAKIDREKLLRYLISFRHHNEFHEQCVERIFNDILQLCQPDKLSVYARYTRRGGLDINPWRSNESFKPTMMRLARQ

SEQ ID NO: 44119 - protein, 281 aa, unidentified
  source 1..281: note = Arsenophonus endosymbiont
  REGION 1..281: note = tr|A0A3B0MAY0|A0A3B0MAY0_9GAMM NADPH-dependent 7-cyano-7-deazaguanine reductase OS=Arsenophonus endosymbiont of Trialeurodes vaporariorum OX=235567; GN = queF PE=3 SV=1
MPLDQDNGKLQRLTLGKKTEYQDNYAPHLLQAVPRRLNRKPLGLSSDRLPFHGADIWTLYELSWLNSRGVPQVVIGHVTINANSINMIESKSFKLYLNSVNQTQFISWQEVEKQLTQDVTACAAGVVTVKLQPLTMFANQTIHNLSGECIDEPEIEITDYEFNRDYLNNATTNIKAEETLVSHLLKSNCLITNQPDWGSIQIHYCGAKIDREKLLRYLVSFRHHNEFHEQCVERIFNDILQLCQPDKLSVYARYTRRGGLDINPWRSNESFQPTMMRLARQ

SEQ ID NO: 44120 - protein, 281 aa, Arsenophonus nasoniae
  REGION 1..281: note = tr|D2U273|D2U273_9GAMM NADPH-dependent 7-cyano-7-deazaguanine reductase OS=Arsenophonus nasoniae; OX = 638 GN=queF_1 PE=3 SV=1
MPIYQDNGELQHLTLGKKTEYQDNYAPHLLQAVPRRLNRQPLGLSSDKLPFHGADIWTLYELSWLNSRGVPQVAIGHVTINANSVNLIESKSFKLYLNSFNQTKFISWQEVEKQLTQDLTACAAGEVIVKLQPLTIFTDQTINNLPGECIDEQEIEITDYEFNRNYLKNATESILVEETLVSHLLKSNCLITNQPDWGSIQIHYFGPKIDREKLLRYLVSFRHHNEFHEQCVERIFNDILQLCQPNKLSVYARYTRRGGLDINPWRSNENSQPTIMRLARQ

SEQ ID NO: 44121 - protein, 235 aa, Arsenophonus nasoniae
  REGION 1..235: note = tr|D2U164|D2U164_9GAMM NADPH-dependent 7-cyano-7-deazaguanine reductase OS=Arsenophonus nasoniae; OX = 638 GN=queF PE=3 SV=1
MSFFGEDIWNLYELSWLNKNGVPQVAIGEVKIDSNSINLIESKSFKLYLNSFNQTFFDSIDIVRDSIKEDLSACAEGNVLVKLANLSECKAISLINFDGISIDNNNIIINKYDYSPEILEDATKNNSPVITECLVSNLLKSNCLVTNQPDWGSVLITYKGAKINRDILLKYIISFRNHNEFHEQCIERIFSDILFYCKPLELSVYGRYTRRGGLDINPWRSTNHLEIENLRLPRQ

SEQ ID NO: 44122 - protein, 281 aa, Arsenophonus sp.
  REGION 1..281: note = tr|A0A2A2GX94|A0A2A2GX94_9GAMM NADPH-dependent 7-cyano-7-deazaguanine reductase OS=Arsenophonus sp. ENCA; OX = 1987579 GN=queF PE=3 SV=1
MPLDQDNGELQHLTLGKKTEYQDNYAPHLLQAVPRRLNRQPLGLSSNRLPFHGADIWTLYELSWLNSRGVPQVAIGHVTINANSINLIESKSFKLYLNSFNQTQFISWQEVEKQLTQDLTVCAAGEVTVKLQPLTMFANQTIHNLSGECIDEQEIEITDYEFNRDYLNNATTNTKAEETLVSHLLKSNCLITNQPDWGSIQIHYCGAKIDREKLLRYLVSFRHHNEFHEQCVERIFNDILQLCQPDKLSVYARYTRRGGLDINPWRSNESFQPTMMRLARQ

SEQ ID NO: 44123 - protein, 281 aa, unidentified
  source 1..281: note = Arsukibacterium ikkense
  REGION 1..281: note = tr|A0A0M2V925|A0A0M2V925_9GAMM NADPH-dependent 7-cyano-7-deazaguanine reductase OS=Arsukibacterium ikkense OX=336831 GN=queF PE=3 SV=1
MTKSHSEIMAGLSLGKTTAYAEQYDPSLLQPVPRSLGRDNLGLDHTTPLPFIGEDIWHGYELSWLNAKGKPMVALATFVVPLSSPHLIESKSFKLYLNSFNQSRFDDLRQVYQALQRDLSACAGAPVRVTLHNVNEIMVFQPTWIPGHCIDDLDISIDSYQYDPTLLQLAGSADIVDEKVHSHLLKSNCLITSQPDWASVYIHYRGQAIDHAALLRYLISFRSHNEFHEQCVERIFLDIWLRCKPDYLLVYARYTRRGGLDINPVRASASYKLPNLRLSRQ

SEQ ID NO: 44124 - protein, 280 aa, unidentified
  source 1..280: note = Arsukibacterium sp.
  REGION 1..280: note = tr|A0A0M2VHZ9|A0A0M2VHZ9_9GAMM NADPH-dependent 7-cyano-7-deazaguanine reductase OS=Arsukibacterium sp. MJ3 OX=1632859 GN=queF PE=3 SV=1
MTKSHSEIMAGLSLGKITAYAEQYDASLLQPVPRSLGRDSLGIDPTHLPFIGEDIWHGYELSWLNAKGKPMVALATFVVPINSANLVESKSFKLYLNSFNQSRFSDLRQVYQALQRDLSACAGSTVQVTLHNVNEIMVFQPTWIPGHCIDDLDISIDSYQYDPSLLQLAEPAAAVDEKVHSHLLKSNCLITSQPDWASVYIHYRGQAIDHAALLRYLISFRSHNEFHEQCIERIFLDIWQRCQPEYLLVYARYTRRGGLDINPVRASASYKLPNLRLSRQ

SEQ ID NO: 44125 - protein, 157 aa, unidentified
  source 1..157: note = Arthrospira maxima
  REGION 1..157: note = tr|B5W9E9|B5W9E9_LIMMA NADPH-dependent 7-cyano-7-deazaguanine reductase OS=Arthrospira maxima CS-328 OX=513049 GN=queF PE=3 SV=1
MGDRNWLFIVEPNMSNSQVKSSETESVTNTELKYGERQITEGQLITFPNPRPGRSYQINIVLPEFTCKCPFSGYPDFATIDLTYVPDQSVVELKSIKLYINSYRDRYISHEESVNQILDDFVAACDPLSVHIKGDFNPRGNVHTVVEVHHHKQHPES

SEQ ID NO: 44126 - protein, 157 aa, unidentified
  source 1..157: note = Arthrospira platensis
  REGION 1..157: note = tr|K1W5E8|K1W5E8_ARTPT NADPH-dependent 7-cyano-7-deazaguanine reductase OS=Arthrospira platensis C1 OX=459495 GN=queF PE=3 SV=1
MGDRNWLFIVDANMSNSQVKSSETESVTNTELKYGERQITEGQLITFPNPRPGRSYQINIVLPEFTCKCPFSGYPDFATIDLTYVPDQSVVELKSIKLYINSYRDRYISHEESVNQILDDFVAACDPLSVHIKGDFNPRGNVHTVVEVHHHKQHPES

SEQ ID NO: 44127 - protein, 144 aa, unidentified
  source 1..144: note = Arthrospira platensis
  REGION 1..144: note = tr|D5A695|D5A695_ARTPN NADPH-dependent 7-cyano-7-deazaguanine reductase OS=Arthrospira platensis (strain NIES-39 / IAM M-135) OX=696747 GN=queF PE=3 SV=1
MSNSQVKPSETESVTNTEPRYGEREISEGQLITFPNPRPGRSYQINIVLPEFTCKCPFSGYPDFATIDLTYVPDQSVVELKSIKLYINSYRDRYISHEESVNQILDDFVAACDPLSVHIKGDFNPRGNVHTVVEVHHHKHQQTN

SEQ ID NO: 44128 - protein, 119 aa, Arthrospira sp.
  REGION 1..119: note = tr|A0A328V572|A0A328V572_9CYAN NADPH-dependent 7-cyano-7-deazaguanine reductase (Fragment) OS=Arthrospira sp. O9.13F OX=1982223 GN=B9S53_23675 PE=3 SV=1
ITEGQLITFPNPRPGRSYQINIVLPEFTCKCPFSGYPDFATIDLTYVPDQSVVELKSIKLYINSYRDRYISHEESVNQILDDFVAACDPLSVHIKGDFNPRGNVHTVVEVHHHKQHPES

SEQ ID NO: 44129 - protein, 191 aa, Asaccharobacter celatus
  REGION 1..191: note = tr|A0A369P3U7|A0A369P3U7_9ACTN NADPH-dependent 7-cyano-7-deazaguanine reductase OS=Asaccharobacter celatus OX=394340 GN=queF PE=3 SV=1
MAAIAAHLAREDAGPAPATAPAAASAGRDENETRAGGVTLLGNQHTQYPTDYDPSVLETFENKHPGNDYFVKFNCPEFTSLCPITGQPDFATIYISYVPDVRMVESKSLKLYLFSFRNHGDFHEDCMNIIMKDLIALMDPKYIEVWGKFTPRGGISIDPYCNYGRPGTRWEEVAWTRLSQHDLYPEKVDNR

SEQ ID NO: 44130 - protein, 194 aa, Asaccharobacter celatus
  REGION 1..194: note = tr|A0A369NZB6|A0A369NZB6_9ACTN NADPH-dependent 7-cyano-7-deazaguanine reductase OS=Asaccharobacter celatus OX=394340 GN=queF PE=3 SV=1
MAAIAAHLAREDAGSAPVAPAPAPAAAPAGRDEGETRAGGVTLLGNQHTQYPTDYDPSVLETFENKHPGNDYFVKFNCPEFTSLCPITGQPDFATIYISYVPDVRMVESKSLKLYLFSFRNHGDFHEDCMNIIMKDLIALMNPKYIEVWGKFTPRGGISIDPYCNYGRPGTRWEEVAWTRLSQHDLYPEKVDNR

SEQ ID NO: 44131 - protein, 167 aa, unidentified
  source 1..167: note = Asaccharospora irregularis
  REGION 1..167: note = tr|A0A1M5QM02|A0A1M5QM02_9FIRM NADPH-dependent 7-cyano-7-deazaguanine reductase OS=Asaccharospora irregularis DSM 2635 OX=1121321 GN=queF PE=3 SV=1
MHQSGRKKEELQDITLLGNQGTKYEFGYTPEVLEVFDNKHPNNDYFVKFNCPEFTSLCPITGQPDFATIYISYIPGEKMVESKSLKLYLFSFRNHGDFHEDCMNIIMKDLIKLMDPKYIEVWGKFTPRGGISIDPYCNYGMPGTKFEDMANHRLMNHDMYPEKVDNR

SEQ ID NO: 44132 - protein, 156 aa, Asaia bogorensis
  REGION 1..156: note = tr|A0A0P0YD52|A0A0P0YD52_9PROT NADPH-dependent 7-cyano-7-deazaguanine reductase OS=Asaia bogorensis NBRC 16594 OX=1231624 GN=queF PE=3 SV=1
MTTSENDLAALSQLGRQTVQPDSPETATLERVPSPHKGRDYVVRFTAPEFTSLCPVTGQPDFAHIVIDYIPDEWIVESKSLKLYLTSFRNHGAFHEDCSVSIATKLVEVLNPKWLRIGAYWYPRGGIPIDVFWQTGLPPEGVWVPAQDVPGYRGRG

SEQ ID NO: 44133 - protein, 156 aa, Asaia platycodi; identical to SEQ ID NO: 44132
  REGION 1..156: note = tr|A0A060QKW2|A0A060QKW2_9PROT NADPH-dependent 7-cyano-7-deazaguanine reductase OS=Asaia platycodi SF2.1; OX = 1382230 GN=queF PE=3 SV=1

SEQ ID NO: 44134 - protein, 156 aa, Asaia sp.
  REGION 1..156: note = tr|A0A433WR52|A0A433WR52_9PROT NADPH-dependent 7-cyano-7-deazaguanine reductase OS=Asaia sp. W19; OX = 2067395 GN=queF PE=3 SV=1
MTTLENDLAALSQLGRQTVQPDSPETATLERVPSPHKGRDYVVRFTAPEFTSLCPVTGQPDFAHIVIDYIPGDWIVESKSLKLYLTSFRNHGAFHEDCSVSIATKLVEVLNPKWLRIGAYWYPRGGIPIDVFWQTGLPPEGVWVPAQDVPGYRGRG

SEQ ID NO: 44135 - protein, 203 aa, Asticcacaulis benevestitus
  REGION 1..203: note = tr|V4Q7F1|V4Q7F1_9CAUL NADPH-dependent 7-cyano-7-deazaguanine reductase OS=Asticcacaulis benevestitus DSM 16100 = ATCC BAA-896 OX=1121022 GN=queF; PE = 3 SV=1
MAYAQTCAARGRACQNAVGILEITFAEIDVRVKFKIHISCLFGGRVYIQLMSHYTDNLTQLGGGNAVASDPALAVLERVPNPHSDVDYVARFTAPEFTSLCPVTGQPDFAHLVIDYVPGEWLVESKSLKLFLTSFRNHGAFHEDCTIYIAKRLKELLDPRWLRIGGFWYPRGGIPIDVFWQTGEAPKGVYVPDFGVPSYRGRG

SEQ ID NO: 44136 - protein, 153 aa, unidentified
  source 1..153: note = Asticcacaulis biprosthecum
  REGION 1..153: note = tr|F4QU55|F4QU55_9CAUL NADPH-dependent 7-cyano-7-deazaguanine reductase OS=Asticcacaulis biprosthecum C19 OX=715226 GN=queF PE=3 SV=1
MSHYTDNLTQLGGDARPVDDPARAVLERVPNPHADVDYVARFTVPEFTSLCPVTGQPDFAHLVIDYVPGDWLVESKSLKLFLTSFRNHGAFHEDCTIHIAKRLRDLLAPRWLRIGGFWYPRGGIPIDVFWQTSEPPKGVLVPDFGVATYRGRG

SEQ ID NO: 44137 - protein, 153 aa, Asticcacaulis excentricus
  REGION 1..153: note = tr|A0A3G9G3L7|A0A3G9G3L7_9CAUL NADPH-dependent 7-cyano-7-deazaguanine reductase OS=Asticcacaulis excentricus OX=78587 GN=queF PE=3 SV=1
MAHYTDNLTQLGQQLGAPTDPDSAVLERVPNPHADIDYVARFTAPEFTSLCPVTGQPDFAHLVIDYVPGEWLVESKSLKLFLTAFRNHGAFHEDCTISIAKRLRDLLAPRWLRIGGFWYPRGGIPIDVFWQTTEPPKGVLIPDFGVATYRGRG

SEQ ID NO: 44138 - protein, 153 aa, Asticcacaulis excentricus
  REGION 1..153: note = tr|E8RRX7|E8RRX7_ASTEC NADPH-dependent 7-cyano-7-deazaguanine reductase OS=Asticcacaulis excentricus (strain ATCC 15261 / DSM 4724 / VKM B-1370 / CB 48) OX=573065 GN =queF PE=3 SV=1
MAHYTDNLTQLGQQLGAPTDPDSAVLERVPNPHADIDYVARFTAPEFTSLCPVTGQPDFAHLVIDYVPGEWLVESKSLKLFLTAFRNHGAFHEDCTIYIAKRLRDLLAPRWLRIGGFWYPRGGIPIDVFWQTTEPPKGVLIPDFGVATYRGRG

SEQ ID NO: 44139 - protein, 66 aa, Asticcacaulis sp.
  REGION 1..66: note = tr|A0A258B9D7|A0A258B9D7_9CAUL NADPH-dependent 7-cyano-7-deazaguanine reductase QueF (Fragment); OS = Asticcacaulis sp. 32-58-5 OX=1970317 GN=B7Z26_07245; PE = 3 SV=1
HGAFHEDCTIYIAKRLKDLLDPRWLRIAGYWYPRGGIPIDVFWQTGEAPKGVWVPETGVAPYRGRG

SEQ ID NO: 44140 - protein, 153 aa, Asticcacaulis sp.
  REGION 1..153: note = tr|V4NU82|V4NU82_9CAUL NADPH-dependent 7-cyano-7-deazaguanine reductase OS=Asticcacaulis sp. YBE204 OX=1282363 GN=queF PE=3 SV=1
MAHYTDNLTQLGQQLGAPTDPESAVLERVPNPHTDIDYVARFTAPEFTSLCPVTGQPDFAHIAIDYVPGEWLVESKSLKLFLTAFRNHGAFHEDCTIYIAKRLRDLLEPRWLRIGGFWYPRGGIPIDVFWQTTEPPKGVLVPDFGVATYRGRG

SEQ ID NO: 44141 - protein, 153 aa, Asticcacaulis taihuensis
  REGION 1..153: note = tr|A0A1G4SDJ7|A0A1G4SDJ7_9CAUL NADPH-dependent 7-cyano-7-deazaguanine reductase OS=Asticcacaulis taihuensis OX=260084 GN=queF PE=3 SV=1
MSHYTDNLTQLGGDARPVDDPAKAVLERVPNPHADVNYVARFTAPEFTSLCPVTGQPDFAHLVIDYVPGEWLVESKSLKLFLTSFRNHGAFHEDCTVYIAKRLNDLLAPRWLRIGGFWYPRGGIPIDVFWQTAEAPKGVYVPDFGVPTYRGRG

SEQ ID NO: 44142 - protein, 132 aa, unidentified
  source 1..132: note = Atelocyanobacterium thalassa
  REGION 1..132: note = tr|D3EP90|D3EP90_ATETH NADPH-dependent 7-cyano-7-deazaguanine reductase OS=Atelocyanobacterium thalassa (isolate ALOHA) OX=1453429 GN=queF PE=3 SV=1
MNEIPDTNSSTLKYGERNIIEGELITFPNPRIGRSYSILITLPEFTCKCPFSGHPDFATLEFKYVPNQKILELKALKLYINGFRDKYISHEESINQILDDFVEACEPSEATLKGNFNPRGNIHTVIEVCYKK

SEQ ID NO: 44143 - protein, 281 aa, unidentified
  source 1..281: note = Atlantibacter hermannii
  REGION 1..281: note = tr|A0A447LSW8|A0A447LSW8_ATLHE NADPH-dependent 7-cyano-7-deazaguanine reductase OS=Atlantibacter hermannii OX=565 GN=queF PE=3 SV=1
MTSYENHAALSGLTLGKSTAYRDIYDASLLQPVPRSLNRDPLGLRADALPFHGADIWTLYELSWLNNNGLPQVGVGHVSIDSASVNLVESKSFKLYLNSFNQTRFASWDEVQQTLAQDLGRCAQGNVDVKLFRLHELEGQTVAAFDGTCIDNQPITIDNYEFDADYLAGAAGDRVVEETLVSHLLKSNCLITHQPDWGSVQIRYNGPQIDREKLLRYLVSFRHHNEFHEQCVERIFNDIMRFCQPTSLSVYARYTRRGGLDINPWRSNTDFTPATGRLVRQ

SEQ ID NO: 44144 - protein, 281 aa, unidentified; identical to SEQ ID NO: 44143
  source 1..281: note = Atlantibacter hermannii
  REGION 1..281: note = tr|H5V0E3|H5V0E3_ATLHE NADPH-dependent 7-cyano-7-deazaguanine reductase OS=Atlantibacter hermannii NBRC 105704 OX=1115512 GN=queF PE=3 SV=1

SEQ ID NO: 44145 - protein, 281 aa, unidentified
  source 1..281: note = Atlantibacter subterranea
  REGION 1..281: note = tr|A0A427UNZ1|A0A427UNZ1_9ENTR NADPH-dependent 7-cyano-7-deazaguanine reductase OS=Atlantibacter subterranea OX=255519 GN=queF PE=3 SV=1
MTSYENHAALSGLTLGKSTDYRDIYDASLLQPVPRSLNRDPLGISAGDLPFHGADIWTLYELSWLNSNGLPQVAVGHVSIDSTSVNLVESKSFKLYLNSFNQSRFASWDEVQNTLARDLCHCAQGKVEVQLYRIQDIEGQAIAAFDGVCIDNQPITIDNYEFDAAYLDGAAGEQQVEETLVSHILKSNCLITHQPDWGSVQIRYRGPQIDREKLLRYLVSFRHHNEFHEQCVERIFSDIMRFCQPQTLSVYARYTRRGGLDINPWRSNCDFTPATERLVRQ

SEQ ID NO: 44146 - protein, 163 aa, Atopobacter sp.
  REGION 1..163: note = tr|A0A421BE74|A0A421BE74_9LACT NADPH-dependent 7-cyano-7-deazaguanine reductase OS=Atopobacter sp. AH10; OX = 2315861 GN=queF PE=3 SV=1
MRSKEEMGDISQLGQQKTVYRDDYAPEVLETFPNKHPENDYFVKFNCPEFTSLCPMTGQPDFATVYISYIPGERMVESKSLKLYLFSFRNHGDFHEDCINIIMKDLIQLMDPKYIEVWGKFTPRGGISIDPYCNYGKAASKYEQMAWDRLQQHDMYPEKVDNR

SEQ ID NO: 44147 - protein, 131 aa, Aulosira laxa
  REGION 1..131: note = tr|A0A1Z4TYD3|A0A1Z4TYD3_9CYAN NADPH-dependent 7-cyano-7-deazaguanine reductase OS=Aulosira laxa NIES-50; OX = 1541988 GN=queF PE=3 SV=1
MTNNTTEIKYGEREIAEGQLITFPNPRVGRRYDISITLPEFTCKCPFSGYPDFATIYISYVPDERVVELKALKLYINSYRDRYISHEESANQILDDFVAACDPLEATVKADFTPRGNVHTVVEVRHQKLAK

SEQ ID NO: 44148 - protein, 153 aa, Aurantimonas manganoxydans
  REGION 1..153: note = tr|Q1YFP9|Q1YFP9_AURMS NADPH-dependent 7-cyano-7-deazaguanine reductase OS=Aurantimonas manganoxydans (strain ATCC BAA-1229 / DSM 21871 / SI85-9A1) OX=287752 GN=queFPE=3 SV=1
MVSPDDLSQLGRDARPAASPEEAVLETVPYTRGDGAPAIVRFTCPEFTSLCPVTGQPDFAHLVIDYAPDERLVESKSLKLFLTSFRNHGAFHEDCTVSVGRRIVAATQPLWLRIGGYWYPRGGIPIDVFWQTGPAPEGAWVPETGVPPYRGRG

SEQ ID NO: 44149 - protein, 152 aa, Aurantimonas sp.
  REGION 1..152: note = tr|A0A0Q6EUJ6|A0A0Q6EUJ6_9RHIZ NADPH-dependent 7-cyano-7-deazaguanine reductase OS=Aurantimonas sp. Leaf443 OX=1736378 GN=queF PE=3 SV=1
MTDPTLTQLGRDSRPAASPEEAPLETVPFAPGEGPAAIVRFTCPEFTSLCPVTGQPDFAHIVLDYAPAGRLVESKSLKLFLTSFRNHGAFHEDCTLTIARRVMAATQPRWLRIGAFWYPRGGIPIDVFWQSGEPPAGAFLPEMGVPPYRGRG

SEQ ID NO: 44150 - protein, 153 aa, Aurantimonas sp.; identical to SEQ ID NO: 44148
  REGION 1..153: note = tr|A0A2E2JFQ3|A0A2E2JFQ3_9RHIZ NADPH-dependent 7-cyano-7-deazaguanine reductase OS=Aurantimonas sp.; OX = 1872654 GN=queF PE=3 SV=1

SEQ ID NO: 44151 - protein, 131 aa, unidentified
  source 1..131: note = Aureibacillus halotolerans
  REGION 1..131: note = tr|A0A4R6TVD8|A0A4R6TVD8_9BACI NADPH-dependent 7-cyano-7-deazaguanine reductase OS=Aureibacillus halotolerans OX=1508390 GN=queF PE=3 SV=1
MNEASWLPTSGPMPRPDSVEQAKTILANEAFEAPNVQTITFRALEFTAVCPRTGQPDFGRVTIQYTPNKKCIESKALKFYLWSFRDEGCFCESLAARIADDIVEAITPQSVSVTVHQSPRGGIELEATAER

SEQ ID NO: 44152 - protein, 153 aa, Aureimonas altamirensis
  REGION 1..153: note = tr|A0A1M6DN31|A0A1M6DN31_9RHIZ NADPH-dependent 7-cyano-7-deazaguanine reductase OS=Aureimonas altamirensis DSM 21988 OX=1121026 GN=queF PE=3 SV=1
MSDIYNDLKQLGQPTALPASPEEAVLERVANPQAGISYCVRFTAPEFTSLCPMTGQPDFAHLVIDYVPSGWLVESKSLKLYLGAFRNHGAFHEDCTISIARRLVDLLEPQWLRIGGYWYPRGGIPIDVFWQTGAVPAKVWIPDQGVPPYRGRG

SEQ ID NO: 44153 - protein, 153 aa, Aureimonas altamirensis
  REGION 1..153: note = tr|A0A0B1Q679|A0A0B1Q679_9RHIZ NADPH-dependent 7-cyano-7-deazaguanine reductase OS=Aureimonas altamirensis OX=370622 GN=queF PE=3 SV=1
MSDIYNDLTQLGQPTALPASPEEAVLERVANPQAGIRYCVRFTAPEFTSLCPMTGQPDFAHLVIDYVPSGWLVESKSLKLYLGAFRNHGAFHEDCTISIARRLVDLLEPEWLRIGGYWYPRGGIPIDVFWQTGAVPGDVWIPDQGVPPYRGRG

SEQ ID NO: 44154 - protein, 152 aa, unidentified
  source 1..152: note = Aureimonas flava
  REGION 1..152: note = tr|A0A3A1WJS1|A0A3A1WJS1_9RHIZ NADPH-dependent 7-cyano-7-deazaguanine reductase OS=Aureimonas flava; OX = 2320271 GN=queF PE=3 SV=1
MSTTTLTQLGAEARPAASPEEAVLETVPYTRGEGPPAIVRFVAPEFTSLCPVTGQPDFAHLVIDYAPDARLVESKSLKLFLVSFRNHGAFHEDCTVTVGRRIVEATRPLWLRIGGYWYPRGGIPIDVFWQTGAPPEGVFLPDQGVPPYRGRG

SEQ ID NO: 44155 - protein, 154 aa, Aureimonas frigidaquae
  REGION 1..154: note = tr|A0A0P0Z346|A0A0P0Z346_9RHIZ NADPH-dependent 7-cyano-7-deazaguanine reductase OS=Aureimonas frigidaquae; OX = 424757 GN=queF PE=3 SV=1
MNPDITAGLTQLGHDTPLPTDPDSARLERVPNPQAGIAYCVRFTAPEFTSLCPMTGQPDFAHIVIDYVPQDWLVESKSLKLFLGSFRNHGAFHEDCTITIARRLVTLLEPQWLRIGGYWYPRGGIPIDVFWQTGPVPAGIFLPDQGVPPYRGRG

SEQ ID NO: 44156 - protein, 153 aa, unidentified
  source 1..153: note = Aureimonas jatrophae
  REGION 1..153: note = tr|A0A1H0GQ62|A0A1H0GQ62_9RHIZ NADPH-dependent 7-cyano-7-deazaguanine reductase OS=Aureimonas jatrophae; OX = 1166073 GN=queF PE=3 SV=1
MTSESELTQLGADARPAARPEDALLETVAFSHGDGAPTLVRLTAPEFTLLCPVTGQPDFAHLVIDYVPDRRLVESKSFKLFLVSYRNHGAFHEDCSVSIAKRLVAAMEPRWLRIGAYWYPRGGIPIDVFWQTGPAPDGLFIPDQGVPPYRGRG

SEQ ID NO: 44157 - protein, 152 aa, unidentified
  source 1..152: note = Aureimonas phyllosphaerae
  REGION 1..152: note = tr|A0A1I2I318|A0A1I2I318_9RHIZ NADPH-dependent 7-cyano-7-deazaguanine reductase OS=Aureimonas phyllosphaerae OX=1166078 GN=queF PE=3 SV=1
MTTTTLTQLGAEARPAASPEDAVLETVPYTRREGPPAIVRFACPEFTSLCPVTGQPDFAHLVIDYAPDQRLVESKSLKLFLVSFRNHGAFHEDCTVMVARRIVEATQPLWLRIGGYWYPRGGIPIDVFWQTGAPPEGVFLPDQGVPPYRGRG

SEQ ID NO: 44158 - protein, 153 aa, Aureimonas sp.
  REGION 1..153: note = tr|A0A0Q6EUE1|A0A0Q6EUE1_9RHIZ NADPH-dependent 7-cyano-7-deazaguanine reductase OS=Aureimonas sp. Leaf460; OX = 1736384 GN=queF PE=3 SV=1
MTTDTSTLTQLGQSAGIAASPEEAVLERVPNPHADTNYLARFTAPEFTSLCPVTGQPDFAHLVIDYVPGDWLVESKSLKLYLTAFRNHGAFHEDCTVGIGRRLAALLDPRWLRIGGYWYPRGGIPIDVFWQTGAPIEGVWLPDQGVPTYRGRG

SEQ ID NO: 44159 - protein, 155 aa, Aureimonas sp.
  REGION 1..155: note = tr|A0A0S2ERP6|A0A0S2ERP6_9RHIZ NADPH-dependent 7-cyano-7-deazaguanine reductase OS=Aureimonas sp. AU20; OX = 1349819 GN=queF PE=3 SV=1
MTSESTENLTQLGRDTRPTASPEEAVLETVPFARRTDPGAVVRFTCPEFTSLCPVTGQPDFAHIVIDYVPNERLVESKSLKLFLTSFRNHGAFHEDCTVMIAQRIVEATRPLWLRIGGYWYPRGGIPIDVFWQTGAPPAGVFLPDQGAPTYRGRG

SEQ ID NO: 44160 - protein, 151 aa, Aureimonas ureilytica
  REGION 1..151: note = tr|A0A175RD23|A0A175RD23_9RHIZ NADPH-dependent 7-cyano-7-deazaguanine reductase OS=Aureimonas ureilytica; OX = 401562 GN=queF PE=3 SV=1
MTTELTQLGRDTRPAASPEEAVLETVPFARRTDPAAVVRFTCPEFTSLCPVTGQPDFAHIVIDYVPDARLVESKSLKLFLTSFRNHGAFHEDCTVMIGQRIVEATQPLWLRIGGYWYPRGGIPIDVFWQTGAPPAGIFLPDQGAPSYRGRG

SEQ ID NO: 44161 - protein, 164 aa, unidentified; identical to SEQ ID NO: 43477
  source 1..164: note = Auricoccus indicus
  REGION 1..164: note = tr|A0A1Q1G2Y7|A0A1Q1G2Y7_9STAP NADPH-dependent 7-cyano-7-deazaguanine reductase OS=Auricoccus indicus; OX = 1849491 GN=queF PE=3 SV=1

SEQ ID NO: 44162 - protein, 279 aa, Avibacterium avium
  REGION 1..279: note = tr|A0A379AS45|A0A379AS45_AVIAV NADPH-dependent 7-cyano-7-deazaguanine reductase OS=Avibacterium avium; OX = 751 GN=queF PE=3 SV=1
MDYNHESLHALKLGQETKYAQHYDRTLLQAVPRQLNRAQLGIVENQPFTFGADIWTAYEISWLNPKGVPQVAIADVEIDFRSENLIESKSFKLYLNSFNQSHFDSFEQVQQILLQDLADCAKGQVKVRLNSLQNYHRTLIDSLQGDCIDDQDIEIRDYQFNPNYLEHCTHAEQVEEHLVSHLLKSNCLITQQPDWGSLQIHYVGKRIDREKLLRYLVSFRQHNEFHEQCVERIYCDLMRFAQPEKLTVYARYTRRGGLDINPFRSNFETVPHNVRLARQ

SEQ ID NO: 44163 - protein, 279 aa, Avibacterium endocarditidis
  REGION 1..279: note = tr|A0A2S5AGX1|A0A2S5AGX1_9PAST NADPH-dependent 7-cyano-7-deazaguanine reductase OS=Avibacterium endocarditidis OX=380674 GN=queF PE=3 SV=1
MDYNHESLHALKLGQETKYAQHYDRTLLQAVPRQLNRAQLGIVENQPFTFGADIWTAYEISWLNPKGVPQVAIADVEIDFRSENLIESKSFKLYLNSFNQSHFDSFEQVQQILQQDLADCAKGQVKVRLNSLQNYHRTFINSLQGDCIDDQDIEIRDYQFNPNYLEHCTHAEQVEEHLVSHLLKSNCLITQQPDWGSLQIHYVGKRIDREKLLRYLVSFRQHNEFHEQCVERIYCDLMRFAQPEKLTVYARYTRRGGLDINPFRSNFETVPHNARLARQ

SEQ ID NO: 44164 - protein, 279 aa, Avibacterium gallinarum
  REGION 1..279: note = tr|A0A379AWA5|A0A379AWA5_AVIGA NADPH-dependent 7-cyano-7-deazaguanine reductase OS=Avibacterium gallinarum OX=755 GN=queF PE=3 SV=1
MDYNHESLHALKLGQETKYAQHYDRTLLQAVPRQLNRTQLGVVENQPFTFGADIWTAYEISWLNPKGVPQVAIADVEIDFRSENLIESKSFKLYLNSFNQSHFDSFEQVQQILQQDLADCAKGQVKVRLNSLQNYHRTFIDSLQGDCIDDQDIEIQNYQFNPNYLEHCTHAEQVEEHLVSHLLKSNCLITQQPDWGSLQIHYVGKRIDREKLLRYLVSFRQHNEFHEQCVERIYCDLMRFAQPEKLTVYARYTRRGGLDINPFRSNFETVPHNARLARQ

SEQ ID NO: 44165 - protein, 280 aa, Avibacterium paragallinarum
  REGION 1..280: note = tr|A0A0F5EYC8|A0A0F5EYC8_AVIPA NADPH-dependent 7-cyano-7-deazaguanine reductase OS=Avibacterium paragallinarum OX=728 GN=queF PE=3 SV=1
MNYNHQSLHALKLGQETKYAQHYDRTLLQAVPRQLNREQLGIVATQPFTFGADIWTAYEISWLNPKGVPQVAIADVEIDFRSENLIESKSFKLYLNSFNQSHFDSSAQVQQILQQDLADCAKGQVKVRLNSLANYDRTFIASLQGECIDEQDIEITDYQFNPHYLENSTQGEQVVEEYLVSHLLKSNCLITQQPDWGSLQIHYVGKRIDRENLLRYLVSFRQHNEFHEQCVERIYCDLMRFAQPEKLTVYARYTRRGGLDINPFRSNFETVPHNARLARQ

SEQ ID NO: 44166 - protein, 280 aa, Avibacterium paragallinarum
  REGION 1..280: note = tr|A0A3G8W098|A0A3G8W098_AVIPA NADPH-dependent 7-cyano-7-deazaguanine reductase OS=Avibacterium paragallinarum OX=728 GN=queF PE=3 SV=1
MSYNHQSLHALKLGQETKYAQHYDRTLLQAVPRQLNRAQLGIVENQPFTFGADIWTAYEISWLNPKGVPQVAIADVEIDFRSENLIESKSFKLYLNSFNQSHFNSSAQVQQILQQDLADCAKGEVKVRLNSLANYDRTFIASLQGECIDEQDIKITDYQFNPHYLENSTQGEQVVEEYLVSHLLKSNCLITQQPDWGSLQIHYVGKRIDRENLLRYLVSFRQHNEFHEQCVERIYCDLMRFAQPEKLTVYARYTRRGGLDINPFRSNFETVPHNARLARQ

SEQ ID NO: 44167 - protein, 280 aa, Avibacterium volantium
  REGION 1..280: note = tr|A0A447SRK8|A0A447SRK8_AVIVO NADPH-dependent 7-cyano-7-deazaguanine reductase OS=Avibacterium volantium; OX = 762 GN=queF PE=3 SV=1
MNYNHQSLHALKLGQETKYAQHYDRTLLQAVPRQLNREQLGIVATQPFTFGADIWTAYEISWLNPKGVPQVAIADVEIDFRSENLIESKSFKLYLNSFNQSHFDSFAQVQQILQQDLADCAKGEVKVRLNSLANYDRTFIDSLQGDCIDEQDIEITDYQFNPHYLENSTQGEQVVEEYLVSHLLKSNCLITQQPDWGSLQIHYVGKRIDREKLLRYLVSFRQHNEFHEQCVERIYCDLMRFAQPEKLTVYARYTRRGGLDINPFRSNFETVPHNARLARQ

SEQ ID NO: 44168 - protein, 284 aa, Azoarcus communis
  REGION 1..284: note = tr|A0A2U8GR21|A0A2U8GR21_9RHOO NADPH-dependent 7-cyano-7-deazaguanine reductase OS=Azoarcus communis; OX = 41977 GN=queF PE=3 SV=1
MNDTSPLRHGAEASPLGKPVAYRDTYAPELLFPIERQLKRDEIGVRGDALPFVGEDLWNAYELSWLNMRGKPVVALARFRVPADTPRLIESKSLKLYLNAFNQSRFADAGTVRETIARDLSAAAGGAVAVELMPLGERPLRQFGYPQGVCLDNLDIDIDTYQPAPVLLAARGEIVSETLYSHLLKSNCLVTGQPDWGMVVVRYTGPAIEREGLLRYIVSFREHNEFHEQCVERVFCDIVARCHPQALAVWARYTRRGGLDINPFRATPGVGKADEFDACDEVRQ

SEQ ID NO: 44169 - protein, 282 aa, Azoarcus communis
  REGION 1..282: note = tr|A0A323UR76|A0A323UR76_9RHOO NADPH-dependent 7-cyano-7-deazaguanine reductase OS=Azoarcus communis SWub3 = DSM 12120 OX=1121029 GN=queF PE=3 SV=1
MNDTEFSPLHGAEASPLGKPVAYRDTYAPELLFPIERQLKRDEIGVRADALPFVGEDLWNAYELSWLNPRGKPVVALARFRVPADSPRLIESKSLKLYLNAFNQSRFADAAQVQDIIARDLSAAAGRPVGVEVLPLADRPQRRIAYPQGICLDELDIAIDRYQPAPELLSAGGPVVSETLYSHLLKSNCLVTGQPDWGMVVVRYTGAAIDREGLLRYIVSFREHNEFHEQCVERVFCDLLARCQPAELAVWARYTRRGGLDINPCRATPGAALADEADEVRQ

SEQ ID NO: 44170 - protein, 277 aa, Azoarcus indigens
  REGION 1..277: note = tr|A0A4R6E899|A0A4R6E899_9RHOO NADPH-dependent 7-cyano-7-deazaguanine reductase OS=Azoarcus indigens; OX = 29545 GN=queF PE=3 SV=1
MTERHGAEASPLGRTVSYRDTYAPELLFPIPRQLKRDELGLREEALPFVGADLWNAYELSWLNPRGKPVVALACFRVPAETPRLVESKSLKLYLNSFNQHVFADHDAVAATIAADLSAAAGGPVGVEVTPLSQRPQRAFGYPEGLCLDELDVAIDSYQPAPELLSAGGAEVEETLYSHLLKSNCLVTGQPDWGMVALRYRGPAIDRAGLLRYIVSFRGHNEFHEQCVERIFCDVLARCQPRELSVWARYTRRGGLDINPWRATSLALVADERMEVRQ

SEQ ID NO: 44171 - protein, 281 aa, Azoarcus sp.
  REGION 1..281: note = sp|A1KBB9|QUEF_AZOSB NADPH-dependent 7-cyano-7-deazaguanine reductase OS=Azoarcus sp. (strain BH72) OX=62928 GN=queF PE=3 SV=1
MNDTQNPLHGAEASPLGKPVAYRDTYAPELLFPIARQLKRDEIGVRADALPFCGEDLWNAYELSWLNPRGKPVVALAEFRVPADTPRLVESKSLKLYLNSFNQSRFDDAAAVRMAIARDLSAAAGGAVGVAVWPLGGQAERRFAAPEGVCIDDLDVAIDTYQPDPTLLSAGDEVVSETLYSHLLKTNCLVTGQPDWGMVAVRYTGPRIDRAGLLRYIVSFREHNEFHEQCVERVFCDITARCRPQRLAVWARYTRRGGLDINPFRASDRDQRADEAMEIRQ

SEQ ID NO: 44172 - protein, 281 aa, Azoarcus sp.
  REGION 1..281: note = tr|A0A558CX38|A0A558CX38_9RHOO NADPH-dependent 7-cyano-7-deazaguanine reductase OS=Azoarcus sp. PHD; OX = 1628740 GN=queF PE=3 SV=1
MNDTSPLRHGAEASPLGKPVAYRDTYAPELLFPIERQLKRDEIGVRGDALPFVGEDLWNAYELSWLNMRGKPVVALARFRVPAETPRLVESKSLKLYLNAFNQSRFADAATVRETIARDLSAAAGGAVAVELMPLGERPLRQIGYPQGVCLDDLDIDIDTYQPAPALLAARGEIVSETLYSHLLKSNCLVTGQPDWGMVVVRYTGPAIEREGLLRYIVSFREHNEFHEQCVERVFCDIMAHCHPQALAVWARYTRRGGLDINPFRATPGAGKADEFNEVRQ

SEQ ID NO: 44173 - protein, 283 aa, Azoarcus tolulyticus
  REGION 1..283: note = tr|A0A1N6Z784|A0A1N6Z784_9RHOO NADPH-dependent 7-cyano-7-deazaguanine reductase OS=Azoarcus tolulyticus; OX = 34027 GN=queF PE=3 SV=1
MNPSAPSAHGAESSPLGKPADYCDTYSPALLFPIARQIKRDEIGIVAGKLPFVGEDLWNAYELSWLNPRGKPVVALATFRVPADSPRLIESKSLKLYLNSCNQTRFDGEEAVRATFVRDLSEAAGAPVAVDIRPLGSAPERVIAPPPGESLDELDIDIDTYQPCPDFLSSARDGSEVSETLHSHLLKSNCLVTGQPDWGCIVVRYTGPAIDRAGLLRYIVSFRKHNEFHEQCVERVFSDLLQRCTPRELAVWARYTRRGGLDINPFRSTGQFPAPDNRAEIRQ

SEQ ID NO: 44174 - protein, 280 aa, Azomonas agilis
  REGION 1..280: note = tr|A0A562I0W5|A0A562I0W5_9GAMM NADPH-dependent 7-cyano-7-deazaguanine reductase OS=Azomonas agilis; OX = 116849 GN=queF PE=3 SV=1
MSVQHSAEQSPLGKTTEYVDRYDPSLLFPISRALKWAELGMSAQSLPYIGADVWNCYELSWLLPTGKPVVAVAEFQIPADSPYMIESKSFKLYLNSLNQSVFSDVAQLTGVLIQDLSAVAGKAVTVRIKSLDEARLEGIATLPGQCIDDIDINIEHYDAPKPELLRVSQAALVADFCWYTHLLRSNCPVTGQPDWGSLVIDYRGLALEPASLLAYIVSFRRHADFHEQCVERIFLDIQRLVQPERLTVYARYVRRGGLDINPYRTTDAGCSILNLRTVRQ

SEQ ID NO: 44175 - protein, 282 aa, Azonexus fungiphilus
  REGION 1..282: note = tr|A0A495WBC8|A0A495WBC8_9RHOO NADPH-dependent 7-cyano-7-deazaguanine reductase OS=Azonexus fungiphilus; OX = 146940 GN=queF PE=3 SV=1
MNPTLDPSTLSPLGKPTEYRSDYAPELLYPIPRQLKRAELGIAAGTQPFVGADIWNAYELSWLNPRGKPVVAVGSFRIPADSPNLIESKSFKLYLNSFNQTVFADLAAVVTTLQRDLSAAAGAPVTAKIEDLRGRPQNVIEYPQGIALDELDIDCTDYQPMPELLSTVDAPETAKTEETLYSHLLKSNCLVTGQPDWAMVIIRYRGRPIDHAGLLRYLVSFRNHNEFHEQCVERIFCDLSRRCAPEALSVYARYTRRGGLDINPFRSSGEFALPGNTREIRQ

SEQ ID NO: 44176 - protein, 279 aa, Azonexus hydrophilus
  REGION 1..279: note = tr|A0A1R1HZQ5|A0A1R1HZQ5_9RHOO NADPH-dependent 7-cyano-7-deazaguanine reductase OS=Azonexus hydrophilus; OX = 418702 GN=queF PE=3 SV=1
MTHTIDPSILSPLGKPTEYRSDYAPELLYPIPRQLKRDELGIAPGALPFVGEDIWNAYEVSWLNPKGKPVVAVATFRVPADSPNLVESKSFKLYLNSFNQTVFSDLSVVESVLLRDLSAAAGAPVGVKIEDLRGRPQVLVNYPQGVALDDLDIECTTYQPTPELLFAVDGEKTEETLYSHLLKSNCLVTGQPDWAMVVIRYRGRPIDHAGLLRYLVSFRNHNEFHEQCVERIFCDITARCAPEALSVYARYTRRGGLDINPCRSSGDFPPADNSREIRQ

SEQ ID NO: 44177 - protein, 150 aa, Azorhizobium caulinodans
  REGION 1..150: note = tr|A8IBF5|A8IBF5_AZOC5 NADPH-dependent 7-cyano-7-deazaguanine reductase OS=Azorhizobium caulinodans (strain ATCC 43989 / DSM 5975 / JCM 20966 / NBRC 14845 / NCIMB 13 405 / ORS 571) OX=438753 GN=queF; PE = 3 SV=1
MTEAKLQLGRETALPSSPEEAVLDRVPNPHPDTNYVARFTAPEFTSLCPVTGQPDFAHLVLDYVPDAWLVESKSLKLYLASFRNHGAFHEDCTVAIGKRLVELLKPRFFRIAGYWYPRGGIPIDVFWQTGELPRGVWLPETGVAPYRGRG

SEQ ID NO: 44178 - protein, 150 aa, Azorhizobium sp.
  REGION 1..150: note = tr|A0A258K4W7|A0A258K4W7_9RHIZ NADPH-dependent 7-cyano-7-deazaguanine reductase OS=Azorhizobium sp. 32-67-21 OX=1970319 GN=queF PE=3 SV=1
MTEETLQLGRNVPVPAGPEEAVLEAVPNPHPDTNYVARFTCPEFTSLCPVTGQPDFAHLVIDYVPHRLLVESKSLKLYLTSFRNHGAFHEDCTIGIAKRLVGLLAPRYLRMAGYWYPRGGIPIDVFWQTGTLPNGTWLPDPGVAPYRGRG

SEQ ID NO: 44179 - protein, 277 aa, Azospira oryzae
  REGION 1..277: note = tr|G8QFA9|G8QFA9_AZOOP NADPH-dependent 7-cyano-7-deazaguanine reductase OS=Azospira oryzae (strain ATCC BAA-33 / DSM 13638 / PS) OX=640081 GN=queF; PE = 3 SV=1
MTIDPSALSPLGKASEYRCHYAPELLFPIPRQLKRDEIGIDPARLPFVGEDLWNAYEISWLNPRGKPVVTLGTFRIPAQTPHLIESKSFKLYLNSFNQSPFADAETVAATLARDLSAAAGGQVTVQLEPLAGQPRPRVDYPSGILLDELDIECDRYQPAPELLQADAGRCVEETLYSHLLKSNCLVTGQPDWGMVVVRYRGPAIDRAALLRYIVSFRGHNEFHEQCVERIFCDISARCAPQSLAVYARYTRRGGLDINPFRSSGEFLPPDNIREVRQ

SEQ ID NO: 44180 - protein, 139 aa, Azospira oryzae
  REGION 1..139: note = tr|A0A2W5J3W4|A0A2W5J3W4_9RHOO NADPH-dependent 7-cyano-7-deazaguanine reductase OS=Azospira oryzae; OX = 146939 GN=queF PE=3 SV=1
MSTRPSKQLETFPNPAPERDYLIHMEIPEFTCLCPRTGQPDFATLLLDYVPDRLCVELKSLKLYIWSYRDEGAFHEAVTNRILDDLVAATKPRYMRLRARFYVRGGIFTTVEAEHRKKGWKPVAPVPLPEFEKGLSTRG

SEQ ID NO: 44181 - protein, 277 aa, Azospira sp.
  REGION 1..277: note = tr|A0A5H2YSP9|A0A5H2YSP9_9RHOO NADPH-dependent 7-cyano-7-deazaguanine reductase OS=Azospira sp. I09; OX = 1765049 GN=queF PE=4 SV=1
MTIDPSALSPLGKASEYRCHYAPELLFPIPRQLKRDEIGIDPARLPFVGEDLWNAYEISWLNPRGKPVVALGTFRIPAQTPHLIESKSFKLYLNSFNQSAFADAQTVAATLVRDLSAAAGGQVTVQLEPLAAQPRPRVDYPSGILLDELDIECDRYQPAPELLQADAGRSVEETLYSHLLKSNCLVTGQPDWGMVVVRYRGPAIDRAALLRYIVSFRGHNEFHEQCVERIFCDISARCAPQSLAVYARYTRRGGLDINPFRSSGEFLPPDNIREVRQ

SEQ ID NO: 44182 - protein, 139 aa, Azospira sp.
  REGION 1..139: note = tr|A0A2R5EHD6|A0A2R5EHD6_9RHOO NADPH-dependent 7-cyano-7-deazaguanine reductase OS=Azospira sp. I13; OX = 1765050 GN=queF PE=3 SV=1
MTTQPSKSLETFPNPAPERDFHIHMQIPEFTCLCPKTGQPDFATLYLDYIPDQTCVELKSLKLYMWSFRDEGCFHEAVTNRILDDLVQATAPRYMRLTAKFYVRGGIFTNVVADYRKEGWNPAPRVDLSVFDTNSNTRG

SEQ ID NO: 44183 - protein, 144 aa, Azospirillum brasilense
  REGION 1..144: note = tr|A0A2W5EFX8|A0A2W5EFX8_AZOBR NADPH-dependent 7-cyano-7-deazaguanine reductase OS=Azospirillum brasilense OX=192 GN=queF PE=3 SV=1
MLGQHTAQPASPEEARLERVPNPHPDKRYCVRFTAPEFTSLCPITGQPDFAHLVIDYVPDGWLVESKSLKLYLTSFRNHGAFHEACTVEIGDRLVRELRPHWLRIGGYWYPRGGIPIDVFWQTGATPEGVWIPPQDVPGYRGRG

SEQ ID NO: 44184 - protein, 154 aa, Azospirillum brasilense
  REGION 1..154: note = tr|A0A0P0EWU0|A0A0P0EWU0_AZOBR NADPH-dependent 7-cyano-7-deazaguanine reductase OS=Azospirillum brasilense OX=192 GN=queF PE=3 SV=1
MSENIYAGLTQLGGATVQPKTPEEAVLERVPNPNPGENYVVRFTAPEFTSLCPITGQPDFAHLVIDYVPGEWLVESKSLKLFLTSFRNHGAFHEACTVGIGKRLVDELKPVWLRIGGYWYPRGGIPIDVFYATGEPPKGVWIPSQDVQTYRGRG

SEQ ID NO: 44185 - protein, 154 aa, Azospirillum doebereinerae
  REGION 1..154: note = tr|A0A433J529|A0A433J529_9PROT NADPH-dependent 7-cyano-7-deazaguanine reductase OS=Azospirillum doebereinerae OX=92933 GN=queF PE=3 SV=1
MSSDIYAGLTQLGGATVQPKTPEEAVLERVPNPNPGDGYVVRFTAPEFTSLCPITGQPDFAHLVIDYVPGDWLVESKSLKLYLTSFRNHGAFHEACTVGIGKRLVAELSPGWLRIGGYWYPRGGIPIDVLYQTGEPPKGVWIPSQDVQTYRGRG

SEQ ID NO: 44186 - protein, 154 aa, unidentified
  source 1..154: note = Azospirillum humicireducens
  REGION 1..154: note = tr|A0A160JG57|A0A160JG57_9PROT NADPH-dependent 7-cyano-7-deazaguanine reductase OS=Azospirillum humicireducens OX=1226968 GN=queF PE=3 SV=1
MTENIYAGLTQLGGSTVQPKTPEEAVLERVPNPNPGDPYCVRFTAPEFTSLCPITGQPDFAHLVIDYVPGDWLVESKSLKLFLTSFRNHGAFHEACTVGIGKRLVDELSPVWLRIGGYWYPRGGIPIDVFFQTGEPPKGVWIPSQDVPTYRGRG

SEQ ID NO: 44187 - protein, 154 aa, Azospirillum lipoferum
  REGION 1..154: note = tr|A0A5A9GVE1|A0A5A9GVE1_AZOLI NADPH-dependent 7-cyano-7-deazaguanine reductase OS=Azospirillum lipoferum; OX = 193 GN=queF PE=3 SV=1
MTENIYAGLTQLGGSTVQPKTPEEAVLERVPNPNPGTPYCVRFTAPEFTSLCPITGQPDFAHLVIDYVPGDWLVESKSLKLFLTSFRNHGAFHEACTVGIGKRLVDELSPEWLRIGGYWYPRGGIPIDVFFQTGEPPKGVWIPSQDVPTYRGRG

SEQ ID NO: 44188 - protein, 154 aa, Azospirillum lipoferum
  REGION 1..154: note = tr|G7Z202|G7Z202_AZOL4 NADPH-dependent 7-cyano-7-deazaguanine reductase OS=Azospirillum lipoferum (strain 4B) OX=862719 GN=queF PE=3 SV=1
MTENIYAGLTQLGGSTVQPRTPEEAVLERVPNPNPGDPYCVRFTAPEFTSLCPITGQPDFAHLVIDYVPGDWLVESKSLKLFLTSFRNHGAFHEACTVGIGKRLVDELSPVWLRIGGYWYPRGGIPIDVFFQTGEPPKGVWIPSQDVPTYRGRG

SEQ ID NO: 44189 - protein, 154 aa, Azospirillum oryzae
  REGION 1..154: note = tr|A0A1X7H6P5|A0A1X7H6P5_9PROT NADPH-dependent 7-cyano-7-deazaguanine reductase OS=Azospirillum oryzae; OX = 286727 GN=queF PE=3 SV=1
MTENIYAGLTQLGGSTVQPKSPEEAVLERVPNPNPGDPYCVRFTAPEFTSLCPITGQPDFAHLVIDYVPGDWLVESKSLKLFLTSFRNHGAFHEACTVGIGKRLVDELSPVWLRIGGYWYPRGGIPIDVFFQTGEPPKGVWIPSQDVPTYRGRG

SEQ ID NO: 44190 - protein, 154 aa, Azospirillum oryzae
  REGION 1..154: note = tr|A0A5A9G641|A0A5A9G641_9PROT NADPH-dependent 7-cyano-7-deazaguanine reductase OS=Azospirillum oryzae; OX = 286727 GN=queF PE=3 SV=1
MTENIYAGLTQLGGSTVQPKTPEEAVLERVPNPNPGDPYCVRFTAPEFTSLCPITGQPDFAHLVIDYVPGDWLVESKSLKLYLTSFRNHGAFHEACTVGIGKRLVDELSPVWLRIGGYWYPRGGIPIDVFFQTGEPPKGVWIPSQDVPTYRGRG

SEQ ID NO: 44191 - protein, 154 aa, unidentified
  source 1..154: note = Azospirillum palustre
  REGION 1..154: note = tr|A0A2B8B5U6|A0A2B8B5U6_9PROT NADPH-dependent 7-cyano-7-deazaguanine reductase OS=Azospirillum palustre; OX = 2044885 GN=queF PE=3 SV=1
MSENIYAGLTQLGGSTIQPRTPEEAVLERVPNPNPGTPYCVRFTAPEFTSLCPITGQPDFAHLVIDYVPGDWLVESKSLKLFLTSFRNHGAFHEACTVGIGKRLVDELSPVWLRIGGYWYPRGGIPIDVFFQTGEPPKGVWIPSQDVPTYRGRG

SEQ ID NO: 44192 - protein, 154 aa, Azospirillum sp.
  REGION 1..154: note = tr|A0A2U1WH92|A0A2U1WH92_9PROT NADPH-dependent 7-cyano-7-deazaguanine reductase OS=Azospirillum sp. TSA6c; OX = 709813 GN=queF PE=3 SV=1
MSENIYAGLTQLGGSTIQPSTPEEAVLERVPNPNPGTPYCVRFTAPEFTSLCPITGQPDFAHLVIDYVPGDWLVESKSLKLFLTSFRNHGAFHEACTVGIGKRLVDELSPVWLRIGGYWYPRGGIPIDVFFQTGEPPKGVWIPSQDVPTYRGRG

SEQ ID NO: 44193 - protein, 154 aa, Azospirillum sp.
  REGION 1..154: note = tr|A0A2U1YS36|A0A2U1YS36_9PROT NADPH-dependent 7-cyano-7-deazaguanine reductase OS=Azospirillum sp. TSO5; OX = 716760 GN=queF PE=3 SV=1
MTENIYAGLTQLGGSTVQPKTPEEAVLERVPNPNPGTPYCVRFTAPEFTSLCPITGQPDFAHLVIDYVPGDWLVESKSLKLFLTSFRNHGAFHEACTVGIGKRLVDELSPVWLRIGGYWYPRGGIPIDVFFQTGEPPKGVWIPSQDVQTYRGRG

SEQ ID NO: 44194 - protein, 154 aa, Azospirillum thiophilum
  REGION 1..154: note = tr|A0A0F2L0G2|A0A0F2L0G2_9PROT NADPH-dependent 7-cyano-7-deazaguanine reductase OS=Azospirillum thiophilum OX=528244 GN=queF PE=3 SV=1
MSENIYANLTQLGGATVQPRTPEEAVLERVPNPNPGDPYCVRFTAPEFTSLCPITGQPDFAHLVIDYVPGDWLVESKSLKLYLTSFRNHGAFHEACTVGIGKRLVDELAPVWLRIGGYWYPRGGIPIDVFFQTGEPPKGVWIPSQDVPTYRGRG

SEQ ID NO: 44195 - protein, 276 aa, Azotobacter beijerinckii
  REGION 1..276: note = tr|A0A1H9GLP1|A0A1H9GLP1_9GAMM NADPH-dependent 7-cyano-7-deazaguanine reductase OS=Azotobacter beijerinckii OX=170623 GN=queF PE=3 SV=1
MPPAAEHSPLGKSSEYLDTYTPSLLFPIPRAPKWAELGLTAASLPYRGVDVWNCYELSWLLPSGKPVVAIGEFVIPADSPNIVESKSFKLYLNSLNQTVFADCETLRQTLAADLSAAAGAPVAVRLRSLAEVQEEGIAALPGQCIDELEVAIVRYGQPSPALLRCDPNRRLEQVLHSHLLKSNCPVTGQPDWGSVVVDYRGPALDPASLLAYLVSFRQHADFHEQCVERIFLDLLHLLEPERLTVYARYVRRGGLDINPWRSTDAVVADNRRLARQ

SEQ ID NO: 44196 - protein, 276 aa, Azotobacter beijerinckii
  REGION 1..276: note = tr|A0A1I3ZXC8|A0A1I3ZXC8_9GAMM NADPH-dependent 7-cyano-7-deazaguanine reductase OS=Azotobacter beijerinckii OX=170623 GN=queF PE=3 SV=1
MPPVAEHSPLGKSSEYLDTYTPSLLFPIPRAPKWAELGLTAASLPYRGVDVWNCYELSWLLPSGKPVVAIGEFAIPADSPNIVESKSFKLYLNSLNQTVFADRETPRQTLAADLSAAAGAPVAVRLRSLAEVQEEGIAALPGQCIDELEVAIARYGQPSPALLRCDPNRRVEAVLHSHLLKSNCPVTGQPDWGSVVVDYRGPALDPASLLAYLVSFRQHADFHEQCVERIFLDLLHLLEPERLTVYARYVRRGGLDINPWRSTEALVPDNRRLARQ

SEQ ID NO: 44197 - protein, 276 aa, Azotobacter chroococcum
  REGION 1..276: note = tr|A0A0C4WIM3|A0A0C4WIM3_9GAMM NADPH-dependent 7-cyano-7-deazaguanine reductase OS=Azotobacter chroococcum NCIMB 8003 OX=1328314 GN=queF PE=3 SV=1
MHPAAEHSPLGKSSEYLDTYTPSLLFPIPRAPKWAELGLTAASLPYRGVDVWNCYELSWLLPSGKPVVAIGEFVIPADSPNIVESKSFKLYLNSLNQTVFADRETLRQTLAADLSGVAGAPVAVRLRSLAEVQEEGVAALPGQCIDELDVGISCYGLPSGELLRCDRGRRVEEVLHSHLLKSNCPVTGQPDWGSVVVDYRGPALDPASLLAYLVSFRQHADFHEQCVERIFLDLQRLLEPERLSVYARYVRRGGLDINPFRSTEALVPDNRRLVRQ

SEQ ID NO: 44198 - protein, 276 aa, Azotobacter chroococcum
  REGION 1..276: note = tr|A0A4Q9VUI6|A0A4Q9VUI6_9GAMM NADPH-dependent 7-cyano-7-deazaguanine reductase OS=Azotobacter chroococcum OX=353 GN=queF PE=3 SV=1
MHPAAEHSPLGKSSEYLDTYTPSLLFPIPRAPKWAELGLTAASLPYRGVDVWNCYELSWLLPSGKPVVAIGEFVIPADSPNIVESKSFKLYLNSLNQTVFADRETLRQTLAADLSGVAGAPVAVRLRSLAEVQEEGVAALPGQCIDELDVGISRYGLPSGELLRCDRGRRVEEVLHSHLLKSNCPVTGQPDWGSVVVDYRGPALDPASLLAYLVSFRQHADFHEQCVERIFLDLQRLLEPERLSVYARYVRRGGLDINPFRSTEALVPDNRRLVRQ

SEQ ID NO: 44199 - protein, 276 aa, Azotobacter vinelandii
  REGION 1..276: note = sp|C1DRN1|QUEF_AZOVD NADPH-dependent 7-cyano-7-deazaguanine reductase OS=Azotobacter vinelandii (strain DJ / ATCC BAA-1303) OX=322710 GN=queF PE=3 SV=1
MHPAAEDSPLGKSSEYLDTYTPSLLFPIPRAPKWAELGLAAENLPYRGVDVWNCYELSWLLPSGKPVVAVGEFVIPADSPNIVESKSFKLYLNSLNQTVFADREALRQTLARDLSAATGAPVAVRLRSLGEVQEQGVAALPGQCIDELDVTIGRYGQPSAELLRCDPARRVEQVLHSHLLKSNCPVTGQPDWGSLVVDYHGPALDPASLLAYVVSFRQHADFHEQCVERIFLDLLRLLEPGRLTVYARYVRRGGLDINPWRSTGAVVADNRRLARQ

SEQ ID NO: 44200 - protein, 276 aa, Azotobacter vinelandii; identical to SEQ ID NO: 44199
  REGION 1..276: note = tr|M9YCV6|M9YCV6_AZOVI NADPH-dependent 7-cyano-7-deazaguanine reductase OS=Azotobacter vinelandii CA6 OX=1283331 GN=queF PE=3 SV=1

SEQ ID NO: 44201 - protein, 165 aa, unidentified
  source 1..165: note = Bacillaceae bacterium
  REGION 1..165: note = tr|A0A261QL24|A0A261QL24_9BACI NADPH-dependent 7-cyano-7-deazaguanine reductase OS=Bacillaceae bacterium SAS-127 OX=2015203 GN=queF PE=3 SV=1
MAGRKEDELQDITLLGNQGTTYKFAYDPSILETFDNKHQNRDYFVKFNCPEFTSLCPMTGQPDFATIYISYIPDVKMVESKALKLYLFSFRNHGDFHEDCMNIIMNDLIELMNPRYIEVWGKFTPRGGISIDPYTNWGRPGTKYEQMAEYRMMNHDLYPEKIDNR

SEQ ID NO: 44202 - protein, 165 aa, unidentified; identical to SEQ ID NO: 44201
  source 1..165: note = Bacillaceae bacterium
  REGION 1..165: note = tr|A0A271M561|A0A271M561_9BACI NADPH-dependent 7-cyano-7-deazaguanine reductase OS=Bacillaceae bacterium SAOS 7 OX=2015052 GN=queF PE=3 SV=1

SEQ ID NO: 44203 - protein, 166 aa, unidentified
  source 1..166: note = Bacilli bacterium
  REGION 1..166: note = tr|A0A0K0GBN1|A0A0K0GBN1_9FIRM NADPH-dependent 7-cyano-7-deazaguanine reductase OS=Bacilli bacterium VT-13-104 OX=1637974 GN=queF PE=3 SV=1
MSGRSEKQGLKDLTLLGNKETNYATDYTPEVLESVNNIHSNRDYFVKFNCPEFTSLCPITGQPDFATMYISYIPDQKIVESKSLKLYLFSFRNHGDFHEDCVNIIMNDLIELLDPRYIEVWGKFTPRGGISIDPWCNYGKPGTKYEEMAMHRLMNHDLNPENIDNR

SEQ ID NO: 44204 - protein, 165 aa, Bacillus aerius
  REGION 1..165: note = tr|A0A3A9DPY2|A0A3A9DPY2_9BACI NADPH-dependent 7-cyano-7-deazaguanine reductase OS=Bacillus aerius; OX = 293388 GN=queF PE=3 SV=1
MTTRKDSELEGVTLLGNQGTNYLFDYSPEVLESFPNKHENRDYFVKFNCPEFTSLCPKTGQPDFATIYISYIPDKKMVESKSLKLYLFSFRNHGDFHEDCMNIIMNDLIELMDPRYIEVWGKFTPRGGISIDPYTNYGKPGTKYEKMAEYRMMNHDLYPETIDNR

SEQ ID NO: 44205 - protein, 165 aa, Bacillus aerophilus
  REGION 1..165: note = tr|A0A410KUG9|A0A410KUG9_9BACI NADPH-dependent 7-cyano-7-deazaguanine reductase OS=Bacillus aerophilus; OX = 293389 GN=queF PE=3 SV=1
MTTRKPEELEGVTLLGNQGTNYLFDYAPQVLETFPNKHTNRDYFVKFNCPEFTSLCPQTGQPDFATVYISYIPNEIMVESKSLKLYLFSFRNHGDFHEDCMNIIMNDLIELMDPRYIEVWGKFTPRGGISIDPYTNYGKPGTKYEEMASYRMMNHDMYPETIDNR

SEQ ID NO: 44206 - protein, 165 aa, Bacillus akibai
  REGION 1..165: note = tr|W4QXY3|W4QXY3_BACA3 NADPH-dependent 7-cyano-7-deazaguanine reductase OS=Bacillus akibai (strain ATCC 43226 / DSM 21942 / JCM 9157 / 1139); OX = 1236973 GN=queF PE=3SV=1
MGGRTEQELEGVTLLGNQGTEYDFQYNPSVLEIFENKHQNRDYFVKFNCPEFTSLCPMTKQPDFATIYISYIPDVKMVESKSLKLYLFSFRNHGDFHEDCMNIIMNDLIELMDPRYIEVWGKFTPRGGISIDPYTNYGKPGTKYEKMAEHRMMNHDMYPETVDNR

SEQ ID NO: 44207 - protein, 165 aa, unidentified
  source 1..165: note = Bacillus albus
  REGION 1..165: note = tr|A0A1J9U3W7|A0A1J9U3W7_9BACI NADPH-dependent 7-cyano-7-deazaguanine reductase OS=Bacillus albus; OX = 2026189 GN=queF PE=3 SV=1
MVGRLDEDLKDVTLLGNQNTKYLFEYSPEILEVFDNNHPNRDYFVKFNCPEFTSLCPKTGQPDFATIYISYIPEQRMVESKSLKLYLFSFRNHGDFHEDCMNVIMNDLIKLMDPRYIEVWGKFTPRGGISIDPYCNYGRPGTKYEQMADYRMMNHDLYPETIDNR

SEQ ID NO: 44208 - protein, 165 aa, Bacillus alcalophilus
  REGION 1..165: note = tr|A0A094YYZ4|A0A094YYZ4_BACAO NADPH-dependent 7-cyano-7-deazaguanine reductase OS=Bacillus alcalophilus ATCC 27647 = CGMCC 1.3604 OX=1218173 GN=queF PE=3 SV=1
MSGRKDSELDGVTLLGNQGTSYEFSYNPGILESFDNKHPNRDYFVKFNCPEFTSLCPKTGQPDFATIYISYIPGEKMVESKSLKLYLFSFRNHGDFHEDCMNIIMNDLIELMDPRYIEVWGKFTPRGGISIDPYTNYGKPGTKYEEIANYRLMNHDLYPENIDNR

SEQ ID NO: 44209 - protein, 165 aa, Bacillus altitudinis; identical to SEQ ID NO: 44205
  REGION 1..165: note = tr|A0A5K1N809|A0A5K1N809_9BACI 7-cyano-7-deazaguanine reductase OS=Bacillus altitudinis; OX = 293387 GN=queF PE=4 SV=1

SEQ ID NO: 44210 - protein, 164 aa, Bacillus amyloliquefaciens
  REGION 1..164: note = tr|A0A0D7XUS2|A0A0D7XUS2_BACAM NADPH-dependent 7-cyano-7-deazaguanine reductase OS=Bacillus amyloliquefaciens OX=1390 GN=queF PE=3 SV=1
MTRKESELEGVTLLGNQGTNYLFEYAPEVLESFPNKHVNRDYFVKFNCPEFTSLCPKTGQPDFATIYISYIPDEKMVESKSLKLYLFSFRNHGDFHEDCMNIIMNDLIELMDPRYIEVWGKFTPRGGISIDPYTNYGRPGTKYEKMAEHRMMNHDMYPETIDNR

SEQ ID NO: 44211 - protein, 65 aa, Bacillus amyloliquefaciens
  REGION 1..65: note = tr|A0A369CQA5|A0A369CQA5_BACAM NADPH-dependent 7-cyano-7-deazaguanine reductase OS=Bacillus amyloliquefaciens OX=1390 GN=queF PE=3 SV=1
MNIIMNDLIELMDPRYIEVWGKFTPRGGISIDPYTNYGKPGTKYEKMAEYRMMNHDLYPETIDNR

SEQ ID NO: 44212 - protein, 168 aa, Bacillus anthracis
  REGION 1..168: note = tr|A0A0F7RHG5|A0A0F7RHG5_BACAN NADPH-dependent 7-cyano-7-deazaguanine reductase OS=Bacillus anthracis; OX = 1392 GN=queF PE=3 SV=1
MFKMAGRLDEDLKDVTLLGNQNTKYLFEYSPEILEVFDNNHPNRDYFVKFNCPEFTSLCPKTGQPDFATIYISYIPEQRMVESKSLKLYLFSFRNHGDFHEDCMNVIMNDLIKLMDPRYIEVWGKFTPRGGISIDPYCNYGRPGTKYEQMADYRMMNHDLYPETIDNR

SEQ ID NO: 44213 - protein, 165 aa, Bacillus anthracis
  REGION 1..165: note = sp|C3LAK7|QUEF_BACAC NADPH-dependent 7-cyano-7-deazaguanine reductase OS=Bacillus anthracis (strain CDC 684 / NRRL 3495) OX=568206 GN=queF PE=3 SV=1
MAGRLDEDLKDVTLLGNQNTKYLFEYSPEILEVFDNNHPNRDYFVKFNCPEFTSLCPKTGQPDFATIYISYIPEQRMVESKSLKLYLFSFRNHGDFHEDCMNVIMNDLIKLMDPRYIEVWGKFTPRGGISIDPYCNYGRPGTKYEQMADYRMMNHDLYPETIDNR

SEQ ID NO: 44214 - protein, 165 aa, Bacillus aquimaris
  REGION 1..165: note = tr|A0A1J6WQ81|A0A1J6WQ81_9BACI NADPH-dependent 7-cyano-7-deazaguanine reductase OS=Bacillus aquimaris; OX = 189382 GN=queF PE=3 SV=1
MSGRKDEELTDITLLGNQGTNYLFEYSPDILESFDNKHPNRDYFVKFNCPEFTSLCPKTGQPDFATIYISYIPDQKMVESKSLKLYLFSFRNHGDFHEDCMNIIMNDLIELMDPRYIEVWGKFTPRGGISIDPYCNYGKPGTKYETMADHRLMNHDLYPEKIDNR

SEQ ID NO: 44215 - protein, 165 aa, Bacillus aquimaris
  REGION 1..165: note = tr|A0A5D4URL0|A0A5D4URL0_9BACI NADPH-dependent 7-cyano-7-deazaguanine reductase OS=Bacillus aquimaris; OX = 189382 GN=queF PE=3 SV=1
MSGRKDEDLTDLSLLGNQGTNYLFEYAPHILEAFDNKHPNRDYFVKFNCPEFTSLCPKTGQPDFAAIYISYIPGEKMVESKSLKLYLFSFRNHGDFHEDCMNIIMNDLIELMDPRYIEVWGKFTPRGGISIDPYCNYGKPGTKYETMADHRLMNHDLYPEKVDNR

SEQ ID NO: 44216 - protein, 165 aa, Bacillus aryabhattai
  REGION 1..165: note = tr|A0A1G6Q7M5|A0A1G6Q7M5_9BACI NADPH-dependent 7-cyano-7-deazaguanine reductase OS=Bacillus aryabhattai B8W22 OX=1358420 GN=queF PE=3 SV=1
MSGRKDEELEGVSLLGNQGTNYLFEYSPEILEAFDNKHPNRDYFVKFNCPEFTSLCPKTGQPDFATIYISYIPDEKMVESKSLKLYLFSFRNHGDFHEDCMNIIMNDLIKLMNPRYIEVWGKFTPRGGISIDPYTNYGRPGTKYEEMANYRLMNHDLYPETIDNR

SEQ ID NO: 44217 - protein, 165 aa, Bacillus aryabhattai; identical to SEQ ID NO: 44216
  REGION 1..165: note = tr|A0A0J5UTY4|A0A0J5UTY4_9BACI NADPH-dependent 7-cyano-7-deazaguanine reductase OS=Bacillus aryabhattai; OX = 412384 GN=queF PE=3 SV=1

SEQ ID NO: 44218 - protein, 165 aa, Bacillus asahii
  REGION 1..165: note = tr|A0A3Q9RKJ3|A0A3Q9RKJ3_9BACI NADPH-dependent 7-cyano-7-deazaguanine reductase OS=Bacillus asahii; OX = 228899 GN=queF1 PE=3 SV=1
MAGRSESELQDITLLGNQGTKYLFEYTPDVLETFDNKHISRDYFVKFNCPEFTSLCPMTGQPDFATIYISYIPDVKMVESKSLKLYLFSFRNHGDFHEDCMNIIMNDLIELMDPRYIEVWGKFTPRGGISIDPYTNYGKPGTKYEKMAEHRLMNHDLYPEKVDNR

SEQ ID NO: 44219 - protein, 165 aa, Bacillus asahii
  REGION 1..165: note = tr|A0A398BI70|A0A398BI70_9BACI NADPH-dependent 7-cyano-7-deazaguanine reductase OS=Bacillus asahii; OX = 228899 GN=queF PE=3 SV=1
MAGRSESELKDITLLGNQGTKYLFEYTPDVLETFDNKHANRDYFVKFNCPEFTSLCPMTGQPDFATIYISYIPDVKMVESKSLKLYLFSFRNHGDFHEDCMNIIMNDLIELMDPRYIEVWGKFTPRGGISIDPYTNYGKPGTKYEKMAEHRLMNHDLYPEKVDNR

SEQ ID NO: 44220 - protein, 165 aa, Bacillus atrophaeus
  REGION 1..165: note = tr|A0A0H3DYH3|A0A0H3DYH3_BACA1 NADPH-dependent 7-cyano-7-deazaguanine reductase OS=Bacillus atrophaeus (strain 1942) OX=720555 GN=queF PE=3 SV=1
MTTRKESELEGVTLLGNQGTNYLFEYAPDVLESFPNKHVNRDYFVKFNCPEFTSLCPKTGQPDFATIYISYIPDEKMVESKSLKLYLFSFRNHGDFHEDCMNIIMNDLIELMDPRYIEVWGKFTPRGGISIDPYTNYGKPGTKYEKMAEYRMMNHDLYPETIDNR

SEQ ID NO: 44221 - protein, 165 aa, Bacillus atrophaeus; identical to SEQ ID NO: 44220
  REGION 1..165: note = tr|A0A080UJS2|A0A080UJS2_BACAT NADPH-dependent 7-cyano-7-deazaguanine reductase OS=Bacillus atrophaeus; OX = 1452 GN=queF PE=3 SV=1

SEQ ID NO: 44222 - protein, 165 aa, unidentified; identical to SEQ ID NO: 44205
  source 1..165: note = Bacillus australimaris
  REGION 1..165: note = tr|A0A0P7GHP3|A0A0P7GHP3_9BACI NADPH-dependent 7-cyano-7-deazaguanine reductase OS=Bacillus australimaris; OX = 1326968 GN=queF PE=3 SV=1

SEQ ID NO: 44223 - protein, 133 aa, Bacillus azotoformans
  REGION 1..133: note = tr|A0A072NQW2|A0A072NQW2_BACAZ NADPH-dependent 7-cyano-7-deazaguanine reductase OS=Bacillus azotoformans MEV2011 OX=1348973 GN=queF PE=3 SV=1
MKENYYLPRSGPMPRPASVEEGREVLKGEAFPAPNVQQITFRAMEFTAVCPKTGQPDFGHVEISYVPNELCIESKSLKFYLWSYRDHGAYCESLAANIADDIVYAINPKKVVVTVYQTARGGIELETQAIREN

SEQ ID NO: 44224 - protein, 133 aa, Bacillus azotoformans
  REGION 1..133: note = tr|K6D545|K6D545_BACAZ NADPH-dependent 7-cyano-7-deazaguanine reductase OS=Bacillus azotoformans LMG 9581 OX=1131731 GN=queF PE=3 SV=1
MKENYYLPRSGPMPRPGSVEESREVLKGEAFPAPNVQQITFRAMEFTAVCPKTGQPDFGRVEISYVPNELCIESKSLKFYLWSYRDHGAYCESLAANIADDIVYAINPKKVVVTVYQTARGGIELETQAIREN

SEQ ID NO: 44225 - protein, 165 aa, unidentified
  source 1..165: note = Bacillus bacterium
  REGION 1..165: note = tr|A0A3D0E7T3|A0A3D0E7T3_9BACI NADPH-dependent 7-cyano-7-deazaguanine reductase OS=Bacillus bacterium; OX = 2053512 GN=queF PE=3 SV=1
MAGRNEDTLKELSLLGNQNTKYLFEYSPQVLEPIDNLHADRDYFIKFNCPEFTSLCPQTNQPDFATMYISYIPDKKIVESKSLKLYLFSFRNHGDFHEDCVNIIMNDLIDLLDPRYIEVWGKFTPRGGLSIDPYSNYGKPGTKYEQMAEYRLMNHDLYPEKVDNR

SEQ ID NO: 44226 - protein, 165 aa, unidentified; identical to SEQ ID NO: 44213
  source 1..165: note = Bacillus bacterium
  REGION 1..165: note = tr|A0A506QK90|A0A506QK90_9BACI NADPH-dependent 7-cyano-7-deazaguanine reductase OS=Bacillus bacterium; OX = 2053512 GN=queF PE=3 SV=1

SEQ ID NO: 44227 - protein, 166 aa, Bacillus badius
  REGION 1..166: note = tr|A0A0C2Y4U0|A0A0C2Y4U0_BACBA NADPH-dependent 7-cyano-7-deazaguanine reductase OS=Bacillus badius; OX = 1455 GN=queF PE=3 SV=1
MAGRNEEELKQDISLLGNQGTKYTFAYDPSILESFDNKHPNRDYFVKFNCPEFTSLCPVTGQPDFATIYISYIPDIKMVESKSLKLYLFSFRNHGDFHEDCVNIIMNDLIELMNPRYIEVWGKFTPRGGISIDPYCNWGRPGTKFEEMANYRLMNHDMYPETVDNR

SEQ ID NO: 44228 - protein, 166 aa, Bacillus bataviensis
  REGION 1..166: note = tr|K6DEL1|K6DEL1_9BACI NADPH-dependent 7-cyano-7-deazaguanine reductase OS=Bacillus bataviensis LMG 21833 OX=1117379 GN=queF PE=3 SV=1
MSGCSHDEGLKDLTLLGNQGTTYSFEYAPEVLEAVDNLHSERDYFVKFNCPEFTSLCPLTRQPDFATMYISYVPDKKIVESKSLKLYLFSFRNHGDFHEDCVNIIMNDLIKLLDPRYIEVWGKFTPRGGISIDPWCNYGKPGTKYEEMASYRLMNHDLYPEKVDNR

SEQ ID NO: 44229 - protein, 166 aa, Bacillus bataviensis
  REGION 1..166: note = tr|A0A561CXA8|A0A561CXA8_9BACI NADPH-dependent 7-cyano-7-deazaguanine reductase OS=Bacillus bataviensis; OX = 220685 GN=queF PE=3 SV=1
MSGRSHEEGLKDLTLLGNQGTTYSFEYAPEVLEAVDNLHPERDYFVKFNCPEFTSLCPLTRQPDFATMYISYVPDKKIVESKSLKLYLFSFRNHGDFHEDCVNIIMNDLIKLLDPRYIEVWGKFTPRGGISIDPWCNYGKPGTKYEEMANYRLMNHDLYPEKVDNR

SEQ ID NO: 44230 - protein, 135 aa, Bacillus beveridgei
  REGION 1..135: note = tr|A0A1D7R055|A0A1D7R055_9BACI NADPH-dependent 7-cyano-7-deazaguanine reductase OS=Bacillus beveridgei; OX = 632773 GN=queF PE=3 SV=1
MSENYYLPRSGPMPRPESVEEGRKVLQNEAFPAPNVSIVRFKALEFTAVCPKTGQPDFGQVEIEYVPREKCIESKSLKFYLWSYRDEGAYCESLAAQIADDVMAAIEPARVKVLVYQTPRGGIQLETEAERTHEA

SEQ ID NO: 44231 - protein, 165 aa, unidentified
  source 1..165: note = Bacillus bombysepticus
  REGION 1..165: note = tr|A0A023P287|A0A023P287_9BACI NADPH-dependent 7-cyano-7-deazaguanine reductase OS=Bacillus bombysepticus str. Wang OX=1330043 GN=queF PE=3 SV=1
MTGRLDEDLKDVTLLGNQNTKYLFEYSPEILEVFDNNHPNRDYFVKFNCPEFTSLCPKTGQPDFATIYISYIPEQKMVESKSLKLYLFSFRNHGDFHEDCMNVIMNDLIKLMDPRYIEVWGKFTPRGGISIDPYCNYGRPGTKYEQMADYRMMNHDLYPETIDNR

SEQ ID NO: 44232 - protein, 165 aa, Bacillus boroniphilus
  REGION 1..165: note = tr|W4RT13|W4RT13_9BACI NADPH-dependent 7-cyano-7-deazaguanine reductase OS=Bacillus boroniphilus JCM 21738 OX=1294265 GN=queF PE=3 SV=1
MAGRNEEELKDITLLGNQGTKYLFEYSPEILETFENKHPYRDYFVKFNTPEFTSLCPITGQPDFASIYISYIPDKLMVESKSLKLYLFSFRNHGDFHEDCMNIIMNDLIKLMDPRYIEVWGKFTPRGGISIDPYTNYGKPGTKYEEMADYRMMNHDMYPEKVDNR

SEQ ID NO: 44233 - protein, 166 aa, Bacillus butanolivorans
  REGION 1..166: note = tr|A0A0M0ERE2|A0A0M0ERE2_9BACI NADPH-dependent 7-cyano-7-deazaguanine reductase OS=Bacillus butanolivorans OX=421767 GN=queF PE=3 SV=1
MSGRKEEELKKDITLLGNQGTKYTFDYAPEILESFDNKHPNRDYFVKFNCPEFTSLCPITGQPDFATIYISYIPSVKMVESKSLKLYLFSFRNHGDFHEDCMNIIMNDLIELMDPKYIEVWGKFTPRGGISIDPYTNYGKPGTKFEEMANFRLMNHDLYPETVDNR

SEQ ID NO: 44234 - protein, 165 aa, unidentified; identical to SEQ ID NO: 44028
  source 1..165: note = Bacillus caldolyticus
  REGION 1..165: note = tr|A0A2H5KFX0|A0A2H5KFX0_BACCL NADPH-dependent 7-cyano-7-deazaguanine reductase OS=Bacillus caldolyticus; OX = 1394 GN=queF PE=3 SV=1

SEQ ID NO: 44235 - protein, 166 aa, unidentified
  source 1..166: note = Bacillus camelliae
  REGION 1..166: note = tr|A0A2N3LK40|A0A2N3LK40_9BACI NADPH-dependent 7-cyano-7-deazaguanine reductase OS=Bacillus camelliae; OX = 1707093 GN=queF PE=3 SV=1
MSGRTQEEGLKDLTLLGNQGTKYKFEYAPEILESVDNLHSNRDYFVKFNCPEFTSLCPITSQPDYATMYISYIPDKKIVESKSLKLYLFSFRNHGDFHEDCVNIIMNDLIQLLDPRYIEVWGKFTPRGGISIDPYCNYGKPGTKYEEMANFRLMNHDLYPEKVDNR

SEQ ID NO: 44236 - protein, 166 aa, unidentified
  source 1..166: note = Bacillus campisalis
  REGION 1..166: note = tr|A0A0M2T0I0|A0A0M2T0I0_9BACI NADPH-dependent 7-cyano-7-deazaguanine reductase OS=Bacillus campisalis; OX = 1408103 GN=queF PE=3 SV=1
MSGRSHEQGLKDLTLLGNQNTQYAFQYAPEVLESVDNMHPERDYFVKFNCPEFTSLCPLTNQPDFATMYISYIPDKKIVESKSLKLYLFSFRNHGDFHEDCVNIIMNDLIKLLDPRYIEVWGKFTPRGGISIDPWCNYGKPGTKFEEMALHRLMNHDLYPEKVDNR

SEQ ID NO: 44237 - protein, 165 aa, Bacillus canaveralius
  REGION 1..165: note = tr|A0A2N5GFH8|A0A2N5GFH8_9BACI NADPH-dependent 7-cyano-7-deazaguanine reductase OS=Bacillus canaveralius; OX = 1403243 GN=queF PE=3 SV=1
MPGRKNEELSDITLLGNQGTKYLFDYAPEILESFDNKHPNRDYFVKFNCPEFTSLCPITGQPDFATIYISYIPDQKMVESKSLKLYLFSFRNHGDFHEDCMNIIMNDLIKLMDPRYIEVWGKFTPRGGISIDPYTNYGKPGTKYEQMAEYRLMNHDLYPEKVDNR

SEQ ID NO: 44238 - protein, 164 aa, unidentified
  source 1..164: note = Bacillus caseinilyticus
  REGION 1..164: note = tr|A0A1H3RB36|A0A1H3RB36_9BACI NADPH-dependent 7-cyano-7-deazaguanine reductase OS=Bacillus caseinilyticus OX=1503961 GN=queF PE=3 SV=1
MSRQHNRSDEVTLLGEAGTEYHFEYDPDILEAFENRHQYRDYFVKFNCPEFTSLCPKTGQPDFATIYISYIPDKKMVESKSLKLYLFSFRNHGDFHEDCMNIILNDLVKLMDPRYIEVWGKFTPRGGISIDPYVNYGKPGTKYEQMAEHRMMNHDMYPETVDNR

SEQ ID NO: 44239 - protein, 169 aa, unidentified
  source 1..169: note = Bacillus cavernae
  REGION 1..169: note = tr|A0A433HKD6|A0A433HKD6_9BACI NADPH-dependent 7-cyano-7-deazaguanine reductase OS=Bacillus cavernae; OX = 1674310 GN=queF PE=3 SV=1
MSGRKDERKDEDLQDITLLGNQGTKYVFEYSPGILETFDNKHPNRDYFVKFNCPEFTSLCPKTGQPDFATIYISYIPGHRMVESKSLKLYLFSFRNHGDFHEDCMNIIMNDLIELMDPRYIEVWGKFTPRGGISIDPYTNYGKPGTKYEKMAEYRLMNHDLYPEKIDNR

SEQ ID NO: 44240 - protein, 164 aa, Bacillus cellulosilyticus
  REGION 1..164: note = tr|E6TY87|E6TY87_BACCJ NADPH-dependent 7-cyano-7-deazaguanine reductase OS=Bacillus cellulosilyticus (strain ATCC 21833 / DSM 2522 / FERM P-1141 / JCM 9156 / N-4) OX =649639 GN=queF PE=3 SV=1
MSHKHHREDEVSLLGNQGTEYHFEYNPGILESFENRHDYRDYFVKFNCPEFTSLCPKTGQPDFATIYISYIPDKKMVESKSLKLYLFSFRNHGDFHEDCMNIILNDLVKLMDPRYIEVWGKFTPRGGISIDPYVNYGKPGTKYEKMAEHRLMNHDMYPETIDNR

SEQ ID NO: 44241 - protein, 165 aa, Bacillus cereus; identical to SEQ ID NO: 44231
  REGION 1..165: note = tr|J8RKB0|J8RKB0_BACCE NADPH-dependent 7-cyano-7-deazaguanine reductase OS=Bacillus cereus BAG1X1-2 OX=1053171 GN=queF PE=3 SV=1

SEQ ID NO: 44242 - protein, 165 aa, Bacillus cereus; identical to SEQ ID NO: 44213
  REGION 1..165: note = tr|J8FV95|J8FV95_BACCE NADPH-dependent 7-cyano-7-deazaguanine reductase OS=Bacillus cereus VD102; OX = 1053228 GN=queF PE=3 SV=1

SEQ ID NO: 44243 - protein, 166 aa, Bacillus circulans
  REGION 1..166: note = tr|A0A0J1LF53|A0A0J1LF53_BACCI NADPH-dependent 7-cyano-7-deazaguanine reductase OS=Bacillus circulans; OX = 1397 GN=queF PE=3 SV=1
MSGRKNEEGLTDLTLLGNQNTQYKSDYAPEVLESVDNLHSDRDYFVKFNCPEFTSLCPITGQPDFATMYISYIPNKKIVESKSLKLYLFSFRNHGDFHEDCVNIIMNDLIKLLDPRYIEVWGKFTPRGGISIDPWCNYGKPGTKFEEMAAHRLMNHDMYPEKVDNR

SEQ ID NO: 44244 - protein, 165 aa, Bacillus clausii
  REGION 1..165: note = tr|A0A268RX32|A0A268RX32_BACCS NADPH-dependent 7-cyano-7-deazaguanine reductase OS=Bacillus clausii; OX = 79880 GN=queF PE=3 SV=1
MAGRQEKELQNVTLLGSEQTEYKYSYDPGVLETFDNQHPYRDYMVKFNCPEFTTLCPKTGQPDFATLYISYIPEQKMVESKSLKLYLFSFRNHGDFHEDSVNTIMNDLIEIMDPRYIEVWGKFTPRGGISIDPYCNYGKKGTKYEEIANYRLMNHDLYPETITNR

SEQ ID NO: 44245 - protein, 165 aa, Bacillus clausii
  REGION 1..165: note = sp|Q5WG44|QUEF_BACSK NADPH-dependent 7-cyano-7-deazaguanine reductase OS=Bacillus clausii (strain KSM-K16) OX=66692 GN=queF PE=3 SV=1
MAGRQEKELQNVTLLGSEQTEYKYSYDPRVLETFDNQHPYRDYMVKFNCPEFTTLCPKTGQPDFATLYISYIPEQKMVESKSLKLYLFSFRNHGDFHEDSVNTIMNDLIELMDPRYIEVWGKFTPRGGISIDPYCNYGKKGTKYEEIANYRLMNHDLYPETITNR

SEQ ID NO: 44246 - protein, 204 aa, Bacillus coagulans
  REGION 1..204: note = tr|A0A150KE11|A0A150KE11_BACCO NADPH-dependent 7-cyano-7-deazaguanine reductase OS=Bacillus coagulans; OX = 1398 GN=queF PE=3 SV=1
MDQKAMSIRDVAFFILFWHGSAPLLEKMTGTFLTGGFFMAGRKQEEGLQDLTLLGNQKTKYPVDYDPGVLEAVDNLHADRDYFVKFNCPEFTSLCPLTGQPDFATMYISYIPDKKIVESKSLKLYLFSFRNHGDFHEDCVNIIMDDLIKLLDPRYIEVWGKFTPRGGISIDPWCNYGKPGTKYEDMAHFRLMHHDLYPEKVDNR

SEQ ID NO: 44247 - protein, 204 aa, Bacillus coagulans
  REGION 1..204: note = tr|A0A0C5BYC5|A0A0C5BYC5_BACCO NADPH-dependent 7-cyano-7-deazaguanine reductase OS=Bacillus coagulans; OX = 1398 GN=queF PE=3 SV=1
MDQKAMSIRDVAFFILFWHGSAPLLEKMRGTFLTGGFFMAGRKQEEGLQDLTLLGNQKTRYPADYDPGVLEAVDNLHADRDYFVKFNCPEFTSLCPLTGQPDFATMYISYIPDKKIVESKSLKLYLFSFRNHGDFHEDCVNIIMDDLIKLLDLRYIEVWGKFTPRGGISIDPWCNYGKPGTKYEDMAHFRLMHHDLYPEKVDNR

SEQ ID NO: 44248 - protein, 166 aa, Bacillus cohnii
  REGION 1..166: note = tr|A0A223KQ47|A0A223KQ47_9BACI NADPH-dependent 7-cyano-7-deazaguanine reductase OS=Bacillus cohnii; OX = 33932 GN=queF PE=3 SV=1
MTAGRKDEELQGVTLLGNQGTNYLFQYSPDVLETFENKHPNRDYFVKFNCPEFTSLCPKTNQPDFATIYISYIPDKLMVESKSLKLYLFSFRNHGDFHEDCMNIIMNDLIKLMDPRYIEVWGKFTPRGGISIDPYTNYGKPGTKYEEMAHYRLMNHDMYPETVNNR

SEQ ID NO: 44249 - protein, 166 aa, unidentified
  source 1..166: note = Bacillus cucumis
  REGION 1..166: note = tr|A0A2N5HJ49|A0A2N5HJ49_9BACI NADPH-dependent 7-cyano-7-deazaguanine reductase OS=Bacillus cucumis; OX = 1740721 GN=queF PE=3 SV=1
MSGRSHEEGLKDLTLLGNQGTTYSFEYAPEVLEAVDNLHPERDYFVKFNCPEFTSLCPLTRQPDFATMYISYVPDKKIVESKSLKLYLFSFRNHGDFHEDCVNIIMNDLIKLLDPRYIEVWGKFTPRGGISIDPWCNYGKPGTKYEEMAAYRLMNHDLYPEKIDNR

SEQ ID NO: 44250 - protein, 165 aa, unidentified
  source 1..165: note = Bacillus cytotoxicus
  REGION 1..165: note = tr|A0A2S1A8F7|A0A2S1A8F7_9BACI NADPH-dependent 7-cyano-7-deazaguanine reductase OS=Bacillus cytotoxicus; OX = 580165 GN=queF PE=3 SV=1
MAGRLDEDLKDVTLLGNQNTKYLFEYSPEILETFDNNHPNRDYFVKFNCPEFTSLCPKTGQPDFATIYISYIPEKKMVESKSLKLYLFSFRNHGDFHEDCMNVIMNDLIELMDPRYIEVWGKFTPRGGISIDPYCNYGRPGTKYEKMAEYRMMNHDLYPETVDNR

SEQ ID NO: 44251 - protein, 165 aa, unidentified; identical to SEQ ID NO: 44250
  source 1..165: note = Bacillus cytotoxicus
  REGION 1..165: note = sp|A7GMN5|QUEF_BACCN NADPH-dependent 7-cyano-7-deazaguanine reductase OS=Bacillus cytotoxicus (strain DSM 22905 / CIP 110041 / 391-98 / NVH 391-98); OX = 315749 GN=queFPE=3 SV=1

SEQ ID NO: 44252 - protein, 162 aa, Bacillus daliensis
  REGION 1..162: note = tr|A0A1H0K6G2|A0A1H0K6G2_9BACI NADPH-dependent 7-cyano-7-deazaguanine reductase OS=Bacillus daliensis; OX = 745820 GN=queF PE=3 SV=1
MAHNREEEVNLLGNTNVEYKMDYDPSILEAFENRHQYRDYFVKFNCPEFTSLCPKTGQPDFATIYISYIPGEKMVESKSLKLYLFSFRNHGDFHEDCMNTILNDLVELMGPRYIEVLGKFTPRGGISIDPYVNYGQPGTKYEKMAEHRLMQHDIYPENIDHR

SEQ ID NO: 44253 - protein, 165 aa, unidentified
  source 1..165: note = Bacillus deserti
  REGION 1..165: note = tr|A0A2N5M6J9|A0A2N5M6J9_9BACI NADPH-dependent 7-cyano-7-deazaguanine reductase OS=Bacillus deserti; OX = 673318 GN=queF PE=3 SV=1
MAGRQKDELQDVTLLGNQGTKYLFEYSPEILESFDNKHPYRDYFVKFNCPEFTSLCPITGQPDFATIYISYIPDVKMVESKSLKLYLFSFRNHGDFHEDCMNIIMNDLIKLMDPKYIEVWGKFTPRGGISIDPYTNYGKPGTKYEEMANYRLMNHDLYPEKVDNR

SEQ ID NO: 44254 - protein, 165 aa, unidentified
  source 1..165: note = Bacillus enclensis
  REGION 1..165: note = tr|A0A0V8HGE5|A0A0V8HGE5_9BACI NADPH-dependent 7-cyano-7-deazaguanine reductase OS=Bacillus enclensis; OX = 1402860 GN=queF PE=3 SV=1
MSGRKDEELTDITLLGNQGTNYLFEYSPEILESFDNKHPNRDYFVKFNCPEFTSLCPKTGQPDFATIYISYIPDQKMVESKSLKLYLFSFRNHGDFHEDCMNIIMNDLIELMDPRYIEVWGKFTPRGGISIDPYCNYGKPGTKYETMADHRLMNHDLYPEKIDNR

SEQ ID NO: 44255 - protein, 165 aa, Bacillus endophyticus
  REGION 1..165: note = tr|A0A329EQV0|A0A329EQV0_9BACI NADPH-dependent 7-cyano-7-deazaguanine reductase OS=Bacillus endophyticus; OX = 135735 GN=queF PE=3 SV=1
MTGRKNEELEGVTLLGNQGTEYTFHYSPEVLESFDNKHPNRDYFVKFNCPEFTSLCPKTNQPDFATIYISYIPDQKMVESKSLKLYLFSFRNHGDFHEDCMNIIMNDLIELMDPRYIEVWGKFTPRGGISIDPYVNYGKPGTKYERIAEHRLMNHDLYPEKIDNR

SEQ ID NO: 44256 - protein, 165 aa, unidentified
  source 1..165: note = Bacillus endozanthoxylicus
  REGION 1..165: note = tr|A0A5J5HXE4|A0A5J5HXE4_9BACI NADPH-dependent 7-cyano-7-deazaguanine reductase QueF OS=Bacillus endozanthoxylicus OX=2036016 GN=queF PE=4 SV=1
MPNRQESELDGLTLLGNQGTKYTFQYAPEILEVFDNKHPNRDYFVKFNCPEFTSLCPITGQPDFATIYISYIPNQKMVESKSLKLYLFSFRNHGDFHEDCMNIIMNDLIQLMDPRYIEVWGKFTPRGGISIDPYCNYGKPGTKFEKMADYRLMNHDLYPETIDNR

SEQ ID NO: 44257 - protein, 181 aa, unidentified
  source 1..181: note = Bacillus filamentosus
  REGION 1..181: note = tr|A0A1X7EZN3|A0A1X7EZN3_9BACI NADPH-dependent 7-cyano-7-deazaguanine reductase OS=Bacillus filamentosus; OX = 1402861 GN=queF PE=3 SV=1
MKNAVRMTSVESGERQLTGRKNEELEGVTLLGNQGTEYTFHYSPEVLESFDNKHPNRDYFVKFNCPEFTSLCPKTNQPDFATIYISYIPDQKMVESKSLKLYLFSFRNHGDFHEDCMNIIMNDLIELMDPRYIEVWGKFTPRGGISIDPYVNYGKPGTKYERIAEHRLMNHDLYPEKIDNR

SEQ ID NO: 44258 - protein, 165 aa, unidentified; identical to SEQ ID NO: 44255
  source 1..165: note = Bacillus filamentosus
  REGION 1..165: note = tr|A0A0H4KGP8|A0A0H4KGP8_9BACI NADPH-dependent 7-cyano-7-deazaguanine reductase OS=Bacillus filamentosus; OX = 1402861 GN=queF PE=3 SV=1

SEQ ID NO: 44259 - protein, 165 aa, Bacillus firmus
  REGION 1..165: note = tr|W7L159|W7L159_BACFI NADPH-dependent 7-cyano-7-deazaguanine reductase OS=Bacillus firmus DS1; OX = 1307436 GN=queF PE=3 SV=1
MSGRKDEELTDITLLGNQGTKYLFEYAPEILEAFDNKHPNRDYFVKFNCPEFTSLCPKTGQPDFATIYISYIPDQKMVESKSLKLYLFSFRNHGDFHEDCMNIIMNDLIELMDPRYIEVWGKFTPRGGISIDPYCNYGKPGTKYEKMADYRLMNHDLYPETIDNR

SEQ ID NO: 44260 - protein, 165 aa, Bacillus firmus; identical to SEQ ID NO: 44259
  REGION 1..165: note = tr|A0A0J5YRD3|A0A0J5YRD3_BACFI NADPH-dependent 7-cyano-7-deazaguanine reductase OS=Bacillus firmus; OX = 1399 GN=queF PE=3 SV=1

SEQ ID NO: 44261 - protein, 165 aa, Bacillus flexus
  REGION 1..165: note = tr|A0A4P8XCZ2|A0A4P8XCZ2_9BACI NADPH-dependent 7-cyano-7-deazaguanine reductase OS=Bacillus flexus; OX = 86664 GN=queF PE=3 SV=1
MSGRKEEELEGVTLLGNQGTKYLFEYSPEILEVFDNKHPNRDYFVKFNCPEFTSLCPQTGQPDFATIYISYIPDEKMVESKSLKLYLFSFRNHGDFHEDCMNIIMNDLIELMNPRYIEVWGKFTPRGGISIDPYTNYGRPGTKYEEMASYRLMNHDLYPETIDNR

SEQ ID NO: 44262 - protein, 166 aa, Bacillus foraminis
  REGION 1..166: note = tr|A0A4R2BAJ5|A0A4R2BAJ5_9BACI NADPH-dependent 7-cyano-7-deazaguanine reductase OS=Bacillus foraminis; OX = 279826 GN=queF PE=3 SV=1
MSGRSHEEGLKDLTLLGNQNTKYSFQYAPEVLEAVDNMHSSRDYFVKFNCPEFTSLCPMTHQPDFATMYISYIPDKKIVESKSLKLYLFSFRNHGDFHEDCVNIIMNDLIKLLDPRYIEVWGKFTPRGGISIDPWCNYGKPGTKYEEMADYRLMNHDLNPEKIDNR

SEQ ID NO: 44263 - protein, 165 aa, Bacillus fortis
  REGION 1..165: note = tr|A0A443IU25|A0A443IU25_9BACI NADPH-dependent 7-cyano-7-deazaguanine reductase OS=Bacillus fortis; OX = 254758 GN=queF PE=3 SV=1
MAGRNEDTLNDLSLLGNQNTKYLFEYSPEVLESIDNLHPDRDYFVKFNCPEFTSLCPQTNQPDFATMYISYIPDKKIVESKSLKLYLFSFRNHGDFHEDCVNIIMNDLIKLLDPRYIEVWGKFTPRGGLSIDPYSNYGKPGTKYEQMAEYRMLNHDLYPEKVDNR

SEQ ID NO: 44264 - protein, 165 aa, unidentified
  source 1..165: note = Bacillus freudenreichii
  REGION 1..165: note = tr|A0A448FK41|A0A448FK41_9BACI NADPH-dependent 7-cyano-7-deazaguanine reductase OS=Bacillus freudenreichii OX=1783501 GN=queF PE=3 SV=1
MAGRNENTLKDLSLLGNQNTKYLFEYSPQVLESIDNLHSNRDYFIKFNCPEFTSLCPQTNQPDFATMYISYIPDKKIVESKSLKLYLFSFRNHGDFHEDCVNIIMNDLIELLDPRYIEVWGKFTPRGGLSIDPYCNYGKPGTKFEQMAENRLMNHDMYPEKVDNR

SEQ ID NO: 44265 - protein, 165 aa, unidentified
  source 1..165: note = Bacillus gaemokensis
  REGION 1..165: note = tr|A0A073K8J9|A0A073K8J9_9BACI NADPH-dependent 7-cyano-7-deazaguanine reductase OS=Bacillus gaemokensis; OX = 574375 GN=queF PE=3 SV=1
MTGRLDEDLKDVTLLGNQNTKYLFEYSPEILETFDNNHPNRDYFVKFNCPEFTSLCPKTGQPDFATIYISYIPEQKMVESKSLKLYLFSFRNHGDFHEDCMNVIMNDLIKLMDPRYIEVWGKFTPRGGISIDPYCNYGRPGTKYEQMAEYRMMNHDLYPETIDNR

SEQ ID NO: 44266 - protein, 169 aa, Bacillus galactosidilyticus
  REGION 1..169: note = tr|A0A0Q9Y8Q3|A0A0Q9Y8Q3_9BACI NADPH-dependent 7-cyano-7-deazaguanine reductase OS=Bacillus galactosidilyticus OX=217031 GN=queF PE=3 SV=1
MAGRNEETLGDLTLLGNQHTKYLDHYSPDVLEPIDNLHSGRDYFVKFNCPEFTSLCPKTGQPDFATIYISYIPDKKIVESKSLKLYLFSFRNHGDFHEDCVKDCVNTIMDDLIKLLDPRYIEVWGKFTPRGGLSIDPYCNYGKPGTKYEQMAEHRLMNHDMYPEKVDNR

SEQ ID NO: 44267 - protein, 165 aa, Bacillus galactosidilyticus
  REGION 1..165: note = tr|A0A177ZQ70|A0A177ZQ70_9BACI NADPH-dependent 7-cyano-7-deazaguanine reductase OS=Bacillus galactosidilyticus OX=217031 GN=queF PE=3 SV=1
MAGRNEETLGDLTLLGNQHTKYLDHYSPDVLEPIDNLHSGRDYFVKFNCPEFTSLCPKTGQPDFATIYISYIPDKKIVESKSLKLYLFSFRNHGDFHEDCVNTIMDDLIKLLDPRYIEVWGKFTPRGGLSIDPYCNYGKPGTKYEQMAEHRLMNHDMYPEKVDNR

SEQ ID NO: 44268 - protein, 166 aa, Bacillus ginsengihumi
  REGION 1..166: note = tr|A0A0A6V9Y3|A0A0A6V9Y3_9BACI NADPH-dependent 7-cyano-7-deazaguanine reductase OS=Bacillus ginsengihumi; OX = 363870 GN=queF PE=3 SV=1
MSGRKQEEGLKDLTLLGNQNTQYSFDYAPEVLEAVDNLHSDRDYFVKFNCPEFTSLCPLTHQPDFATMYISYIPDKKIVESKSLKLYLFSFRNHGDFHEDCVNIIMNDLIQLLDPRYIEVWGKFTPRGGISIDPWCNYGKPGTKYEEMAQFRLMNHDLYPEKVDNR

SEQ ID NO: 44269 - protein, 163 aa, unidentified
  source 1..163: note = Bacillus glycinifermentans
  REGION 1..163: note = tr|A0A0J6EFF5|A0A0J6EFF5_9BACI NADPH-dependent 7-cyano-7-deazaguanine reductase OS=Bacillus glycinifermentans OX=1664069 GN=queF PE=3 SV=1
MRKDSELEGVTLLGNQGTEYLFDYSPDVLEAFPNKHENRDYFVKFNCPEFTSLCPKTGQPDFATIYISYIPDKKMVESKSLKLYLFSFRNHGDFHEDCMNIIMNDLIELMDPRYIEVWGKFTPRGGISIDPYTNYGRPGTKYEKMAEYRLMNHDLYPETVDNR

SEQ ID NO: 44270 - protein, 164 aa, unidentified
  source 1..164: note = Bacillus gobiensis
  REGION 1..164: note = tr|A0A0M4FPB0|A0A0M4FPB0_9BACI NADPH-dependent 7-cyano-7-deazaguanine reductase OS=Bacillus gobiensis; OX = 1441095 GN=queF PE=3 SV=1
MSRKKSELEGVSLLGNRGTSYEFSYKPEILESFINKHPNRDYFVKFNCPEFTSLCPMTGQPDFATIYISYIPDQKMVESKSLKLYLFSFRNHGDFHEDCMNIIMNDLIELMDPRYIEVWGKFTPRGGISIDPYTNYGKPGTKYEEMAAHRLMNHDLYPEKVDNR

SEQ ID NO: 44271 - protein, 165 aa, Bacillus halodurans
  REGION 1..165: note = tr|A0A4Y7X1U1|A0A4Y7X1U1_BACHO NADPH-dependent 7-cyano-7-deazaguanine reductase OS=Bacillus halodurans; OX = 86665 GN=queF PE=3 SV=1
MTGRKEEELEGVTLLGNQGTIYTFDYNPDILEVFENKHQERDYFVKFNCPEFTTLCPMTGQPDFATVYISYIPDVKMVESKSLKLYLFSFRNHGDFHEDAMNIIMNDLIKLMDPRYIEVWGKFTPRGGISIDPYTNYGRPGTKYEKMAEYRMMNHDLYPETVDNR

SEQ ID NO: 44272 - protein, 165 aa, Bacillus halodurans
  REGION 1..165: note = sp|Q9KAP6|QUEF_BACHD NADPH-dependent 7-cyano-7-deazaguanine reductase OS=Bacillus halodurans (strain ATCC BAA-125 / DSM 18197 / FERM 7344 / JCM 9153 / C-125) OX=2725 58 GN=queF PE=3 SV=1
MTGRKEEELEGVTLLGNQGTTYTFDYNPDILEVFENKHQGRDYFVKFNCPEFTTLCPMTGQPDFATVYISYIPDVKMVESKSLKLYLFSFRNHGDFHEDAMNIIMNDLIKLMDPRYIEVWGKFTPRGGISIDPYTNYGRPGTKYEKMAEYRMMNHDLYPETVDNR

SEQ ID NO: 44273 - protein, 165 aa, unidentified
  source 1..165: note = Bacillus halotolerans
  REGION 1..165: note = tr|A0A2S9WEQ5|A0A2S9WEQ5_9BACI NADPH-dependent 7-cyano-7-deazaguanine reductase OS=Bacillus halotolerans; OX = 260554 GN=queF PE=3 SV=1
MTTRNESELEGVTLLGNQGTNYLFEYAPDVLESFPNKHVNRDYFVKFNCPEFTSLCPKTGQPDFATIYISYIPDEKMVESKSLKLYLFSFRNHGDFHEDCMNIIMNDLIELMDPRYIEVWGKFTPRGGISIDPYTNYGKPGTKYEKMAEYRMMNHDLYPETIDNR

SEQ ID NO: 44274 - protein, 165 aa, unidentified; identical to SEQ ID NO: 44220
  source 1..165: note = Bacillus halotolerans
  REGION 1..165: note = tr|A0A3Q9RP16|A0A3Q9RP16_9BACI NADPH-dependent 7-cyano-7-deazaguanine reductase OS=Bacillus halotolerans; OX = 260554 GN=queF PE=3 SV=1

SEQ ID NO: 44275 - protein, 165 aa, unidentified
  source 1..165: note = Bacillus haynesii
  REGION 1..165: note = tr|W7R793|W7R793_9BACI NADPH-dependent 7-cyano-7-deazaguanine reductase OS=Bacillus haynesii; OX = 1925021 GN=queF PE=3 SV=1
MTTRKDSELEGVTLLGNQGTKYLFDYSPEVLESFPNKHENRDYFVKFNCPEFTSLCPKTGQPDFATIYISYIPDKKMVESKSLKLYLFSFRNHGDFHEDCMNIIMNDLIELMDPRYIEVWGKFTPRGGISIDPYTNYGKPGTKYEKMAEYRMMNHDLYPETIDNR

SEQ ID NO: 44276 - protein, 165 aa, Bacillus hemicellulosilyticus
  REGION 1..165: note = tr|W4QFT0|W4QFT0_9BACI NADPH-dependent 7-cyano-7-deazaguanine reductase OS=Bacillus hemicellulosilyticus JCM 9152 OX=1236971 GN=queF PE=3 SV=1
MSGRSDNELDGVNLLGNQGTEYTFSYNPAVLEVFENKHQNRDYFVKFNCPEFTSLCPKTNQPDFATIYISYIPNIKMVESKSLKLYLFSFRNHGDFHEDCMNIIMNDLIELMDPRYIEVWGKFTPRGGISIDPYTNYGQPGTKYEKMAEYRMMNHDLYPETIDNR

SEQ ID NO: 44277 - protein, 162 aa, unidentified
  source 1..162: note = Bacillus hisashii
  REGION 1..162: note = tr|A0A267TXD9|A0A267TXD9_9BACI NADPH-dependent 7-cyano-7-deazaguanine reductase OS=Bacillus hisashii; OX = 996558 GN=queF PE=3 SV=1
MMGRKKDEVKSLGKKEAKYIFDYAPEVLEAVQNKHAGRDYFVKFNCPEFTSLCPITNQPDFATIYISYIPDEKLVESKSLKLYLFSFRNHGDFHEDCVNIIMDDLIQLLDPKYIEVWGKFTPRGGISIDPYCNYGRPGTKYEEMANYRLMNHDLYPEKVDNR

SEQ ID NO: 44278 - protein, 165 aa, Bacillus horikoshii
  REGION 1..165: note = tr|A0A1Y0CLX6|A0A1Y0CLX6_9BACI NADPH-dependent 7-cyano-7-deazaguanine reductase OS=Bacillus horikoshii; OX = 79883 GN=queF PE=3 SV=1
MSGRKDSELEGVTLLGNQGTSYLFNYSPDVLETFENKHPNRDYFVKFNCPEFTSLCPKTNQPDFATIYISYIPGELMVESKSLKLYLFSFRNHGDFHEDCMNIIMNDLIELMDPRYIEVWGKFTPRGGISIDPYTNYGKPGTKYEEMAEYRLMNHDLYPEKIDNR

SEQ ID NO: 44279 - protein, 165 aa, Bacillus horikoshii
  REGION 1..165: note = tr|A0A5D4T7S0|A0A5D4T7S0_9BACI NADPH-dependent 7-cyano-7-deazaguanine reductase OS=Bacillus horikoshii; OX = 79883 GN=queF PE=3 SV=1
MSGRKDSELEGVTLLGNQGTNYLFNYSPDVLETFENKHPNRDYFVKFNCPEFTSLCPKTNQPDFATIYISYIPGELMVESKSLKLYLFSFRNHGDFHEDCMNIIMNDLIELMDPRYIEVWGKFTPRGGISIDPYTNYGKPGTKYEEMAQYRLMNHDLYPEKIDNR

SEQ ID NO: 44280 - protein, 166 aa, Bacillus horneckiae
  REGION 1..166: note = tr|A0A2N0ZCC1|A0A2N0ZCC1_9BACI NADPH-dependent 7-cyano-7-deazaguanine reductase OS=Bacillus horneckiae; OX = 549687 GN=queF PE=3 SV=1
MSGRKNEEGLKDLTLLGNQHTQYPSDYAPEVLEAVDSLHSNRDYFVKFNCPEFTSLCPITGQPDFATMYISYVPDKKIVESKSLKLYLFSFRNHGDFHEDCVNIIMNDLIKLLDPRYIEVWGKFTPRGGISIDPWCNYGRPGTKYEEMADYRMMNHDLYPEKVDNR

SEQ ID NO: 44281 - protein, 138 aa, Bacillus hwajinpoensis
  REGION 1..138: note = tr|A0A4U1MEP0|A0A4U1MEP0_9BACI NADPH-dependent 7-cyano-7-deazaguanine reductase OS=Bacillus hwajinpoensis; OX = 208199 GN=queF PE=3 SV=1
MNSMDKAWLPSSGPMPRPESVEQAREVIKNEAFDAPNVQEITFNALEFTAVCPKTGQPDFGRVEISYVPDEKCIESKSLKFYLWSYRDEGSFCETLAARIADDVVYAIDPLKVTITVYQSARGGIELKTTAVREKATS

SEQ ID NO: 44282 - protein, 165 aa, Bacillus indicus
  REGION 1..165: note = tr|A0A084H2U3|A0A084H2U3_BACID NADPH-dependent 7-cyano-7-deazaguanine reductase OS=Bacillus indicus; OX = 246786 GN=queF PE=3 SV=1
MAGRIDSELTDVTLLGNQGTNYLFEYSPEILESFDNKHVNRDYFVKFNCPEFTSLCPKTGQPDFATIYISYIPDRKMVESKSLKLYLFSFRNHGDFHEDCMNIIMNDLIELMDPRYIEVWGKFTPRGGISIDPYTNYGKPGTKYEKMAEHRMMNHDMYPEKIDNR

SEQ ID NO: 44283 - protein, 165 aa, Bacillus infantis
  REGION 1..165: note = tr|U5L5N8|U5L5N8_9BACI NADPH-dependent 7-cyano-7-deazaguanine reductase OS=Bacillus infantis NRRL B-14911 OX=1367477 GN=queF PE=3 SV=1
MSGRKDEELKDVTLLGNQGTQYLFEYSPSILEAFDNKHPNRDYFVKFNCPEFTSLCPKTGQPDFATIYISYIPDQRMVESKSLKLYLFSFRNHGDFHEDCMNIIMNDLIELMDPRYIEVWGKFTPRGGISIDPYTNYGKPGTKYEKMAEYRMMNHDLYPETIDNR

SEQ ID NO: 44284 - protein, 165 aa, Bacillus infantis; identical to SEQ ID NO: 44283
  REGION 1..165: note = tr|A0A4Q4C2B8|A0A4Q4C2B8_9BACI NADPH-dependent 7-cyano-7-deazaguanine reductase OS=Bacillus infantis; OX = 324767 GN=queF PE=3 SV=1

SEQ ID NO: 44285 - protein, 165 aa, unidentified; identical to SEQ ID NO: 44220
  source 1..165: note = Bacillus intestinalis
  REGION 1..165: note = tr|A0A136G6A6|A0A136G6A6_9BACI NADPH-dependent 7-cyano-7-deazaguanine reductase OS=Bacillus intestinalis; OX = 1963032 GN=queF PE=3 SV=1

SEQ ID NO: 44286 - protein, 166 aa, Bacillus kochii
  REGION 1..166: note = tr|A0A248TG57|A0A248TG57_9BACI NADPH-dependent 7-cyano-7-deazaguanine reductase OS=Bacillus kochii; OX = 859143 GN=queF PE=3 SV=1
MSGRKEEQGLTDLTLLGNQQTQYPSDYAPEVLEAVDSLHSGRDYFVKFNCPEFTSLCPITGQPDFATMYISYIPDEKIVESKSLKLYLFSFRNHGDFHEDCVNIIMNDLIDLLNPRYIEVWGKFTPRGGISIDPWCNYGRPETKYEKMAEHRLMNHDLYPEKVDNR

SEQ ID NO: 44287 - protein, 165 aa, Bacillus koreensis
  REGION 1..165: note = tr|A0A0M0LHZ4|A0A0M0LHZ4_9BACI NADPH-dependent 7-cyano-7-deazaguanine reductase OS=Bacillus koreensis; OX = 284581 GN=queF PE=3 SV=1
MTGRKDEELEGVTLLGNQGTKYLFEYAPDVLEAFDNKHPNRDYFVKFNCPEFTSLCPKTGQPDFATIYISYIPDIKMVESKSLKLYLFSFRNHGDFHEDCMNIIMNDLIELMDPRYIEVWGKFTPRGGISIDPYVNYGRPGTKYETMAEHRLMNHDMYPETIDNR

SEQ ID NO: 44288 - protein, 80 aa, Bacillus krulwichiae
  REGION 1..80: note = tr|A0A1X9MBG5|A0A1X9MBG5_9BACI NADPH-dependent 7-cyano-7-deazaguanine reductase OS=Bacillus krulwichiae; OX = 199441 GN=queF_1 PE=3 SV=1
MIQLGLQFFDFHEDCMNIIMNDLIELMDPRYIEVWGKFTPRGGISIDPYTNYGKPGTKYEKMAEYRMMNHDLYPETVDNR

SEQ ID NO: 44289 - protein, 165 aa, Bacillus krulwichiae
  REGION 1..165: note = tr|A0A1X9MJM4|A0A1X9MJM4_9BACI NADPH-dependent 7-cyano-7-deazaguanine reductase OS=Bacillus krulwichiae; OX = 199441 GN=queF_2 PE=3 SV=1
MSGRKDEDLQGVTLLGNQGTNYDFSYNPSVLEVFENNHPNRDYFVKFNCPEFTSLCPKTNQPDFATIYISYIPDIKMVESKSLKLYLFSFRNHGDFHEDCMNIIMNDLIELMDPRYIEVWGKFTPRGGISIDPYTNYGKPGTKYEKMAEYRMMNHDLYPETVDNR

SEQ ID NO: 44290 - protein, 166 aa, unidentified
  source 1..166: note = Bacillus kyonggiensis
  REGION 1..166: note = tr|A0A4U1D8V0|A0A4U1D8V0_9BACI NADPH-dependent 7-cyano-7-deazaguanine reductase OS=Bacillus kyonggiensis; OX = 1037680 GN=queF PE=3 SV=1
MSGRKTEEGLNDLTLLGNQNTKYSFEYAPEVLESVDNLHSDRDYFVKFNCPEFTSLCPITSQPDFATMYISYIPNKKIVESKSLKLYLFSFRNHGDFHEDCVNIIMNDLIKLLDPRYIEVWGKFTPRGGISIDPWCNYGKPGTKFEEMAMHRLMNHDLNPEKIDNR

SEQ ID NO: 44291 - protein, 165 aa, Bacillus lehensis
  REGION 1..165: note = tr|A0A4Y7WQC1|A0A4Y7WQC1_9BACI NADPH-dependent 7-cyano-7-deazaguanine reductase OS=Bacillus lehensis; OX = 300825 GN=queF PE=3 SV=1
MTGRKEETLTNVTLLGNQGTEYAFSYNPSVLETFDNQHPNRDYFVKFNCPEFTTLCPKTHQPDFATIYISYIPDVKMVESKSLKLYLFSFRNHGDFHEDSVNTIMNDLIQLMDPRYIEVWGKFTPRGGISIDPYCNYGKKETRFEEMANYRLMNHDMYPETITNR

SEQ ID NO: 44292 - protein, 165 aa, Bacillus lehensis; identical to SEQ ID NO: 44291
  REGION 1..165: note = tr|A0A060M2A9|A0A060M2A9_9BACI NADPH-dependent 7-cyano-7-deazaguanine reductase OS=Bacillus lehensis G1; OX = 1246626 GN=queF PE=3 SV=1

SEQ ID NO: 44293 - protein, 165 aa, Bacillus lentus
  REGION 1..165: note = tr|A0A2X4YRB2|A0A2X4YRB2_BACLE NADPH-dependent 7-cyano-7-deazaguanine reductase OS=Bacillus lentus; OX = 1467 GN=queF PE=3 SV=1
MAGRNEDTLQDLSLLGNQNTKYLFKYSPDVLESIDNLHPNRDYFVKFNCPEFTSLCPQTHQPDFATMYISYIPDQKIVESKSLKLYLFSFRNHGDFHEDCVNIIMNDLIKLLEPRYIEVWGKFTPRGGLSIDPYCNYGKPGTKYVQMADHRMMNHDMYPEKVDNR

SEQ ID NO: 44294 - protein, 165 aa, Bacillus licheniformis; identical to SEQ ID NO: 44204
  REGION 1..165: note = tr|A0A1Y0YNK9|A0A1Y0YNK9_BACLI NADPH-dependent 7-cyano-7-deazaguanine reductase OS=Bacillus licheniformis; OX = 1402 GN=ykvM PE=3 SV=1

SEQ ID NO: 44295 - protein, 165 aa, Bacillus licheniformis; identical to SEQ ID NO: 44204
  REGION 1..165: note = sp|Q65KI3|QUEF_BACLD NADPH-dependent 7-cyano-7-deazaguanine reductase OS=Bacillus licheniformis (strain ATCC 14580 / DSM 13 / JCM 2505 / NBRC 12200 / NCIMB 9375 / NR RL NRS-1264 / Gibson 46) OX=279010 GN=queF; PE = 3

SEQ ID NO: 44296 - protein, 165 aa, Bacillus litoralis
  REGION 1..165: note = tr|A0A179SXZ0|A0A179SXZ0_9BACI NADPH-dependent 7-cyano-7-deazaguanine reductase OS=Bacillus litoralis; OX = 152268 GN=queF PE=3 SV=1
MAGRKNEELKDVTLLGNQGVNYLFEYSPQILESFDNKHPNRDYFVKFNCPEFTSLCPITNQPDFATIYISYIPDQKMVESKSLKLYLFSFRNHGDFHEDCMNIIMNDLIELMDPRYIEVWGKFTPRGGISIDPYTNYGKPGTKYEEMASYRLMNHDLYPETVDNR

SEQ ID NO: 44297 - protein, 165 aa, Bacillus litoralis
  REGION 1..165: note = tr|A0A5C6W6M6|A0A5C6W6M6_9BACI NADPH-dependent 7-cyano-7-deazaguanine reductase OS=Bacillus litoralis; OX = 152268 GN=queF PE=3 SV=1
MSGRKDEELQDVTLLGNQGTNYLFEYSPQILEAFDNKHPNRDYFVKFNCPEFTSLCPKTGQPDFATIYISYIPDVKMVESKSLKLYLFSFRNHGDFHEDCMNIIMNDLIELMDPRYIEVWGKFTPRGGISIDPYTNYGKPGTKYEEMANYRLMNHDLYPETIDNR

SEQ ID NO: 44298 - protein, 166 aa, unidentified
  source 1..166: note = Bacillus loiseleuriae
  REGION 1..166: note = tr|A0A0K9GZM2|A0A0K9GZM2_9BACI NADPH-dependent 7-cyano-7-deazaguanine reductase OS=Bacillus loiseleuriae; OX = 1679170 GN=queF PE=3 SV=1
MSGRSNEEGLKDLTLLGNQHTQYSFDYAPEVLEAVDNLHSNRDYFVKFNCPEFTSLCPLTHQPDFATMYISYVPDQKIVESKSLKLYLFSFRNHGDFHEDCVNIIMNDLIKLLDPRYIEVWGKFTPRGGISIDPWCNYGKPDTKYEEMAHFRLMNHDLYPEKIDNR

SEQ ID NO: 44299 - protein, 165 aa, unidentified
  source 1..165: note = Bacillus lonarensis
  REGION 1..165: note = tr|A0A1G6H6Z7|A0A1G6H6Z7_9BACI NADPH-dependent 7-cyano-7-deazaguanine reductase OS=Bacillus lonarensis; OX = 1464122 GN=queF PE=3 SV=1
MTNRDEQTLNHITLLGNQNTHYDFSYNPDVLETFTNNHPNRDYMVKFNCPEFTTLCPKTNQPDFATLYISYIPDIQMVESKSLKLYLFSFRNHGGFHEDAVNVIMNDLIKLMDPRYIEVWGKFTPRGGISIDPYCNYGKKGTLFEEMAHHRLMNHDLYPETITNR

SEQ ID NO: 44300 - protein, 165 aa, Bacillus luciferensis
  REGION 1..165: note = tr|A0A1E2W111|A0A1E2W111_9BACI NADPH-dependent 7-cyano-7-deazaguanine reductase OS=Bacillus luciferensis; OX = 178774 GN=queF PE=3 SV=1
MVGRSKGSLEEVSLLGSNNTKYLFEYDPGILETFDNTHPDRDYFVKFNFPEFTSLCPKTGQPDFATIYISYIPEQKMVESKSLKLYFFSFRNHGDFHEDCMNIIMDDLIKLMDPRYIEVWGKFTPRGGISIDPYCNYGRPGTKYEKMAEHRMMNHDLYPEKIDNR

SEQ ID NO: 44301 - protein, 165 aa, unidentified; identical to SEQ ID NO: 44213
  source 1..165: note = Bacillus luti
  REGION 1..165: note = tr|A0A1K0BUC9|A0A1K0BUC9_9BACI NADPH-dependent 7-cyano-7-deazaguanine reductase OS=Bacillus luti; OX = 2026191 GN=queF PE=3 SV=1

SEQ ID NO: 44302 - protein, 165 aa, unidentified
  source 1..165: note = Bacillus manliponensis
  REGION 1..165: note = tr|A0A073K1M4|A0A073K1M4_9BACI NADPH-dependent 7-cyano-7-deazaguanine reductase OS=Bacillus manliponensis; OX = 574376 GN=queF PE=3 SV=1
MTGRKDEDLKEVTLLGNQNTKYLFEYSPEILEVFDNNHPNRDYFVKFNCPEFTSLCPKTGQPDFATIYISYIPSEKMVESKSLKLYLFSFRNHGDFHEDCMNVIMNDLIKLMDPRYIEVWGKFTPRGGISIDPYCNYGKPGTKYEEMASYRLMNHDLYPETIDNR

SEQ ID NO: 44303 - protein, 165 aa, Bacillus marisflavi
  REGION 1..165: note = tr|A0A0J5S552|A0A0J5S552_9BACI NADPH-dependent 7-cyano-7-deazaguanine reductase OS=Bacillus marisflavi; OX = 189381 GN=queF PE=3 SV=1
MSGRKDEDLTDLSLLGNQGTNYLFEYAPEILEAFDNKHPNRDYFVKFNCPEFTSLCPKTGQPDFATIYISYIPGEKMVESKSLKLYLFSFRNHGDFHEDCMNIIMNDLIELMDPRYIEVWGKFTPRGGISIDPYTNYGKPGTKYEEMAFHRLMNHDMYPETIDNR

SEQ ID NO: 44304 - protein, 165 aa, Bacillus marmarensis
  REGION 1..165: note = tr|U6SRB6|U6SRB6_9BACI NADPH-dependent 7-cyano-7-deazaguanine reductase OS=Bacillus marmarensis DSM 21297 OX=1188261 GN=queF PE=3 SV=1
MGGRKDEDLQGVTLLGNQGTTYDFEYNPKILEVFDNQHPNRDYFVKFNCPEFTSLCPKTGQPDFATIYISYIPGEKMVESKSLKLYLFSFRNHGDFHEDCMNIIMNDLIELMDPRYIEVWGKFTPRGGISIDPYTNYGKPGTKYEKIAEYRLMNHDLYPETIDNR

SEQ ID NO: 44305 - protein, 165 aa, Bacillus megaterium; identical to SEQ ID NO: 44216
  REGION 1..165: note = tr|D5DZE6|D5DZE6_BACMQ NADPH-dependent 7-cyano-7-deazaguanine reductase OS=Bacillus megaterium (strain ATCC 12872 / QMB1551) OX=545693 GN=queF PE=3 SV=1

SEQ ID NO: 44306 - protein, 165 aa, Bacillus megaterium
  REGION 1..165: note = tr|A0A109G0M1|A0A109G0M1_BACME NADPH-dependent 7-cyano-7-deazaguanine reductase OS=Bacillus megaterium; OX = 1404 GN=queF PE=3 SV=1
MSGRKDEELEGVSLLGNQGTNYLFEYAPEILEAFDNKHPNRDYFVKFNCPEFTSLCPKTGQPDFATIYISYIPDEKMVESKSLKLYLFSFRNHGDFHEDCMNIIMNDLIKLMNPRYIEVWGKFTPRGGISIDPYTNYGRPGTKYEEMANYRLMNHDLYPETIDNR

SEQ ID NO: 44307 - protein, 166 aa, unidentified
  source 1..166: note = Bacillus mesonae
  REGION 1..166: note = tr|A0A3Q9QT71|A0A3Q9QT71_9BACI NADPH-dependent 7-cyano-7-deazaguanine reductase OS=Bacillus mesonae; OX = 1193713 GN=queF PE=3 SV=1
MSGRSDEQGLKDLTLLGNQNNQYLFEYSPDVLEAVDNLHSDRDYFVKFNCPEFTSLCPLTKQPDFATMYISYIPDRKIVESKSLKLYLFSFRNHGDFHEDCVNIIMNDLIKLLDPRYTEVWGKFTPRGGISIDPWCNYGKPGTKYEEMANFRLMNHDLYPEKVDNR

SEQ ID NO: 44308 - protein, 165 aa, Bacillus methanolicus
  REGION 1..165: note = tr|I3E2V2|I3E2V2_BACMM NADPH-dependent 7-cyano-7-deazaguanine reductase OS=Bacillus methanolicus (strain MGA3 / ATCC 53907) OX=796606 GN=queF PE=3 SV=1
MSGRKEEELKDLTLLGNQGTKYLFEYTPEVLEAFDNKHPNRDYFVKFNCPEFTSLCPKTGQPDFATIYISYIPDKKMVESKSLKLYLFSFRNHGDFHEDCVNIIMNDLIDLMDPKYIEVWGKFTPRGGISIDPYTNYGRPGTKYEKMAEYRLMNHDLYPEKIDNR

SEQ ID NO: 44309 - protein, 165 aa, Bacillus methanolicus
  REGION 1..165: note = tr|I3E6M1|I3E6M1_BACMT NADPH-dependent 7-cyano-7-deazaguanine reductase OS=Bacillus methanolicus PB1 OX=997296 GN=queF PE=3 SV=1
MSGRKKEELKDLTLLGNQGTKYVFDYAPEVLEAFDNKHPNRDYFVKFNCPEFTSLCPITGQPDFATIYISYIPDKKMVESKSLKLYLFSFRNHGDFHEDCINIIMNDLIDLMDPKYIEVWGKFTPRGGISIDPYVNYGRPGTKYEQMAEYRLMNHDLYPEKIDNR

SEQ ID NO: 44310 - protein, 165 aa, unidentified; identical to SEQ ID NO: 44213
  source 1..165: note = Bacillus mobilis
  REGION 1..165: note = tr|A0A1J9ZMX5|A0A1J9ZMX5_9BACI NADPH-dependent 7-cyano-7-deazaguanine reductase OS=Bacillus mobilis; OX = 2026190 GN=queF PE=3 SV=1

SEQ ID NO: 44311 - protein, 165 aa, Bacillus muralis
  REGION 1..165: note = tr|A0A1B3XIY3|A0A1B3XIY3_9BACI NADPH-dependent 7-cyano-7-deazaguanine reductase OS=Bacillus muralis; OX = 264697 GN=queF PE=3 SV=1
MSGRKEEELKEITLLGNQGTKYPFDYAPEILESFDNKHPNRDYFVKFNCPEFTSLCPITGQPDFATIYISYIPSVKMVESKSLKLYLFSFRNHGDFHEDCMNIIMNDLIELMDPKYIEVWGKFTPRGGISIDPYTNYGRPGTKYEEMADYRLMNHDLYPETVDNR

SEQ ID NO: 44312 - protein, 168 aa, Bacillus mycoides
  REGION 1..168: note = tr|C2PT28|C2PT28_BACMY NADPH-dependent 7-cyano-7-deazaguanine reductase OS=Bacillus mycoides; OX = 1405 GN=queF PE=3 SV=1
MFKMAGRLDEDLKDVTLLGNQNTKYLFEYSPGILEVFDNNHPNRDYFVKFNCPEFTSLCPKTGQPDFATIYISYIPEQRMVESKSLKLYLFSFRNHGDFHEDCMNVIMNDLIKLMDPRYIEVWGKFTPRGGISIDPYCNYGRPGTKYEKMADYRMMNHDLYPEKIDNR

SEQ ID NO: 44313 - protein, 165 aa, Bacillus mycoides
  REGION 1..165: note = sp|A9VKS1|QUEF_BACMK NADPH-dependent 7-cyano-7-deazaguanine reductase OS=Bacillus mycoides (strain KBAB4) OX=315730 GN=queF PE=3 SV=1
MAGRLDEDLKDVTLLGNQNTKYLFEYSPEILEVFDNNHPNRDYFVKFNCPEFTSLCPKTGQPDFATIYISYIPEQRMVESKSLKLYLFSFRNHGDFHEDCMNVIMNDLIKLMDPRYIEVWGKFTPRGGISIDPYCNYGRPGTKYEKMADYRMMNHDLYPEKIDNR

SEQ ID NO: 44314 - protein, 164 aa, unidentified
  source 1..164: note = Bacillus nakamurai
  REGION 1..164: note = tr|A0A150F1Y3|A0A150F1Y3_9BACI NADPH-dependent 7-cyano-7-deazaguanine reductase OS=Bacillus nakamurai; OX = 1793963 GN=queF PE=3 SV=1
MTRKDSELEGVTLLGNQGTNYLFEYAPEVLESFPNKHVNRDYFVKFNCPEFTSLCPKTGQPDFATIYISYIPDEKMVESKSLKLYLFSFRNHGDFHEDCMNIIMNDLIELMDPRYIEVWGKFTPRGGISIDPYTNYGRPGTKYEQMAEHRMMNHDMYPETIDNR

SEQ ID NO: 44315 - protein, 166 aa, Bacillus nanhaiisediminis
  REGION 1..166: note = tr|A0A562QRB2|A0A562QRB2_9BACI NADPH-dependent 7-cyano-7-deazaguanine reductase OS=Bacillus nanhaiisediminis OX=688079 GN=queF PE=3 SV=1
MSSGRNEKELEGVSLLGNQGTTYDFSYNPSVLEVFENKHQNRDYFVKFNCPEFTSLCPKTNQPDFATIYISYIPNVKMVESKSLKLYLFSFRNHGDFHEDCMNIIMNDLIELMDPRYIEVWGKFTPRGGISIDPYCNYGKPGTKYEKIAEHRLMNHDMYPETIDNR

SEQ ID NO: 44316 - protein, 166 aa, Bacillus nealsonii
  REGION 1..166: note = tr|R9C8S4|R9C8S4_9BACI NADPH-dependent 7-cyano-7-deazaguanine reductase OS=Bacillus nealsonii AAU1 OX=1202533 GN=queF PE=3 SV=1
MSGRKNEEGLQDLTLLGNQNTQYKSDYAPEVLESVDNLHSDRDYFVKFNCPEFTSLCPITGQPDFATMYISYIPNKKIVESKSLKLYLFSFRNHGDFHEDCVNIIMNDLIKLLDPRYIEVWGKFTPRGGISIDPWCNYGKPGTKFEEMATHRLMNHDMYPEKVDNR

SEQ ID NO: 44317 - protein, 166 aa, unidentified
  source 1..166: note = Bacillus notoginsengisoli
  REGION 1..166: note = tr|A0A417YTI8|A0A417YTI8_9BACI NADPH-dependent 7-cyano-7-deazaguanine reductase OS=Bacillus notoginsengisoli OX=1578198 GN=queF PE=3 SV=1
MSGRSQEEGLKDLTLLGNQKVQYAFKYAPEVLESVDNLHSDRDYFVKFNCPEFTSLCPITNQPDFATMYISYIPNKKIVESKSLKLYLFSFRNHGDFHEDCVNIIMNDLIKLLDPRYIEVWGKFTPRGGISIDPWCNYGKLGTKYEEMANFRLMNHDMYPEKVDNR

SEQ ID NO: 44318 - protein, 165 aa, Bacillus oceanisediminis
  REGION 1..165: note = tr|A0A1S1YQC5|A0A1S1YQC5_9BACI NADPH-dependent 7-cyano-7-deazaguanine reductase OS=Bacillus oceanisediminis OX=665099 GN=queF PE=3 SV=1
MSGRKDEELTDITLLGNQGTKYLFEYSPDILEAFDNKHPNRDYFVKFNCPEFTSLCPKTGQPDFATIYISYIPDQKMVESKSLKLYLFSFRNHGDFHEDCMNIIMNDLIELMDPRYIEVWGKFTPRGGISIDPYCNYGKPGTKYEKMAEYRLMNHDLYPETIDNR

SEQ ID NO: 44319 - protein, 165 aa, Bacillus oceanisediminis
  REGION 1..165: note = tr|A0A4V6QB10|A0A4V6QB10_9BACI NADPH-dependent 7-cyano-7-deazaguanine reductase OS=Bacillus oceanisediminis OX=665099 GN=queF PE=3 SV=1
MSGRKDEELTDITLLGNQGTKYLFEYSPEILEAFDNKHPNRDYFVKFNCPEFTSLCPKTGQPDFATIYISYIPDQKMVESKSLKLYLFSFRNHGDFHEDCMNIIMNDLIELMDPRYIEVWGKFTPRGGISIDPYCNYGKPGTKYEKMADYRLMNHDLYPETIDNR

SEQ ID NO: 44320 - protein, 165 aa, Bacillus okhensis
  REGION 1..165: note = tr|A0A0B0IHW8|A0A0B0IHW8_9BACI NADPH-dependent 7-cyano-7-deazaguanine reductase OS=Bacillus okhensis; OX = 333138 GN=queF PE=3 SV=1
MSGRKKEELEGVTLLGNQGTAYDFSYNPSVLEVFENKHQNRDYFVKFNCPEFTSLCPMTNQPDFATIYISYIPDVKMVESKALKLYLFSFRNHGDFHEDCMNIIMNDLIELMDPRYIEVWGKFTPRGGISIDPYTNYGKPGTKYEKMAEYRMMNHDLYPENIDNR

SEQ ID NO: 44321 - protein, 165 aa, Bacillus okuhidensis; identical to SEQ ID NO: 44272
  REGION 1..165: note = tr|A0A0M0KKK6|A0A0M0KKK6_9BACI NADPH-dependent 7-cyano-7-deazaguanine reductase OS=Bacillus okuhidensis; OX = 136160 GN=queF PE=3 SV=1

SEQ ID NO: 44322 - protein, 135 aa, unidentified
  source 1..135: note = Bacillus oleivorans
  REGION 1..135: note = tr|A0A285CS84|A0A285CS84_9BACI NADPH-dependent 7-cyano-7-deazaguanine reductase OS=Bacillus oleivorans; OX = 1448271 GN=queF PE=3 SV=1
MKNSWIPQSGPMPRPKSVEEGREALKEEAFDSPNVSNITFRALEFTAVCPKTGQPDFGQVEISYTPDQKCIESKSLKFYLWSYRDEGAFCETLAARIADDIVYAIDPKRVEVTIFQSPRGGIELKATAIREKNND

SEQ ID NO: 44323 - protein, 165 aa, unidentified; identical to SEQ ID NO: 44213
  source 1..165: note = Bacillus pacificus
  REGION 1..165: note = tr|A0A1J9Y7Q5|A0A1J9Y7Q5_9BACI NADPH-dependent 7-cyano-7-deazaguanine reductase OS=Bacillus pacificus; OX = 2026187 GN=queF PE=3 SV=1

SEQ ID NO: 44324 - protein, 166 aa, unidentified
  source 1..166: note = Bacillus paralicheniformis
  REGION 1..166: note = tr|A0A1Q8GGI2|A0A1Q8GGI2_9BACI NADPH-dependent 7-cyano-7-deazaguanine reductase OS=Bacillus paralicheniformis OX=1648923 GN=queF PE=3 SV=1
MMTTRKDSELEGVTLLGNQGTNYLFDYSPEVLESFPNKHENRDYFVKFNCPEFTSLCPKTGQPDFATIYISYIPDKKMVESKSLKLYLFSFRNHGDFHEDCMNIIMNDLIELMDPRYIEVWGKFTPRGGISIDPYTNYGKPGTKYEKMAEYRMMNHDLYPETIDNR

SEQ ID NO: 44325 - protein, 165 aa, unidentified; identical to SEQ ID NO: 44204
  source 1..165: note = Bacillus paralicheniformis
  REGION 1..165: note = tr|A0A5A9T963|A0A5A9T963_9BACI NADPH-dependent 7-cyano-7-deazaguanine reductase OS=Bacillus paralicheniformis OX=1648923 GN=queF PE=3 SV=1

SEQ ID NO: 44326 - protein, 165 aa, unidentified
  source 1..165: note = Bacillus paramycoides
  REGION 1..165: note = tr|A0A1J9U8A0|A0A1J9U8A0_9BACI NADPH-dependent 7-cyano-7-deazaguanine reductase OS=Bacillus paramycoides; OX = 2026194 GN=queF PE=3 SV=1
MAGRLDEDLKDVTLLGNQNTKYLFEYSPEILEVFDNNHPNRDYFVKFNCPEFTSLCPKTGQPDFATIYISYIPEQKMVESKSLKLYLFSFRNHGDFHEDCMNVIMNDLIKLMDPRYIEVWGKFTPRGGISIDPYCNYGRPGTKYEEMADYRMMNHDLYPETIDNR

SEQ ID NO: 44327 - protein, 165 aa, unidentified; identical to SEQ ID NO: 44213
  source 1..165: note = Bacillus paranthracis
  REGION 1..165: note = tr|A0A4U1DPU1|A0A4U1DPU1_9BACI NADPH-dependent 7-cyano-7-deazaguanine reductase OS=Bacillus paranthracis; OX = 2026186 GN=queF PE=3 SV=1

SEQ ID NO: 44328 - protein, 165 aa, unidentified
  source 1..165: note = Bacillus paranthracis
  REGION 1..165: note = tr|A0A1J9YND1|A0A1J9YND1_9BACI NADPH-dependent 7-cyano-7-deazaguanine reductase OS=Bacillus paranthracis; OX = 2026186 GN=queF PE=3 SV=1
MAGRLDEDLKDVTLLGNQNTKYLFEYSPEILEVFDNNHPNRDYFVKFNCPEFTSLCPKTGQPDFATIYISYIPEQRMVESKSLKLYLFSFRNHGDFHEDCMNVIMNDLIKLMDPRYIEVWGKFTPRGGISIDPYCNYGRPGTKYEKMADYRMMNHDLYPETIDNR

SEQ ID NO: 44329 - protein, 166 aa, unidentified
  source 1..166: note = Bacillus persicus
  REGION 1..166: note = tr|A0A1H8G6M0|A0A1H8G6M0_9BACI NADPH-dependent 7-cyano-7-deazaguanine reductase OS=Bacillus persicus; OX = 930146 GN=queF PE=3 SV=1
MSGRNEEQGLKDLTLLGNQHTQYPSDYAPEVLEAVDSLHSNRDYFVKFNCPEFTSLCPITGQPDFATMYISYIPDKKIVESKSLKLYLFSFRNHGDFHEDCVNIIMNDLIKLLDPRYIEVWGKFTPRGGISIDPWCNYGKPDTKYEEMANFRLMNHDLYPEKVDNR

SEQ ID NO: 44330 - protein, 166 aa, unidentified
  source 1..166: note = Bacillus praedii
  REGION 1..166: note = tr|A0A4V2NUN3|A0A4V2NUN3_9BACI NADPH-dependent 7-cyano-7-deazaguanine reductase OS=Bacillus praedii; OX = 1742358 GN=queF PE=3 SV=1
MSGRKMEEGLKDLTLLGNQQTQYRSDYAPEVLEAVDSLHSNRDYFVKFNCPEFTSLCPITGQPDFATMYISYIPDKKIVESKSLKLYLFSFRNHGDFHEDCVNIIMNDLIKLLDPRYIEVWGKFTPRGGISIDPWCNYGRPGTKYEEMADHRLMNHDLYPEKVDNR

SEQ ID NO: 44331 - protein, 165 aa, Bacillus pseudofirmus
  REGION 1..165: note = tr|A0A1Q8V216|A0A1Q8V216_BACPF NADPH-dependent 7-cyano-7-deazaguanine reductase OS=Bacillus pseudofirmus; OX = 79885 GN=queF PE=3 SV=1
MVGRKDEDLQDVTLLGNQNTKYDYQYNPEVLETFDNQHPGRDYFVKFNCPEFTTLCPKTGQPDFATIYISYIPDTKMVESKSLKLYLFSFRNHGDFHEDSVNTIMNDLIKLMEPRYIEVWGKFTPRGGISIDPYCNYGRPGTKFEEMANFRLMNHDLYPETITNR

SEQ ID NO: 44332 - protein, 165 aa, Bacillus pseudofirmus
  REGION 1..165: note = tr|D3FSX4|D3FSX4_BACPE NADPH-dependent 7-cyano-7-deazaguanine reductase OS=Bacillus pseudofirmus (strain OF4) OX=398511 GN=queF PE=3 SV=1
MGGRKDEDLQGVTLLGNQGTTYDFEYNPKILEVFDNQHPNRDYFVKFNCPEFTSLCPKTGQPDFATIYISYIPGEKMVESKSLKLYLFSFRNHGDFHEDCMNIIMNDLIELMDPRYIEVWGKFTPRGGISIDPYTNYGKPGTKYEKMAEYRLMNHDLYPETIDNR

SEQ ID NO: 44333 - protein, 165 aa, Bacillus pseudomycoides
  REGION 1..165: note = tr|C3BHQ9|C3BHQ9_9BACI NADPH-dependent 7-cyano-7-deazaguanine reductase OS=Bacillus pseudomycoides DSM 12442 OX=527000 GN=queF PE=3 SV=1
MAGRLDEDLKDVTLLGNQNTKYLFEYSPKILETFDNNHPNRDYFVKFNCPEFTSLCPKTGQPDFATIYISYIPEQKMVESKSLKLYLFSFRNHGDFHEDCMNVIMNDLIKLMDPRYIEVWGKFTPRGGISIDPYCNYGRPGTKYEKMAEYRMMNHDLYPETIDNR

SEQ ID NO: 44334 - protein, 165 aa, Bacillus pseudomycoides; identical to SEQ ID NO: 44333
  REGION 1..165: note = tr|A0A2A8H382|A0A2A8H382_9BACI NADPH-dependent 7-cyano-7-deazaguanine reductase OS=Bacillus pseudomycoides OX=64104 GN=queF PE=3 SV=1

SEQ ID NO: 44335 - protein, 165 aa, Bacillus pumilus; identical to SEQ ID NO: 44205
  REGION 1..165: note = tr|W8RH14|W8RH14_BACPU NADPH-dependent 7-cyano-7-deazaguanine reductase OS=Bacillus pumilus; OX = 1408 GN=queF PE=3 SV=1

SEQ ID NO: 44336 - protein, 165 aa, Bacillus pumilus; identical to SEQ ID NO: 44205
  REGION 1..165: note = sp|A8FCI2|QUEF_BACP2 NADPH-dependent 7-cyano-7-deazaguanine reductase OS=Bacillus pumilus (strain SAFR-032) OX=315750 GN=queF PE=3 SV=1

SEQ ID NO: 44337 - protein, 165 aa, Bacillus safensis
  REGION 1..165: note = tr|A0A0M2EDU5|A0A0M2EDU5_9BACI NADPH-dependent 7-cyano-7-deazaguanine reductase OS=Bacillus safensis; OX = 561879 GN=queF PE=3 SV=1
MTTRKPEELEGVTLLGNQGTNYLFDYAPQVLETFPNKHTNRDYFVKFNCPEFTSLCPQTGQPDFATVYISYIPNEIMVESKSLKLYLFSFRNHGDFHEDCMNIIMNDLIELMDPRYIEVWGKFTPRGGISIDPYTNYGKPGTKYEEMAEYRMMNHDMYPETIDNR

SEQ ID NO: 44338 - protein, 165 aa, Bacillus safensis; identical to SEQ ID NO: 44205
  REGION 1..165: note = tr|A0A561S1I2|A0A561S1I2_9BACI NADPH-dependent 7-cyano-7-deazaguanine reductase OS=Bacillus safensis; OX = 561879 GN=queF PE=3 SV=1

SEQ ID NO: 44339 - protein, 165 aa, unidentified
  source 1..165: note = Bacillus salacetis
  REGION 1..165: note = tr|A0A3A1QVL9|A0A3A1QVL9_9BACI NADPH-dependent 7-cyano-7-deazaguanine reductase OS=Bacillus salacetis; OX = 2315464 GN=queF PE=3 SV=1
MSGRKDEELQDVTLLGNQGTDYLFEYAPQVLETFENQHPNRDYFVKFNCPEFTSLCPKTRQPDFATIYISYVPDIKMVESKSLKLYLFSFRNHGDFHEDCMNIIMNDLIELMDPRYIEVWGKFTPRGGISIDPYCNYGKPGTKFEKMAEYRMMNHDLYPETIDNR

SEQ ID NO: 44340 - protein, 163 aa, Bacillus salarius
  REGION 1..163: note = tr|A0A3R9P4U9|A0A3R9P4U9_9BACI NADPH-dependent 7-cyano-7-deazaguanine reductase OS=Bacillus salarius; OX = 284579 GN=queF PE=3 SV=1
MSKRKDVDELSHLGQEETSYTFEYDPSLLETFNNNHPDRDYFVKFNCPEFTTLCPKTGQPDFATLYISYIPDERMVESKSLKLYLFSFRNHGGFHEDAINTIVDDLVELMAPRYLEVIGKFTPRGGISIDPYANYGRPGTTFEEMAKTRLLYHDMYPETIDNR

SEQ ID NO: 44341 - protein, 163 aa, Bacillus salarius
  REGION 1..163: note = tr|A0A428MTB9|A0A428MTB9_9BACI NADPH-dependent 7-cyano-7-deazaguanine reductase OS=Bacillus salarius; OX = 284579 GN=queF PE=3 SV=1
MSERKDVDELSHLGQEETSYTFEYDPSLLETFNNNHPNRDYFVKFNCPEFTTLCPKTGQPDFATLYISYIPDEKMVESKALKLYLFSFRNHGGFHEDAINTIVNDLVDLMDPRYLEVLGKFTPRGGISIDPYANYGRPGTTYEEMAKTRLLYHDMYPEKIDNR

SEQ ID NO: 44342 - protein, 190 aa, unidentified
  source 1..190: note = Bacillus salsus
  REGION 1..190: note = tr|A0A1H0RYT6|A0A1H0RYT6_9BACI NADPH-dependent 7-cyano-7-deazaguanine reductase OS=Bacillus salsus; OX = 930152 GN=queF PE=3 SV=1
MGVVFLVLVKSLSRFMLFKERNVYRMTGRKDEELTDVTLLGNQGTNYLFEYSPDILESFDNKHPDRDYFVKFNCPEFTSLCPKTGQPDFATIYISYIPEIKMVESKSLKLYLFSFRNHGDFHEDCVNIIMKDLIKLMDPRYIEVWGKFTPRGGISIDPYTNYGRPGTKFEEMAEYRMMNHDLYPEKIDNR

SEQ ID NO: 44343 - protein, 165 aa, Bacillus selenatarsenatis
  REGION 1..165: note = tr|A0A0A8XEB9|A0A0A8XEB9_9BACI NADPH-dependent 7-cyano-7-deazaguanine reductase OS=Bacillus selenatarsenatis SF-1 OX=1321606 GN=queF PE=3 SV=1
MAGRKDEELKDITLLGNQGTKYLFEYSPEILETFENKHPYRDYFVKFNTPEFTSLCPITGQPDFASIYISYIPDKLMVESKSLKLYLFSFRNHGDFHEDCMNIIMNDLIKLMEPRYIEVWGKFTPRGGISIDPYTNYGKPGTKYEEMADYRMMNHDMYPEKVDNR

SEQ ID NO: 44344 - protein, 135 aa, Bacillus selenitireducens
  REGION 1..135: note = tr|D6XV20|D6XV20_BACIE NADPH-dependent 7-cyano-7-deazaguanine reductase OS=Bacillus selenitireducens (strain ATCC 700615 / DSM 15326 / MLS10); OX = 439292 GN=queF PE=3SV=1
MSENYYLPRSGPMPRPASVEEGRNVLRDEAFPAPDVSVVRFKALEFTAVCPKTGQPDFGQVEIEYVPRNKCIESKSLKFYLWSYRDEGAYCESLAAQIADDVMAAIEPARVKVMVHQTPRGGIQLETEAERIHEA

SEQ ID NO: 44345 - protein, 166 aa, Bacillus shackletonii
  REGION 1..166: note = tr|A0A0Q3TAR9|A0A0Q3TAR9_9BACI NADPH-dependent 7-cyano-7-deazaguanine reductase OS=Bacillus shackletonii; OX = 157838 GN=queF PE=3 SV=1
MSGRKQEEGLKDLTLLGNQGTKYKFEYSPEILESVDNLHSNRDYFVKFNCPEFTSLCPITSQPDYATMYISYIPDKKIVESKSLKLYLFSFRNHGDFHEDCVNIIMNDLIKLLDPRYIEVWGKFTPRGGISIDPYCNYGRPGTKYEEMANFRLMNHDLYPEKVDNR

SEQ ID NO: 44346 - protein, 164 aa, Bacillus siamensis
  REGION 1..164: note = tr|A0A2K9KD29|A0A2K9KD29_9BACI NADPH-dependent 7-cyano-7-deazaguanine reductase OS=Bacillus siamensis; OX = 659243 GN=queF PE=3 SV=1
MTRKESELEGVTLLGNQGTNYLFEYAPEVLESFPNKHVNRDYFVKFNCPEFTSLCPKTGQPDFATIYISYIPDEKMVESKSLKLYLFSFRNHGDFHEDCMNIIMNDLIELMDPRYIEVWGKFTPRGGISIDPYTNYGKPGTKYEKMAEYRMMNHDLYPETIDNR

SEQ ID NO: 44347 - protein, 164 aa, Bacillus siamensis; identical to SEQ ID NO: 44210
  REGION 1..164: note = tr|A0A268DYC6|A0A268DYC6_9BACI NADPH-dependent 7-cyano-7-deazaguanine reductase OS=Bacillus siamensis; OX = 659243 GN=queF PE=3 SV=1

SEQ ID NO: 44348 - protein, 166 aa, Bacillus simplex
  REGION 1..166: note = tr|A0A098FA62|A0A098FA62_9BACI NADPH-dependent 7-cyano-7-deazaguanine reductase OS=Bacillus simplex; OX = 1478 GN=queF PE=3 SV=1
MSGRKEEELKKDITLLGNQGTKYTFDYAPEILESFDNKHPNRDYFVKFNCPEFTSLCPITGQPDFATIYISYIPSVKMVESKSLKLYLFSFRNHGDFHEDCMNIIMNDLIELMDPKYIEVWGKFTPRGGISIDPYTNYGKLGTKYEEMANYRLMNHDLYPETVDNR

SEQ ID NO: 44349 - protein, 166 aa, Bacillus simplex
  REGION 1..166: note = tr|A0A127D394|A0A127D394_9BACI NADPH-dependent 7-cyano-7-deazaguanine reductase OS=Bacillus simplex; OX = 1478 GN=queF PE=3 SV=1
MSGRKEEELKKDITLLGNQGTKYTFDYAPEILESFDNKHPNRDYFVKFNCPEFTSLCPITGQPDFATIYISYIPSVKMVESKSLKLYLFSFRNHGDFHEDCMNIIMNDLIELMDPKYIEVWGKFTPRGGISIDPYTNYGKPGTKYEEMADYRLMNHDLYPETVDNR

SEQ ID NO: 44350 - protein, 165 aa, Bacillus smithii
  REGION 1..165: note = tr|A0A0H4P2B6|A0A0H4P2B6_9BACI NADPH-dependent 7-cyano-7-deazaguanine reductase OS=Bacillus smithii; OX = 1479 GN=queF PE=3 SV=1
MAGRNEEELQGVTLLGNQGTKYVFDYAPEVLEVFDNKHPNRDYFVKFNCPEFTSLCPKTGQPDFATIYISYIPDKKMVESKSLKLYLFSFRNHGDFHEDCVNIIMNDLIDVMDPRYIEVWGKFTPRGGISIDPYVNYGRPGTKYEKMAEYRLMNHDLYPEKIDNR

SEQ ID NO: 44351 - protein, 165 aa, Bacillus smithii
  REGION 1..165: note = tr|G9QLM2|G9QLM2_9BACI NADPH-dependent 7-cyano-7-deazaguanine reductase OS=Bacillus smithii 7_3_47FAA OX=665952 GN=queF PE=3 SV=1
MAGRNEEELQGVTLLGNQGTKYIFDYAPEVLEVFDNKHPNRDYFVKFNCPEFTSLCPKTGQPDFATIYISYIPDKKMVESKSLKLYLFSFRNHGDFHEDCVNIIMNDLIDVMDPRYIEVWGKFTPRGGISIDPYVNYGRPGTKYEKMAEYRLMNHDLYPEKIDNR

SEQ ID NO: 44352 - protein, 166 aa, unidentified
  source 1..166: note = Bacillus solani
  REGION 1..166: note = tr|A0A0Q3SQ50|A0A0Q3SQ50_9BACI NADPH-dependent 7-cyano-7-deazaguanine reductase OS=Bacillus solani; OX = 1637975 GN=queF PE=3 SV=1
MSGRKLEEGLKDLTLLGNQQTQYRSDYAPEVLEAVDSLHSNRDYFVKFNCPEFTSLCPITGQPDFATMYISYIPDKKIVESKSLKLYLFSFRNHGDFHEDCVNIIMNDLIKLLDPRYIEVWGKFTPRGGISIDPWCNYGRPGTKYEEMANHRLMNHDLYPEKVDNR

SEQ ID NO: 44353 - protein, 132 aa, unidentified
  source 1..132: note = Bacillus solimangrovi
  REGION 1..132: note = tr|A0A1E5LF70|A0A1E5LF70_9BACI NADPH-dependent 7-cyano-7-deazaguanine reductase OS=Bacillus solimangrovi; OX = 1305675 GN=queF PE=3 SV=1
MSEYYLPRSGPMPRPESSQQAKEVLKQESFPAPNVQEVTFDALEFTSVCPKTSQPDFGSVTISYVPDESCIESKSLKFYLWSFRDEGAYCESLAAQIADDIVYAIDPKRVDVTVYQTPRGGIKLKTNAVREK

SEQ ID NO: 44354 - protein, 165 aa, Bacillus sonorensis
  REGION 1..165: note = tr|M5P557|M5P557_9BACI NADPH-dependent 7-cyano-7-deazaguanine reductase OS=Bacillus sonorensis L12 OX=1274524 GN=queF PE=3 SV=1
MTTRKDSELEGVTLLGNQGTNYLFDYSPDVLEAFPNKHENRDYFVKFNCPEFTSLCPKTGQPDFATIYISYIPDKKMVESKSLKLYLFSFRNHGDFHEDCMNIIMNDLIELMDPRYIEVWGKFTPRGGISIDPYTNYGRPGTKYEKMAEYRMMNHDLYPETVDNR

SEQ ID NO: 44355 - protein, 65 aa, Bacillus sonorensis
  REGION 1..65: note = tr|M5P3E3|M5P3E3_9BACI NADPH-dependent 7-cyano-7-deazaguanine reductase OS=Bacillus sonorensis L12 OX=1274524 GN=queF PE=3 SV=1
MNIIMNDLIELMDPRYIEVWGKFTPRGGISIDPYTNYGRPGTKYEKMAEYRLMNHDLYPETVDNR

SEQ ID NO: 44356 - protein, 165 aa, Bacillus sp.
  REGION 1..165: note = tr|A0A1S1FX61|A0A1S1FX61_9BACI NADPH-dependent 7-cyano-7-deazaguanine reductase OS=Bacillus sp. HMSC76G11; OX = 1608910 GN=queF PE=3 SV=1
MAGRQDSELTDVTLLGNQGTNYLFEYSPDILESFDNKHENRDYFVKFNCPEFTSLCPKTGQPDFATIYISYIPDKKMVESKSLKLYLFSFRNHGDFHEDCMNIIMNDLIELMDPRYIEVWGKFTPRGGISIDPYTNYGKPGTKYEQMAEHRMMNHDMYPEKIDNR

SEQ ID NO: 44357 - protein, 165 aa, Bacillus sp.
  REGION 1..165: note = tr|A0A2B8U2Q7|A0A2B8U2Q7_9BACI NADPH-dependent 7-cyano-7-deazaguanine reductase OS=Bacillus sp. AFS055030; OX = 2033507 GN=queF PE=3 SV=1
MVGRSKGSLEDVSLLGSNNTKYLFEYDPGILETFDNTHPDRDYFVKFNFPEFTSLCPKTGQPDFATIYISYIPEKKMVESKSLKLYFFSFRNHGDFHEDCMNIIMDDLIKLMDPRYIEVWGKFTPRGGISIDPYCNYGRPGTKYEKMAEHRMMNHDLYPEKIDNR

SEQ ID NO: 44358 - protein, 166 aa, Bacillus sporothermodurans
  REGION 1..166: note = tr|A0A150LFD6|A0A150LFD6_9BACI NADPH-dependent 7-cyano-7-deazaguanine reductase OS=Bacillus sporothermodurans OX=46224 GN=queF PE=3 SV=1
MSGRKKEEGLSDLTLLGNQGTQYSFEYAPQVLESVDNLHVDRDYFVKFNCPEFSSLCPITHQPDYATMYISYIPDKKIVESKSLKLYLFSFRNHGDFHEDCVNIIMNDLIKLLDPRYIEVWGKFTPRGGISIDPYCNYGKKGTKFEDMAAYRLMNHDMYPEKVDNR

SEQ ID NO: 44359 - protein, 166 aa, Bacillus sporothermodurans
  REGION 1..166: note = tr|A0A2T6EWZ9|A0A2T6EWZ9_9BACI NADPH-dependent 7-cyano-7-deazaguanine reductase OS=Bacillus sporothermodurans OX=46224 GN=queF PE=3 SV=1
MSGRKKEEGLSDLTLLGNQGTQYSFEYAPQVLESVDNLHVDRDYFVKFNCPEFSSLCPITHQPDYATMYISYIPDKKIVESKSLKLYLFSFRNHGDFHEDCVNIIMNDLIKLLDPRYIEVWGKFTPRGGISIDPYCNYGKKGTKFEDMAAYRLMNHDMYPETVDNR

SEQ ID NO: 44360 - protein, 165 aa, Bacillus stratosphericus; identical to SEQ ID NO: 44205
  REGION 1..165: note = tr|M5R3L6|M5R3L6_9BACI NADPH-dependent 7-cyano-7-deazaguanine reductase OS=Bacillus stratosphericus LAMA 585 OX=1236481 GN=queF PE=3 SV=1

SEQ ID NO: 44361 - protein, 165 aa, Bacillus stratosphericus; identical to SEQ ID NO: 44337
  REGION 1..165: note = tr|A0A4Y9K3U1|A0A4Y9K3U1_9BACI NADPH-dependent 7-cyano-7-deazaguanine reductase OS=Bacillus stratosphericus OX=293386 GN=queF PE=3 SV=1

SEQ ID NO: 44362 - protein, 165 aa, Bacillus subterraneus
  REGION 1..165: note = tr|A0A427TTH4|A0A427TTH4_9BACI NADPH-dependent 7-cyano-7-deazaguanine reductase OS=Bacillus subterraneus; OX = 285983 GN=queF PE=3 SV=1
MAGRKEEEMKDLTLLGNQGTKYLFEYSPEILETFENKHPYRDYFVKFNTPEFTSLCPITGQPDFASIYISYIPDQLMVESKSLKLYLFSFRNHGDFHEDCMNIIMNDLIKLMDPRYIEVWGKFTPRGGISIDPYTNYGKPGTKYEEMANYRMMNHDMYPEKVDNR

SEQ ID NO: 44363 - protein, 165 aa, Bacillus subtilis; identical to SEQ ID NO: 44220
  REGION 1..165: note = sp|O31678|QUEF_BACSU NADPH-dependent 7-cyano-7-deazaguanine reductase OS=Bacillus subtilis (strain 168) OX=224308 GN=queF PE=1 SV=1

SEQ ID NO: 44364 - protein, 62 aa, Bacillus subtilis
  REGION 1..62: note = tr|A0A0D1KU70|A0A0D1KU70_BACIU 7-cyano-7-deazaguanine reductase OS=Bacillus subtilis; OX = 1423 GN=SC09_Contig19orf00817 PE=4 SV=1
MNIIMNDLIELMDPRYIEVWGKFTPRGGISIDPYTNYGKPGTKYEKMAEYRHDLYPETIDNR

SEQ ID NO: 44365 - protein, 165 aa, unidentified; identical to SEQ ID NO: 44204
  source 1..165: note = Bacillus swezeyi
  REGION 1..165: note = tr|A0A1R1RGL7|A0A1R1RGL7_9BACI NADPH-dependent 7-cyano-7-deazaguanine reductase OS=Bacillus swezeyi; OX = 1925020 GN=queF PE=3 SV=1

SEQ ID NO: 44366 - protein, 139 aa, Bacillus taeanensis
  REGION 1..139: note = tr|A0A366Y0R2|A0A366Y0R2_9BACI NADPH-dependent 7-cyano-7-deazaguanine reductase OS=Bacillus taeanensis; OX = 273032 GN=queF PE=3 SV=1
MGKVNVDHSKYEGIRFDIENEDVILVDILETIPYEYIGKETLVTIPTNEFTSVCPWSGLPDFAEIQISYIPNETLVEMKSLKYYLTSYRNVGIYQEHATNRMLNDLVSLLSPKYMKITALWNARGGLGTEVVVEYKEDK

SEQ ID NO: 44367 - protein, 165 aa, Bacillus tequilensis
  REGION 1..165: note = tr|A0A2X0X753|A0A2X0X753_9BACI NADPH-dependent 7-cyano-7-deazaguanine reductase OS=Bacillus tequilensis; OX = 227866 GN=ykvM PE=3 SV=1
MTTRKESELEGVTLLGNQGTNYLFEYAPDVLESFPNKHVNRDYFVKFNCPEFTSLCPKTGQPDFATIYISYIPDEKMVESKSLKLYLFSFRNHGDFHEDCMNIIMNDLIELMDPRYIEVWGKFTPRGGISIDPYTNYGKPGTKYEKMAEYRMMNHDLYPETVDNR

SEQ ID NO: 44368 - protein, 165 aa, unidentified
  source 1..165: note = Bacillus terrae
  REGION 1..165: note = tr|A0A429X3R1|A0A429X3R1_9BACI NADPH-dependent 7-cyano-7-deazaguanine reductase OS=Bacillus terrae; OX = 1914933 GN=queF PE=3 SV=1
MTGRNEDTLKDLSLLGNQNTEYLFEYSPGVLESIDNLHSDRDYFIKFNCPEFTSLCPQTKQPDFATIYISYIPDKKIVESKSLKLYLFSFRNHGDFHEDCVNKIMNDLIKLLYPRYIEVWGKFTPRGGLSIDPYSNYGKPGTKYEQMAEYRMMNHDLYPEKVDNR

SEQ ID NO: 44369 - protein, 162 aa, Bacillus thermoamylovorans
  REGION 1..162: note = tr|A0A2U8EH60|A0A2U8EH60_9BACI NADPH-dependent 7-cyano-7-deazaguanine reductase OS=Bacillus thermoamylovorans OX=35841 GN=queF PE=3 SV=1
MMGRKKDEVKSLGKKEAKYIFDYAPEVLEAVQNKHAGRDYFVKFNCPEFTSLCPITNQPDFATIYISYIPDEKLVESKSLKLYLFSFRNHGDFHEDCVNIIMDDLIKLLDPKYIEVWGKFTPRGGISIDPYCNYGRPGTKYEEMANYRLMNHDLYPEKVDNR

SEQ ID NO: 44370 - protein, 161 aa, Bacillus thermoamylovorans
  REGION 1..161: note = tr|A0A090KSQ1|A0A090KSQ1_9BACI NADPH-dependent 7-cyano-7-deazaguanine reductase OS=Bacillus thermoamylovorans OX=35841 GN=queF PE=3 SV=1
MGRKKDEVKSLGKKEAKYIFDYAPEVLEAVQNKHAGRDYFVKFNCPEFTSLCPITNQPDFATIYISYIPDEKLVESKSLKLYLFSFRNHGDFHEDCVNIIMDDLIQLLDPKYIEVWGKFTPRGGISIDPYCNYGRPGTKYEEMAYYRLMNHDLYPEKVDNR

SEQ ID NO: 44371 - protein, 163 aa, unidentified; identical to SEQ ID NO: 44033
  source 1..163: note = Bacillus thermocopriae
  REGION 1..163: note = tr|A0A410XIN3|A0A410XIN3_9BACI NADPH-dependent 7-cyano-7-deazaguanine reductase OS=Bacillus thermocopriae; OX = 1215031 GN=queF PE=3 SV=1

SEQ ID NO: 44372 - protein, 168 aa, Bacillus thuringiensis; identical to SEQ ID NO: 44212
  REGION 1..168: note = tr|C3G071|C3G071_BACTU NADPH-dependent 7-cyano-7-deazaguanine reductase OS=Bacillus thuringiensis serovar andalousiensis BGSC 4AW1 OX=527032 GN=queF PE=3; SV = 1

SEQ ID NO: 44373 - protein, 165 aa, Bacillus thuringiensis; identical to SEQ ID NO: 44231
  REGION 1..165: note = tr|W8Y8H2|W8Y8H2_BACTU NADPH-dependent 7-cyano-7-deazaguanine reductase OS=Bacillus thuringiensis DB27 OX=1431339 GN=queF PE=3 SV=1

SEQ ID NO: 44374 - protein, 166 aa, unidentified
  source 1..166: note = Bacillus timonensis
  REGION 1..166: note = tr|A0A4S3PMD6|A0A4S3PMD6_9BACI NADPH-dependent 7-cyano-7-deazaguanine reductase OS=Bacillus timonensis; OX = 1033734 GN=queF PE=3 SV=1
MSGRSHEEGLKDLTLLGNQNTQYSFEYAPEVLEAVDNLHSNRDYFVKFNCPEFTSLCPLTHQPDFATIYISYIPDKKLVESKSLKLYLFSFRNHGDFHEDCVNIIMNDLIKLLDPRYIEVWGKFTPRGGISIDPWCNYGKPGTKYEEMANYRLMNHDLNPEKIDNR

SEQ ID NO: 44375 - protein, 165 aa, unidentified
  source 1..165: note = Bacillus toyonensis
  REGION 1..165: note = tr|A0A2C5IMS6|A0A2C5IMS6_9BACI NADPH-dependent 7-cyano-7-deazaguanine reductase OS=Bacillus toyonensis; OX = 155322 GN=queF PE=3 SV=1
MAGRLDEDLKDITLLGNQNTKYLFEYSPEILEVFDNNHPNRDYFVKFNCPEFTSLCPKTGQPDFATIYISYIPEQRMVESKSLKLYLFSFRNHGDFHEDCMNVIMNDLIKLMDPRYIEVWGKFTPRGGISIDPYCNYGRPGTKYEQMADYRMMNHDLYPETIDNR

SEQ ID NO: 44376 - protein, 165 aa, unidentified
  source 1..165: note = Bacillus toyonensis
  REGION 1..165: note = tr|A0A2B5Y7W4|A0A2B5Y7W4_9BACI NADPH-dependent 7-cyano-7-deazaguanine reductase OS=Bacillus toyonensis; OX = 155322 GN=queF PE=3 SV=1
MAGRLDEDLKDVTLLGNQNTKYLFEYSPEILEVFDNNHPNRDYFVKFNCPEFTSLCPKTGQPDFAIIYISYIPEQRMVESKSLKLYLFSFRNHGDFHEDCMNVIMNDLIKLMDPRYIEVWGKFTPRGGISIDPYCNYGRPGTKYEQMADYRMMNHDLYLETIDNR

SEQ ID NO: 44377 - protein, 165 aa, unidentified; identical to SEQ ID NO: 44213
  source 1..165: note = Bacillus tropicus
  REGION 1..165: note = tr|A0A4Y6F844|A0A4Y6F844_9BACI NADPH-dependent 7-cyano-7-deazaguanine reductase OS=Bacillus tropicus; OX = 2026188 GN=queF PE=3 SV=1

SEQ ID NO: 44378 - protein, 162 aa, unidentified
  source 1..162: note = Bacillus urumqiensis
  REGION 1..162: note = tr|A0A2P6MK33|A0A2P6MK33_9BACI NADPH-dependent 7-cyano-7-deazaguanine reductase OS=Bacillus urumqiensis; OX = 1548213 GN=queF PE=3 SV=1
MTKPREDEVSLLGNTNVEYKTDYDPSVLESVENRHDYRDFFVKFNCPEFTSLCPKTGQPDFATVYISYVPDKKMVESKSLKLYLFSFRNHGDFHEDCMNIILNDLVELMDPRYIEVWGKFTPRGGISIDPYTNYGKPGTKYENMAEHRMMNHDMYPETVDHR

SEQ ID NO: 44379 - protein, 165 aa, Bacillus vallismortis
  REGION 1..165: note = tr|A0A410WHM3|A0A410WHM3_BACVA NADPH-dependent 7-cyano-7-deazaguanine reductase OS=Bacillus vallismortis; OX = 72361 GN=queF PE=3 SV=1
MTTRKDSELEGVTLLGNQGTNYLFEYAPDVLESFPNKHVNRDYFVKFNCPEFTSLCPKTGQPDFATIYISYIPDEKMVESKSLKLYLFSFRNHGDFHEDCMNIIMNDLIELMDPRYIEVWGKFTPRGGISIDPYTNYGKPGTKYEKMAEYRMMNHDLYPETIDNR

SEQ ID NO: 44380 - protein, 164 aa, Bacillus vallismortis; identical to SEQ ID NO: 44210
  REGION 1..164: note = tr|A0A1W6HH79|A0A1W6HH79_BACVA NADPH-dependent 7-cyano-7-deazaguanine reductase OS=Bacillus vallismortis; OX = 72361 GN=queF PE=3 SV=1

SEQ ID NO: 44381 - protein, 165 aa, unidentified
  source 1..165: note = Bacillus velezensis
  REGION 1..165: note = tr|A0A411A5C1|A0A411A5C1_9BACI NADPH-dependent 7-cyano-7-deazaguanine reductase OS=Bacillus velezensis; OX = 492670 GN=queF PE=3 SV=1
MTTRKESELEGVTLLGNQGTNYLFEYAPDVLESFPNKHVNRDYFVKFNCPEFTSLCPKTGQPDFATIYISYIPDEKMVESKSLKLYLFSFRNHGDFHEDCMNIIMNDLIELMDPRYIEVWGKFTPRGGISIDPYTNYGRPGTKYEKMAEHRMMNHDMYPETIDNR

SEQ ID NO: 44382 - protein, 164 aa, unidentified; identical to SEQ ID NO: 44210
  source 1..164: note = Bacillus velezensis
  REGION 1..164: note = sp|A7Z3Y9|QUEF_BACVZ NADPH-dependent 7-cyano-7-deazaguanine reductase OS=Bacillus velezensis (strain DSM 23117 / BGSC 10A6 / FZB42) OX=326423 GN=queF; PE = 3 SV=1

SEQ ID NO: 44383 - protein, 165 aa, Bacillus vietnamensis
  REGION 1..165: note = tr|A0A0P6WVS3|A0A0P6WVS3_9BACI NADPH-dependent 7-cyano-7-deazaguanine reductase OS=Bacillus vietnamensis; OX = 218284 GN=queF PE=3 SV=1
MSGRKDEDLTDLSLLGNQGTNYLFEYAPHILEAFDNKHPNRDYFVKFNCPEFTSLCPKTGQPDFATIYISYIPGEKMVESKSLKLYLFSFRNHGDFHEDCMNIIMNDLIELMDPRYIEVWGKFTPRGGISIDPYCNYGKPGTKFETMADHRLMNHDLYPEKIDNR

SEQ ID NO: 44384 - protein, 165 aa, Bacillus vietnamensis
  REGION 1..165: note = tr|A0A5D4KER5|A0A5D4KER5_9BACI NADPH-dependent 7-cyano-7-deazaguanine reductase OS=Bacillus vietnamensis; OX = 218284 GN=queF PE=3 SV=1
MSGRKDEQLQDVTLLGNQGTDYLFEYAPQVLETFDNQHPNRDYFVKFNCPEFTSLCPKTRQPDFATIYISYIPDIKMVESKSLKLYLFSFRNHGDFHEDCMNIIMNDLIELMDPRYIEVWGKFTPRGGISIDPYCNYGKKDTKFEKMADYRMMNHDLYPETIDNR

SEQ ID NO: 44385 - protein, 166 aa, Bacillus vireti
  REGION 1..166: note = tr|W1SCV8|W1SCV8_9BACI NADPH-dependent 7-cyano-7-deazaguanine reductase OS=Bacillus vireti LMG 21834 OX=1131730 GN=queF PE=3 SV=1
MSGRSHEEGLKDLTLLGNQGTTYSFDYAPEVLEAVDNLHPERDYFVKFNCPEFTSLCPLTRQPDFATMYISYVPNQKIVESKSLKLYLFSFRNHGDFHEDCVNIIMNDLIQLLDPRYIEVWGKFTPRGGISIDPWCNYGKPGTKYEEMANFRLMNHDLYPEKVDNR

SEQ ID NO: 44386 - protein, 165 aa, Bacillus wakoensis
  REGION 1..165: note = tr|W4PXA5|W4PXA5_9BACI NADPH-dependent 7-cyano-7-deazaguanine reductase OS=Bacillus wakoensis JCM 9140 OX=1236970 GN=queF PE=3 SV=1
MSGRKKEELEGVTLLGNQGTAYDFSYNPSVLEVFENKHQNRDYFVKFNCPEFTSLCPMTNQPDFATIYISYIPDVKMVESKSLKLYLFSFRNHGDFHEDCMNIIMNDLIELMDPRYIEVWGKFTPRGGISIDPYTNYGKPGTKYEKMAEHRMMNHDMYPETIDNR

SEQ ID NO: 44387 - protein, 165 aa, unidentified
  source 1..165: note = Bacillus weihaiensis
  REGION 1..165: note = tr|A0A1L3MT66|A0A1L3MT66_9BACI NADPH-dependent 7-cyano-7-deazaguanine reductase OS=Bacillus weihaiensis; OX = 1547283 GN=queF PE=3 SV=1
MSGRKDEELQDVTLLGNQGTNYLFEYSPSILESFDNKHQNRDYFVKFNCPEFTSLCPKTGQPDFATIYISYIPDVKMVESKSLKLYLFSFRNHGDFHEDCMNIIMNDLIELMDPRYIEVWGKFTPRGGISIDPYTNYGKPGTKYEKMAEYRMMNHDLYPETIDNR

SEQ ID NO: 44388 - protein, 78 aa, unidentified
  source 1..78: note = Bacillus wiedmannii
  REGION 1..78: note = tr|A0A4U3AWV8|A0A4U3AWV8_9BACI NADPH-dependent 7-cyano-7-deazaguanine reductase (Fragment) OS=Bacillus wiedmannii OX=1890302 GN=FC699_18605 PE=3 SV=1
FSFRNHGDFHEDCMNVIMNDLIKLMDPRYIEVWGKFTPRGGISIDPYCNYGRPGTKYEQMADYRMMNHDLYPETIDNR

SEQ ID NO: 44389 - protein, 165 aa, unidentified
  source 1..165: note = Bacillus wiedmannii
  REGION 1..165: note = tr|A0A2C4HAB7|A0A2C4HAB7_9BACI NADPH-dependent 7-cyano-7-deazaguanine reductase OS=Bacillus wiedmannii; OX = 1890302 GN=queF PE=3 SV=1
MAGRLDQDLKDVTLLGNQNTKYLFEYSPEILEVFDNNHPNRDYFVKFNCPEFTSLCPKTGQPDFATIYISYIPEQRMVESKSLKLYLFSFRNHGDFHEDCMNVIMNDLIKLMDPRYIEVWGKFTPRGGISIDPYCNYGRPGTKYEQMADYRMMNHDLYPETIDNR

SEQ ID NO: 44390 - protein, 166 aa, unidentified
  source 1..166: note = Bacillus wudalianchiensis
  REGION 1..166: note = tr|A0A1B9AG29|A0A1B9AG29_9BACI NADPH-dependent 7-cyano-7-deazaguanine reductase OS=Bacillus wudalianchiensis OX=1743143 GN=queF PE=3 SV=1
MAGRNEEELKKDISLLGNQGTKYTFEYDPSILESFDNKHPNRDYFVKFNCPEFTSLCPVTGQPDFATIYISYIPDIKMVESKSLKLYLFSFRNHGDFHEDCVNIIMNDLIKLMNPRYIEVWGKFTPRGGISIDPYCNWGRPGTKFEEMANYRLMNHDLYPEKVDNR

SEQ ID NO: 44391 - protein, 165 aa, unidentified; identical to SEQ ID NO: 44205
  source 1..165: note = Bacillus xiamenensis
  REGION 1..165: note = tr|K2NG36|K2NG36_9BACI NADPH-dependent 7-cyano-7-deazaguanine reductase OS=Bacillus xiamenensis; OX = 1178537 GN=queF PE=3 SV=1

SEQ ID NO: 44392 - protein, 165 aa, unidentified
  source 1..165: note = Bacillus zeae
  REGION 1..165: note = tr|A0A398AZR1|A0A398AZR1_9BACI NADPH-dependent 7-cyano-7-deazaguanine reductase OS=Bacillus zeae; OX = 1917180 GN=queF PE=3 SV=1
MGGRKDEELKDLTLLGNQGTKYSFEYAPNLLETFENKHKDRDYIVKFNCPEFTSLCPQTGQPDFATIYISYIPDVKMVESKSLKLYLFSFRNHGDFHEDCMNIIMNDLIELMAPRYIEVWGKFTPRGGISIDPYTNYGKPGTKYEQMADYRLMNHDMYPETIDNR

SEQ ID NO: 44393 - protein, 165 aa, unidentified
  source 1..165: note = Bacillus zhangzhouensis
  REGION 1..165: note = tr|A0A081L6Z5|A0A081L6Z5_9BACI NADPH-dependent 7-cyano-7-deazaguanine reductase OS=Bacillus zhangzhouensis OX=1178540 GN=queF PE=3 SV=1
MTTRKPEELEGVTLLGNQGTNYLFEYAPQVLETFPNKHPNRDYFVKFNCPEFTSLCPQTGQPDFATIYISYIPNEIMVESKSLKLYLFSFRNHGDFHEDCMNIIMNDLIELMDPRYIEVWGKFTPRGGISIDPYTNYGKPGTKYEEMASYRMMNHDMYPETIDNR

SEQ ID NO: 44394 - protein, 281 aa, unidentified
  source 1..281: note = Unknown
  REGION 1..281: note = tr|A0A0J8YR49|A0A0J8YR49_9GAMM NADPH-dependent 7-cyano-7-deazaguanine reductase OS=bacteria symbiont BFo2 of Frankliniella occidentalis OX=1628856 GN=queF PE=3 SV=1
MADYENHPTLSELTLGKSTAYISDYQPSLLQAVPRSLNRDSLQLEGAQLPFHGEDFWTLYELSWLNENGIPQVAIGDVALPASSQNLIESKSFKLYLNSFNQTRFSDWHSVEQTLVRDLSECAQGEVRVTLHRLSDFAAQPIDDFAGAVIDEQAITVDDYQFNRDYLRDAAHGEWVEETLVSHLLKSNCLITQQPDWGSVMIHYKGKKIDREALLRYLLSFRQHNEFHEQCVERIYMDIMALCEPEALTVYARYTRRGGLDINPWRTNQHFSPHNRRLARQ

SEQ ID NO: 44395 - protein, 281 aa, unidentified
  source 1..281: note = Unknown
  REGION 1..281: note = tr|A0A0J8YH18|A0A0J8YH18_9GAMM NADPH-dependent 7-cyano-7-deazaguanine reductase OS=bacteria symbiont BFo1 of Frankliniella occidentalis OX=1628855 GN=queF PE=3 SV=1
MSSYDHHQALEGLTLGKPTEYHDSYQPALLQAVPRSLNREPLGLYPDTLPFTGADIWTLYELSWLNSKGLPQVAVGEVALDADSVNLIESKSFKLYLNSFNQTKFADWGEVRQTLERDLSACAAGKVSVALFRLQEIEGQPIGHFDGSCIDEQDIVIDDYQFNADYLRDAAAGEIVEEQLVSHLLKSNCLITNQPDWGSVQISYRGPRIQREALLRYLVSFRHHNEFHEQCVERIFSDILRYCQPESLSVYARYTRRGGLDINPWRTNGQFKPGRSRLVRQ

SEQ ID NO: 44396 - protein, 114 aa, unidentified
  source 1..114: note = Bacteriodetes bacterium
  REGION 1..114: note = tr|A0A522FQR1|A0A522FQR1_9BACT NADPH-dependent 7-cyano-7-deazaguanine reductase OS=Bacteriodetes bacterium OX=2507565 GN=queF PE=3 SV=1
MISIETFPNPKPDRKYVITHVNPEFTSVCPKTGLPDFGIITVKYIPDKVCLELKALKYYYLSYRDKGIFYEAVTNQILDDLVAACEPLEMEITSEWTTRGGMNSVIVAEYHKGE

SEQ ID NO: 44397 - protein, 128 aa, unidentified
  source 1..128: note = Bacteriodetes bacterium
  REGION 1..128: note = tr|A0A522GNH3|A0A522GNH3_9BACT NADPH-dependent 7-cyano-7-deazaguanine reductase OS=Bacteriodetes bacterium OX=2507565 GN=queF PE=3 SV=1
MKYGEKIIKKAVLEIWNNPHPERDYEINISFPEFTCLCPRSGYPDFATIKINYKPGKKIVELKSLKLYLNFFRTTYISHEDVTNVIYTELKKKLRPKFLEVIGDFNPRGNVKTIVRVCSDSKVKAEKV

SEQ ID NO: 44398 - protein, 273 aa, unidentified
  source 1..273: note = Bacterioplanes sanyensis
  REGION 1..273: note = tr|A0A222FKL5|A0A222FKL5_9GAMM NADPH-dependent 7-cyano-7-deazaguanine reductase OS=Bacterioplanes sanyensis OX=1249553 GN=queF PE=3 SV=1
MGSVHSESNPLGQASEYKDQYDAGLLFPIDRQESWRAQGLDRSSASFFGEDIWNAYELSWLNERGKPMVAMAEFRIPAASPFLIESKSFKLYLNSFNQTRFASAAEVVQHLERDLSGAAGAAVQATLLDVEHAFSAPPQAVCIDELDVDIDSYQPDPSLLRCADGEFDGWLCSHLLKSNCPVTGQPDWGSLYIHYRGQRIDEAALLKYVISLRQHQDFHEQCVERTFMDLMTACQPEALTVYARYVRRGGLDINPMRSTDSAAVAVNFRLARQ

SEQ ID NO: 44399 - protein, 187 aa, Bacteriovorax sp.
  REGION 1..187: note = tr|T0C355|T0C355_9PROT NADPH-dependent 7-cyano-7-deazaguanine reductase OS=Bacteriovorax sp. BAL6_X OX=1201290 GN=queF PE=3 SV=1
MSASKKSIKQTKTKSKAKQSPKGRNVKELDAFALGSANTEYPDTYAPDVLEAFDNKNPGSDAWTTFVCTEFTSLCPKTGQPDFARIYINYIADKKMVESKSLKLYLFSFRNHGDFHEDCVQKICDDLTKLMKPKYVEVIGEFTPRGGICIYPYASNSNNKKIYKDIRAKRFSEYAPGKYTMDLSKIY

SEQ ID NO: 44400 - protein, 185 aa, Bacteriovorax sp.
  REGION 1..185: note = tr|T0SKT1|T0SKT1_9PROT NADPH-dependent 7-cyano-7-deazaguanine reductase OS=Bacteriovorax sp. Seq25_V OX=1201288 GN=queF PE=3 SV=1
MAKSLGKKTQTKVGQKKINKGRDAKELSAHILGSAHTEYPSTYSPESLESFPNKNPGKDAWTTFVCTEFTSLCPKTNQPDFARIYINYIADKDMVESKSLKLYLFSFRNHGDFHEDCVQKICDDLTALMNPKYLEVIGEFTPRGGIAIYPYAQSSNKQKKYKDLKDKRFFDYAPGKYSMELSKIY

SEQ ID NO: 44401 - protein, 181 aa, Bacteriovorax stolpii
  REGION 1..181: note = tr|A0A2K9NT06|A0A2K9NT06_9PROT NADPH-dependent 7-cyano-7-deazaguanine reductase OS=Bacteriovorax stolpii; OX = 960 GN=queF PE=3 SV=1
MKKSKNTASKSPRQGQKSETRKAELKSFSLGESHTDYPTTYSPEVLEAFDNKNPGKTAWTTFVCTEFTSLCPKTSQPDFAKIFINYIADKKMVESKSLKLYLFSFRNHGDFHEDCVQKICDDLVKLMNPHYIEVIGEFTPRGGIAIFPFASYGSKKFEKLKDERFMNYAPGKYSMELSKLY

SEQ ID NO: 44402 - protein, 261 aa, unidentified
  source 1..261: note = Unknown
  REGION 1..261: note = tr|A0A2E5IQ96|A0A2E5IQ96_9BACT QueF_N domain-containing protein OS=bacterium OX=1869227; GN = CL658_01950 PE=4 SV=1
MKQKDLDSSPLGKIVNTPEKYNKDILVAIQRNLDYSFKAYGMDRWTAYELSWLNKAGIPQIRICEISYNASSSAIIESKSLKLYFNAFNNSHYDSEKTVLKTIQNDLQDKVKSTVNVSFRTVQDESINPYKQMFQIEESVTQIDSFNAFKFHDNNVEETLYTHIYRSLCPVTNQPDFATLFITYSGKQLDKQTLFNYLISSRNKNNFHEECISTIFNDLLNTKKIKELTVQGSFLRRGGIDITPIRSTLKSYKIIPRISLQ

SEQ ID NO: 44403 - protein, 118 aa, unidentified
  source 1..118: note = Unknown
  REGION 1..118: note = tr|A0A521Q2Q7|A0A521Q2Q7_9BACT NADPH-dependent 7-cyano-7-deazaguanine reductase OS=bacterium OX=1869227; GN = queF PE=3 SV=1
MPTTPSKKIETFSSPRPGRDYEISMECPEFTCVCPRTGQPDFATIRIRYVPDQLCVELKSLKLYLWSFREEGAFHEDVINRILDDLVEACHPRSMTVAGDFNVRGGIHTVVTAEHKAK

SEQ ID NO: 44404 - protein, 139 aa, unidentified
  source 1..139: note = Unknown
  REGION 1..139: note = tr|A0A2M7GBL3|A0A2M7GBL3_9BACT NADPH-dependent 7-cyano-7-deazaguanine reductase OS=bacterium (Candidatus Blackallbacteria) CG17_big_fil_post_rev_8_21_14_2_50_48_46 O X=2014261 GN=queF PE=3 SV=1
MSKKLKKQDLKILGKTTEYPQRPEDAVLETFPNPAPDRDYLISLDCPEFTTLCPITGQPDFATIEIHYVPNQKCVESKALKLYLFSFRNIGSFHEAVTNRILDDLVKAMEPRWIQVKGNFKARGGIAINVRVEKGQNPL

SEQ ID NO: 44405 - protein, 133 aa, unidentified
  source 1..133: note = Unknown
  REGION 1..133: note = tr|A0A523VX46|A0A523VX46_9BACT NADPH-dependent 7-cyano-7-deazaguanine reductase OS=bacterium (Candidatus Stahlbacteria) OX=2528828 GN=queF PE=3 SV=1
MMKYTKKHAISGLREKMPKLEVLPNQFKNYKITIVIPEYTSLCPRTGLPDDGTITIEYEPDNYFVELKSLKYYILAYRNLGIFYENAVNRILKDFVKAVKPQWAIVRGEFNPRGGIKSIVEAKFSTVHPVRKS

SEQ ID NO: 44406 - protein, 165 aa, unidentified
  source 1..165: note = Unknown
  REGION 1..165: note = tr|A0A3A9FFN1|A0A3A9FFN1_9BACT NADPH-dependent 7-cyano-7-deazaguanine reductase OS=bacterium 1XD42-54; OX = 2320110 GN=queF PE=3 SV=1
MQGRTHEELKDITLLGNQKTRYQTDYAPEVLETFPNKHPDNDYFVKFNCPEFTSLCPMTGQPDFATIYISYVPGARMVESKSLKLYLFSFRNHGDFHEDCVNIIMKDLIRLMDPKYIEVWGKFTPRGGISIDPYCNYGKPGTCWEQVALDRLTHHDMYPEKIDNR

SEQ ID NO: 44407 - protein, 163 aa, unidentified
  source 1..163: note = Unknown
  REGION 1..163: note = tr|A0A3A8YWN3|A0A3A8YWN3_9BACT NADPH-dependent 7-cyano-7-deazaguanine reductase OS=bacterium 1xD8-6; OX = 2320116 GN=queF PE=3 SV=1
MAKREEENTITLLGNQNTKYADNYAPEVLETFLNKHPDNDYFVKFNCPEFTSLCPITGQPDFANIIISYVPAQKMVESKSLKLYLFSFRNHGDFHEDCVNIIMKDLIRLMEPKYIEVWGKFTPRGGISIDPYCNYGMPGTKWEEVARDRLFHHDMYPERVDNR

SEQ ID NO: 44408 - protein, 272 aa, unidentified
  source 1..272: note = Unknown
  REGION 1..272: note = tr|A0A0S4M411|A0A0S4M411_9BACT 7-cyano-7-deazaguanine reductase OS=bacterium 2013Arg42i; OX = 1561003 GN=queF PE=4 SV=1
MDFSKTRLGKFYPVPDEYSSDLLDVVGRGSEDRSFFTGYDIWWVHELTWLNSDGFPCRACAKLIIPSTSDFLVESKSAKYYFNSFRFTSFATLGLLRDTIVSDFSLALGCRIGCYIEGFSYNVGIPVNVGSCLDDHEIEIGGYGKEISRHCLKLERGDSRHVRCYTNLFLSHCPVTSQPDLATAVVDCDSAPFNSEGLIKYLLSYRRFSNFNEACCDWIFSDLIELYSPKHLVVAMFYMRRGGITIIPIRHGGTSVDMSVLKDILGYEVPSW

SEQ ID NO: 44409 - protein, 148 aa, unidentified
  source 1..148: note = Unknown
  REGION 1..148: note = tr|A0A1H9N969|A0A1H9N969_9BACT NADPH-dependent 7-cyano-7-deazaguanine reductase OS=bacterium A52C2; OX = 1855383 GN=queF PE=3 SV=1
METLQLGKAVEQPSSPEDAQLDRVPNPHVDTDYVTRFTAPEFTSLCPVTGQPDFAHLVIDYVPDRWLVESKSLKLFLTSFRNHGAFHEDCTVSIGRRLVSLLEPRYLRIAGYWYPRGGIPIDVFWQTGEVPKAIWLPDTGVAPYRGRG

SEQ ID NO: 44410 - protein, 119 aa, unidentified
  source 1..119: note = Unknown
  REGION 1..119: note = tr|A0A1V5T6F0|A0A1V5T6F0_9BACT NADPH-dependent 7-cyano-7-deazaguanine reductase OS=bacterium ADurb.Bin270; OX = 1866926 GN=queF PE=3 SV=1
MTTKPSSELATFPNPNPERNYEIFMDCPEFTCLCPVTSQPDFARIKIRYIPDDLCVELKSLKLYLWSYRNEGAFHEAVTNKIANDIVKTISPRWLEITGEFNVRGGITTSVVVTHGKKV

SEQ ID NO: 44411 - protein, 180 aa, unidentified
  source 1..180: note = Unknown
  REGION 1..180: note = tr|A0A1V5PEH3|A0A1V5PEH3_9BACT NADPH-dependent 7-cyano-7-deazaguanine reductase OS=bacterium ADurb.Bin363; OX = 1866927 GN=queF PE=3 SV=1
MNKRMVIRRRSEKNYSSSLPISYHILTGQIKYNTIRAMKKSSVYKDLTLLGSFIKQYPGKPSREILETFPNKYPENKFLVEFSQIGEFTSICPVTGQPDFADIIIKYIPAEKLIEAKSLKIYLMAYRKEEDFGEFIANRIMEDIWYVCKPLWIEVTASFKPRGGIGWKTVTSKGKETIMP

SEQ ID NO: 44412 - protein, 186 aa, unidentified
  source 1..186: note = Unknown
  REGION 1..186: note = tr|A0A1V5MDC9|A0A1V5MDC9_9BACT NADPH-dependent 7-cyano-7-deazaguanine reductase OS=bacterium ADurb.Bin425; OX = 1866929 GN=queF PE=3 SV=1
MAKKANSKKVQATVAASAQPAHDPEVHEAKEKNNKEKNGHKQKKQFKELGKETAAVKQNYDNPDPEILEVFDNPFNDKKANRNNVCGTIHIEAPEFTTVCPITGQPDFANIVIDYCPDKLCVESKSLKLYLGAFRQLPEFHEACVNRIANDLIDKLKPLSLTVEGRFTPRGGIPFWPKAFYEKSRK

SEQ ID NO: 44413 - protein, 118 aa, unidentified
  source 1..118: note = Unknown
  REGION 1..118: note = tr|A0A1V5LXM4|A0A1V5LXM4_9BACT NADPH-dependent 7-cyano-7-deazaguanine reductase OS=bacterium ADurb.Bin429; OX = 1866930 GN=queF PE=3 SV=1
MPTAPSKALETFPNPNPDRDFTIQITCPEFTCLCPKTGQPDFATITITYVPDELCLELKSLKLYFWSFRDEGAFHEAVTNQILDELAAACRPRRMTVVGDFYVRGGLHTVVTAEYVKT

SEQ ID NO: 44414 - protein, 136 aa, unidentified
  source 1..136: note = Unknown
  REGION 1..136: note = tr|A0A1V5LKW3|A0A1V5LKW3_9BACT NADPH-dependent 7-cyano-7-deazaguanine reductase OS=bacterium ADurb.Bin431; OX = 1866931 GN=queF PE=3 SV=1
MDELKRGQREILEAKLEVFENRYPGRDYVITISDPEFSCLCPRTGYPDFATVEIRYVPDQYCLELKALKLYINKFRDRGIFHEEAVNEILEALVEVCRPRWMAVHGDFNPRGNIHTRVDAEYKAPGFDKKRLASGY

SEQ ID NO: 44415 - protein, 126 aa, unidentified
  source 1..126: note = Unknown
  REGION 1..126: note = tr|A0A2H6EGB8|A0A2H6EGB8_9BACT NADPH-dependent 7-cyano-7-deazaguanine reductase OS=bacterium BMS3Abin03; OX = 2005711 GN=queF PE=3 SV=1
MEDKIKLLETFENQYPDRDYSIIHEAPEFTSLCPKTGQPDFATIVVEYVPDKLCIELKSLKLYLNTYRNDGIFYESVTNKILDDLVTVCKPRYMIVTAEFNVRGGISSIIETEYKNPEFFGSENFN

SEQ ID NO: 44416 - protein, 124 aa, unidentified
  source 1..124: note = Unknown
  REGION 1..124: note = tr|A0A2H6EMX7|A0A2H6EMX7_9BACT NADPH-dependent 7-cyano-7-deazaguanine reductase OS=bacterium BMS3Abin04; OX = 2005712 GN=queF PE=3 SV=1
MEDKKKLLETFENQYPERDYLITHTAPEFTSLCPKTGQPDFATMILEYIPDKLCIELKSYKIYLNSYRNDGIFFESVTNTILDDLVAVCKPRFMRLTAEFNVRGGITSVIEAEYEAEDEFNNLN

SEQ ID NO: 44417 - protein, 126 aa, unidentified
  source 1..126: note = Unknown
  REGION 1..126: note = tr|A0A2H6F817|A0A2H6F817_9BACT NADPH-dependent 7-cyano-7-deazaguanine reductase OS=bacterium BMS3Abin06; OX = 2005714 GN=queF PE=3 SV=1
MQKKKYGEKAVSKAGLEKWPNPYPDRDYTIDISFPEFTCLCPRSGYPDFATIKINYIPGKYIVELKSLKLYLNKFRDRDISHESVTNQIFDDLKKLLKPGHLEVIGDFNPRGNVKTVIQVSTQRNR

SEQ ID NO: 44418 - protein, 126 aa, unidentified
  source 1..126: note = Unknown
  REGION 1..126: note = tr|A0A2H6FAS1|A0A2H6FAS1_9BACT NADPH-dependent 7-cyano-7-deazaguanine reductase OS=bacterium BMS3Abin07; OX = 2005715 GN=queF PE=3 SV=1
MPADKYGERAIKKSGLKLWANPHQDRDYQIDISFPEFTCLCPRSGYPDFATIKINYVPDKKIVELKSLKLFLNSFRDAYISHEDVTNVIFNELEKKLKPRYLEVTGDFNPRGNVKTVVRVSTESLK

SEQ ID NO: 44419 - protein, 141 aa, unidentified
  source 1..141: note = Unknown
  REGION 1..141: note = tr|A0A2H6FGH4|A0A2H6FGH4_9BACT NADPH-dependent 7-cyano-7-deazaguanine reductase OS=bacterium BMS3Abin08; OX = 2005716 GN=queF PE=3 SV=1
MRPGEKAIQEARLEVWDNPTPERDYEIDITFSEFTCLCPRSGYPDFAAIRIRYVPDEKIIELKSLKLYLNSFRDRHISHEEVTNRIYGDLMTLLGPRSIEVIGDFNPRGNVKTVIRVASDSGRPERFRGMTTKRHLQTDSE

SEQ ID NO: 44420 - protein, 122 aa, unidentified
  source 1..122: note = Unknown
  REGION 1..122: note = tr|A0A2H6FT84|A0A2H6FT84_9BACT NADPH-dependent 7-cyano-7-deazaguanine reductase OS=bacterium BMS3Abin10; OX = 2005718 GN=queF PE=3 SV=1
MKKTGYGQSEISKAKFEKWPNPSPDRDYTIDIEVPEFTCLCPRSGYPDFATIKISYVPDKYIVELKSLKLYINKFRDRSLSHESATNEIFDALKKLLKPRHLEVIGDFNPRGNVKTVVRVST

SEQ ID NO: 44421 - protein, 132 aa, unidentified
  source 1..132: note = Unknown
  REGION 1..132: note = tr|A0A2H6G2X2|A0A2H6G2X2_9BACT NADPH-dependent 7-cyano-7-deazaguanine reductase OS=bacterium BMS3Abin11; OX = 2005719 GN=queF PE=3 SV=1
MSTKPGKELDVFDNPNSDRDYTISIRMPEFTCLCPKTGQPDFATLYLDYIPDKFCVELKALKLYIWSYRDEGTFHEAVTNTILDDLVTAASPRYLRLCARFYVRGGIYTTVTAQYSKPDWQGTIPSDPQFSD

SEQ ID NO: 44422 - protein, 153 aa, unidentified
  source 1..153: note = Unknown
  REGION 1..153: note = tr|A0A2H6IXH9|A0A2H6IXH9_9BACT NADPH-dependent 7-cyano-7-deazaguanine reductase OS=bacterium BMS3Bbin10; OX = 2005733 GN=queF PE=3 SV=1
MTDQEEQLTQLGAEVPVPDSPEKAKLERVANPHSDTHYLARFTCPEFTSLCPVTGQPDFAHLVIDYVPGEWISESKSLKLYLASFRNHGAFHEDCTVAIGKRIVSDIEPLWLRIGGYWYPRGGMPIDVFWQTGVLPEGLWVPDQGVAAYRGRG

SEQ ID NO: 44423 - protein, 136 aa, unidentified
  source 1..136: note = Unknown
  REGION 1..136: note = tr|A0A2H6JE23|A0A2H6JE23_9BACT NADPH-dependent 7-cyano-7-deazaguanine reductase OS=bacterium BMS3Bbin12; OX = 2005735 GN=queF PE=3 SV=1
MPSRPSKDLETFDNPHPERDYFIHIRVPEFTCLCPKTGQPDFAVLYIDYVPDRRCIELKSLKLYVWSYRDEGAFHEAVTNRILDDLVAACAPRYLRLRAKFNVRGGIYTTVTVEHRRPGWKAPAPVPVPGGPTSCQ

SEQ ID NO: 44424 - protein, 116 aa, unidentified
  source 1..116: note = Unknown
  REGION 1..116: note = tr|A0A101VUW8|A0A101VUW8_9BACT NADPH-dependent 7-cyano-7-deazaguanine reductase OS=bacterium BRH_c32; OX = 1734400 GN=queF PE=3 SV=1
MKDKQKILEVFPNPQPDRDYTIIHTSPEFTSVCPKTGQPDFAIIDLEYIPDEVCVELKSYKFYLGSYRNDGIYFEAVTNNILNDLVAVLQPRYIKITANWNPRGGISSVVIVEHTK

SEQ ID NO: 44425 - protein, 124 aa, unidentified
  source 1..124: note = Unknown
  REGION 1..124: note = tr|A0A2M7YTJ4|A0A2M7YTJ4_9BACT NADPH-dependent 7-cyano-7-deazaguanine reductase OS=bacterium CG_4_9_14_3_um_filter_65_15 OX=1975567 GN=queF PE=3 SV=1
MASQPSKDFEVFDNPNPGRDYEIEFDCPEFTCLCPLTGQPDFAHFHITYIPGQKCVELKSLKLYLWSYRNEGAFHEKVTNQILDDLVAAVRPRLMDVRGEWFVRGGITTYVTASYQDENWAEKD

SEQ ID NO: 44426 - protein, 167 aa, unidentified
  source 1..167: note = Unknown
  REGION 1..167: note = tr|A0A3A9B6L0|A0A3A9B6L0_9BACT NADPH-dependent 7-cyano-7-deazaguanine reductase OS=bacterium D16-34; OX = 2320120 GN=queF PE=3 SV=1
MSENGCSVREDEGLTLLGNQHVAYAFDYDPTLLETFENKHQDNDYFVKFNCPEFTSLCPITGQPDFATIYISYVPDVRMVESKSLKLYLFSFRNHGDFHEDCVNVIMKDLIDLMDPKYIEVWGKFLPRGGISIDPYCNYGRAGTRWEEVAWQRLSQHDLHPEMVDNR

SEQ ID NO: 44427 - protein, 164 aa, unidentified
  source 1..164: note = Unknown
  REGION 1..164: note = tr|A0A3A8WBL2|A0A3A8WBL2_9BACT NADPH-dependent 7-cyano-7-deazaguanine reductase OS=bacterium D16-59; OX = 2320098 GN=queF PE=3 SV=1
MENQRGQEQSITLLGSQNTRYPDNYAPEVLETFINKHPDNDYFVKFNCPEFTSLCPITGQPDFANIVISYVPQEKMVESKSLKLYLFSFRNHGDFHEDCVNIIMKDLIHLMEPKYIEVWGKFTPRGGISIDPYCNYGKPGTPWEDVAKTRLFQHDMYPERVDNR

SEQ ID NO: 44428 - protein, 157 aa, unidentified
  source 1..157: note = Unknown
  REGION 1..157: note = tr|A0A3A9AZH3|A0A3A9AZH3_9BACT NADPH-dependent 7-cyano-7-deazaguanine reductase OS=bacterium D16-63; OX = 2320119 GN=queF PE=3 SV=1
MTDALKQLGSATAYPTDYDPAVLEAFQNKHPGRDYFVKFNCPEFTSLCPITGQPDFATLYISYVPDQRMVESKSLKLYLFSFRNHGAFHEDCVNVIMDDLIALMEPRYIEVWGKFLPRGGLSIDPYCNYGKPGTRWEAVAADRLANHDLHPETVNNR

SEQ ID NO: 44429 - protein, 124 aa, unidentified
  source 1..124: note = Unknown
  REGION 1..124: note = tr|A0A2G6G493|A0A2G6G493_9BACT NADPH-dependent 7-cyano-7-deazaguanine reductase OS=bacterium DOLZORAL124_64_63 OX=2044883 GN=queF PE=3 SV=1
MATQPSKELDVFDNPNPERDYEIEFDCPEFTCLCPLTGQPDFAHFRISYVPNEKCVELKSLKLYLWSYRNEGAFHEKVTNKILDDLVDAVQPRMMEVKGEWFVRGGITTWVTASHVDENWGSPA

SEQ ID NO: 44430 - protein, 137 aa, unidentified
  source 1..137: note = Unknown
  REGION 1..137: note = tr|A0A202DLF8|A0A202DLF8_9BACT NADPH-dependent 7-cyano-7-deazaguanine reductase OS=bacterium E08(2017); OX = 1932693 GN=queF PE=3 SV=1
MPTKKTKYDGITLLKQNDTNFPNSPSKAKLESFKNSHPKRPYTIEFDCPEFTCICPITGQPDFGHITLEYIPDKLCVESKSLKLYLHSYRNHGAFHEEVINKILDDVVKAINPREAIVTGEFNPRGGIAINVQAVYP

SEQ ID NO: 44431 - protein, 129 aa, Escarpia laminata
  REGION 1..129: note = tr|A0A497TXH1|A0A497TXH1_9BACT NADPH-dependent 7-cyano-7-deazaguanine reductase OS=bacterium endosymbiont of Escarpia laminata OX=1221601 GN=queF PE=3 SV=1
MPSQPSKELETFDNPRPERDYTIRISIPEFTCLCPKTGQPDFAEMTLEYVPDKQCVELKALKMYIWSFREEGAFHEAITNEILSDLVAATQPRYMRLTAEFNVRGGIYTTVVADHKADDWTAPDPVTLP

SEQ ID NO: 44432 - protein, 131 aa, unidentified
  source 1..131: note = Bathymodiolus sp.
  REGION 1..131: note = tr|A0A483AIB9|A0A483AIB9_9BACT NADPH-dependent 7-cyano-7-deazaguanine reductase OS=bacterium endosymbiont of Bathymodiolus sp. 5 South OX=1181670 GN=queF PE=3 SV=1
MSSQASKTLEVFDNPNRARDYVIQIELPEFTCLCPKTGQPDFATLHLEYIADRDCVELKSLKMYIWSFRDEGAFHEAVTNQILEDLVAATNPRFMRLKAIFNVRGGVYTTVIAEHQQSEWQPKPSVDLKHI

SEQ ID NO: 44433 - protein, 157 aa, unidentified
  source 1..157: note = Unknown
  REGION 1..157: note = tr|A0A132HTH2|A0A132HTH2_9BACT NADPH-dependent 7-cyano-7-deazaguanine reductase OS=bacterium F083; OX = 1768114 GN=queF PE=3 SV=1
MRTLSELEDLRSLGNGHTDYLTDYAPSVLETFENQHVDHDYLVTLNCPEFTTLCPKTGQPDFARIVINYIPDRMMVESKSLKLYLFSFRNHGDFHEDCVNIILNDLVQLMQPRYIEVVGLFTPRGGISIQPFANYADAQHQTLRQHRIEAQMDRSAQ

SEQ ID NO: 44434 - protein, 140 aa, unidentified
  source 1..140: note = Unknown
  REGION 1..140: note = tr|A0A202DIF4|A0A202DIF4_9BACT NADPH-dependent 7-cyano-7-deazaguanine reductase OS=bacterium F11; OX = 1932698 GN=queF PE=3 SV=1
MKTKLGYSSRHAKAGINAKMPRIECFDNQYSNDYQISISIPEYTSICPKTQLPDFGTLIITYCPDKKIMELKSLKMYVLKYRSLGIFYENAVNKILNDVVTACLPRWAIVRGEFSSRGGIKSSVEVNYNGLLGKRIKNRR

SEQ ID NO: 44435 - protein, 143 aa, unidentified
  source 1..143: note = Unknown
  REGION 1..143: note = tr|A0A2H5VKT7|A0A2H5VKT7_9BACT NADPH-dependent 7-cyano-7-deazaguanine reductase OS=bacterium HR08; OX = 2035403 GN=queF PE=3 SV=1
MSEYTEEHARAGLEAELPKIECWPNQFKGYEITIVIPEYTSVCPRTGLPDFGTITIRYEPDQWCVELKSLKYYILGYRQLGIFYENAVNRILRDFVAACRPVWAEVTGEFNIRGGMRSIVQARYRARAESSVEGERATSEPRP

SEQ ID NO: 44436 - protein, 135 aa, unidentified
  source 1..135: note = Unknown
  REGION 1..135: note = tr|A0A2H5VQB0|A0A2H5VQB0_9BACT NADPH-dependent 7-cyano-7-deazaguanine reductase OS=bacterium HR09; OX = 2035404 GN=queF PE=3 SV=1
MVQAEGKTFPFVGEEAIRPDFLETFAYEYPQREAEITIETDEWNCVCPFSGLPDFGTLVIRYVPDRLCLELKSLKYYLTSFRQVGIYQEHAANRLLEDLVRAVQPKRMEVTLDYRLRGGIHTVVTVRYPDAGGKA

SEQ ID NO: 44437 - protein, 135 aa, unidentified
  source 1..135: note = Unknown
  REGION 1..135: note = tr|A0A2H5VW30|A0A2H5VW30_9BACT NADPH-dependent 7-cyano-7-deazaguanine reductase OS=bacterium HR10; OX = 2035405 GN=queF PE=3 SV=1
MGEYTEEHARAGLEVELPKIECWPNQFKGYEITIVIPEYTSVCPRTGLPDFGTITIRYEPDEWCVELKSLKYYILGYRQLGIFYENAVNRILRDFVAACRPVWAEVTGEFNVRGGMRSIVCARYRARTERSASGS

SEQ ID NO: 44438 - protein, 125 aa, unidentified
  source 1..125: note = Unknown
  REGION 1..125: note = tr|A0A2H5WJB1|A0A2H5WJB1_9BACT NADPH-dependent 7-cyano-7-deazaguanine reductase OS=bacterium HR13; OX = 2035408 GN=queF PE=3 SV=1
MEKKYGELAIESAKLEPWENPSPERDYMIEITFPEFSCLCPRSGYPDYATIKIRYIPDKYIVELRSLKLWLNKFRNRYISHEQATNEIYTALYETLRPRFLEVIGDFNPRGNVHTVIKVRSDGNY

SEQ ID NO: 44439 - protein, 136 aa, unidentified
  source 1..136: note = Unknown
  REGION 1..136: note = tr|A0A2H5WK36|A0A2H5WK36_9BACT NADPH-dependent 7-cyano-7-deazaguanine reductase OS=bacterium HR14; OX = 2035409 GN=queF PE=3 SV=1
MPENYWLPRSGPMPRPRSIAEAVEVLKHEAFPAPGVSKVRFHAREFTAICPRSGQPDFGEVIIEYIPNRLCLESKALKFYLWAYRDEGAYAESLAARIADDIVAAIQPRYVRVVVRQYPRGGIEIEAEAERSTENS

SEQ ID NO: 44440 - protein, 141 aa, unidentified
  source 1..141: note = Unknown
  REGION 1..141: note = tr|A0A2H5WW17|A0A2H5WW17_9BACT NADPH-dependent 7-cyano-7-deazaguanine reductase OS=bacterium HR15; OX = 2035410 GN=queF PE=3 SV=1
MSVLQEDFWLPRSGPMPRPKSVAEAVEVLRREAFPSPGVSQVRFHAREFTSICPRSGQPDFGEVIIEYAPNKLCLESKSLKFYLWAFREEAGYAEGLAARIADDLYEVLQPRWVRVVVRQYPRGGIEIEAEALRPSQSETL

SEQ ID NO: 44441 - protein, 118 aa, unidentified
  source 1..118: note = Unknown
  REGION 1..118: note = tr|A0A2H5X2R9|A0A2H5X2R9_9BACT NADPH-dependent 7-cyano-7-deazaguanine reductase OS=bacterium HR16; OX = 2035411 GN=queF PE=3 SV=1
MDRNILEVFDNPYPDRDYLVKHVCPEFTSVCPKTGNPDFGTITIEYVPDKKCVELKSLKYYFFAYRNQGIFYEAVVNKILDDLVAVCRPRRMTVTGEFNVRGGIYSVVTASYVAGGEK

SEQ ID NO: 44442 - protein, 168 aa, unidentified
  source 1..168: note = Unknown
  REGION 1..168: note = tr|A0A2H5XGK3|A0A2H5XGK3_9BACT NADPH-dependent 7-cyano-7-deazaguanine reductase OS=bacterium HR18; OX = 2035413 GN=queF PE=3 SV=1
MTEPERQAWAEKLAALREEALLHTEQALAYMARYGIRPEGHIQPFLPPAARQQHIDRLPYEHAVRQVVVYETEPGEFSAVCPFSGLPDYGVLRIEYVPGSWILELKSLKYYLISWRHIGVTQEDVTAMVYQDVMRHLEDPEYLKVTTVYNVRGGIRTTCTIDSREQRR

SEQ ID NO: 44443 - protein, 118 aa, unidentified
  source 1..118: note = Unknown
  REGION 1..118: note = tr|A0A2H5XW34|A0A2H5XW34_9BACT NADPH-dependent 7-cyano-7-deazaguanine reductase OS=bacterium HR20; OX = 2035415 GN=queF PE=3 SV=1
MSTPPIETFPNPAPNRRYVITHVNPEFTSVCPKTGLPDFGTVTIRYIPRERCIELKSLKYYYLSYRNEGIFYEAVTNKILDDLVAACDPEEMTVTTEWRTRGGIHSIIEASYHRSQQQ

SEQ ID NO: 44444 - protein, 122 aa, unidentified
  source 1..122: note = Unknown
  REGION 1..122: note = tr|A0A2H5Y1G9|A0A2H5Y1G9_9BACT NADPH-dependent 7-cyano-7-deazaguanine reductase OS=bacterium HR21; OX = 2035416 GN=queF PE=3 SV=1
MAVQLETFPNPKPGRRYLITHINPEFTSVCPRTGLPDFGTVTIRYVPDKLCLELKSLKYYFLQYRNMGIFYEDVTNRILDDLVAACDPLEMEVITEWNTRGGMRSVIHARYERPPASAEPHE

SEQ ID NO: 44445 - protein, 144 aa, unidentified
  source 1..144: note = Unknown
  REGION 1..144: note = tr|A0A2H5YAK3|A0A2H5YAK3_9BACT NADPH-dependent 7-cyano-7-deazaguanine reductase OS=bacterium HR23; OX = 2035418 GN=queF PE=3 SV=1
MARIPDLQERYERLDRKLAVKGEEAIDTSCLLAFDYEYPHQPAEVVIETDEFTAVCPWTGLPDYGRLTITYVPREKCVELKSLKYYLLSFRDVGIVQEHAANRILQDLVALCRPRWIKVCLDYKVRGGIHTTVTVEYREPEAER

SEQ ID NO: 44446 - protein, 127 aa, unidentified
  source 1..127: note = Unknown
  REGION 1..127: note = tr|A0A2H5Z064|A0A2H5Z064_9BACT NADPH-dependent 7-cyano-7-deazaguanine reductase OS=bacterium HR27; OX = 2035422 GN=queF PE=3 SV=1
MPTQPSKELERIPNPKPERDYEIEITTNEFTCVCPRTGQPDFATITIRYVPDQWIVELKSLKLYLWSFRNEGHYHEEVTNTILDDLVRTLQPRRMTVIADFNIRGGLHTVVTARYERTTEEIRAAAD

SEQ ID NO: 44447 - protein, 127 aa, unidentified
  source 1..127: note = Unknown
  REGION 1..127: note = tr|A0A2H5Z2E0|A0A2H5Z2E0_9BACT NADPH-dependent 7-cyano-7-deazaguanine reductase OS=bacterium HR28; OX = 2035423 GN=queF PE=3 SV=1
MPTQPSKELERIPNPKPERDYEIEITTNEFTCVCPRTGQPDFATITIRYVPDQWIVELKSLKLYLWSFRNEGHYHEEVTNTILDDLVRTLQPRRMTVIADFNIRGGLHTVVTARYERSAGELQAAAD

SEQ ID NO: 44448 - protein, 125 aa, unidentified
  source 1..125: note = Unknown
  REGION 1..125: note = tr|A0A2H5ZAK6|A0A2H5ZAK6_9BACT NADPH-dependent 7-cyano-7-deazaguanine reductase OS=bacterium HR29; OX = 2035424 GN=queF PE=3 SV=1
MGENTFRTDGTIDFFENRHPERDYVIEFTAPEFTSVCPMTGLPDFGTLTIRYVPDRRCIELRSFKYYLHTYRNRGIFYEDVVNQVLDDIVAAVQPRSCTVIGDFNTRGGISARVTATYTRSEGAK

SEQ ID NO: 44449 - protein, 112 aa, unidentified
  source 1..112: note = Unknown
  REGION 1..112: note = tr|A0A2H6A461|A0A2H6A461_9BACT NADPH-dependent 7-cyano-7-deazaguanine reductase OS=bacterium HR33; OX = 2035428 GN=queF PE=3 SV=1
MLKAEAFPAPEVTEVTLHATEFTSICPRTGQPDFGSVVIRYRPRRRCLESKALKYYLWSFRNEGAFCESLAARIADDIVFAVNPEWVRVEVHQNIRGGIAIVAAAERGKPQR

SEQ ID NO: 44450 - protein, 155 aa, unidentified
  source 1..155: note = Unknown
  REGION 1..155: note = tr|A0A2H6AHX1|A0A2H6AHX1_9BACT NADPH-dependent 7-cyano-7-deazaguanine reductase OS=bacterium HR36; OX = 2035431 GN=queF PE=3 SV=1
MSASPAAKSSSDLQPSAAQLETFPNAYPGRDYIVEIECPEFTSVCPRTGQPDFGTITFRYIPDKLCVELKSLKLYLQRYRNVGIFYETLVNRLLDDFVAACKPRHCEVIAEFNPRGGMTTTVSAVYVASTEEEDEQETCPECEERPSRRRRVRKR

SEQ ID NO: 44451 - protein, 117 aa, unidentified
  source 1..117: note = Unknown
  REGION 1..117: note = tr|A0A2H6AK79|A0A2H6AK79_9BACT NADPH-dependent 7-cyano-7-deazaguanine reductase OS=bacterium HR37; OX = 2035432 GN=queF PE=3 SV=1
MAKLETFKNRYQGREYEIEITCPEFTCLCPITGQPDFAVIRIKYVPDELCIELKSLKLYIFSYRNVGEFHEHVTNKILDDIVEACKPIRAEVIGDFNVRGGIKTVVKATYSRDKDSK

SEQ ID NO: 44452 - protein, 154 aa, unidentified
  source 1..154: note = Unknown
  REGION 1..154: note = tr|A0A2H6AYK8|A0A2H6AYK8_9BACT NADPH-dependent 7-cyano-7-deazaguanine reductase OS=bacterium HR40; OX = 2035435 GN=queF PE=3 SV=1
MAGEAYGGLTQLGRPTVLPASPGEAVLETVPNPHPGTLYLVRFTCPEFTCLCPITGQPDFAHFVIDYVPRERIVESKSLKLYLASFRNHGSFHEACTVGIGKRLVEVLAPLWLRIGGYWYPRGGIPIDVFWQTGEPPPGLWLPDQGVPPYRGRG

SEQ ID NO: 44453 - protein, 157 aa, unidentified
  source 1..157: note = Unknown
  REGION 1..157: note = tr|A0A3L8A4G7|A0A3L8A4G7_9BACT NADPH-dependent 7-cyano-7-deazaguanine reductase OS=bacterium J10(2018); OX = 2320122 GN=queF PE=3 SV=1
MSRSDDEMPGVTLLGNQGVQYPDRYAPEVLETFVNKHPDNEYLVTFTCPEFTSLCPKTGQPDFARIIISYIPREKMVESKSLKLYLFSFRNHGDFHEDCVNIIMKDLVKLMDPKYIEVTGLFTPRGGIAIYPFANYGDAEHQNMVKARMLASFRNDF

SEQ ID NO: 44454 - protein, 120 aa, unidentified
  source 1..120: note = Unknown
  REGION 1..120: note = tr|A0A202DUL3|A0A202DUL3_9BACT NADPH-dependent 7-cyano-7-deazaguanine reductase OS=bacterium J17; OX = 1932695 GN=queF PE=3 SV=1
MSTKPSKELDSFPNPRPGRIYDIDFSCPEFTCVCPATGQPDFATINISYVPDQLCVELKSLKLYLWSYRDEGAFHEAVTNQILDDLVAAISPLKAEVEGDFYVRGGIHTVVTARYDKSQD

SEQ ID NO: 44455 - protein, 272 aa, unidentified
  source 1..272: note = Unknown
  REGION 1..272: note = tr|A0A4S1HX50|A0A4S1HX50_9BACT NADPH-dependent 7-cyano-7-deazaguanine reductase QueF OS=bacterium M00.F.Ca.ET.141.01.1.1 OX=2563898 GN=queF PE=3 SV=1
MNTPQDSSLGREVSYPSQYDPGLLFPIPRSGARAEIGLDDAALPFVGHDRWHAFELSWLDPRGKPQVAVATVQVPCTSPRLIESKSFKLYLNSLNSTRIDSAEALRSRIVADLSACAGAPVQVEFGLPGLRETPLGESIDGLDVEIDCYGPPQADFLAADAGEVVEETLVSALLKSNCPVTGQPDWATVSLRYRGPKIDRAGLLRYLVSYREHAEFHEQCVERIFSEVSARCQPHWLEVEARYTRRGGLDINPWRASPGITAPAATYRELRQ

SEQ ID NO: 44456 - protein, 153 aa, unidentified
  source 1..153: note = Unknown
  REGION 1..153: note = tr|A0A4S1HRS9|A0A4S1HRS9_9BACT NADPH-dependent 7-cyano-7-deazaguanine reductase OS=bacterium M00.F.Ca.ET.141.01.1.1 OX=2563898 GN=queF PE=3 SV=1
MIDTKNLTQLGTHVETPQSPEAAVLETVPFQRGDGPPAIVRFTVPEFTSLCPVTGQPDFAHIVIDYAPDAALVESKSLKLFMTSFRNHGAFHEDCTVMIGRRIVAATKPLWLRIGGYWYPRGGIPIDVFWQTGTPPEGAWLPDTGVAPYRGRG

SEQ ID NO: 44457 - protein, 153 aa, unidentified
  source 1..153: note = Unknown
  REGION 1..153: note = tr|A0A4S1AXI5|A0A4S1AXI5_9BACT NADPH-dependent 7-cyano-7-deazaguanine reductase OS=bacterium M00.F.Ca.ET.146.01.1.1 OX=2563899 GN=queF PE=3 SV=1
MTDAKNLTQLGKHVETPQSPEQAVLEAVPFQRGDGPPAIVRFTCPEFTSLCPVTGQPDFAHIVIDYAPDQTLVESKSLKLFMTSFRNHGAFHEECTVMIGRRIVEVTKPLWLRVGGYWFPRGGIPIDVFWQTGAPPKDVWLPDTGVAPYRGRG

SEQ ID NO: 44458 - protein, 153 aa, unidentified
  source 1..153: note = Unknown
  REGION 1..153: note = tr|A0A4S1BKG6|A0A4S1BKG6_9BACT NADPH-dependent 7-cyano-7-deazaguanine reductase OS=bacterium M00.F.Ca.ET.152.01.1.1 OX=2563900 GN=queF PE=3 SV=1
MTDAKNLTQLGKYVETPQSPEQAVLETVPFQRGDGPPAIVRFACPEFTSLCPVTGQPDFAHIVIDYAPDAALVESKSLKLFMTSFRNHGAFHEDCTVMIGRRIVAATTPLWLRIGGYWYPRGGIPIDVFWQTGAPPEGAWLPDTGVAPYRGRG

SEQ ID NO: 44459 - protein, 274 aa, unidentified
  source 1..274: note = Unknown
  REGION 1..274: note = tr|A0A4V3NKW2|A0A4V3NKW2_9BACT NADPH-dependent 7-cyano-7-deazaguanine reductase QueF OS=bacterium M00.F.Ca.ET.155.01.1.1 OX=2563901 GN=queF PE=3 SV=1
MTPEQSPLGKASTYTEQYDASLLFPIARSHAREAIGISAQLPFFGTDIWNAYELSWLNARGKPQIAVATFFVPADSPNIVESKSFKLYLGSFAQTAFESIEAVRDTIRRDVSASCGSTVSVYLTAPQDFGKLQMEEFEGTPLDRLDLDADVYTPDASLLKAALDEAPVEETVFSNLLKSNCPVTGQPDWGSVQIHYVGPQIDHAGLLRYIISYRNHTGFHEQCVEKIFIDVLKACRPVKLAVYARYTRRGGLDINPFRTNYNLPMPDNMRLARQ

SEQ ID NO: 44460 - protein, 153 aa, unidentified; identical to SEQ ID NO: 44457
  source 1..153: note = Unknown
  REGION 1..153: note = tr|A0A4S0ZNM8|A0A4S0ZNM8_9BACT NADPH-dependent 7-cyano-7-deazaguanine reductase OS=bacterium M00.F.Ca.ET.156.01.1.1 OX=2563902 GN=queF PE=3 SV=1

SEQ ID NO: 44461 - protein, 153 aa, unidentified; identical to SEQ ID NO: 44456
  source 1..153: note = Unknown
  REGION 1..153: note = tr|A0A4S1AKY1|A0A4S1AKY1_9BACT NADPH-dependent 7-cyano-7-deazaguanine reductase OS=bacterium M00.F.Ca.ET.156.01.1.1 OX=2563902 GN=queF PE=3 SV=1

SEQ ID NO: 44462 - protein, 153 aa, unidentified; identical to SEQ ID NO: 44457
  source 1..153: note = Unknown
  REGION 1..153: note = tr|A0A4S0WWB4|A0A4S0WWB4_9BACT NADPH-dependent 7-cyano-7-deazaguanine reductase OS=bacterium M00.F.Ca.ET.157.01.1.1 OX=2563903 GN=queF PE=3 SV=1

SEQ ID NO: 44463 - protein, 153 aa, unidentified; identical to SEQ ID NO: 44457
  source 1..153: note = Unknown
  REGION 1..153: note = tr|A0A4S0VZF7|A0A4S0VZF7_9BACT NADPH-dependent 7-cyano-7-deazaguanine reductase OS=bacterium M00.F.Ca.ET.159.01.1.1 OX=2563904 GN=queF PE=3 SV=1

SEQ ID NO: 44464 - protein, 153 aa, unidentified; identical to SEQ ID NO: 44458
  source 1..153: note = Unknown
  REGION 1..153: note = tr|A0A4V3S8J4|A0A4V3S8J4_9BACT NADPH-dependent 7-cyano-7-deazaguanine reductase OS=bacterium M00.F.Ca.ET.162.01.1.1 OX=2563905 GN=queF PE=3 SV=1

SEQ ID NO: 44465 - protein, 153 aa, unidentified; identical to SEQ ID NO: 44457
  source 1..153: note = Unknown
  REGION 1..153: note = tr|A0A4S0YAG7|A0A4S0YAG7_9BACT NADPH-dependent 7-cyano-7-deazaguanine reductase OS=bacterium M00.F.Ca.ET.163.01.1.1 OX=2563906 GN=queF PE=3 SV=1

SEQ ID NO: 44466 - protein, 272 aa, unidentified; identical to SEQ ID NO: 44455
  source 1..272: note = Unknown
  REGION 1..272: note = tr|A0A4S0YWS8|A0A4S0YWS8_9BACT NADPH-dependent 7-cyano-7-deazaguanine reductase QueF OS=bacterium M00.F.Ca.ET.163.01.1.1 OX=2563906 GN=queF PE=3 SV=1

SEQ ID NO: 44467 - protein, 154 aa, unidentified; identical to SEQ ID NO: 43810
  source 1..154: note = Unknown
  REGION 1..154: note = tr|A0A4S1H975|A0A4S1H975_9BACT NADPH-dependent 7-cyano-7-deazaguanine reductase OS=bacterium M00.F.Ca.ET.168.01.1.1 OX=2563907 GN=queF PE=3 SV=1

SEQ ID NO: 44468 - protein, 272 aa, unidentified; identical to SEQ ID NO: 44455
  source 1..272: note = Unknown
  REGION 1..272: note = tr|A0A4S0QIP3|A0A4S0QIP3_9BACT NADPH-dependent 7-cyano-7-deazaguanine reductase QueF OS=bacterium M00.F.Ca.ET.177.01.1.1 OX=2563908 GN=queF PE=3 SV=1

SEQ ID NO: 44469 - protein, 153 aa, unidentified
  source 1..153: note = Unknown
  REGION 1..153: note = tr|A0A4S0QP07|A0A4S0QP07_9BACT NADPH-dependent 7-cyano-7-deazaguanine reductase OS=bacterium M00.F.Ca.ET.177.01.1.1 OX=2563908 GN=queF PE=3 SV=1
MTDAKNLTQLGKHVETPQSPEQAVLETVPFQRGDGPPAIVRFTCPEFTSLCPVTGQPDFAHIVIDYAPDKTLVESKSLKLFMTSFRNHGAFHEECTVMIGRRIVEATKPLWLRVGGYWFPRGGIPIDVFWQTGAPPEGAWLPDTGVAPYRGRG

SEQ ID NO: 44470 - protein, 154 aa, unidentified; identical to SEQ ID NO: 43810
  source 1..154: note = Unknown
  REGION 1..154: note = tr|A0A4S0MXZ3|A0A4S0MXZ3_9BACT NADPH-dependent 7-cyano-7-deazaguanine reductase OS=bacterium M00.F.Ca.ET.179.01.1.1 OX=2563909 GN=queF PE=3 SV=1

SEQ ID NO: 44471 - protein, 166 aa, unidentified
  source 1..166: note = Unknown
  REGION 1..166: note = tr|A0A4S0LPU3|A0A4S0LPU3_9BACT NADPH-dependent 7-cyano-7-deazaguanine reductase OS=bacterium M00.F.Ca.ET.180.01.1.1 OX=2563910 GN=queF PE=3 SV=1
MSEGRKQEDLNDITLLGNQNNKYDFDYRPDVLESFDNKHPGRDYFVKFNCPEFTSLCPITGQPDFATIYISYIPNIKMVESKSLKLYLFSFRNHGDFHEDCMNIIMNDLIDLMDPHYIEVWGKFTPRGGISIDPYTNYGRPDSKYEKMAEHRLMNHDLYPEKIDNR

SEQ ID NO: 44472 - protein, 274 aa, unidentified; identical to SEQ ID NO: 44459
  source 1..274: note = Unknown
  REGION 1..274: note = tr|A0A4S0J196|A0A4S0J196_9BACT NADPH-dependent 7-cyano-7-deazaguanine reductase QueF OS=bacterium M00.F.Ca.ET.191.01.1.1 OX=2563911 GN=queF PE=3 SV=1

SEQ ID NO: 44473 - protein, 154 aa, unidentified; identical to SEQ ID NO: 43810
  source 1..154: note = Unknown
  REGION 1..154: note = tr|A0A4S0GST0|A0A4S0GST0_9BACT NADPH-dependent 7-cyano-7-deazaguanine reductase OS=bacterium M00.F.Ca.ET.194.01.1.1 OX=2563912 GN=queF PE=3 SV=1

SEQ ID NO: 44474 - protein, 272 aa, unidentified; identical to SEQ ID NO: 44455
  source 1..272: note = Unknown
  REGION 1..272: note = tr|A0A4S0EXC5|A0A4S0EXC5_9BACT NADPH-dependent 7-cyano-7-deazaguanine reductase QueF OS=bacterium M00.F.Ca.ET.199.01.1.1 OX=2563913 GN=queF PE=3 SV=1

SEQ ID NO: 44475 - protein, 153 aa, unidentified; identical to SEQ ID NO: 44456
  source 1..153: note = Unknown
  REGION 1..153: note = tr|A0A4S0FU24|A0A4S0FU24_9BACT NADPH-dependent 7-cyano-7-deazaguanine reductase OS=bacterium M00.F.Ca.ET.199.01.1.1 OX=2563913 GN=queF PE=3 SV=1

SEQ ID NO: 44476 - protein, 153 aa, unidentified; identical to SEQ ID NO: 44458
  source 1..153: note = Unknown
  REGION 1..153: note = tr|A0A4R9ZL98|A0A4R9ZL98_9BACT NADPH-dependent 7-cyano-7-deazaguanine reductase OS=bacterium M00.F.Ca.ET.205.01.1.1 OX=2563914 GN=queF PE=3 SV=1

SEQ ID NO: 44477 - protein, 153 aa, unidentified; identical to SEQ ID NO: 44457
  source 1..153: note = Unknown
  REGION 1..153: note = tr|A0A4R9UD62|A0A4R9UD62_9BACT NADPH-dependent 7-cyano-7-deazaguanine reductase OS=bacterium M00.F.Ca.ET.221.01.1.1 OX=2563915 GN=queF PE=3 SV=1

SEQ ID NO: 44478 - protein, 153 aa, unidentified; identical to SEQ ID NO: 44457
  source 1..153: note = Unknown
  REGION 1..153: note = tr|A0A4R9UQB7|A0A4R9UQB7_9BACT NADPH-dependent 7-cyano-7-deazaguanine reductase OS=bacterium M00.F.Ca.ET.222.01.1.1 OX=2563916 GN=queF PE=3 SV=1

SEQ ID NO: 44479 - protein, 153 aa, unidentified; identical to SEQ ID NO: 44457
  source 1..153: note = Unknown
  REGION 1..153: note = tr|A0A4R9TQW0|A0A4R9TQW0_9BACT NADPH-dependent 7-cyano-7-deazaguanine reductase OS=bacterium M00.F.Ca.ET.227.01.1.1 OX=2563917 GN=queF PE=3 SV=1

SEQ ID NO: 44480 - protein, 274 aa, unidentified; identical to SEQ ID NO: 44459
  source 1..274: note = Unknown
  REGION 1..274: note = tr|A0A4R9RHA1|A0A4R9RHA1_9BACT NADPH-dependent 7-cyano-7-deazaguanine reductase QueF OS=bacterium M00.F.Ca.ET.228.01.1.1 OX=2563918 GN=queF PE=3 SV=1

SEQ ID NO: 44481 - protein, 98 aa, unidentified
  source 1..98: note = Unknown
  REGION 1..98: note = tr|A0A4R9RC98|A0A4R9RC98_9BACT NADPH-dependent 7-cyano-7-deazaguanine reductase (Fragment) OS=bacterium M00.F.Ca.ET.229.01.1.1 OX=2563919 GN=queF PE=3 SV=1
RGDGPPAIVRFTCPEFTSLCPVTGQPDFAHIVIDYAPDQTLVESKSLKLFMTSFRNHGAFHEDCSVYIAKRLVELLQPKWLRIGAYWYPRGGIPIDVF

SEQ ID NO: 44482 - protein, 166 aa, unidentified; identical to SEQ ID NO: 44471
  source 1..166: note = Unknown
  REGION 1..166: note = tr|A0A4R9SCV1|A0A4R9SCV1_9BACT NADPH-dependent 7-cyano-7-deazaguanine reductase OS=bacterium M00.F.Ca.ET.229.01.1.1 OX=2563919 GN=queF PE=3 SV=1

SEQ ID NO: 44483 - protein, 153 aa, unidentified; identical to SEQ ID NO: 44457
  source 1..153: note = Unknown
  REGION 1..153: note = tr|A0A4R9RXT5|A0A4R9RXT5_9BACT NADPH-dependent 7-cyano-7-deazaguanine reductase OS=bacterium M00.F.Ca.ET.230.01.1.1 OX=2563920 GN=queF PE=3 SV=1

SEQ ID NO: 44484 - protein, 283 aa, unidentified
  source 1..283: note = Unknown
  REGION 1..283: note = tr|A0A4R9RT84|A0A4R9RT84_9BACT NADPH-dependent 7-cyano-7-deazaguanine reductase QueF OS=bacterium M00.F.Ca.ET.230.01.1.1 OX=2563920 GN=queF PE=4 SV=1
MKPLETHGILGQSTHYPKTYAPDMLYPIPRALGRANLALPADALSIGMDWWQVFEMSWLNSHGISQVAMARLAIPATSDYIIESKSLKLYFNSLNFTEFDNQQAVKATVEKDLSACLKTDVTLEIFEVNIANSLPISAPQGDCIDNALDNSDKKIAIVSDVDPSSLTVAHHGASDSQLQILHSHLLRSNCPVTNQPDWGTLEIQIDSQPIDRAGLLEYILSFRQHNGFHEQCVEQIFSDLTQVFVPKTLMVRAWYTRRGGIDINPCRVSDISLLPPPSRLNRQ

SEQ ID NO: 44485 - protein, 153 aa, unidentified
  source 1..153: note = Unknown
  REGION 1..153: note = tr|A0A5J4E281|A0A5J4E281_9BACT NADPH-dependent 7-cyano-7-deazaguanine reductase OS=bacterium MnTg02; OX = 2080452 GN=queF PE=4 SV=1
MADEPGEPTQLGRETPLPASPSEARLERVANPHADTHYVARFTCPEFTALCPITGQPDFAHLIIDYAPADWLLESKSLKLFLASYRNHGAFHEDCTVAIGKRIADLLVPHWLRIGGYWYPRGGIPIDVFWQTGTLPEGVWLPDQDVPPYRGRG

SEQ ID NO: 44486 - protein, 130 aa, unidentified
  source 1..130: note = Unknown
  REGION 1..130: note = tr|A0A5J4E6G2|A0A5J4E6G2_9BACT NADPH-dependent 7-cyano-7-deazaguanine reductase OS=bacterium MnTg03; OX = 2080453 GN=queF PE=4 SV=1
MSSTPSTSLETFENPQMDRDYTIRIDTPEFTCLCPITGQPDFATIQLEYIADQRCLELKSLKLYFWSYRDQGAFHEAVTNQILSDLVAAISPRFMRVSAEFNVRGGIYTQVIAEHRAENWVAPEAVVLPR

SEQ ID NO: 44487 - protein, 137 aa, unidentified
  source 1..137: note = Unknown
  REGION 1..137: note = tr|A0A5J4EDB2|A0A5J4EDB2_9BACT NADPH-dependent 7-cyano-7-deazaguanine reductase OS=bacterium MnTg04; OX = 2080454 GN=queF PE=4 SV=1
MPVNPQKPKPARPVRGLETFANPNPARDYTIRIRVPEFSCLCPKTGQPDFATLHFEYIPENLCIELKSLKNYIWSYRNEGAFHETVTNQILDDCVAAIDPRYMCLTADFNVRGGIYTTVVAEHKKPGWQAPMRIATS

SEQ ID NO: 44488 - protein, 156 aa, unidentified
  source 1..156: note = Unknown
  REGION 1..156: note = tr|A0A132GV32|A0A132GV32_9BACT NADPH-dependent 7-cyano-7-deazaguanine reductase OS=bacterium P201; OX = 1768112 GN=queF PE=3 SV=1
MSRNEQELKGVTLLGNQNTQYNYDYTPEVLETFENKHPENEYLVTLDCPEFTSLCPKTGQPDFGHLIINYIPRTLMVESKSLKLYLFSFRNHGDFHEDCVNIIMKDLVKLMDPKYLEVIGLFNPRGGISIKPFANYGDAEHQGMVKQRLMSAFHNS

SEQ ID NO: 44489 - protein, 152 aa, unidentified
  source 1..152: note = Unknown
  REGION 1..152: note = tr|A0A4Q2REM0|A0A4Q2REM0_9BACT NADPH-dependent 7-cyano-7-deazaguanine reductase OS=bacterium RmlP001; OX = 2316527 GN=queF PE=3 SV=1
MSTFLPPTLLGQTVAQPQSPEEARLERVPNPHPGTLYLTRFTAPEFTSLCPVTGQPDFAHLVIDYVADGWLVESKALKLYLTSFRNHGAFHEDCTVRIGKDIVALLEPRWLRIGGYWYPRGGIPIDVFWQTGTPPEGLWLPDQGVPPYRGRG

SEQ ID NO: 44490 - protein, 152 aa, unidentified
  source 1..152: note = Unknown
  REGION 1..152: note = tr|A0A4Q2U5Q4|A0A4Q2U5Q4_9BACT NADPH-dependent 7-cyano-7-deazaguanine reductase OS=bacterium RmlP026; OX = 2316528 GN=queF PE=3 SV=1
MSDPLTPTLLGQTVAQPGSPEEARLDRVPNPHPGTLYLARFTAPEFTSLCPVTAQPDFAHIVIDYVPDGWLVESKSLKMYLTSFRNHGAFHEDCTVRIGKELQSLLLPRWLRIGGYWYPRGGIPIDVFWQTGAPPEGLWLPDQGVPPYRGRG

SEQ ID NO: 44491 - protein, 125 aa, unidentified
  source 1..125: note = Unknown
  REGION 1..125: note = tr|A0A177Q1Q6|A0A177Q1Q6_9BACT NADPH-dependent 7-cyano-7-deazaguanine reductase OS=bacterium SCGC AG-212-C10 OX=1799370 GN=queF PE=3 SV=1
MAENDYRIDGTLDTFENAFPARDYTIEFDAPEFTSVCPMTGLPDFGTIHIAYVPGERCVELRSFKYYLNAFRNRGIFYEAVVNTILDDFVAACAPRRITVTGDFKTRGGISARVTASHDSATSPR

SEQ ID NO: 44492 - protein, 129 aa, unidentified
  source 1..129: note = Unknown
  REGION 1..129: note = tr|A0A424SIP8|A0A424SIP8_9BACT NADPH-dependent 7-cyano-7-deazaguanine reductase OS=bacterium TMED144; OX = 1986778 GN=queF PE=3 SV=1
MPKPDGKYFIFDDEGSINANFLETFSFDSSDQYIKTETNEFSAVCPFSGLPDIANVKIEYYPEGGKCIELKSLKYYFVSFRNVGIYQEGVTKRIYDDLKHALKTSKLKVTTIYNTRGGFDTTCSEGELK

SEQ ID NO: 44493 - protein, 135 aa, unidentified
  source 1..135: note = Unknown
  REGION 1..135: note = tr|A0A1Z8LXM2|A0A1Z8LXM2_9BACT NADPH-dependent 7-cyano-7-deazaguanine reductase OS=bacterium TMED15; OX = 1986651 GN=queF PE=3 SV=1
MQTNSYSDLQDHIRQIEMPNIETWQNQYADKEYTIDITISEFTAICPKTGLPDFAEIQISYVPNERCVELKSLKEYMFAYREIGIFHEHVVNKIMEDFIRDCQPRKVNIVGDFNIRGGIKTVVRANYEQSTVESE

SEQ ID NO: 44494 - protein, 118 aa, unidentified
  source 1..118: note = Unknown
  REGION 1..118: note = tr|A0A1Z9M3B0|A0A1Z9M3B0_9BACT NADPH-dependent 7-cyano-7-deazaguanine reductase OS=bacterium TMED198; OX = 1986779 GN=queF PE=3 SV=1
MDKPLFSDLEIVDNQYGQRDYEVKINIPEFNCICPRTSLPDFATIKIKYIPNNWIVELKSLKLYIVKYRTIGIFHENVTNKILDDFVKAAQPKVIEVEGIFKARGGIDTTVLCRWPEK

SEQ ID NO: 44495 - protein, 129 aa, unidentified
  source 1..129: note = Unknown
  REGION 1..129: note = tr|A0A1Z9RWB5|A0A1Z9RWB5_9BACT NADPH-dependent 7-cyano-7-deazaguanine reductase OS=bacterium TMED250; OX = 1986657 GN=queF PE=3 SV=1
MAKAEGKYFQFTDEDQINTEFLETFSFESPRQYIMTETDEFSAVCPFSGLPDLAYVKIEYYPEGGKCIELKSLKYYFISFRNVGIYQEGATKRIYDDLKNILKTKKIKVTTIYNTRGGFDTTCVEGKIG

SEQ ID NO: 44496 - protein, 28 aa, unidentified
  source 1..28: note = Unknown
  REGION 1..28: note = tr|A0A3R7UYL4|A0A3R7UYL4_9BACT NADPH-dependent 7-cyano-7-deazaguanine reductase QueF (Fragment); OS = bacterium TMED46 OX=1986782 GN=CBC06_009005 PE=4 SV=1
MAKAEGKSFEFLDESHIDPSLLEVFDFD

SEQ ID NO: 44497 - protein, 118 aa, unidentified
  source 1..118: note = Unknown
  REGION 1..118: note = tr|A0A1Z8KV48|A0A1Z8KV48_9BACT NADPH-dependent 7-cyano-7-deazaguanine reductase OS=bacterium TMED6; OX = 1986783 GN=queF PE=3 SV=1
MDKTNEPHYKNLEIVPNHYEGRDYTIEVSIPEFNCVCPKTGLPDFGTIYINYIPNESIVELKSLKLYMVKFRNIGIFHEYVTNRILDDFKKACNPKKIEVIGDFNPRGGIKTVVKSQL

SEQ ID NO: 44498 - protein, 130 aa, unidentified
  source 1..130: note = Unknown
  REGION 1..130: note = tr|A0A1Z8Z010|A0A1Z8Z010_9BACT NADPH-dependent 7-cyano-7-deazaguanine reductase OS=bacterium TMED80; OX = 1986784 GN=queF PE=3 SV=1
MAKAEGKIFNYDDESKINADFLETFPFESLDQYIKTETNEFSAVCPFSGLPDLAKVRIEYFPAGGKCIELKSLKYYFTSFRSVGIYQEGATKRIYDDLSSILETKKIQITTIYNIRGGFKTTCIEGSINN

SEQ ID NO: 44499 - protein, 148 aa, unidentified
  source 1..148: note = Unknown
  REGION 1..148: note = tr|A0A0A1PBE1|A0A0A1PBE1_9BACT NADPH-dependent 7-cyano-7-deazaguanine reductase OS=bacterium YEK0313; OX = 1522316 GN=queF PE=3 SV=1
MADLMLGKPVAMPASPEEAVLDRVPNPHQDTDYVTRFTAPEFTSLCPVTGQPDFAHLVIDFVADAWLVESKSLKLYLASFRNHGAFHEDCTVAIGKRLVALLEPRWLRIGGYWYPRGGIPIDVFWQTGEAPKGVWIPDQGVAPYRGRG

SEQ ID NO: 44500 - protein, 151 aa, unidentified
  source 1..151: note = Bacteroidaceae bacterium
  REGION 1..151: note = tr|A0A5C6HLB8|A0A5C6HLB8_9BACT NADPH-dependent 7-cyano-7-deazaguanine reductase OS=Bacteroidaceae bacterium HV4-6-C5C OX=2600309 GN=queF PE=3 SV=1
MSELKDQLSLLGRKTEYKQDYAPEVLEAFDNKHPENDYWVRFNCPEFTSLCPITGQPDFAEIRISYIPDIKMVESKSLKLYLFSFRNHGAFHEDCVNIIMKDLIQLMNPKYIEVTGLFTPRGGISIYPYANYGRSGTKFERMAEQRLMTRE

SEQ ID NO: 44501 - protein, 147 aa, unidentified
  source 1..147: note = Bacteroidales bacterium
  REGION 1..147: note = tr|A0A180FSI6|A0A180FSI6_9BACT NADPH-dependent 7-cyano-7-deazaguanine reductase OS=Bacteroidales bacterium Barb7 OX=1633203 GN=queF PE=3 SV=1
MKKELQSLGGETVYRQDYAPEALEAFTNKHQENDYWVRLNCPEFTALCPITGQPDFATIHIDYIPDVKMVESKSLKLYLFSFRTHGSFHEDCVNVIMKDLIRLMDPKYIEVRGIFTPRGGISICPYANYGRKGTKYEELAEKRLFEQ

SEQ ID NO: 44502 - protein, 156 aa, unidentified
  source 1..156: note = Bacteroidales bacterium
  REGION 1..156: note = tr|A0A4U1GGS0|A0A4U1GGS0_9BACT NADPH-dependent 7-cyano-7-deazaguanine reductase OS=Bacteroidales bacterium OX=2030927 GN=queF PE=3 SV=1
MRKESELEGVTLLGCQGVAYPTDYAPQLLETFENKHPENEYVVTFDCPEFTTLCPKTGQPDFGHIIISYIPRERMVESKSLKLYLFSFRNHGDFHEDCVNIIMKDLWKLMDPKYIEVKGLFMPRGGISIYPFANMGDADHQDLCKARRVAALDMKK

SEQ ID NO: 44503 - protein, 151 aa, Bacteroides acidifaciens
  REGION 1..151: note = tr|A0A3L8ABU6|A0A3L8ABU6_9BACE NADPH-dependent 7-cyano-7-deazaguanine reductase OS=Bacteroides acidifaciens OX=85831 GN=queF PE=3 SV=1
MTELKDQLSLLGRKTEYKQDYAPEVLEAFDNKHPENDYWVRFNCPEFTSLCPITGQPDFAEIRISYIPDIKMVESKSLKLYLFSFRNHGAFHEDCVNIIMKDLIKLMNPKYIEVTGIFTPRGGISIYPYANYGRPGTKFEQMAEHRLMNRE

SEQ ID NO: 44504 - protein, 151 aa, Bacteroides caccae
  REGION 1..151: note = tr|R5UT43|R5UT43_9BACE NADPH-dependent 7-cyano-7-deazaguanine reductase OS=Bacteroides caccae CAG:21 OX=1263037 GN=queF PE=3 SV=1
MTELKDQLSLLGRKTEYKQDYAPEVLEAFDNKHPENDYWVRFNCPEFTSLCPITGQPDFAEIRISYIPEVKMVESKSLKLYLFSFRNHGAFHEDCVNIIMKDLIKLMNPKYIEVTGIFTPRGGISIYPYANYGRPGTKFEQMAEHRLMNRE

SEQ ID NO: 44505 - protein, 151 aa, Bacteroides caccae; identical to SEQ ID NO: 44504
  REGION 1..151: note = tr|A0A174RSC9|A0A174RSC9_9BACE NADPH-dependent 7-cyano-7-deazaguanine reductase OS=Bacteroides caccae; OX = 47678 GN=queF PE=3 SV=1

SEQ ID NO: 44506 - protein, 151 aa, unidentified
  source 1..151: note = Bacteroides caecimuri
  REGION 1..151: note = tr|A0A4S2DDR2|A0A4S2DDR2_9BACE NADPH-dependent 7-cyano-7-deazaguanine reductase OS=Bacteroides caecimuri; OX = 2516958 GN=queF PE=3 SV=1
MTELKDQLSLLGRKTEYKQDYAPEVLEAFDNKHPENDYWVRFNCPEFTSLCPITGQPDFAEIRISYIPDIKMVESKSLKLYLFSFRSHGAFHEDCVNIIMKDLITLMNPKYIEVTGIFTPRGGISIYPYANYGRPGTKFEQMAEHRLMNRE

SEQ ID NO: 44507 - protein, 167 aa, unidentified; identical to SEQ ID NO: 44426
  source 1..167: note = Bacteroides caecimuris
  REGION 1..167: note = tr|A0A3A9B832|A0A3A9B832_9BACE NADPH-dependent 7-cyano-7-deazaguanine reductase OS=Bacteroides caecimuris; OX = 1796613 GN=queF PE=3 SV=1

SEQ ID NO: 44508 - protein, 151 aa, unidentified; identical to SEQ ID NO: 44506
  source 1..151: note = Bacteroides caecimuris
  REGION 1..151: note = tr|A0A1C7H0K5|A0A1C7H0K5_9BACE NADPH-dependent 7-cyano-7-deazaguanine reductase OS=Bacteroides caecimuris; OX = 1796613 GN=queF PE=3 SV=1

SEQ ID NO: 44509 - protein, 87 aa, Bacteroides cellulosilyticus
  REGION 1..87: note = tr|E2NI92|E2NI92_9BACE NADPH-dependent 7-cyano-7-deazaguanine reductase (Fragment) OS=Bacteroides cellulosilyticus DSM 14838 OX=537012 GN=queF PE=3 SV=1
MTELKDQLSLLGRKTEYKQDYAPEVLEAFDNKHPENDYWVRFNCPEFTSLCPITGQPDFAEIRISYIPDIKMVESKSLKLYLFSFRN

SEQ ID NO: 44510 - protein, 151 aa, Bacteroides cellulosilyticus
  REGION 1..151: note = tr|A0A412IKD7|A0A412IKD7_9BACE NADPH-dependent 7-cyano-7-deazaguanine reductase OS=Bacteroides cellulosilyticus OX=246787 GN=queF PE=3 SV=1
MTELKDQLSLLGRKTEYKQDYAPEVLEAFDNKHSENDYWVRFNCPEFTSLCPITGQPDFAEIRISYIPDIKMVESKSLKLYLFSFRNHGAFHEDCVNIIMKDLIHLMNPKYIEVTGLFTPRGGISIYPYANYGRPGTKYEGIAEQRLMNRE

SEQ ID NO: 44511 - protein, 151 aa, Bacteroides clarus
  REGION 1..151: note = tr|F3PH83|F3PH83_9BACE NADPH-dependent 7-cyano-7-deazaguanine reductase OS=Bacteroides clarus YIT 12056 OX=762984 GN=queF PE=3 SV=1
MTELKDQLSLLGRKTEYKQDYAPEVLEAFDNKHPGNDYWVRFNCPEFTSLCPITGQPDFAEIRISYIPDVKMVESKSLKLYLFSFRNHGAFHEDCVNIIMKDLIRLMNPKYIEVTGIFTPRGGISIYPYANYGRPGTKYERMAEHRLMNRE

SEQ ID NO: 44512 - protein, 151 aa, Bacteroides clarus; identical to SEQ ID NO: 44511
  REGION 1..151: note = tr|A0A1Y4JUB5|A0A1Y4JUB5_9BACE NADPH-dependent 7-cyano-7-deazaguanine reductase OS=Bacteroides clarus; OX = 626929 GN=queF PE=3 SV=1

SEQ ID NO: 44513 - protein, 151 aa, Bacteroides coprocola
  REGION 1..151: note = tr|A0A412GV61|A0A412GV61_9BACE NADPH-dependent 7-cyano-7-deazaguanine reductase OS=Bacteroides coprocola; OX = 310298 GN=queF PE=3 SV=1
MERKDELTILGKNTVYKQDYAPEVLEAFVNKHPENDYWVRFNCPEFTSLCPITGQPDFAEIRISYLPDVKMVESKSLKLYLFSFRNHGDFHEDCVNIIMKDLIKLMDPKYIEVTGIFTPRGGISIYPYCNYGCPGTKYEKLAEYRMQNHDL

SEQ ID NO: 44514 - protein, 151 aa, Bacteroides coprocola
  REGION 1..151: note = tr|B3JMY0|B3JMY0_9BACE NADPH-dependent 7-cyano-7-deazaguanine reductase OS=Bacteroides coprocola DSM 17136 OX=470145 GN=queF PE=3 SV=1
MERKDELTILGKNTVYKQDYAPEVLEAFVNKHPENDYWVRFNCPEFTSLCPITGQPDFAEIRISYLPDVKMVESKSLKLYLFSFRNHGDFHEDCVNIIMKDLIKLMDPKYIEVTGIFTPRGGISIYPYCNYGRPGTKYEKLAEYRMQNHDL

SEQ ID NO: 44515 - protein, 155 aa, Bacteroides coprophilus
  REGION 1..155: note = tr|R6S2C0|R6S2C0_9BACE NADPH-dependent 7-cyano-7-deazaguanine reductase OS=Bacteroides coprophilus CAG:333 OX=1263041 GN=queF PE=3 SV=1
MNKFMERKDELTLLGNKHTEYKQDYAPEVLEAFMNKHPENDYWVRFNCPEFTSLCPITGQPDFAEIRISYLPDKKMVESKSLKLYLFSFRNHGDFHEDCVNIIMKDLIRLMDPKYIEVTGIFTPRGGISIYPYCNYGRPGTKYEELAEYRLRNHN

SEQ ID NO: 44516 - protein, 155 aa, Bacteroides coprophilus; identical to SEQ ID NO: 44515
  REGION 1..155: note = tr|S0FA05|S0FA05_9BACE NADPH-dependent 7-cyano-7-deazaguanine reductase OS=Bacteroides coprophilus DSM 18228 = JCM 13818 OX=547042 GN=queF PE=3; SV = 1

SEQ ID NO: 44517 - protein, 154 aa, Bacteroides coprosuis
  REGION 1..154: note = tr|F3ZRP0|F3ZRP0_9BACE NADPH-dependent 7-cyano-7-deazaguanine reductase OS=Bacteroides coprosuis DSM 18011 OX=679937 GN=queF PE=3 SV=1
MRKDTELRQQLSALGTKTEYKQDYAPKVLESFDNKHPMNDYWVRFNCPEFTSLCPITGQPDFAEIIISYLPDEKMVESKSLKLYLFSFRNHGAFHEDCVNIIMKDLIKLMNPKYIEVTGIFTPRGGISIYPYTNYGKPGTKYEKLAEHRLMNHQ

SEQ ID NO: 44518 - protein, 151 aa, Bacteroides dorei
  REGION 1..151: note = tr|A0A1Y4PI87|A0A1Y4PI87_9BACE NADPH-dependent 7-cyano-7-deazaguanine reductase OS=Bacteroides dorei; OX = 357276 GN=queF PE=3 SV=1
MERKDELTLLGTKTEYRQDYAPEVLESFVNKHPGNDYWVRFNCPEFTSLCPITGQPDFAEIRISYLPDVKMVESKSLKLYLFSFRNHGDFHEDCVNIIMKDLIKLMDPKYIEVTGIFTPRGGISIYPYCNYGRPGTKYEELAEYRMRNHDL

SEQ ID NO: 44519 - protein, 151 aa, Bacteroides dorei
  REGION 1..151: note = tr|A0A076IKS2|A0A076IKS2_9BACE NADPH-dependent 7-cyano-7-deazaguanine reductase OS=Bacteroides dorei; OX = 357276 GN=queF PE=3 SV=1
MERKDELTLLGAKTEYRQDYAPEVLESFVNKHPGNDYWVRFNCPEFTSLCPITGQPDFAEIRISYLPDVKMVESKSLKLYLFSFRNHGDFHEDCVNIIMKDLIKLMDPKYIEVTGIFTPRGGISIYPYCNYGRPGTKYEELAEYRMRNHDL

SEQ ID NO: 44520 - protein, 151 aa, Bacteroides eggerthii
  REGION 1..151: note = tr|R5K585|R5K585_9BACE NADPH-dependent 7-cyano-7-deazaguanine reductase OS=Bacteroides eggerthii CAG:109 OX=1263043 GN=queF PE=3 SV=1
MAELKDQLSLLGRKTEYKQDYAPEVLEAFDNKHPGNDYWVRFNCPEFTSLCPITGQPDFAEIRISYIPDVKMVESKSLKLYLFSFRNHGAFHEDCVNIIMKDLIRLMNPKYIEVTGIFTPRGGISIYPYANYGRPGTKYEQMAEHRLMSRE

SEQ ID NO: 44521 - protein, 151 aa, Bacteroides eggerthii; identical to SEQ ID NO: 44520
  REGION 1..151: note = tr|A0A380YJ20|A0A380YJ20_9BACE NADPH-dependent 7-cyano-7-deazaguanine reductase OS=Bacteroides eggerthii; OX = 28111 GN=queF PE=3 SV=1

SEQ ID NO: 44522 - protein, 151 aa, Bacteroides faecichinchillae
  REGION 1..151: note = tr|A0A1M5FJ01|A0A1M5FJ01_9BACE NADPH-dependent 7-cyano-7-deazaguanine reductase OS=Bacteroides faecichinchillae OX=871325 GN=queF PE=3 SV=1
MTELKDQLSLLGRKTEYKQDYAPEVLEAFDNKHPENDYWVRFNCPEFTSLCPITGQPDFAEIRISYIPDIKMVESKSLKLYLFSFRNHGAFHEDCVNIIMKDLIRLMGPKYIEVTGIFTPRGGISIYPYANYGRPGTKYEQMAEHRLANRE

SEQ ID NO: 44523 - protein, 151 aa, Bacteroides faecis
  REGION 1..151: note = tr|A0A1H3B7H0|A0A1H3B7H0_9BACE NADPH-dependent 7-cyano-7-deazaguanine reductase OS=Bacteroides faecis MAJ27 OX=1077285 GN=queF PE=3 SV=1
MAELKDQLSLLGRKTEYKQDYAPEVLEAFDNKHPENDYWVRFNCPEFTSLCPITGQPDFAEIRISYIPDIKMVESKSLKLYLFSFRSHGAFHEDCVNIIMKDLIKLMNPKYIEVTGIFTPRGGISIYPYANYGRPGTKFEQMAEHRLMNRE

SEQ ID NO: 44524 - protein, 151 aa, Bacteroides faecis; identical to SEQ ID NO: 44523
  REGION 1..151: note = tr|R6W4T4|R6W4T4_9BACE NADPH-dependent 7-cyano-7-deazaguanine reductase OS=Bacteroides faecis CAG:32 OX=1263044 GN=queF PE=3 SV=1

SEQ ID NO: 44525 - protein, 151 aa, Bacteroides finegoldii; identical to SEQ ID NO: 44503
  REGION 1..151: note = tr|C9L3B0|C9L3B0_9BACE NADPH-dependent 7-cyano-7-deazaguanine reductase OS=Bacteroides finegoldii DSM 17565 OX=483215 GN=queF PE=3 SV=1

SEQ ID NO: 44526 - protein, 151 aa, Bacteroides finegoldii; identical to SEQ ID NO: 44503
  REGION 1..151: note = tr|R6RVQ2|R6RVQ2_9BACE NADPH-dependent 7-cyano-7-deazaguanine reductase OS=Bacteroides finegoldii CAG:203 OX=1263045 GN=queF PE=3 SV=1

SEQ ID NO: 44527 - protein, 153 aa, Bacteroides fluxus
  REGION 1..153: note = tr|F3PSQ5|F3PSQ5_9BACE NADPH-dependent 7-cyano-7-deazaguanine reductase OS=Bacteroides fluxus YIT 12057 OX=763034 GN=queF PE=3 SV=1
MTMTELKDQLSLLGRKTEYRQDYAPEVLEAFDNKHPGNDYWVRFNCPEFTSLCPITGQPDFAEIRICYIPDVKMVESKSLKLYLFSFRNHGAFHEDCVNIIMKDLIRLMDPKYIEVTGIFTPRGGISIYPYANYGRPGTKFEQMAEQRLMNRE

SEQ ID NO: 44528 - protein, 151 aa, Bacteroides fragilis
  REGION 1..151: note = tr|A0A015SW65|A0A015SW65_BACFG NADPH-dependent 7-cyano-7-deazaguanine reductase OS=Bacteroides fragilis str. 3988T(B)14 OX=1339315 GN=queF PE=3 SV=1
MTELKEQLSLLGRKTEYKQDYAPEVLEAFDNKHPENDYWVRFNCPEFTSLCPITGQPDFAEIRISYLPDVKMVESKSLKLYLFSFRNHGAFHEDCVNIIMKDLIRLMDPKYIEVTGIFTPRGGISIYPYANYGRPGTKYEEMAIHRLMNHE

SEQ ID NO: 44529 - protein, 151 aa, Bacteroides fragilis; identical to SEQ ID NO: 44528
  REGION 1..151: note = sp|Q5LFI5|QUEF_BACFN NADPH-dependent 7-cyano-7-deazaguanine reductase OS=Bacteroides fragilis (strain ATCC 25285 / DSM 2151 / JCM 11019 / NCTC 9343); OX = 272559 GN=que F PE=3 SV=1

SEQ ID NO: 44530 - protein, 153 aa, Bacteroides graminisolvens
  REGION 1..153: note = tr|A0A069D1C4|A0A069D1C4_9BACE NADPH-dependent 7-cyano-7-deazaguanine reductase OS=Bacteroides graminisolvens DSM 19988 = JCM 15093 OX=1121097 GN=queF; PE = 3 SV=1
MAELKDQLSLLGRHTEYKQDYAPDVLEAFDNKHPGNDYWVRFNCPEFTSLCPITGQPDFAEIRIAYLPDVKMVESKSLKLYLFSFRNHGAFHEDCVNIIMKDLIQLMNPKYIEVTGILPRGGISIYPFANYGRPGTSYEEMARFRMMHHDLNG

SEQ ID NO: 44531 - protein, 154 aa, Bacteroides graminisolvens
  REGION 1..154: note = tr|A0A351M4Q6|A0A351M4Q6_9BACE NADPH-dependent 7-cyano-7-deazaguanine reductase OS=Bacteroides graminisolvens OX=477666 GN=queF PE=3 SV=1
MAELKDQLSLLGRNTEYKQDYSPDVLEAFDNKHPGNDYWVRFNCPEFTSLCPITGQPDFAEIRIAYLPDVKMVESKSLKLYLFSFRNHGAFHEDCVNIIMKDLIQLMNPKYIEVTGIFTPRGGISIYPFANYGRPGTSYEEMARFRMMHHDLNG

SEQ ID NO: 44532 - protein, 151 aa, Bacteroides helcogenes
  REGION 1..151: note = tr|E6SP47|E6SP47_BACT6 NADPH-dependent 7-cyano-7-deazaguanine reductase OS=Bacteroides helcogenes (strain ATCC 35417 / DSM 20613 / JCM 6297 / P 36-108); OX = 693979 GN= queF PE=3 SV=1
MTELKDQLSLLGRRTEYKQDYAPEVLEAFDNKHPDNDYWVRFNCPEFTSLCPITGQPDFAEIRISYIPDIKMVESKSLKLYLFSFRNHGAFHEDCVNIIMKDLIHLMNPKYIEVTGIFTPRGGISIYPYANYGRPGTKYEKMAGHRLMTRG

SEQ ID NO: 44533 - protein, 151 aa, unidentified
  source 1..151: note = Bacteroides heparinolyticus
  REGION 1..151: note = tr|A0A2R3MTX2|A0A2R3MTX2_9BACE NADPH-dependent 7-cyano-7-deazaguanine reductase OS=Bacteroides heparinolyticus OX=28113 GN=queF PE=3 SV=1
MTELKEQLSLLGRKTEYRQDYAPEVLEAFDNRHQDNDYWVRFNCPEFTSLCPITGQPDFAEIRISYIPDVRMVESKSLKLYLFSFRNHGAFHEDCVNIIMKDLIRLMNPKYIEVTGIFTPRGGISIYPYANYGRPGTKYEQMAGHRLMNRE

SEQ ID NO: 44534 - protein, 151 aa, Bacteroides intestinalis
  REGION 1..151: note = tr|R7E0I6|R7E0I6_9BACE NADPH-dependent 7-cyano-7-deazaguanine reductase OS=Bacteroides intestinalis CAG:315 OX=1263048 GN=queF PE=3 SV=1
MSELKDQLSLLGRKTEYKQDYAPEVLEAFDNKHPGNDYWVRFNCPEFTSLCPITGQPDFAEIRISYIPDIKMVESKSLKLYLFSFRNHGAFHEDCVNIIMKDLILLMNPKYIEVTGIFTPRGGISIYPYANYGRPDTKYEHMAEHRLMNRE

SEQ ID NO: 44535 - protein, 151 aa, Bacteroides intestinalis
  REGION 1..151: note = tr|A0A3E4KVX2|A0A3E4KVX2_9BACE NADPH-dependent 7-cyano-7-deazaguanine reductase OS=Bacteroides intestinalis OX=329854 GN=queF PE=3 SV=1
MSELKDQLSLLGRKTEYKQDYAPEVLEAFDNKHPENDYWVRFNCPEFTSLCPITGQPDFAEIRISYIPDIKMVESKSLKLYLFSFRNHGAFHEDCVNIIMKDLIRLTNPKYIEVTGIFTPRGGISIYPYANYGRPDTKYENMAEHRLMNRE

SEQ ID NO: 44536 - protein, 151 aa, unidentified
  source 1..151: note = Bacteroides luti
  REGION 1..151: note = tr|A0A1M5CR17|A0A1M5CR17_9BACE NADPH-dependent 7-cyano-7-deazaguanine reductase OS=Bacteroides luti; OX = 1297750 GN=queF PE=3 SV=1
MTDLKDQLSILGRATEYKNVYAPEVLEAFDNKHPENDYWVQFNCPEFTSLCPITGQPDFAEIRISYLPDVKMVESKSLKLYMFSFRNHGAFHEDCVNIIMKDLIRLMDPKYIEVTGIFTPRGGISIYPYCNYGRPGTKYEEMASYRLMNRK

SEQ ID NO: 44537 - protein, 151 aa, Bacteroides massiliensis
  REGION 1..151: note = tr|U6RQH8|U6RQH8_9BACE NADPH-dependent 7-cyano-7-deazaguanine reductase OS=Bacteroides massiliensis B84634 = Timone 84634 = DSM 17679 = JCM 13223; OX = 1121098 GN=queFPE=3 SV=1
MERKDELTILGKKTEYKQDYAPEVLESFVNKHPGNDYWVRFNCPEFTSLCPITGQPDFAEIRISYLPDMKMVESKSLKLYLFSFRNHGDFHEDCVNIIMKDLIKLMEPKYIEVTGIFTPRGGISIYPYCNYGRPGTKYEELAQYRLRNHDL

SEQ ID NO: 44538 - protein, 151 aa, Bacteroides nordii
  REGION 1..151: note = tr|A0A413VY80|A0A413VY80_9BACE NADPH-dependent 7-cyano-7-deazaguanine reductase OS=Bacteroides nordii; OX = 291645 GN=queF PE=3 SV=1
MTELKDQLSLLGRKTEYKQDYAPEVLEAFDNKHPENDYWVRFNCPEFTSLCPITGQPDFAEIRISYLPDVKMVESKSLKLYLFSFRSHGAFHEDCVNIIMKDLIRLMDPKYIEVTGIFTPRGGISIYPYANYGRPGTKYEQMAEHRLMNHE

SEQ ID NO: 44539 - protein, 151 aa, Bacteroides nordii; identical to SEQ ID NO: 44538
  REGION 1..151: note = tr|I8X8U8|I8X8U8_9BACE NADPH-dependent 7-cyano-7-deazaguanine reductase OS=Bacteroides nordii CL02T12C05 OX=997884 GN=queF PE=3 SV=1

SEQ ID NO: 44540 - protein, 151 aa, Bacteroides oleiciplenus
  REGION 1..151: note = tr|A0A3E5BL70|A0A3E5BL70_9BACE NADPH-dependent 7-cyano-7-deazaguanine reductase OS=Bacteroides oleiciplenus OX=626931 GN=queF PE=3 SV=1
MTELKDQLSLLGRKTEYKQDYAPEVLEAFDNKHPGNDYWVRFNCPEFTSLCPITGQPDFAEIRISYIPDIKMVESKSLKLYLFSFRNHGAFHEDCVNIIMKDLINLMKPKYIEVTGLFTPRGGISIYPYANYGRPGTKYEAMAEQRLMNRE

SEQ ID NO: 44541 - protein, 151 aa, Bacteroides oleiciplenus
  REGION 1..151: note = tr|A0A1Q6GRT9|A0A1Q6GRT9_9BACE NADPH-dependent 7-cyano-7-deazaguanine reductase OS=Bacteroides oleiciplenus OX=626931 GN=queF PE=3 SV=1
MTELKDQLSLLGRKTEYKQDYAPEVLEAFDNKHPGNDYWVRFNCPEFTSLCPITGQPDFAEIRISYIPDIKMVESKSLKLYLFSFRNHGAFHEDCVNIIMKDLISLMNPKYIEVTGIFTPRGGISIYPYANYGRSGTKYEAMAEQRLMNRE

SEQ ID NO: 44542 - protein, 154 aa, Bacteroides ovatus
  REGION 1..154: note = tr|A7M2H3|A7M2H3_BACO1 NADPH-dependent 7-cyano-7-deazaguanine reductase OS=Bacteroides ovatus (strain ATCC 8483 / DSM 1896 / JCM 5824 / NCTC 11153); OX = 411476 GN=queFPE=3 SV=1
MSAMTELKDQLSLLGRKTEYKQDYAPEVLEAFDNKHPENDYWVRFNCPEFTSLCPITGQPDFAEIRISYIPDIKMVESKSLKLYLFSFRSHGAFHEDCVNIIMKDLIRLMNPKYIEVTGIFTPRGGISIYPYANYGRPGTKFEQMAEHRLMNRE

SEQ ID NO: 44543 - protein, 151 aa, Bacteroides ovatus
  REGION 1..151: note = tr|A0A413ENN4|A0A413ENN4_BACOV NADPH-dependent 7-cyano-7-deazaguanine reductase OS=Bacteroides ovatus; OX = 28116 GN=queF PE=3 SV=1
MTELKNQLSLLGRKTEYKQDYAPEVLEAFDNKHPENDYWVRFNCPEFTSLCPITGQPDFAEIRISYIPDIKMVESKSLKLYLFSFRSHGAFHEDCVNIIMKDLIRLMNPKYIEVTGIFTPRGGISIYPYANYGRPGTKFEQMAEHRLMNRE

SEQ ID NO: 44544 - protein, 152 aa, Bacteroides plebeius
  REGION 1..152: note = tr|R5VJI3|R5VJI3_9BACE NADPH-dependent 7-cyano-7-deazaguanine reductase OS=Bacteroides plebeius CAG:211 OX=1263052 GN=queF PE=3 SV=1
MERKDELTLLGNKKTVYKQDYAPEVLESFVNKHPENDYWVRFNCPEFTSLCPITGQPDFAEIRISYLPDVKMVESKSLKLYLFSFRNHGDFHEDCVNIIMKDLIKLMDPKYIEVTGIFTPRGGISIYPYCNYGRPGTKYEELAEYRMKNHDL

SEQ ID NO: 44545 - protein, 152 aa, Bacteroides plebeius; identical to SEQ ID NO: 44544
  REGION 1..152: note = tr|A0A1Q6GHD3|A0A1Q6GHD3_9BACE NADPH-dependent 7-cyano-7-deazaguanine reductase OS=Bacteroides plebeius; OX = 310297 GN=queF PE=3 SV=1

SEQ ID NO: 44546 - protein, 151 aa, Bacteroides pyogenes
  REGION 1..151: note = tr|U2CQB3|U2CQB3_9BACE NADPH-dependent 7-cyano-7-deazaguanine reductase OS=Bacteroides pyogenes F0041 OX=1321819 GN=queF PE=3 SV=1
MSELKEQLSLLGRSTEYKQDYAPEVLEAFDNKHPGNDYWVRFNCPEFTSLCPITGQPDFAEIRISYIPDVKMVESKSLKLYLFSFRNHGAFHEDCVNIIMKDLIKLMNPKYIEVTGLFTPRGGISIYPYANYGRPGTKYEQMAEQRLMNRE

SEQ ID NO: 44547 - protein, 151 aa, Bacteroides pyogenes; identical to SEQ ID NO: 44546
  REGION 1..151: note = tr|A0A5D3EFE3|A0A5D3EFE3_9BACE NADPH-dependent 7-cyano-7-deazaguanine reductase OS=Bacteroides pyogenes; OX = 310300 GN=queF PE=3 SV=1

SEQ ID NO: 44548 - protein, 151 aa, unidentified
  source 1..151: note = Bacteroides reticulotermitis
  REGION 1..151: note = tr|W4US77|W4US77_9BACE NADPH-dependent 7-cyano-7-deazaguanine reductase OS=Bacteroides reticulotermitis JCM 10512 OX=1445607 GN=queF PE=3 SV=1
MTELKEQLSLLGRKTEYKQDYAPEVLEAFDNKHPDNDYWVRFNCPEFTSLCPITGQPDFAEIRISYIPDIKMVESKSLKLYLFSFRNHGAFHEDCVNVIMKDLIQLMNPKYIEVTGIFTPRGGISIYPYANYGRPGTKFEQMAENRLMNRE

SEQ ID NO: 44549 - protein, 151 aa, Bacteroides salanitronis
  REGION 1..151: note = tr|F0R8Q8|F0R8Q8_BACSH NADPH-dependent 7-cyano-7-deazaguanine reductase OS=Bacteroides salanitronis (strain DSM 18170 / JCM 13567 / BL78); OX = 667015 GN=queF PE=3 SV=1
MERKDELTILGKTTAYKQDYAPEVLEAFTNKHPENDYWVRFNCPEFTSLCPITGQPDFAEIRISYLPDMKMVESKSLKLYLFSFRNHGDFHEDCVNIIMKDLIRLMDPKYIEVTGIFTPRGGISIYPYCNYGRPGTKYEELAEYRMRNHDI

SEQ ID NO: 44550 - protein, 151 aa, Bacteroides salyersiae
  REGION 1..151: note = tr|A0A4V1YNE8|A0A4V1YNE8_9BACE NADPH-dependent 7-cyano-7-deazaguanine reductase OS=Bacteroides salyersiae; OX = 291644 GN=queF PE=3 SV=1
MAKLEDQLSLLGRKTEYKQDYAPEVLEAFDNKHPENDYWVRFNCPEFTSLCPITGQPDFAEIRISYLPDVKMVESKSLKLYLFSFRNHGAFHEDCVNIIMKDLIRLMDPKYIEVTGIFTPRGGISIYPYANYGRSRTKYEEMAMHRLMNHE

SEQ ID NO: 44551 - protein, 151 aa, Bacteroides salyersiae
  REGION 1..151: note = tr|I9SSR3|I9SSR3_9BACE NADPH-dependent 7-cyano-7-deazaguanine reductase OS=Bacteroides salyersiae CL02T12C01 OX=997887 GN=queF PE=3 SV=1
MAKLEDQLSLLGRKTEYKQDYAPEVLEAFDNKHPENDYWVRFNCPEFTSLCPITGQPDFAEIRISYLPDVKMVESKSLKLYLFSFRNHGAFHEDCVNIIMKDLIRLMDPKYIEVTGIFTPRGGISIYPYANYGRSGTKYEEMAMHRLMNHE

SEQ ID NO: 44552 - protein, 151 aa, Bacteroides sartorii
  REGION 1..151: note = tr|R9I6Y9|R9I6Y9_9BACE NADPH-dependent 7-cyano-7-deazaguanine reductase OS=Bacteroides sartorii; OX = 671267 GN=queF PE=3 SV=1
MERKDELTLLGAKTEYKQDYAPEVLESFVNKHPGNDYWVRFNCPEFTSLCPITGQPDFAEIRISYLPDVKMVESKSLKLYLFSFRNHGDFHEDCVNIIMKDLIKLMDPKYIEVTGIFTPRGGISIYPYCNYGRPGTKYEELAEYRMRNHDL

SEQ ID NO: 44553 - protein, 151 aa, Bacteroides sp.
  REGION 1..151: note = tr|A0A285TMZ8|A0A285TMZ8_9BACE NADPH-dependent 7-cyano-7-deazaguanine reductase OS=Bacteroides sp. AR29; OX = 93975 GN=queF PE=3 SV=1
MTELKDQLSLLGRKTEYRQDYAPEVLEAFDNKHPGNDYWVRFNCPEFTSLCPITGQPDFAEIRICYIPDVKMVESKSLKLYLFSFRNHGAFHEDCVNIIMKDLIHLMNPKYIEVTGIFTPRGGISIYPYANYGRPGTKFEQMAEHRLMNRE

SEQ ID NO: 44554 - protein, 151 aa, Bacteroides sp.
  REGION 1..151: note = tr|D7JWR1|D7JWR1_9BACE NADPH-dependent 7-cyano-7-deazaguanine reductase OS=Bacteroides sp. 3_1_23; OX = 457390 GN=queF PE=3 SV=1
MTELKDQLSLLGRKTEYKQDYAPEVLEAFDNKHPENDYWVRFNCPEFTSLCPITGQPDFAEIRISYIPDIKMVESKSLKLYLFSFRSHGAFHEDCVNIIMKDLIRLMSPKYIEVTGIFTPRGGISIYPYANYGRPGTKFEQMAEHRLMNRE

SEQ ID NO: 44555 - protein, 151 aa, Bacteroides stercorirosoris; identical to SEQ ID NO: 44541
  REGION 1..151: note = tr|A0A1M6K449|A0A1M6K449_9BACE NADPH-dependent 7-cyano-7-deazaguanine reductase OS=Bacteroides stercorirosoris OX=871324 GN=queF PE=3 SV=1

SEQ ID NO: 44556 - protein, 151 aa, Bacteroides stercoris
  REGION 1..151: note = tr|A0A4Q5G5J8|A0A4Q5G5J8_BACSE NADPH-dependent 7-cyano-7-deazaguanine reductase OS=Bacteroides stercoris; OX = 46506 GN=queF PE=3 SV=1
MTELKDQLSLLGRKTEYKQDYAPEVLEAFDNKHPGNDYWVRFNCPEFTSLCPITGQPDFAEIHISYIPDVKMVESKSLKLYLFSFRNHGAFHEDCVNIIMKDLIRLMNPKYIEVTGIFTPRGGISIYPYANYGRPGTKYEQMAEHRLMNRE

SEQ ID NO: 44557 - protein, 151 aa, Bacteroides stercoris
  REGION 1..151: note = tr|A0A108T4G8|A0A108T4G8_BACSE NADPH-dependent 7-cyano-7-deazaguanine reductase OS=Bacteroides stercoris; OX = 46506 GN=queF PE=3 SV=1
MTELKDQLSLLGRKTEYKQDYAPEVLEAFDNKHPGNDYWVRFNCPEFTSLCPITGQPDFAEIRISYIPDVKMVESKSLKLYLFSFRNHGAFHEDCVNIIMKDLIRLMNPKYIEVTGIFTPRGGISIYPYANYGRPGTKYEKMAEHRLMNRE

SEQ ID NO: 44558 - protein, 151 aa, Bacteroides thetaiotaomicron
  REGION 1..151: note = tr|R9HHE4|R9HHE4_BACT4 NADPH-dependent 7-cyano-7-deazaguanine reductase OS=Bacteroides thetaiotaomicron dnLKV9 OX=1235785 GN=queF PE=3 SV=1
MAELKDQLSLLGRKTEYKQDYAPEVLEAFDNKHPENDYWVRFNCPEFTSLCPITGQPDFAEIRISYIPDIKMVESKSLKLYLFSFRNHGAFHEDCVNIIMKDLIKLMNPKYIEVTGIFTPRGGISIYPYANYGRPGTKFEQMAEHRLMNRE

SEQ ID NO: 44559 - protein, 151 aa, Bacteroides thetaiotaomicron; identical to SEQ ID NO: 44558
  REGION 1..151: note = sp|Q8A7G0|QUEF_BACTN NADPH-dependent 7-cyano-7-deazaguanine reductase OS=Bacteroides thetaiotaomicron (strain ATCC 29148 / DSM 2079 / NCTC 10582 / E50 / VPI-5482) OX =226186 GN=queF PE=3 SV=1

SEQ ID NO: 44560 - protein, 151 aa, Bacteroides uniformis
  REGION 1..151: note = tr|A7VA13|A7VA13_BACUC NADPH-dependent 7-cyano-7-deazaguanine reductase OS=Bacteroides uniformis (strain ATCC 8492 / DSM 6597 / CIP 103695 / JCM 5828 / NCTC 13054 /VPI 0061) OX=411479 GN=queF PE=3 SV=1
MTELKDQLSLLGRKTEYRQNYAPEVLEAFDNKHPGNDYWVRFNCPEFTSLCPITGQPDFAEIRICYIPDVKMVESKSLKLYLFSFRNHGAFHEDCVNIIMKDLIHLMNPKYIEVTGIFTPRGGISIYPYANYGRPGTKFEQMAEHRLMNRE

SEQ ID NO: 44561 - protein, 151 aa, Bacteroides uniformis; identical to SEQ ID NO: 44553
  REGION 1..151: note = tr|A0A139K270|A0A139K270_BACUN NADPH-dependent 7-cyano-7-deazaguanine reductase OS=Bacteroides uniformis; OX = 820 GN=queF PE=3 SV=1

SEQ ID NO: 44562 - protein, 151 aa, Bacteroides vulgatus
  REGION 1..151: note = tr|A0A069SUY5|A0A069SUY5_BACVU NADPH-dependent 7-cyano-7-deazaguanine reductase OS=Bacteroides vulgatus str. 3975 RP4 OX=1339352 GN=queF PE=3 SV=1
MERKDELTLLGSKTEYRQDYAPEVLESFVNKHPGNDYWVRFNCPEFTSLCPITGQPDFAEIRISYLPDVKMVESKSLKLYLFSFRNHGDFHEDCVNIIMKDLIKLMDPKYIEVTGIFTPRGGISIYPYCNYGRPGTKYEELAEYRMRNHDL

SEQ ID NO: 44563 - protein, 151 aa, Bacteroides vulgatus; identical to SEQ ID NO: 44562
  REGION 1..151: note = tr|A0A0P0M278|A0A0P0M278_BACVU NADPH-dependent 7-cyano-7-deazaguanine reductase OS=Bacteroides vulgatus; OX = 821 GN=queF PE=3 SV=1

SEQ ID NO: 44564 - protein, 151 aa, Bacteroides xylanisolvens
  REGION 1..151: note = tr|D4VQY3|D4VQY3_9BACE NADPH-dependent 7-cyano-7-deazaguanine reductase OS=Bacteroides xylanisolvens SD CC 1b OX=702447 GN=queF PE=3 SV=1
MTELKDQLSLLGRKTEYKQDYAPEVLEAFDNKHPENDYWVRFNCPEFTSLCPITGQPDFAEMRISYIPDIKMVESKSLKLYLFSFRSHGAFHEDCVNIIMKDLIKLMNPKYIEVTGIFTPRGGISIYPYANYGRPGTKFEQMAEHRLMNQE

SEQ ID NO: 44565 - protein, 151 aa, Bacteroides xylanisolvens
  REGION 1..151: note = tr|A0A174KYW4|A0A174KYW4_9BACE NADPH-dependent 7-cyano-7-deazaguanine reductase OS=Bacteroides xylanisolvens OX=371601 GN=queF PE=3 SV=1
MTELKDQLSLLGRKTEYKQDYAPEVLEAFDNKHPENDYWVRFNCPEFTSLCPITGQPDFAEIRISYIPDIKMVESKSLKLYLFSFRSHGAFHEDCVNIIMKDLIKLMNPKYIEVTGIFTPRGGISIYPYANYGRPGTKFEQMAEHRLMNRE

SEQ ID NO: 44566 - protein, 165 aa, Bacteroides xylanolyticus
  REGION 1..165: note = tr|A0A2S6HN88|A0A2S6HN88_9BACE NADPH-dependent 7-cyano-7-deazaguanine reductase OS=Bacteroides xylanolyticus OX=384636 GN=queF PE=3 SV=1
MSGRNSEETKGLTHLGSQGTVYETNYNPGVLETFLNKHPNNDYFVKFNCPEFTSLCPITGQPDFATITISYVPGEKMVESKSLKLYLFSFRNHGDFHEDCMNIIMKDLIALMHPKYIEVWGKFTPRGGISIDPYCNYGKPGTRWEEVAWERLKNHDLYPERVDNR

SEQ ID NO: 44567 - protein, 151 aa, unidentified
  source 1..151: note = Bacteroides zoogleoformans
  REGION 1..151: note = tr|A0A562UQY9|A0A562UQY9_9BACE NADPH-dependent 7-cyano-7-deazaguanine reductase OS=Bacteroides zoogleoformans OX=28119 GN=queF PE=3 SV=1
MSELKEQLSLLGRKAEYKQDYTPEVLETFDNKHPENDYWVRFNCPEFTSLCPITGQPDFAEIRISYIPDVKMVESKSLKLYLFSFRNHGAFHEDCVNIIMKDLSRLMNPKYIEVTGIFTPRGGISIYPYANYGRLATKYEQMAAHRLMNQE

SEQ ID NO: 44568 - protein, 151 aa, unidentified
  source 1..151: note = Bacteroidetes bacterium
  REGION 1..151: note = tr|S8GS48|S8GS48_9BACT NADPH-dependent 7-cyano-7-deazaguanine reductase OS=Bacteroidetes bacterium oral taxon 272 str. F0290 OX=888054 GN=queF PE=3; SV = 1
MERRDELTQLGRQTAYRTDYAPETLETFVNKHPENDYWVRFNCPEFTSLCPITGQPDFAEIRIEYLPDVKMVESKSLKLYLFSFRNHGDFHEDCVNIIMKDLIKLMDPKYIEVAGIFTPRGGISIYPYCNYGRPGTKYEELAAYRLKIHDR

SEQ ID NO: 44569 - protein, 121 aa, unidentified
  source 1..121: note = Bacteroidetes bacterium
  REGION 1..121: note = tr|A0A3D3LUP4|A0A3D3LUP4_9BACT NADPH-dependent 7-cyano-7-deazaguanine reductase OS=Bacteroidetes bacterium OX=1898104 GN=queF PE=3 SV=1
MNPKNRIKLLETFENSFPNRDYLIIHKANEFTSVCPKTGQPDFGVITIKYIANKKCVELKSLKFYLQSFRNDGIFYENVINTILDELVSVLKPRWMEITGEFSVRGGLQSVIVATFSGRKS

SEQ ID NO: 44570 - protein, 113 aa, unidentified
  source 1..113: note = Bacteroidetes sp.
  REGION 1..113: note = tr|A0A3N0ZRK7|A0A3N0ZRK7_9BACT NADPH-dependent 7-cyano-7-deazaguanine reductase OS=Bacteroidetes/Chlorobi group bacterium ChocPot_Mid OX=2382230 GN=queF PE=3 SV=1
MKKKLETFPNPKPGRKYTITHINSEFTSVCPKTGLPDFGVITITYIPDKICLELKALKYYFLEYRNKGIFYEDITNKILDDLVAACKPLEMEITSEWSTRGGMNSIITAKYTK

SEQ ID NO: 44571 - protein, 118 aa, unidentified
  source 1..118: note = Bacteroidetes sp.
  REGION 1..118: note = tr|A0A3N0ZKI3|A0A3N0ZKI3_9BACT NADPH-dependent 7-cyano-7-deazaguanine reductase OS=Bacteroidetes/Chlorobi group bacterium MS-B_bin-24 OX=2382228 GN=queF PE=3 SV=1
MEIETFPNPKPGREYVIIHRNPEFTSVCPKTGLPDFGTVTIKYIPDKLCLELKSLKYYFLQYRNMGIFYEAVTNKILDDLVAACDPLEMEVQTDWSTRGGMNSTIIAKYVRSGRKNES

SEQ ID NO: 44572 - protein, 152 aa, unidentified
  source 1..152: note = Bacteroidia bacterium
  REGION 1..152: note = tr|A0A1M3ETN8|A0A1M3ETN8_9BACT NADPH-dependent 7-cyano-7-deazaguanine reductase OS=Bacteroidia bacterium 44-10 OX=1895721 GN=queF PE=3 SV=1
MAHEGLSHLGGKTEYKQDYAPEMLEAFNNKHPGNDYWVTFDCPEFTSLCPITGQPDFATIRIDYIPDIKMVESKSLKLYLFSFRNHGAFHEDCVNIIMKDLIGLMDPKYIEVTGIFTPRGGISIYPYANYGKEGTKYEKLAEERLFNHSFPL

SEQ ID NO: 44573 - protein, 153 aa, unidentified
  source 1..153: note = Bacteroidia bacterium
  REGION 1..153: note = tr|A0A1Q3QJF1|A0A1Q3QJF1_9BACT NADPH-dependent 7-cyano-7-deazaguanine reductase OS=Bacteroidia bacterium 43-41 OX=1895720 GN=queF PE=3 SV=1
MSQTENLSLLGKKTAYKQDYAPDVLEAFENKHRSNDYWVTFNCPEFTSLCPITGQPDFATIRIDYIPDVKMVESKSLKIYLFSFRNHGAFHEDCVNIIMKDLIGLMDPKYIEVTGIFTPRGGISIYPYVNYGRSGTKYERLAEERLFNHSFPL

SEQ ID NO: 44574 - protein, 160 aa, unidentified
  source 1..160: note = Baia soyae
  REGION 1..160: note = tr|A0A4R2S1N9|A0A4R2S1N9_9BACL NADPH-dependent 7-cyano-7-deazaguanine reductase OS=Baia soyae OX=1544746; GN = queF PE=3 SV=1
MAQHDLDLQLLGQKTNYHFEYNPDVLESFDNRHPDTDYFVKFNTPEFTSLCPITNQPDFATLYISYVPDQKLVESKSLKLYLFSFRNHGDFHENCIVVIMKDLIKLLDPKYIEVWGKFLPRGGVSIDPYANYGKSGTRWEAIAEQRLAQHDLYPETITNR

SEQ ID NO: 44575 - protein, 163 aa, Balnearium lithotrophicum
  REGION 1..163: note = tr|A0A521BQX0|A0A521BQX0_9BACT NADPH-dependent 7-cyano-7-deazaguanine reductase OS=Balnearium lithotrophicum OX=223788 GN=queF PE=3 SV=1
MKREDFGNVSKLGKPTIYEFEYNPQLLERFPNKFPDRVYWVSFNCPEFTTLCPITGQPDFATIYIQYIPDKWLVESKSLKLYLFSFRNARGFHEDTVNKIADDLFELLEPYYIEVYGEFNPRGGISIDPYVQKFKDVDWVKEIAKERFKLHRITPPEIRRNRG

SEQ ID NO: 44576 - protein, 64 aa, Balneola sp.
  REGION 1..64: note = tr|A0A3D4UZ59|A0A3D4UZ59_9BACT NADPH-dependent 7-cyano-7-deazaguanine reductase QueF (Fragment); OS = Balneola sp. OX=2024824 GN=DF712_13365 PE=4 SV=1
FHEEICETIFTRLNNTFEPRSLMVACLYVRRGGWDINPIRTTHEYLIDEFFWDHTVPWIKTLRQ

SEQ ID NO: 44577 - protein, 147 aa, unidentified
  source 1..147: note = Balneolaceae bacterium
  REGION 1..147: note = tr|A0A356X6Q0|A0A356X6Q0_9BACT NADPH-dependent 7-cyano-7-deazaguanine reductase OS=Balneolaceae bacterium; OX = 2053516 GN=queF PE=3 SV=1
MSSESTPKPKRKRNWAKNRDILKAIPNPSGEAYEIKMKIPELTFEGVRSQPDFANLYITFYPGKKVIELKSLKEYFFAFRSQIYSYERIINVIYDDMMAAYEPTRLRLVMTCNPRGGISSKLTVDSDWGVRGGNDQFMDWVGQKEEW

SEQ ID NO: 44578 - protein, 151 aa, Barnesiella intestinihominis
  REGION 1..151: note = tr|K0XEW8|K0XEW8_9BACT NADPH-dependent 7-cyano-7-deazaguanine reductase OS=Barnesiella intestinihominis YIT 11860 OX=742726 GN=queF PE=3 SV=1
MKSETSQLTLLGHKTVYKQDYAPEVLETFINKHPENDYWVRFNCPEFTSLCPITGQPDFATIQIDYIPGEHMVESKSLKLYLFSFRNHGAFHEDCVNIIMKDLVKLMNPKYIEVTGFFTPRGGISIYPYCNYGQPGTEYEQMAKQRLQNHR

SEQ ID NO: 44579 - protein, 151 aa, Barnesiella sp.
  REGION 1..151: note = tr|A0A1Y3WUD5|A0A1Y3WUD5_9BACT NADPH-dependent 7-cyano-7-deazaguanine reductase OS=Barnesiella sp. An55; OX = 1965646 GN=queF PE=3 SV=1
MESKEPQLTLLGYKTTYRQDYAPEVLETFTNKHPENDYWVRFNCPEFTSLCPITGQPDFATIQIDYIPGERMVESKSLKLYLFSFRNHGAFHEDCVNIIMKDLIRLMEPKYIEVTGFFTPRGGISIYPYCNYGRPGTEYEQMARQRLQNHQ

SEQ ID NO: 44580 - protein, 157 aa, Barnesiella sp.
  REGION 1..157: note = tr|A0A4Y9IYX5|A0A4Y9IYX5_9BACT NADPH-dependent 7-cyano-7-deazaguanine reductase OS=Barnesiella sp. WM24; OX = 2558278 GN=queF PE=3 SV=1
MSRTDEEMPEVTLLGSQGTKYPTEYAPGILETFVNKHPDNEYLVTFTCPEFTSLCPKTGQPDFARIIINYIPREKMVESKSLKLYLFSFRNHGDFHEDCINIIMKDLVALIDPRYLEVIGLFTPRGGISIYPFANYGDSEHQDLVKARMLASFRNDF

SEQ ID NO: 44581 - protein, 151 aa, Barnesiella viscericola
  REGION 1..151: note = tr|W0ET61|W0ET61_9BACT NADPH-dependent 7-cyano-7-deazaguanine reductase OS=Barnesiella viscericola DSM 18177 OX=880074 GN=queF PE=3 SV=1
MESKEPQLTLLGHKTTYRQDYAPEVLETFTNKHPENDYWVRFNCPEFTSLCPITGQPDFATIQIDYIPGERMVESKSLKLYLFSFRNHGAFHEDCVNIIMKDLIKLMEPKYIEVTGFFTPRGGISIYPYCNYGRPGTEYEAMARQRLQSHR

SEQ ID NO: 44582 - protein, 156 aa, unidentified
  source 1..156: note = Bartonella apis
  REGION 1..156: note = tr|A0A1U9MAX7|A0A1U9MAX7_9RHIZ NADPH-dependent 7-cyano-7-deazaguanine reductase OS=Bartonella apis; OX = 1686310 GN=queF PE=3 SV=1
MASDHSIYENLKQLGKKTPFPESPEKAVLERVPNPQADVKYCVRFTAPEFTSLCPITSQPDFAYLMIDYVPHEWLVESKSLKLYLGSFRNHGAFHEDCTVTIARRLVELLSPHWLRIGGYWYPRGGIPIDVFWQTGKTPEDVWIPEQNVSNYRGRG

SEQ ID NO: 44583 - protein, 156 aa, unidentified
  source 1..156: note = Bartonella apis
  REGION 1..156: note = tr|A0A1R0F785|A0A1R0F785_9RHIZ NADPH-dependent 7-cyano-7-deazaguanine reductase OS=Bartonella apis; OX = 1686310 GN=queF PE=3 SV=1
MASDHSIYENLKQLGKKTPFPESPEKAVLERVPNPQADVKYCVRFTAPEFTSLCPITSQPDFAYLMIDYVPDKWLVESKSLKLYLGSFRNHGAFHEDCTVTIARRLVELLSPHWLRIGGYWYPRGGIPIDVFWQTGKMPDDVWIPDQNVSNYRGRG

SEQ ID NO: 44584 - protein, 152 aa, unidentified
  source 1..152: note = Basilea psittacipulmonis
  REGION 1..152: note = tr|A0A077DFN2|A0A077DFN2_9BURK NADPH-dependent 7-cyano-7-deazaguanine reductase OS=Basilea psittacipulmonis DSM 24701 OX=1072685 GN=queF PE=3 SV=1
MSNETLSLLGSKRTEYPTDYAPDVLEAFENKHPDNDYFVTFVCPEFTSLCPITNQPDFATIYIRYIPNIRMVESKSLKLYLFSFRNHGDFHEDCVNIIMKDLIKLMDPKYIEVKGVFTPRGGIAIHPFANYGQAGTMFEEMARERLMKHEMA

SEQ ID NO: 44585 - protein, 131 aa, unidentified
  source 1..131: note = Bathymodiolus azoricus
  REGION 1..131: note = tr|A0A1H6KMZ5|A0A1H6KMZ5_9GAMM NADPH-dependent 7-cyano-7-deazaguanine reductase OS=Bathymodiolus azoricus thioautotrophic gill symbiont OX=235205 GN=queF PE=3 SV=1
MSSQASKTLEVFDNPNRARDYVIQIELPEFTCLCPKTGQPDFATLHLEYIANKDCVELKSLKMYVWSFRDEGAFHEAVTNQILEDLVAATNPRFMRLKAIFNVRGGVYTTVIAEHQQSGWQPKPSVDLKHI

SEQ ID NO: 44586 - protein, 128 aa, unidentified
  source 1..128: note = Bathymodiolus brooksi
  REGION 1..128: note = tr|A0A482YNH3|A0A482YNH3_9BACT NADPH-dependent 7-cyano-7-deazaguanine reductase OS=Bathymodiolus brooksi thiotrophic gill symbiont OX=1052209 GN=queF PE=3 SV=1
MSSQSSKTLEVFDNPNPERDYVIQIELPEFTCLCPKTGQPDFATLYLEYIADKACVELKSLKMYIWSFRDEGAFHEAVTNQILEDLITATDPRFMRLKAIFNVRGGVYTTVIAEHQQQGWEPKSVVNL

SEQ ID NO: 44587 - protein, 131 aa, unidentified
  source 1..131: note = Bathymodiolus heckerae
  REGION 1..131: note = tr|A0A482ZWL2|A0A482ZWL2_9BACT NADPH-dependent 7-cyano-7-deazaguanine reductase OS=Bathymodiolus heckerae thiotrophic gill symbiont OX=1052212 GN=queF PE=3 SV=1
MLSQASKTLEVFDNPNTQRDYVIQIELPEFTCLCPKTGQPDFAILHLEYIADKTCVELKSLKMYIWSFRNEGSFHEAVTNQILEDLVAATNPRFMRLKAIFNVRGGVYTTIIAEHQQAGWQPKPTVDLQHL

SEQ ID NO: 44588 - protein, 132 aa, unidentified
  source 1..132: note = Bathymodiolus heckerae
  REGION 1..132: note = tr|A0A482YS07|A0A482YS07_9BACT NADPH-dependent 7-cyano-7-deazaguanine reductase OS=Bathymodiolus heckerae thiotrophic gill symbiont OX=1052212 GN=queF PE=3 SV=1
MSSQPSKELEVFDNPNPERDFVIQIDMPEFTCLCPKTGQPDFATLHLEYIADQACVELKSLKMYIWSFRDEGAFHEAVTNEILDDLVNATNPRFMRLKAIFNVRGGVYTSVIAEHQQDGWSPKPIVDLQYIS

SEQ ID NO: 44589 - protein, 129 aa, unidentified
  source 1..129: note = Bathymodiolus platifrons
  REGION 1..129: note = tr|A0A1Z5HAV5|A0A1Z5HAV5_9GAMM NADPH-dependent 7-cyano-7-deazaguanine reductase OS=Bathymodiolus platifrons methanotrophic gill symbiont OX=113268 GN=queF; PE = 3 SV=1
MATKPSKDLQAFDNPQPGRDFTIRIDTPEFTCLCPLTGQPDFAEITLEYVPDKLCIELKALKLYLWTFRDRGAFHEAVTNEILDDIVKVTQPNFMRVRADFNVRGGVYTSVIVEHRNPDWHAPELVQLP

SEQ ID NO: 44590 - protein, 128 aa, unidentified
  source 1..128: note = Bathymodiolus thermophilus
  REGION 1..128: note = tr|A0A1J5TWC3|A0A1J5TWC3_9GAMM NADPH-dependent 7-cyano-7-deazaguanine reductase OS=Bathymodiolus thermophilus thioautotrophic gill symbiont OX=2360 GN=queF; PE = 3 SV=1
MSSQPSKILEVFDNPNPERDYVIQIELPEFTCLCPKTGQPDFATLHLEYIADKACVELKSLKMYIWSFRDEGAFHEAVTNQILEDLIVATDPRFMRLKAVFNVRGGVYTTVIAEHQQQGWTPKTVVNL

SEQ ID NO: 44591 - protein, 150 aa, Bauldia litoralis
  REGION 1..150: note = tr|A0A1G6AYV5|A0A1G6AYV5_9RHIZ NADPH-dependent 7-cyano-7-deazaguanine reductase OS=Bauldia litoralis; OX = 665467 GN=queF PE=3 SV=1
MASKKPQLGRSVPIPPDPEHATLDRVPNPHADKTYVARFTFPEFTSICPVTGQPDFGILMIDYVPDKWLVESKSLKLYLQSFRNHGAFHEDCTVAIGAAIVDLLKPQWLRIGGYFNPRGGMPIDVFWQTGAPPADAWITDQGIPPYRGRG

SEQ ID NO: 44592 - protein, 283 aa, unidentified
  source 1..283: note = Baumannia cicadellinicola
  REGION 1..283: note = sp|Q1LSV9|QUEF_BAUCH NADPH-dependent 7-cyano-7-deazaguanine reductase OS=Baumannia cicadellinicola subsp. Homalodisca coagulata OX=374463; GN = queF PE=3 SV=2
MTDQQYQLLQKFKLDKSKISYRTHYNPMLLQPIPRTIHRELLGISSISLPFQGADFWTLYELSWLNKYGLPQVAIGEMIIDATSDNLIESQSLKLYLNSINQTCFSSEQELRNTLITDITKCINSQVKITIHSLSQWMTVPILEFTGECIDNQSIQIDNDNYIFNSNLLVNSVEREKVKETLVSHLLKSNCPITNQPDWGSVQISYYGMRINREALLRYLISFRKYKIFHEQCVEQIYCDIMQFCLPNTLSVYVRYNRRGGLDINPWRSNISYSPVNRPLARQ

SEQ ID NO: 44593 - protein, 179 aa, Bdellovibrio bacteriovorus
  REGION 1..179: note = tr|K7Z6G1|K7Z6G1_BDEBC NADPH-dependent 7-cyano-7-deazaguanine reductase OS=Bdellovibrio bacteriovorus str. Tiberius OX=1069642 GN=queF PE=3 SV=1
MGISLKKVPMKKKNGRDSKELADFALGEIQTHYPETYAPEVLEAFDNKNPGKIAWTTFVCTEFTSLCPKTRQPDFAKIFINYIADKKMVESKSLKLYLFSFRNHGDFHEDCVQTICDDLVKLMKPKYIEVIGEFTPRGGIAIYPYANYAAKDKFFQDLYKKRMSEYAPGKYSMELSKLY

SEQ ID NO: 44594 - protein, 170 aa, Bdellovibrio bacteriovorus
  REGION 1..170: note = sp|Q6MRJ2|QUEF_BDEBA NADPH-dependent 7-cyano-7-deazaguanine reductase OS=Bdellovibrio bacteriovorus (strain ATCC 15356 / DSM 50701 / NCIB 9529 / HD100) OX=264462 GN= queF PE=3 SV=1
MKKKNGRDSKELADFALGESQTNYPETYAPEVLEAFDNKNPGKIAWTTFVCTEFTSLCPKTRQPDFAKIFINYIADKKMVESKSLKLYLFSFRNHGDFHEDCVQTICDDLVKLMKPKYIEVIGEFTPRGGIAIYPYANYAAKDKFFQELYKKRMSEYAPGKYSMELSKLY

SEQ ID NO: 44595 - protein, 179 aa, unidentified
  source 1..179: note = Bdellovibrio exovorus
  REGION 1..179: note = tr|M4VSP6|M4VSP6_9PROT NADPH-dependent 7-cyano-7-deazaguanine reductase OS=Bdellovibrio exovorus JSS OX=1184267 GN=queF PE=3 SV=1
MKNPRQTKSIARSQGRSKKELQNFSLGQSNTEYSESYNPKLLEAFDNKNPKNIAWTTFICTEFTSLCPKTNQPDFAKVFINYIAADKMVESKSLKLYLHSFRNHGDFHEDCIQTICNDLVKLMKPKYIEVIGEFTPRGGIAIFPFASYAAPAKEFQEIYKERLKSYAPGKYTTELKRVY

SEQ ID NO: 44596 - protein, 169 aa, Bdellovibrio sp.
  REGION 1..169: note = tr|A0A514XDZ6|A0A514XDZ6_9PROT NADPH-dependent 7-cyano-7-deazaguanine reductase OS=Bdellovibrio sp. ZAP7; OX = 2231053 GN=queF PE=3 SV=1
MKKTGRDSKELKNFALGEAKTDYAQTYSPESLEAFDNKNPGKIAWTTFVCTEFTSLCPKTGQPDFAKVFINYIADKKMVESKSLKLYLFSFRNHGDFHEDCIQTICDDLVKLMKPKYIEVIGEFTPRGGIAIFPYASYACKDKFYQDLWKKRLSEFAPGKYSMELSKLY

SEQ ID NO: 44597 - protein, 127 aa, Bdellovibrio sp.
  REGION 1..127: note = tr|A0A3M1C256|A0A3M1C256_9PROT NADPH-dependent 7-cyano-7-deazaguanine reductase OS=Bdellovibrio sp.; OX = 28201 GN=queF PE=3 SV=1
MEKLYGEKMIEEAQLERFENRTQVRRYTIEFTCPEFTCICPRSGFPDFATIYIKYVPDKWCVELKSLKLWINSFRDKRIFHEDVTNLILDELVNLLDPHEMEVRGDFNVRGNIKTVVTATHKKDQSS

SEQ ID NO: 44598 - protein, 139 aa, unidentified
  source 1..139: note = Bdellovibrionaceae bacterium
  REGION 1..139: note = tr|A0A2E3USW3|A0A2E3USW3_9PROT NADPH-dependent 7-cyano-7-deazaguanine reductase OS=Bdellovibrionaceae bacterium OX=2026715 GN=queF PE=3 SV=1
MIDVNPEHENLSQLGKGGTHPKRELETFPNRNPERDYVVELQTSEFTCLCPKTGQPDFADILIRYVPDEKIVESKSLKLYFWTFRDEGVFHEHFTNLLLDDLVSALNPRWCRVEVIFNARGGIGITVSAEHGTPPPSAY

SEQ ID NO: 44599 - protein, 124 aa, unidentified
  source 1..124: note = Bdellovibrionaceae bacterium
  REGION 1..124: note = tr|A0A2D6A1D7|A0A2D6A1D7_9PROT NADPH-dependent 7-cyano-7-deazaguanine reductase OS=Bdellovibrionaceae bacterium OX=2026715 GN=queF PE=3 SV=1
MSDKLYGQVAIEEAQLERFENKHKGRKYEVFFSCPEFTCVCPRSGFPDFATINIKYVPDQYCVELKSLKLYINKFRDEKVFHESVTNVILDDLVELLDPFEIEVVGDFNVRGNIKTVITARHAK

SEQ ID NO: 44600 - protein, 170 aa, unidentified
  source 1..170: note = Bdellovibrionales bacterium
  REGION 1..170: note = tr|A0A1F3SPV2|A0A1F3SPV2_9PROT NADPH-dependent 7-cyano-7-deazaguanine reductase OS=Bdellovibrionales bacterium GWA2_49_15 OX=1797384 GN=queF PE=3 SV=1
MSRSVSKTITRRKIGRSPKELKNLKLGQVTTDYPSTYSPALLESFPNRHPKSEAWTSLLCPEFTSLCPKTGQPDFAHITINYVADKKMVESKSLKLYLFSFRNHGDFHEDCIQTICNDLVKLMSPKYLEVIGEFTPRGGISIFPFASYACDDPEFQNLKAHRFYNYAPQQ

SEQ ID NO: 44601 - protein, 163 aa, unidentified
  source 1..163: note = Bdellovibrionales bacterium
  REGION 1..163: note = tr|A0A1F3VZT4|A0A1F3VZT4_9PROT NADPH-dependent 7-cyano-7-deazaguanine reductase OS=Bdellovibrionales bacterium RIFOXYB2_FULL_36_6 OX=1797394 GN=queF PE=3 SV=1
MIKKRNHKELDKLGLGSKNTIYPTKYAPSVLESVNFSGGVEDAWVSLLCNEFTSLCPKTNQPDFAKIFINYIPSQKLIESKSLKLYLFSFRNHGAFHEDCIHLICRDLFKLLKPKFIEVIGEFNPRGGIAIWPYCSQSSSSSRYKKIKAERLEDYFPGKYSKP

SEQ ID NO: 44602 - protein, 129 aa, Beggiatoa alba
  REGION 1..129: note = tr|I3CDN7|I3CDN7_9GAMM NADPH-dependent 7-cyano-7-deazaguanine reductase OS=Beggiatoa alba B18LD; OX = 395493 GN=queF PE=3 SV=1
MSIRASKILETFPNPTPSRDYTIHMRMPEFTCLCPKTGQPDFATLFLEYVPDQTCIELKSLKGYIWSYRDEGAFHEAVTNQILSDLVNACQPRFMRLRAEFNVRGGIYTQVVVEHRAPDWTPPTPVHLP

SEQ ID NO: 44603 - protein, 129 aa, unidentified
  source 1..129: note = Beggiatoa leptomitoformis
  REGION 1..129: note = tr|A0A2N9YGM6|A0A2N9YGM6_9GAMM NADPH-dependent 7-cyano-7-deazaguanine reductase OS=Beggiatoa leptomitoformis OX=288004 GN=queF PE=3 SV=1
MSIKASKILETFPNPTTDRDYVIHMRMPEFTCLCPKTGQPDFATLFLEYIPDQLCVELKSLKGYIWSYRDTGAFHEAVTNQILTDLVTACQPRFMRLRAEFNVRGGIYTDVVVEHRAPHWTPPTPVHLP

SEQ ID NO: 44604 - protein, 129 aa, Beggiatoa sp.
  REGION 1..129: note = tr|A0A1W9WWM4|A0A1W9WWM4_9GAMM NADPH-dependent 7-cyano-7-deazaguanine reductase OS=Beggiatoa sp. 4572_84; OX = 1972449 GN=queF PE=3 SV=1
MPIRPSKKLETFENPYSDRDYTIHIRIPEFTCLCPKTKQPDFATLFLDYVPDKLCIELKSLKSYIWSYRNKGAFHEAVTNKILNDFVHTSAPRFMRLRAEFNVRGGIYTTIVAQHLASDWTPPPLVHLP

SEQ ID NO: 44605 - protein, 129 aa, Beggiatoa sp.
  REGION 1..129: note = tr|A7C007|A7C007_9GAMM NADPH-dependent 7-cyano-7-deazaguanine reductase OS=Beggiatoa sp. PS; OX = 422289 GN=queF PE=3 SV=1
MPIQPNKTFETFDNPTNERDYTIHIRIPEFTCLCPKTGQPDFATLFLDYVPFELCIELKSLKSYIWSYRNEGAFHEAVTNQILNDLVKACAPRFMRLRTEFNVRGGIYTTVVAEHIAPDWTPPPLIHLP

SEQ ID NO: 44606 - protein, 152 aa, Beijerinckia indica
  REGION 1..152: note = tr|B2IKR1|B2IKR1_BEII9 NADPH-dependent 7-cyano-7-deazaguanine reductase OS=Beijerinckia indica subsp. indica (strain ATCC 9039 / DSM 1715 / NCIB 8712); OX = 395963 GN=q ueF PE=3 SV=1
MSSFSDAPLLGRAVALPASPEEAKLERVANPHPGTSYVARFTAPEFTSLCPVTGQPDFAHIVIDYVPGDWLVESKSLKLYLGAFRNHGAFHEDCTIRIGKDLVTLLSPLWFRIGGYWYPRGGIPIDVFWQIGELPAGTWVPDQGVAPYRGRG

SEQ ID NO: 44607 - protein, 99 aa, Beijerinckia indica
  REGION 1..99: note = tr|B2IKQ9|B2IKQ9_BEII9 NADPH-dependent 7-cyano-7-deazaguanine reductase OS=Beijerinckia indica subsp. indica (strain ATCC 9039 / DSM 1715 / NCIB 8712); OX = 395963 GN=q ueF PE=3 SV=1
MDAGFVLFVIDYVPGDWLVESKSLKLYLGAFRNHGAFHEDCTIRIGKDLVTLLSPPWFRIGGYWYPRGGIPIDVFWQIGELPAGTWVPDQGVAPYRGRG

SEQ ID NO: 44608 - protein, 163 aa, Beijerinckia sp.
  REGION 1..163: note = tr|A0A1H4LY98|A0A1H4LY98_9RHIZ NADPH-dependent 7-cyano-7-deazaguanine reductase OS=Beijerinckia sp. 28-YEA-48 OX=1882748 GN=queF PE=3 SV=1
MAKTSKSPARKSAPALSLGLLGRPATMPDHPDAAILERVPNPQAGEIYVTRFTAPEFTSLCPVTSQPDFAHLVIDFVPGKWLVESKSLKFYLGSFRNHGAFHEDCTVRIGKDIATLLKPRWLRIGGYWYPRGGMPIDVFWQTGKLPAGTWAPDQGVPTYRGRG

SEQ ID NO: 44609 - protein, 153 aa, unidentified
  source 1..153: note = Beijerinckiaceae bacterium
  REGION 1..153: note = tr|A0A539CWQ3|A0A539CWQ3_9RHIZ NADPH-dependent 7-cyano-7-deazaguanine reductase OS=Beijerinckiaceae bacterium OX=1978229 GN=queF PE=3 SV=1
MVKVRTGTSLLGRAVEAPRTRDEATLERVPNPHPDTNYIARFTAPEFTALCPVTGQPDFAILVIDYLPGAWLIESKSLKLYLTSFRNHGAFHEDCTLRIGKDLAACLEPRWLRIGGYWYPRGGIPIDVFWATGELPEGIWVPDQAVPPYRGRG

SEQ ID NO: 44610 - protein, 150 aa, unidentified
  source 1..150: note = Beijerinckiaceae bacterium
  REGION 1..150: note = tr|A0A522GXK8|A0A522GXK8_9RHIZ NADPH-dependent 7-cyano-7-deazaguanine reductase OS=Beijerinckiaceae bacterium OX=1978229 GN=queF PE=3 SV=1
MTPPEQPLLGRPTAIPASPDEAQLDRVANPHPDANYIARFTAPEFTSLCPVTGQPDFAHIVIDYLPEAWLVESKSLKLYLASFRNHGAFHEDCTLRIGKDLVALLAPRWFRIGAYFYPRGGMPIDVFWQAGALPEGVWAPDQGVPPYRGR

SEQ ID NO: 44611 - protein, 156 aa, Belnapia rosea
  REGION 1..156: note = tr|A0A1G6KJG0|A0A1G6KJG0_9PROT NADPH-dependent 7-cyano-7-deazaguanine reductase OS=Belnapia rosea; OX = 938405 GN=queF PE=3 SV=1
MAEATTDTTGLTLLGRPAGLPASPEEARLERVPNPHPGTRYCVRFAAPEFTSLCPLTGQPDFAHLVIDYIPGEWLVESKSLKLYLGSFRNHGAFHEACTVAIARRLVDELSPEWLRIGGYWYPRGGIPIDIFYATGPVPEGVWVPDQGVPGYRGRG

SEQ ID NO: 44612 - protein, 157 aa, Bergeriella denitrificans
  REGION 1..157: note = tr|A0A378UI46|A0A378UI46_BERDE NADPH-dependent 7-cyano-7-deazaguanine reductase OS=Bergeriella denitrificans OX=494 GN=queF PE=3 SV=1
MSRNQQELEGITLLGNQNTHYPDNYAPGVLEAFDNKHPGNDYFVTFICPEFTSLCPMTGQPDFATIYIRYIPDVKMVESKSLKLYLFSFRNHGDFHEDCVNIIMKDLIALMNPKYIEVYGDFTPRGGIAIHPFANYGRKDTEFEALARKRLFEHDMQ

SEQ ID NO: 44613 - protein, 276 aa, Bermanella marisrubri
  REGION 1..276: note = tr|Q1N6F8|Q1N6F8_9GAMM NADPH-dependent 7-cyano-7-deazaguanine reductase OS=Bermanella marisrubri; OX = 207949 GN=queF PE=3 SV=1
MKDDILLGKETEYKSEYDQSLIYPIERAGNRAKLEGIDDSLNNGLGFYGYDLWTGYEISWLNQKGKPQVAIAEFIIPCDSSNIVESKSFKLYLNSFNNTRFDDADEVQALMQKDLSQGFGADVDVRFYSVEQYPLAQSLTGECIDDEDITVKDYAPTPSLLSFSDESTQEILISHLLKSNCPVTNQPDWATVVIDYKGSKIDRAALLAYIISYRNHDDFHEHCVEQMFTDLWRLGAFDSLTVTARYTRRGGLDINPMRSSRSAISVKDMVGRLPRQ

SEQ ID NO: 44614 - protein, 277 aa, Bermanella sp.
  REGION 1..277: note = tr|A0A1Y5DI07|A0A1Y5DI07_9GAMM NADPH-dependent 7-cyano-7-deazaguanine reductase OS=Bermanella sp. 47_1433_sub80_T6 OX=1856278 GN=queF PE=3 SV=1
MNKDDLLLGKETQYAFTYDNSLIFPIERTGNRGRLNMPVKKVHGELPFFGQDVWTGYELSWLNLKGKPQVAIAEFVIPADSTSIVESKSFKLYLNSFNNTRLESIEQVKTRLQQDLSAGFGAQIEVTLFTVDAFPLVNAKLGENIDDLDIEVKDFEPNASLLQVNPAHLTSQTLNSHLLKSNCPVTGQPDWATLVVQYKGTEIDRASLLKYIISYRNHDDFHEHCVEQIFCDLCQAGDFEELVVTARYTRRGGLDINPTRSLKPLMEDDVVGRLARQ

SEQ ID NO: 44615 - protein, 278 aa, Bermanella sp.
  REGION 1..278: note = tr|A0A2D4S3S1|A0A2D4S3S1_9GAMM NADPH-dependent 7-cyano-7-deazaguanine reductase OS=Bermanella sp.; OX = 2024825 GN=queF PE=3 SV=1
MSHDDKELLLGKHTEYVFEYDKSLIFPISREQNRAKLPMPSEKVNGVLPFYGFDIWTGYEVSWLNLKGKPQVAIVEFVIPADSSHIVESKSFKLYLNSFNQTRLANQDELHQRLQSDLSEGFGAPIEVRIFSVMNFPIANEDLGQGIDDLDIEVSDYSPNAGLLSVSDIQVEETLHSHLLKSNCPVTGQPDWATVIIRYDGMKINREALLQYIISYRNHDDFHEHCVEQIFCDLLSLGGFNSLTVTARYTRRGGLDINPTRSLAPISTNQGVGRLARQ

SEQ ID NO: 44616 - protein, 275 aa, unidentified
  source 1..275: note = Unknown
  REGION 1..275: note = tr|M1SR42|M1SR42_9PROT NADPH-dependent 7-cyano-7-deazaguanine reductase OS=beta proteobacterium CB OX=543913 GN=queF PE=3 SV=1
MSTLPLGKATEYPAQYDPSLLFPIPRSENRLKLDIKPNQALPFVGVDIWNAFELGWLNKKGKPQIALAEFQIPADSPNMIESKSFKLYLNSLNSARFEDEAEVRERLITDLSAVAGSKISTRINPTEAVAKKGMQEMSGVLMDRLDIEIDPSLSADPTLLEVNESFGPIEQCLVSHLLKSNCPVTGQPDWASVQIRYQGRPILEEGLLRYLIGFRQKGEFHEHCVETIFTDIKRQCKPEKLSVYARYTRRGGLDINPFRTDHNAPWPDNVRHARQ

SEQ ID NO: 44617 - protein, 296 aa, unidentified
  source 1..296: note = Unknown
  REGION 1..296: note = tr|A0A2T0XJX8|A0A2T0XJX8_9PROT NADPH-dependent 7-cyano-7-deazaguanine reductase OS=beta proteobacterium MWH-P2sevCIIIb OX=323426 GN=queF PE=3 SV=1
MTHFSETSSPNIPLDVPLGKSVSYPSGYSASLLFPIARAEARRSLGLDLSSPLPFTGWDLWNAYELSWLNAKGLPKVALLRIKVAITSPNIIESKSFKLYLNSFNQTRFETVHQVFDRLRLDLQAILGGDVDIELIGPDQFAGEQIKEFDGINLDKLDVEIDTYEPNASLLKLASAAVNAASGLNDRTVQNEKVFSRLLKSNCPVTDQPDWACIEIEYSGKAIDHASLLKYIVSYRLHNGFHEHCVEKIFMDLMSSCRPKSLSVYARYTRRGGLDINPWRATPDMSEPNICRSARQ

SEQ ID NO: 44618 - protein, 139 aa, unidentified
  source 1..139: note = Betaproteobacteria bacterium
  REGION 1..139: note = tr|A0A1F4BRH3|A0A1F4BRH3_9PROT NADPH-dependent 7-cyano-7-deazaguanine reductase OS=Betaproteobacteria bacterium RIFCSPLOWO2_12_61_14 OX=1797494 GN=queF PE=3 SV=1
MTTQPSKILETFPNPNPRRDYHIHMEIPEFTCLCPKTGQPDFATLILDYIADKQCVELKSLKLYIWSFRNEGHFHEDVTNRILDDLVAATQPRFMRLTAKFYVRGGIFTNVVAEHRRQGWQPAPVVDLSRFDAQSNTRG

SEQ ID NO: 44619 - protein, 153 aa, unidentified
  source 1..153: note = Betaproteobacteria bacterium
  REGION 1..153: note = tr|A0A2U1RX23|A0A2U1RX23_9PROT NADPH-dependent 7-cyano-7-deazaguanine reductase OS=Betaproteobacteria bacterium OX=1891241 GN=queF PE=3 SV=1
MPKKSPARSPAAGLKALGAGPRLAPSRLLETFPNPNPGRDYAIRMEIPEFTCLCPKTGQPDFATLRLEYVPDAKCVELKSLKLYVWSFRNEGKFHEAVTNEILDDLVAATRPRFMRLTAEFYVRGGIYTTVEADYRMKGWSPAERVDLGPWEE

SEQ ID NO: 44620 - protein, 166 aa, unidentified
  source 1..166: note = Bhargavaea beijingensis
  REGION 1..166: note = tr|A0A1G6Y912|A0A1G6Y912_9BACL NADPH-dependent 7-cyano-7-deazaguanine reductase OS=Bhargavaea beijingensis OX=426756 GN=queF PE=3 SV=1
MSGRSHEQGLNDLTLLGNQNTQYSTEYAPEVLEAVDNLHTNRDYFVKFNCPEFTSLCPITGQPDFATMYISFIPDKKLVESKSLKLYLFSFRNHGDFHEDCVNIIMNDLIKLLDPRYIEVWGKFTPRGGISIDPWCNYGRPGTKYEEIANYRLMNHDMNPETIDNR

SEQ ID NO: 44621 - protein, 166 aa, Bhargavaea cecembensis
  REGION 1..166: note = tr|A0A161SPS0|A0A161SPS0_9BACL NADPH-dependent 7-cyano-7-deazaguanine reductase OS=Bhargavaea cecembensis; OX = 394098 GN=queF PE=3 SV=1
MSGRSQEQGLKDLTLLGNQNTQYSTEYAPEVLEAVDNLHTNRDYFVKFNCPEFTSLCPITGQPDFATMYISFIPDKKLVESKSLKLYLFSFRNHGDFHEDCVNIIMNDLIKLLDPRYIEVWGKFTPRGGISIDPWCNYGRPGTKYEEIADYRLMNHDMNPETIDNR

SEQ ID NO: 44622 - protein, 166 aa, Bhargavaea cecembensis
  REGION 1..166: note = tr|M7NIW8|M7NIW8_9BACL NADPH-dependent 7-cyano-7-deazaguanine reductase OS=Bhargavaea cecembensis DSE10 OX=1235279 GN=queF PE=3 SV=1
MSGRSQEQGLNDLTLLGNQNTQYSTEYAPEVLESVDNLHTNRDYFVKFNCPEFTSLCPITGQPDFATMYISFIPDKKLVESKSLKLYLFSFRNHGDFHEDCVNIIMNDLIKLLDPRYIEVWGKFTPRGGISIDPWCNYGRPGTKYEEIASYRLMNHDMNPETITNR

SEQ ID NO: 44623 - protein, 166 aa, unidentified
  source 1..166: note = Bhargavaea ginsengi
  REGION 1..166: note = tr|A0A1H6Z2B1|A0A1H6Z2B1_9BACL NADPH-dependent 7-cyano-7-deazaguanine reductase OS=Bhargavaea ginsengi; OX = 426757 GN=queF PE=3 SV=1
MSGRSQEQGLKDLTLLGNQNTQYSTEYAPEVLEAVDNLHSNRDYFVKFNCPEFTSLCPITGQPDFATMYISFIPDKKLVESKSLKLYLFSFRNHGDFHEDCVNIIMNDLIKLLDPRYIEVWGKFTPRGGISIDPWCNYGRPGTKYEEIASYRLMNHDMNPETITNR

SEQ ID NO: 44624 - protein, 280 aa, Bibersteinia trehalosi
  REGION 1..280: note = tr|A0A426FJ01|A0A426FJ01_BIBTR NADPH-dependent 7-cyano-7-deazaguanine reductase OS=Bibersteinia trehalosi; OX = 47735 GN=queF PE=3 SV=1
MNYNDKSLSALKLGQKTEYKNQYDATLLQPVPRRLNRDGLGITEQQPFTQGADIWTAYELSWLNHKGVPQVAIADIWLDCQSENLIESKSFKLYLNSFNQTQFADWESVQRTIQSDLSACASGQVLVKIRKLSEFSAQPISDFQGELLDELDIEIDSYAFSNCYLENVSEGERVEETLVSHLLKSNCLITSQPDWGSVQIHYVGKKLNREKVLRYLISFREHNEFHEQCVERIFCDLMQFGEIEKLTVYARYTRRGGLDINPFRSNFENVPQFNYRMARQ

SEQ ID NO: 44625 - protein, 280 aa, Bibersteinia trehalosi
  REGION 1..280: note = tr|A0A4V7I9C6|A0A4V7I9C6_BIBTR NADPH-dependent 7-cyano-7-deazaguanine reductase OS=Bibersteinia trehalosi USDA-ARS-USMARC-188 OX=1263829 GN=queF PE=3 SV=1
MNYNDKSLSALKLGQKTEYKNQYDATLLQPVPRRLNRDGLGITEQQPFTQGADIWTAYELSWLNHKGVPQVAIADIWLDCQSENLIESKSFKLYLNSFNQTKFSDWDSVQRTIQSDLSACASGQVLVKIRKLSEFSAQPISDFQGELLDELDIEIDSYAFSNCYLENVSEGERVEETLVSHLLKSNCLITSQPDWGSVQIHYVGKKLNREKVLRYLISFREHNEFHEQCVERIFCDLMQFGEIEKLTVYARYTRRGGLDINPFRSNFENVPQFNYRMARQ

SEQ ID NO: 44626 - protein, 170 aa, Bilophila sp.
  REGION 1..170: note = tr|G1V4B5|G1V4B5_9DELT NADPH-dependent 7-cyano-7-deazaguanine reductase OS=Bilophila sp. 4_1_30; OX = 693988 GN=queF PE=3 SV=1
MTMTNGGDQTAQLTVLGTGRLPQPEGGPSVSLLEVFPNRFPHRPYVVSMAFPEYTSLCPVTGQPDFGTIVVEFIPDQKCVESKSFKLYMFAYRNHQSFMESITNTILEDFVEALDPMWCRVKGLFSPRGATYLHVFAEHYKKLDDPAKAEEVRQAVADWKREAAPHTWDK

SEQ ID NO: 44627 - protein, 170 aa, Bilophila wadsworthia
  REGION 1..170: note = tr|E5Y3W8|E5Y3W8_BILWA NADPH-dependent 7-cyano-7-deazaguanine reductase OS=Bilophila wadsworthia 3_1_6 OX=563192 GN=queF PE=3 SV=1
MAMTNGGDQTAQLTVLGTGRLPQPEGGPSASLLEVFPNRFPHRPYVVSMAFPEYTSLCPVTGQPDFGTIVVEFIPDQKCVESKSFKLYMFAYRNHQSFMESITNTILEDFVEALDPMWCRVKGLFSPRGATYLHVFAEHYKKLDDPAKAEEVRQAVADWKREAAPHTWDK

SEQ ID NO: 44628 - protein, 282 aa, Biostraticola sp.
  REGION 1..282: note = tr|A0A4U2UNC0|A0A4U2UNC0_9ENTR NADPH-dependent 7-cyano-7-deazaguanine reductase OS=Biostraticola sp. BGMRC 2031 OX=2575567 GN=queF PE=3 SV=1
MSVNEKHPVLRELPLGRPADYRDRYDPSLLRGVPRALNREPLGLDAATPGFFGADIWTLYELSWLNEKGMPQVAVGEMILDAGSRNLPESKSFKLYLNSFNQTRFADWAQVRDTVINDLSRCAEGDVDLTLFRLNEFTGAVIADLAGECVDEQDIQFDDYTFGNHWLSQAADPAIEVDETLVSHVLKSNCLITHQPDWGSIQITYRGPRIDREALLRYLVSFRQHNEFHEQCVERIFTDIMRCCHPRQLTVYARYTRRGGLDINPWRSNTPFTPSKSRLARQ

SEQ ID NO: 44629 - protein, 282 aa, Biostraticola tofi
  REGION 1..282: note = tr|A0A4R3YJI0|A0A4R3YJI0_9ENTR NADPH-dependent 7-cyano-7-deazaguanine reductase OS=Biostraticola tofi; OX = 466109 GN=queF PE=3 SV=1
MSNYQDSQSLQSLTLGKPTAYQDQYDASLLQAVPRSLNREPLGLTPTSLPFHGADIWTLYELSWLNANGLPQVAVGEISLNADSKSLIESKSFKLYLNSFNQTRFDNWDRVQGTLVRDLSRCAQGDVSVSLCALNALDNQPIAAFAGECIDEQDIRIDDYTFNPAYLEYAAEEGRPVNEVLVSHLLKSNCLITHQPDWGSVQISYCGPRINREALLRYLVSFRHHNEFHEQCVERIFNDIMRFCHPEQLSVYARYTRRGGLDINPWRSNASFIPSTGRLARQ

SEQ ID NO: 44630 - protein, 280 aa, Bisgaardia hudsonensis
  REGION 1..280: note = tr|A0A4R2N1A1|A0A4R2N1A1_9PAST NADPH-dependent 7-cyano-7-deazaguanine reductase OS=Bisgaardia hudsonensis; OX = 109472 GN=queF PE=3 SV=1
MNYDDNSLKSLKLGQKTEYATNYDRTLLQAVPRKLNRDTLGVTTSQPFTIGSDIWTAYEVSWLNNKGLPQVAIADITIDFRSENLIESKSFKLYLNSFNQTRFTNLQEIESIIKEDLTNCAKGKVKVALNTLDKYKNQTIATLQGFCIDNQDIEINDYTFNTDILKNCIDSEDVIEETLISHLLKSNCLITNQPDWGSIQIHYIGKKINQEKLLRYIVSFRQHNEFHEQCVERIFCDLMRFAKPEKLTVYARYTRRGGLDINPFRSNFEEIPNNLRLARQ

SEQ ID NO: 44631 - protein, 113 aa, unidentified
  source 1..113: note = Blastocatellia bacterium
  REGION 1..113: note = tr|A0A317HQW4|A0A317HQW4_9BACT NADPH-dependent 7-cyano-7-deazaguanine reductase OS=Blastocatellia bacterium OX=2052146 GN=queF PE=3 SV=1
MSSSAIETFPNPRPERDFEIAIRCPEFTSLCPKTGLPDFGEIRITYVPDALCVELKSLKYYMIGFRNRGIFYEHVTNEILDDLVAAIRPRRITVVGDFSVRGGIKTVVTANYP

SEQ ID NO: 44632 - protein, 140 aa, unidentified
  source 1..140: note = Blastocatellia bacterium
  REGION 1..140: note = tr|A0A3B9LP44|A0A3B9LP44_9BACT NADPH-dependent 7-cyano-7-deazaguanine reductase OS=Blastocatellia bacterium OX=2052146 GN=queF PE=3 SV=1
MAIGEDKLAPVNQQGLDVRSTPREEMGLFPLDTFAYEFPGREVKIDFEITEFTAICPFSDFPDFATIRLQYVPNERCVELKSLKLYINSFRNVKIFHEHVINVILEDFVRAGDPLSVEIEGDFHVRGNIKTVVRASYKRQ

SEQ ID NO: 44633 - protein, 149 aa, Blastochloris sp.
  REGION 1..149: note = tr|A0A348G0W3|A0A348G0W3_9RHIZ NADPH-dependent 7-cyano-7-deazaguanine reductase OS=Blastochloris sp. GI; OX = 2233851 GN=queF PE=3 SV=1
MTDESLQLGRHVPLPASPDRALLERVPNPHSDTNYVARFTCPEFTSLCPVTGQPDFALLVIDYVPGDWLVESKSLKLYLASFRNHGAFHEDCTIAVGKRLVGLLEPRWLRIGGYWFPRGGMPIDIFWQTAAPPAGLFIPDQGMPPYRGR

SEQ ID NO: 44634 - protein, 150 aa, Blastochloris viridis
  REGION 1..150: note = tr|A0A0H5BQ60|A0A0H5BQ60_BLAVI NADPH-dependent 7-cyano-7-deazaguanine reductase OS=Blastochloris viridis; OX = 1079 GN=queF PE=3 SV=1
MTTETHLQLGRHVALPASPDQALLERVPNPHADTNYVARFTCPEFTSLCPVTGQPDFALLVIDYVPGDWLVESKSLKLYLASFRNHGAFHEDCTIAVGKKLASLLEPRWLRIGGYWFPRGGMPIDIFWQTAAPPQGLFIPDQGVPPYRGR

SEQ ID NO: 44635 - protein, 152 aa, unidentified
  source 1..152: note = Blastomonas fulva
  REGION 1..152: note = tr|A0A222X469|A0A222X469_9SPHN NADPH-dependent 7-cyano-7-deazaguanine reductase OS=Blastomonas fulva; OX = 1550728 GN=queF PE=3 SV=1
MSDQPQTRFLGKDSPMPTSPETAVLDYVPNPRPGKPYLVRFAVPEFTSLCPVTGQPDFAHLVIDYAPDKVMVESKSLKLFLGSFRNHQAFHEDCTVGIGERLFDEMQPHWLRIGGYWYPRGGIPIDVFWQSGEPPAGLWLPPQEVPGYRGRG

SEQ ID NO: 44636 - protein, 137 aa, Blastomonas natatoria
  REGION 1..137: note = tr|A0A2V3URT8|A0A2V3URT8_9SPHN NADPH-dependent 7-cyano-7-deazaguanine reductase OS=Blastomonas natatoria; OX = 34015 GN=queF PE=3 SV=1
MPTSPEEAVLDYVPNPRPGRPYLVRFTAPEFTSLCPVTGQPDFAHLVIDYAPDRVMVESKSLKLFLGSFRNHQAFHEDCTVGIAERLHEEMQPHWLRIGGYWYPRGGIPIDVFWQSGEPPAGLWLPPQDVPGYRGRG

SEQ ID NO: 44637 - protein, 137 aa, Blastomonas sp.
  REGION 1..137: note = tr|W9BWT6|W9BWT6_9SPHN NADPH-dependent 7-cyano-7-deazaguanine reductase OS=Blastomonas sp. CACIA14H2 OX=1419876 GN=queF PE=3 SV=1
MPTSPEAAVLDYVPNPRPGRPYLVRFTAPEFTSLCPVTGQPDFAHLVIDYAPDKVMVESKSLKLFLGSFRNHQAFHEDCTVGIAERMFEEMQPHWLRIGGYWYPRGGIPIDVFWQSGEPPAGLWLPPQDVPGYRGRG

SEQ ID NO: 44638 - protein, 152 aa, Blastomonas sp.
  REGION 1..152: note = tr|A0A2D6H6Z0|A0A2D6H6Z0_9SPHN NADPH-dependent 7-cyano-7-deazaguanine reductase OS=Blastomonas sp.; OX = 1909299 GN=queF PE=3 SV=1
MTDQPQTRFLGKDSPMPTSPEEAVLDYVPNPRPGRPYLVRFTVPEFTSLCPVTGQPDFAHLVIDYAPDRVMVESKSLKLFLGSFRNHQAFHEDCTVGIAERLFEEMQPHWLRIGGYWYPRGGIPIDVFWQSGEPPQGLWLPPQDVPGYRGRG

SEQ ID NO: 44639 - protein, 151 aa, unidentified
  source 1..151: note = Blastopirellula cremea
  REGION 1..151: note = tr|A0A368KUP5|A0A368KUP5_9PLAN NADPH-dependent 7-cyano-7-deazaguanine reductase OS=Blastopirellula cremea; OX = 1031537 GN=queF PE=3 SV=1
MSGLAISARTPQNNSLPSSKEFRTVPEDFRAILETFENQHPQRDYEIEISVPEFTSVCPKTGQPDFGTITISYIPESLCVELKSLKMYMQAFRNQGIFYENVTNEILNDLVAAMQPRWMQVRAEFTPRGGISSTITVEHYNETPPDELQVI

SEQ ID NO: 44640 - protein, 128 aa, Blastopirellula marina
  REGION 1..128: note = tr|A3ZZE3|A3ZZE3_9PLAN NADPH-dependent 7-cyano-7-deazaguanine reductase OS=Blastopirellula marina DSM 3645 OX=314230 GN=queF PE=3 SV=1
MATQFRDILETFENQNPDRDYNIEIVCPEFTSVCPKTGQPDFGTLIFNYIPEEKCVELKSLKMYLQAFRNEGIFYENVTNRILDDLVAVLEPRWMHLEAKFTPRGGISTNVTVEHYAETPEEDEEEEA

SEQ ID NO: 44641 - protein, 146 aa, Blastopirellula marina
  REGION 1..146: note = tr|A0A2S8FW47|A0A2S8FW47_9PLAN NADPH-dependent 7-cyano-7-deazaguanine reductase OS=Blastopirellula marina; OX = 124 GN=queF PE=3 SV=1
MRTGTAQNNSLPSSKELRTVPEDFRAILETFENQHPQRDYEIEISVPEFTSVCPKTGQPDFGTITITYIPESLCVELKSLKMYMQAFRNQGIFYENVTNEILNDLVSAMQPRWMQVRAEFTPRGGISSTITVEHYNETPPDELTVI

SEQ ID NO: 44642 - protein, 121 aa, Blastopirellula sp.
  REGION 1..121: note = tr|A0A2G2JP23|A0A2G2JP23_9PLAN NADPH-dependent 7-cyano-7-deazaguanine reductase OS=Blastopirellula sp.; OX = 2024826 GN=queF PE=3 SV=1
MAEEFRDLLETFENQHPGRDYTIEIDCPEFTSVCPKTGQPDFGSLTFTYIPDKLCVELKSLKMYLQAFRNEGIFYENVTNRIHDDLVSALNPRWFRVVADFTARGGISTSITVEHTAETDE

SEQ ID NO: 44643 - protein, 122 aa, Blastopirellula sp.
  REGION 1..122: note = tr|A0A2E0B0E8|A0A2E0B0E8_9PLAN NADPH-dependent 7-cyano-7-deazaguanine reductase OS=Blastopirellula sp.; OX = 2024826 GN=queF PE=3 SV=1
MSSNLLETFENPHPQRDYVIEHVAPEFTSVCPKTSHPDFATIVLSYVPDTLCVELKSYKLYLQSFRNQGIFYEDVTNCILNDLVACLRPRSMTMVAKFSARGGISSTITAEYSATAAGEVTG

SEQ ID NO: 44644 - protein, 188 aa, Blautia hydrogenotrophica
  REGION 1..188: note = tr|R5C7X0|R5C7X0_9FIRM NADPH-dependent 7-cyano-7-deazaguanine reductase OS=Blautia hydrogenotrophica CAG:147 OX=1263061 GN=queF PE=3 SV=1
MAACAGEYIQMTRQMKNEKGERSMSGREKAELDGVSLLGNKKVSYPTDYAPQMLETFPNKHPENDYFVKFNCPEFTSLCPMTGQPDFATIYISYVPGERMVESKSLKLYLFSFRNHGDFHEDCVNIIMKDLIRLMDPKYIEVWGKFTPRGGISIDPYCNYGKPGTCWEKVAFERLTHHDLYPEKVDNR

SEQ ID NO: 44645 - protein, 165 aa, Blautia hydrogenotrophica
  REGION 1..165: note = tr|A0A173T7H4|A0A173T7H4_9FIRM NADPH-dependent 7-cyano-7-deazaguanine reductase OS=Blautia hydrogenotrophica OX=53443 GN=queF PE=3 SV=1
MSGREKAELDGVSLLGNKKVSYPTDYAPQMLETFPNKHPENDYFVKFNCPEFTSLCPMTGQPDFATIYISYVPGERMVESKSLKLYLFSFRNHGDFHEDCVNIIMKDLIRLMDPKYIEVWGKFTPRGGISIDPYCNYGKPGTCWEKVAFERLTHHDLYPEKVDNR

SEQ ID NO: 44646 - protein, 164 aa, Blautia luti
  REGION 1..164: note = tr|A0A564VVN3|A0A564VVN3_9FIRM NADPH-dependent 7-cyano-7-deazaguanine reductase OS=Blautia luti OX=89014; GN = queF PE=3 SV=1
MSRENLEKEGITLLGNQKVKYPDNYAPEVLETFLNKHPDNDYFVKFNCPEFTSLCPITGQPDFATITISYVPGEKMVESKSLKLYLFSFRNHGDFHEDCVNIIMKDLIRLMDPKYIEVWGKFTPRGGISIDPYCNYGKAGTRWEEIAWKRLTEHDMYPEKIDNR

SEQ ID NO: 44647 - protein, 164 aa, unidentified; identical to SEQ ID NO: 44646
  source 1..164: note = Blautia obeum
  REGION 1..164: note = tr|A0A367FV83|A0A367FV83_9FIRM NADPH-dependent 7-cyano-7-deazaguanine reductase OS=Blautia obeum OX=40520; GN = queF PE=3 SV=1

SEQ ID NO: 44648 - protein, 165 aa, unidentified
  source 1..165: note = Blautia obeum
  REGION 1..165: note = tr|A0A411ZLH0|A0A411ZLH0_9FIRM NADPH-dependent 7-cyano-7-deazaguanine reductase OS=Blautia obeum OX=40520; GN = queF PE=3 SV=1
MTGRSKEETADITLLGNQKTQYPCDYAPEMLETFENKHQGNDYFVKFNCPEFTSLCPITGQPDFATVTISYVPNIKMVESKSLKLYLFSFRNHGDFHEDCMNIIMKDLIKLMDPKYIEVWGKFTPRGGISIDPYCNYGKPGTKWEEIAFNRMANHDMYPEKVDNR

SEQ ID NO: 44649 - protein, 160 aa, Blautia sp.
  REGION 1..160: note = tr|A0A416NSU6|A0A416NSU6_9FIRM NADPH-dependent 7-cyano-7-deazaguanine reductase OS=Blautia sp. AF22-5LB; OX = 2292964 GN=queF PE=3 SV=1
MREKENLTLLGNQQTEYSMDYNPSVLEAFQNKHPENDYFVKFNCPEFTSLCPITGQPDFATITISYVPDERLVESKSLKLYLFSFRNHGDFHEDVINIIMKDLVSLLEPKYIEVWGKFLPRGGLSIDPYCNYGKPGTDWEKVAWNRMSNHDMFPEKVDNR

SEQ ID NO: 44650 - protein, 164 aa, Blautia sp.; identical to SEQ ID NO: 44646
  REGION 1..164: note = tr|A0A1G5GIX4|A0A1G5GIX4_9FIRM NADPH-dependent 7-cyano-7-deazaguanine reductase OS=Blautia sp. SF-50; OX = 1520805 GN=queF PE=3 SV=1

SEQ ID NO: 44651 - protein, 277 aa, unidentified
  source 1..277: note = Unknown
  REGION 1..277: note = tr|A0A1U9VJT1|A0A1U9VJT1_9RALS NADPH-dependent 7-cyano-7-deazaguanine reductase OS=blood disease bacterium A2-HR MARDI OX=1944648 GN=queF PE=3 SV=1
MSHPEHSPLGKVSAYKTQYDPSLLFPIPRQAKRDEIGLAAGSALPFFGVDLWNLYELSWLNLKGKPQVAIGTVIVPADSPNIVESKSFKLYLNSFNQTKVASSEALQQLIHHDLSEACGAPVQVRIVPREEFGRQKMGELEGLSLDRLDIETDVYQPTPGLLHADLDESPVEEVLVSHLLKSNCLVTGQPDWGSVQIRYVGAPINQEGLLKYLISFREHNEFHEQCVERIFMDIQRQCQPVKLAVYARYTRRGGLDINPFRTNFNTPWPDNLRNARQ

SEQ ID NO: 44652 - protein, 277 aa, unidentified; identical to SEQ ID NO: 44651
  source 1..277: note = Unknown
  REGION 1..277: note = tr|G2ZQ15|G2ZQ15_9RALS NADPH-dependent 7-cyano-7-deazaguanine reductase OS=blood disease bacterium R229 OX=741978 GN=queF PE=3 SV=1

SEQ ID NO: 44653 - protein, 162 aa, unidentified
  source 1..162: note = Bombella intestini
  REGION 1..162: note = tr|A0A1S8GQP3|A0A1S8GQP3_9PROT NADPH-dependent 7-cyano-7-deazaguanine reductase OS=Bombella intestini; OX = 1539051 GN=queF PE=3 SV=1
MTDHTPKGPTAPGTEKLNQLGRQTIQPESPDVAELERVPAPHKGRRYVVRFTAPEFTSLCPVTGQPDFAHIVIDYIPRDWIVESKSLKLYLTSFRNHGAFHEDCSVTIATRLVELLDPEWLRIGAYWYPRGGMPIDVFWQTGPAPADVWIPAQDVPGYRGRG

SEQ ID NO: 44654 - protein, 273 aa, unidentified
  source 1..273: note = Bordetella ansorpii
  REGION 1..273: note = tr|A0A157RJ59|A0A157RJ59_9BORD NADPH-dependent 7-cyano-7-deazaguanine reductase OS=Bordetella ansorpii; OX = 288768 GN=queF PE=3 SV=1
MSLSDAPLGQTVSYPSRYDPSVLFPIARAQNRASLPLAEPPAWTGADIWTAYELSWLTPKGKPRVAMATFTVPADSPNLIESKSFKLYLNSFNQTRLDNAQALRDRLERDLSAAAGAPVTLEMMLPQHFARQQIAELDGIDLDKLDVEIDAYQPAPELLRCQDGPVVEETLCSRLLKSNCPVTGQPDWGSVQIRYRGRPIDREALLKYIVSFREHAGFHEHCVETIYADLMRACAPEELTVYARYTRRGGLDINPWRSNAAAPVIAESRTARQ

SEQ ID NO: 44655 - protein, 273 aa, unidentified
  source 1..273: note = Bordetella ansorpii
  REGION 1..273: note = tr|A0A157SPT5|A0A157SPT5_9BORD NADPH-dependent 7-cyano-7-deazaguanine reductase OS=Bordetella ansorpii; OX = 288768 GN=queF PE=3 SV=1
MSLSDAPLGQTVSYPSRYDPSVLFPIARAQNRASLQLAEPPAWTGADIWTAYELSWLTPKGKPRVAMATFTVPADSPNLIESKSFKLYLNSFNQTRLDNAQALRDRLERDLSAAAGAPVTLEMMLPQHFARQQIAELEGIDLDKLDVEIDTYQPAPELLRCQDGPVVEETLCSRLLKSNCPVTGQPDWGSVQIRYRGRPIDRESLLKYIVSFREHAGFHEHCVETIYTDLMRACAPEALTVYARYTRRGGLDINPWRSNAATPVIAESRTARQ

SEQ ID NO: 44656 - protein, 273 aa, Bordetella avium
  REGION 1..273: note = sp|Q2KXN2|QUEF_BORA1 NADPH-dependent 7-cyano-7-deazaguanine reductase OS=Bordetella avium (strain 197N) OX=360910 GN=queF PE=3 SV=1
MPLSDAPLGHNVAYPSEYNAALLFPIARAENRAGLGLDGALPFDGTDIWNAYELSWLDAKGKPRIAMASFRIPASSPNIIESKSFKLYLNSFNQTRLPNAQTLRDLLEKDLSAAAGAPVDMDFILPQRFDTLRIQELSGINLDKLDVEVDRYEPAPELLGCTGTGIIEETLMSRLLKSNCPVTGQPDWASVQIAYRGRPIDRAGLLKYIISFRQHAEFHEHCVERIFCDLMQACQPEQLTVYARYTRRGGLDINPWRSNAGASAPADLRGARQ

SEQ ID NO: 44657 - protein, 275 aa, unidentified
  source 1..275: note = Bordetella bronchialis
  REGION 1..275: note = tr|A0A193FUG1|A0A193FUG1_9BORD NADPH-dependent 7-cyano-7-deazaguanine reductase OS=Bordetella bronchialis; OX = 463025 GN=queF PE=3 SV=1
MNLDQAPLGHDIAYPGQYDPGLLFPVPRADNRAAIGIGASLPFQGCDIWNAYELSWLNPRGKPQVAIGRFIVPADTPCIIESKSFKLYLNSLNQTPLPDAAAYIERVERDLGAVAGGPVRLQLIPPHAFHQERIANLAGATLDDLDIETDAYTPAPQLLRCEPGARVVEESLTSDLLKSNCPVTGQPDWGSVQIGYRGPKLDRAALLAYIVSFREHAEFHEHCVERIFTDVMAACRPQALSVYARYTRRGGLDINPWRATPGWPAPPMDLRTARQ

SEQ ID NO: 44658 - protein, 273 aa, Bordetella bronchiseptica
  REGION 1..273: note = sp|Q7WH69|QUEF_BORBR NADPH-dependent 7-cyano-7-deazaguanine reductase OS=Bordetella bronchiseptica (strain ATCC BAA-588 / NCTC 13252 / RB50); OX = 257310 GN=queF PE=3 S V=2
MSLSNAPLGQHVAYPSQYDPGLLFPIPRATNRASLQLGATLPFTGVDLWNAYELSWLDARGKPRVAMATFSFPADSPNIVESKSFKLYLNSFNQTRLPNAQALRDRLERDLAAAAGAPVGLEFISPQRFGELNMAELDGIYIDKLDIEIDTYEPAPQLLQCAPGDEVEETLATRLLKSNCPVTGQPDWASLQVRYRGRPIDRAALLKYVVSFRQHAEFHEHCVERIFGDIMRACQPRQLTVYARYTRRGGLDINPWRSNFESAPPADVRTARQ

SEQ ID NO: 44659 - protein, 303 aa, Bordetella bronchiseptica
  REGION 1..303: note = tr|A0A3T0P6C4|A0A3T0P6C4_BORBO NADPH-dependent 7-cyano-7-deazaguanine reductase OS=Bordetella bronchiseptica OX=518 GN=queF PE=3 SV=1
MTESAFHIAKKAGRGSAYNAGIIAYADPVSMSLSNAPLGQHVAYPSQYDPGLLFPIPRATNRASLQLGATLPFTGVDLWNAYELSWLDARGKPRVAMATFSFPADSPNIVESKSFKLYLNSFNQTRLPNAQALRDRLERDLAAAAGAPVGLEFISPQRFGELNMAELDGIYIDKLDIEIDTYEPAPQLLQCAPGDEVEETLATRLLKSNCPVTGQPDWASLQVRYRGRPIDRAALLKYVVSFRQHAEFHEHCVERIFGDIMRACQPRQLTVYARYTRRGGLDINPWRSNFESAPPADVRTARQ

SEQ ID NO: 44660 - protein, 274 aa, unidentified
  source 1..274: note = Bordetella flabilis
  REGION 1..274: note = tr|A0A193GF75|A0A193GF75_9BORD NADPH-dependent 7-cyano-7-deazaguanine reductase OS=Bordetella flabilis; OX = 463014 GN=queF PE=3 SV=1
MSLANAPLGHDVAYPDHYDATLLFPIDRAANRGALGIATPLPFTGQDIWNAYELSWLNARGKPQVALGRFTVPADSPRIVESKSFKLYLNSLNQTRLPDARAYIERVVADVSAAVGTPVGLELLPSDRFADARVGVLPGETLDDLDIDIDRYTPDSALLRCAPDAGIVEETLTSELLKSNCPVTGQPDWGGVQISYRGRRIDRAALLSYIVSFRQHTEFHEHCVERMFMDIMAACAPSALCVYARYTRRGGLDINPWRATPGMAAPADIRTARQ

SEQ ID NO: 44661 - protein, 276 aa, unidentified
  source 1..276: note = Bordetella genomosp.
  REGION 1..276: note = tr|A0A261S0J2|A0A261S0J2_9BORD NADPH-dependent 7-cyano-7-deazaguanine reductase OS=Bordetella genomosp. 10 OX=1416804 GN=queF PE=3 SV=1
MTLQDAPLGHEVAYPDRYDPTLLFPIDRAPNRAALGITADSLPFEAGVDIWNAYEVSWLDPRGKPRVALASFGVPATTPRIIESKSFKLYLNSYNQERMTDADAVAARMRRDLSAAAGGDVGVRLIAPDQFDAQRIAELDGVCLDDLDVEIDTYTPAPQLLRTAGEAGVVEETLMSRLLKSNCPVTGQPDWGSVQVRYRGPRLDRAGLLAYIVSFRQHADFHEHCVERMFTDILRTCRPERLSVYARYTRRGGLDINPWRATRDMPTPVDVRTARQ

SEQ ID NO: 44662 - protein, 274 aa, unidentified
  source 1..274: note = Bordetella genomosp.
  REGION 1..274: note = tr|A0A261SII6|A0A261SII6_9BORD NADPH-dependent 7-cyano-7-deazaguanine reductase OS=Bordetella genomosp. 1; OX = 1395607 GN=queF PE=3 SV=1
MSLSNAPLGHSVAYPTAYDPSLLFPIPRAGNRATLALGVALPFRGADIWNAYELSWLDAKGKPRVAMATFVIPADSPNIIESKSFKLYLNSFNQARLPNAQALRDHLERDLSQAAGAPVALDFILPQRFGELAIGELEGDYLDKLDVEIDTYEPAPQLLAVAGDTVVEETLASRLLKSNCPVTGQPDWASVQIRYRGRPLDRAALLKYIVSFRQHAEFHEHCVERIFTDIQRACAPEWLTVYARYTRRGGLDINPWRSNAPGASLPADLRIARQ

SEQ ID NO: 44663 - protein, 280 aa, Bordetella hinzii
  REGION 1..280: note = tr|A0A0H4W1V6|A0A0H4W1V6_9BORD NADPH-dependent 7-cyano-7-deazaguanine reductase OS=Bordetella hinzii; OX = 103855 GN=queF PE=3 SV=1
MPLTDAPLGHSVAYPSEYDASLLFPIPRAENRASLGLDGLPPLPGGALPFRGVDIWNAYEVSWLDAKGKPRIAMASFRVPADSPNIIESKSFKLYLNSFNQTRLPNAQALRERLEADLSAAAGAPIGMDFILPQRFETLRIAELEGISLDKLDVEIDCYEPAPQLLACAEGEVVEETLVSRLLKSNCPVTGQPDWGSVQIAYRGRPIDRAGLLKYIVSFRQHAEFHEHCVERIFCDLMRACRPEQLSVYARYTRRGGLDINPWRSNTAASAPADIRTARQ

SEQ ID NO: 44664 - protein, 280 aa, Bordetella holmesii
  REGION 1..280: note = tr|A0A158M479|A0A158M479_9BORD NADPH-dependent 7-cyano-7-deazaguanine reductase OS=Bordetella holmesii CDC-H585-BH OX=1331206 GN=queF PE=3 SV=1
MPLTDAPLGHNVAYPSEYDASLLFPIPRSDNRAALGLDRMQALPGSALPFHGTDIWNAYELSWLDAKGKPRIAMASFRLPANSPNIIESKSFKLYLNSFNQTRLSNAQALRERLETDLSAAAGSPIEMDFILPQRFDELRIAELGGTNLDKQDVEIEHYEPRPELLRCSVGDVVQETLVSRLLKSNCPVTGQPDWGSVQITYRGRPMDHAALLKYIVSFRQHAEFHEHCAERIFCDLMRACEPEELTVYARYTRRGGLDINPWRSNIPGGAPVDTRTARQ

SEQ ID NO: 44665 - protein, 303 aa, Bordetella parapertussis
  REGION 1..303: note = tr|K0M9K6|K0M9K6_BORPB NADPH-dependent 7-cyano-7-deazaguanine reductase OS=Bordetella parapertussis (strain Bpp5) OX=1208660 GN=queF PE=3 SV=1
MTESAFHIAKKAGRGSAYNAGIIAYADPVSMSLSNAPLGQHVAYPSQYDPGLLFPIPRATNRASLQLGATLPFTGVDLWNAYELSWLDARGKPRVAMATFSFPADSPNIVESKSFKLYLNSFNQTRLPNAQALRDRLERDLAAAAGAPVGLEFISPQRFGELNMAELDGIYIDKLDIEIDTYEPAPQLLQCAPGDEVEETLATRLLKSNCPVTDQPDWASLQVRYRGRPIDRAALLKYVVSFRQHAEFHEHCVERIFGDIMRACQPRQLTVYARYTRRGGLDINPWRSNFESAPPADVRTARQ

SEQ ID NO: 44666 - protein, 273 aa, Bordetella parapertussis
  REGION 1..273: note = sp|Q7W9J1|QUEF_BORPA NADPH-dependent 7-cyano-7-deazaguanine reductase OS=Bordetella parapertussis (strain 12822 / ATCC BAA-587 / NCTC 13253); OX = 257311 GN=queF PE=3 S V=1
MSLSNAPLGQHVAYPSQYDPGLLFPIPRATNRASLQLGATLPFTGVDLWNAYELSWLDARGKPRVAMATFSFPADSPNIVESKSFKLYLNSFNQTRLPNAQALRDRLERDLAAAAGAPVGLKFISPQRFGELNMAELDGIYIDKLDIEIDTYEPAPQLLQCAPGDEVEETLATRLLKSNCPVTGQPDWASLQVRYRGRPIDRAALLKYVVSFRQHAEFHEHCVERIFGDIMRACQPRQLTVYARYTRRGGLDINPWRSNFESAPPADVRTARQ

SEQ ID NO: 44667 - protein, 273 aa, Bordetella pertussis
  REGION 1..273: note = sp|Q7VWV5|QUEF_BORPE NADPH-dependent 7-cyano-7-deazaguanine reductase OS=Bordetella pertussis (strain Tohama I / ATCC BAA-589 / NCTC 13251) OX=257313; GN = queF PE=3 SV =1
MSLSNAPLGQHVAYPSQYDPGLLFPIPRATNRASLQLGAALPFTGVDLWNAYELSWLDARGKPRVAMATFSFPADSPNIVESKSFKLYLNSFNQTRLPNAQALRDRLERDLAAAAGAPVGLEFISPQRFGELNMAELDGIYIDKLDIEIDTYEPAPQLLQCAPGDEVEETLATRLLKSNCPVTGQPDWASLQVRYRGRPIDRAALLKYVVSFRQHAEFHEHCVERIFGDIMRACQPRQLTVYARYTRRGGLDINPWRSNFESAPPADVRTARQ

SEQ ID NO: 44668 - protein, 273 aa, Bordetella pertussis; identical to SEQ ID NO: 44667
  REGION 1..273: note = tr|A0A171K3K8|A0A171K3K8_BORPT NADPH-dependent 7-cyano-7-deazaguanine reductase OS=Bordetella pertussis 2356847 OX=1331248 GN=queF PE=3 SV=1

SEQ ID NO: 44669 - protein, 315 aa, Bordetella petrii
  REGION 1..315: note = tr|A9IUW3|A9IUW3_BORPD NADPH-dependent 7-cyano-7-deazaguanine reductase OS=Bordetella petrii (strain ATCC BAA-461 / DSM 12804 / CCUG 43448) OX=340100; GN = queF PE=3 SV =1
MGGHCCAAPAFIWRPLAFTMWNYGPGSSPTMQGLNPACHVCAMSLSNAPLGQNVAYPAHYDPSLLFPIARAQNRASLNLSGPLPFVGVDIWNAYELSWLDRKGKPQVAMARFTVRADSPNIIESKSFKLYLNSYNQTRLDNAEVLGERLANDLSAAAGAPVEVDLILPARFGTLAMAELDGIDLDSLDIAIDTYLPDAGLLRCAAGEPVAETLASRLLKSNCPVTGQPDWASVQISYRGRPLDRAALLRYLVSFRDHAEFHEHCVERIYTDIMAACRPEQLTVYARYTRRGGLDINPWRSNFEAAPPADVRTARQ

SEQ ID NO: 44670 - protein, 280 aa, unidentified
  source 1..280: note = Bordetella pseudohinzii
  REGION 1..280: note = tr|A0A0J6C4F1|A0A0J6C4F1_9BORD NADPH-dependent 7-cyano-7-deazaguanine reductase OS=Bordetella pseudohinzii OX=1331258 GN=queF PE=3 SV=1
MPLTDAPLGHSVAYPSEYDASLLFPIPRAENRASLGLDSLTPLPGSALPFRGVDIWNAYEVSWLDAKGKPRIAMASFRVPADSPNIIESKSFKLYLNSFNQTRLPNAQALRERLEADLSAAAGAPMEMDFILPQRFETLRIAELEGISLDKLDVEIDCYEPAPQLLACTEGEVVQETLVSRLLKSNCPVTGQPDWGSVQIAYRGRPIDRAALLKYIVSFRQHAEFHEHCVERIFCDLMRACQPEQLSVYARYTRRGGLDINPWRSNTAAGAPADIRTARQ

SEQ ID NO: 44671 - protein, 285 aa, Bordetella sp.
  REGION 1..285: note = tr|A0A2R4XIB9|A0A2R4XIB9_9BORD NADPH-dependent 7-cyano-7-deazaguanine reductase OS=Bordetella sp. HZ20; OX = 2163011 GN=queF PE=3 SV=1
MSTHTLEIHHPTIALGKEVAYPTRYDPDLLLPISRSLGRALLAGLTQNPEAQIAFTGWDMWRGYELSWFDPRGLPKIGILKAWVPCTSTHIIESKSFKLYLNSLNNERMDDIESVKKRIKSDLSSRVGAEVKVQVVTPQEFASEVISEPLEGCLDDQAIEIGHYQPDPDLLACDPERIVSESVFSRLLKSNCPVTGQPDWASVHIEYEGAAIDHEALLRYIVSYRQHEGFHEQCVEQIFCDLMQRCQPQRLSVYARYTRRGGMDINPWRATQGLPEPVTSRSAQQ

SEQ ID NO: 44672 - protein, 279 aa, Bordetella sp.
  REGION 1..279: note = tr|A0A3T0NG39|A0A3T0NG39_9BORD NADPH-dependent 7-cyano-7-deazaguanine reductase OS=Bordetella sp. J329; OX = 1977852 GN=queF PE=3 SV=1
MSHTPLPGATLLGQSVSYPDHYDPTVLQAIPREAARQALGYAAVLPFQGADIWRAYELSWLNARGKPLVATASFVIPADSPNLIESKSFKLYLNSHNQARHASAAALQELLARDLSRVAQAPVQVALQLDARDMATPPLAELSGQCIDGLDIDIERYDPAPELLACRPDAGTIEETLVSRLLRSNCPVTSQPDWGSVQIQYRGPAVDHAALLRYIISYRTHTGFHEQCVEQIFRDIMAQCRPEQLRVHACYTRRGGLDINPWRGTPGMPAPDAARTPRQ

SEQ ID NO: 44673 - protein, 280 aa, Bordetella trematum
  REGION 1..280: note = tr|A0A157LCN6|A0A157LCN6_9BORD NADPH-dependent 7-cyano-7-deazaguanine reductase OS=Bordetella trematum; OX = 123899 GN=queF PE=3 SV=1
MPLSHAPLGHHVAYPSEYDASLLFPIPRAENRAGLGLSELPPLAGQPLPFRGVDIWTAYELSWLDAKGKPRVAMASFAIPADSPFIIESKSFKLYLNSFNQTRLPNAHALRERLQQDLSKAAGATIAMDFMLPQHFSGQAIGELAGFNLDKQDIEIDRYQPAPELLACLPGDEVEETLVSQLLKSNCPVTGQPDWGSVQIRYRGRPIDRAALLKYIVSFRQHTEFHEHCVERMFCDLMRACQPSELTVYARYTRRGGLDINPWRSNRQDAPPANLRTARQ

SEQ ID NO: 44674 - protein, 151 aa, unidentified
  source 1..151: note = Bosea lathyri
  REGION 1..151: note = tr|A0A1H5W4N8|A0A1H5W4N8_9BRAD NADPH-dependent 7-cyano-7-deazaguanine reductase OS=Bosea lathyri; OX = 1036778 GN=queF PE=3 SV=1
MSIDATTLQLGQATHLPTSPEEARLDRVPNPHAGTSYLARFTCPEFTSICPVTGQPDFGILVIDYLPGDWLVESKSLKLYLAAFRNHGAFHEDCTVGIGKTLVELLDPTWFRIGGYWYPRGGIPIDVFWQTGEPPKGLWLPDQGVAPYRGR

SEQ ID NO: 44675 - protein, 151 aa, unidentified
  source 1..151: note = Bosea lupini
  REGION 1..151: note = tr|A0A1H7H4B0|A0A1H7H4B0_9BRAD NADPH-dependent 7-cyano-7-deazaguanine reductase OS=Bosea lupini; OX = 1036779 GN=queF PE=3 SV=1
MTIDASTLQLGKASDLPRSPEEARLDRVPNPHAGTDYLARFTCPEFTSICPVTGQPDFGILVIDYLPGHWLVESKSLKLYLGAFRNHGAFHEDCTVGIGKTLVELLEPKWFRIGGYWYPRGGIPIDVFFQTGEAPKGLWLPDQGVAPYRGR

SEQ ID NO: 44676 - protein, 151 aa, Bosea sp.
  REGION 1..151: note = tr|A0A0N1LDV4|A0A0N1LDV4_9BRAD NADPH-dependent 7-cyano-7-deazaguanine reductase OS=Bosea sp. AAP35; OX = 1523417 GN=queF PE=3 SV=1
MTLDASSLQLGHATAMPASPEEARLDRVPNPHQGTSYLARFTCPEFTSICPVTGQPDFGILVIDYLPAAWLVESKSLKLYLAAFRNHGAFHEDCTVGIGKRLVDLLEPEWFRIGGYWYPRGGIPIDVFWQTGEPPKGLWLPDQGVAPYRGR

SEQ ID NO: 44677 - protein, 151 aa, Bosea sp.
  REGION 1..151: note = tr|A0A1Q3NWC0|A0A1Q3NWC0_9BRAD NADPH-dependent 7-cyano-7-deazaguanine reductase OS=Bosea sp. 67-29; OX = 1895723 GN=queF PE=3 SV=1
MSLDASTLQLGQPSALPASPEEARLDRVPNPHAGTSYLARFTCPEFTSICPVTGQPDFGILVIDYLPGQWLVESKSLKLYLASFRNHGAFHEDCTVGIGKRLVELLEPEWFRIGGYWYPRGGIPIDVFWQTGEPPRGLWLPDQGVAPYRGR

SEQ ID NO: 44678 - protein, 151 aa, Bosea thiooxidans
  REGION 1..151: note = tr|A0A0Q3I1D5|A0A0Q3I1D5_9BRAD NADPH-dependent 7-cyano-7-deazaguanine reductase OS=Bosea thiooxidans; OX = 53254 GN=queF PE=3 SV=1
MAIDASTLQLGQSSALPASPEEARLDRVPNPHAGTRYLARFTCPEFTSICPVTGQPDFGILVIDYLPGQWLVESKSLKLYLGAFRNHGAFHEDCTVSIGMTLVDLLEPEWFRIGGYWYPRGGIPIDVFWQTGEPPKGLWLPDQGVAPYRGR

SEQ ID NO: 44679 - protein, 152 aa, unidentified
  source 1..152: note = Bosea vaviloviae
  REGION 1..152: note = tr|A0A1D7U5B4|A0A1D7U5B4_9BRAD NADPH-dependent 7-cyano-7-deazaguanine reductase OS=Bosea vaviloviae; OX = 1526658 GN=queF PE=3 SV=1
MMTLDASTLQLGQHSALPASPDEARLDRVPNPHAGTNYLARFTCPEFTSICPVTGQPDFGILVIDYLPGDWLVESKSLKLYLGAFRNHGAFHEDCTVGIGKTLVELLQPVWFRIGGYWYPRGGIPIDVFWQTGEPPKGLWLPDQGVAPYRGR

SEQ ID NO: 44680 - protein, 151 aa, unidentified
  source 1..151: note = Bosea vaviloviae
  REGION 1..151: note = tr|A0A0N0MBN9|A0A0N0MBN9_9BRAD NADPH-dependent 7-cyano-7-deazaguanine reductase OS=Bosea vaviloviae; OX = 1526658 GN=queF PE=3 SV=1
MSIDASTLQLGHHAELPASPDEARLDRVPNPHQGTSYLARFTCPEFTSICPVTGQPDFGILVIDYLPGQWLVESKSLKLYLGAFRNHGAFHEDCTVGIGKRLVDLLAPEWFRIGGYWYPRGGIPIDVFWQTGEPPKGLWLPDQGVAPYRGR

SEQ ID NO: 44681 - protein, 151 aa, Bosea vestrisii
  REGION 1..151: note = tr|A0A543NYA4|A0A543NYA4_9BRAD NADPH-dependent 7-cyano-7-deazaguanine reductase OS=Bosea vestrisii; OX = 151416 GN=queF PE=3 SV=1
MSIDASTLQLGQASALPASPQEARLDRVPNPHAGTYYLARFTCPEFTSICPVTGQPDFGILVIDYLPGQWLVESKSLKLYLASFRNHGAFHEDCTVGIGKTLVDLLEPEWFRIGGYWYPRGGIPIDVFWQTGEPPKGLWLPDQGVAPYRGR

SEQ ID NO: 44682 - protein, 276 aa, Bowmanella sp.
  REGION 1..276: note = tr|A0A4Q9XQK0|A0A4Q9XQK0_9ALTE NADPH-dependent 7-cyano-7-deazaguanine reductase OS=Bowmanella sp. JS7-9; OX = 1605368 GN=queF PE=3 SV=1
MSQPDHALSHLSLGKSVTYIEKYAPELLQAVPRSMNRHELDIVASQPFSGCDIWNGYELSWLNSKGKPQVAILRADVPAESENLIESKSFKLYLNSFNQTHFASWQEVQEALQLDLSRCANGNVDVTLYTMQQLSEFNTVSLPGQCIDDLDIEVSQYQPDVSLLTTTDEPVSETLHSHLLKSNCLITSQPDWASIVIRYEGAQIEHASLLKYLIAFRQHNEFHEQCVERIFCDIKSQCKPDKLTVYARYTRRGGLDINPFRSDFEPCWQNLRQARQ

SEQ ID NO: 44683 - protein, 282 aa, Brachymonas denitrificans
  REGION 1..282: note = tr|A0A1H8ERH3|A0A1H8ERH3_9BURK NADPH-dependent 7-cyano-7-deazaguanine reductase OS=Brachymonas denitrificans DSM 15123 OX=1121117 GN=queF PE=3 SV=1
MPTPEQSPLGKAVSYADQYDPTLLFPLPRQPKRDEIGITGRLPFMGADLWTGYELSWLNLRGKPQVALLQVNIPCETPNIIESKSFKLYLNSFNNTRIGLIEEVRERIFADLNEAAWRGAATMDASIGVRLVPSELFDQQPIHELDGLSLDRLDCECTHYHPAPELLTTIPEEGIVSETLTSNLLKSNCLITGQPDWGSVQISYSGPQISHEGLLRYLVSFRNHNEFHEQCVERIFTDIWSRCAPVKLSVYARYTRRGGLDINPFRTSHPQALPPAVRNARQ

SEQ ID NO: 44684 - protein, 299 aa, Brachyspira sp.
  REGION 1..299: note = tr|R5H315|R5H315_9SPIR GTP cyclohydrolase I/Nitrile oxidoreductase OS=Brachyspira sp. CAG:484 OX=1262759; GN = BN676_00018 PE=4 SV=1
MKNITDDIASRFLGKKADGSDVYNPDFLVAVPREENRLHYGIDSNSLPFEGWDVWHAYEFSAMTENGVPVTRVLKLRYNCDNDYIVESKSLKLYLNSFNMSKFGNSVKECLDICKKLITKDLSEKLKTEVCVNFLDNNTERVSIFQNFENIMNYVDEKVLKVEHFKEAPELLSTEDTGVLQEYRLMFDSLRSNCRVTHQPDFGDAFIYYKSKKHILESSLVKYLTSFRSEFHFHEECCEMIFKRLTDILNSGDELFVGALYTRRGGIDICPVRQSRNCTINPAEALADITKFARSGIKQ

SEQ ID NO: 44685 - protein, 165 aa, unidentified
  source 1..165: note = Bradyrhizobiaceae bacterium
  REGION 1..165: note = tr|F7QMK1|F7QMK1_9BRAD NADPH-dependent 7-cyano-7-deazaguanine reductase OS=Bradyrhizobiaceae bacterium SG-6C OX=709797 GN=queF PE=3 SV=1
MSKKPRITKAKTASLQEPASLQLGQQVEPPASPEAAKLDRVPNPHPKDNYLVRFVAPEFTSLCPITGQPDFAHLVIDYVPDQWLVESKALKLYLSSFRNHGAFHEDCTVGIGKRLVKEIKPRWLRIGGYWYPRGGIPIDVFWQTGKLPGGVWVPDQGVAPYRGRG

SEQ ID NO: 44686 - protein, 159 aa, unidentified
  source 1..159: note = Bradyrhizobiaceae bacterium
  REGION 1..159: note = tr|A0A3S0E5J8|A0A3S0E5J8_9BRAD NADPH-dependent 7-cyano-7-deazaguanine reductase OS=Bradyrhizobiaceae bacterium OX=2072420 GN=queF PE=3 SV=1
MSRKPRAAKAAGTSLQLGQQVEAPASPDTAKLDRVPNPHTDTNYVARFTMPEFTSICPVTGQPDFAILVIDYVPNKWLVESKSLKLYLNSFRNVGSFHEDCTVSIGKRLTKLLAPRWLRIGGYFYPRGGMPIDVFWQAGKLPATVWVPDQGVPPYRGRG

SEQ ID NO: 44687 - protein, 150 aa, unidentified
  source 1..150: note = Bradyrhizobium arachidis
  REGION 1..150: note = tr|A0A1I7IPN4|A0A1I7IPN4_9BRAD NADPH-dependent 7-cyano-7-deazaguanine reductase OS=Bradyrhizobium arachidis OX=858423 GN=queF PE=3 SV=1
MAKKSLQLGRAVEWPHTPEEAQLDRVPNPQKGTDYLVRFTVPEFTSLCPVTGQPDFAHLMIDYAPGQWLLESKSLKLYIASFRNHGAFHEDCTVMIGKRIASEIKPKWLRIGGYWYPRGGIPIDVFWQTGRVPKGLWVPEQGVAPYRGRG

SEQ ID NO: 44688 - protein, 158 aa, Bradyrhizobium betae
  REGION 1..158: note = tr|A0A4Q1V2Y3|A0A4Q1V2Y3_9BRAD NADPH-dependent 7-cyano-7-deazaguanine reductase OS=Bradyrhizobium betae; OX = 244734 GN=queF PE=3 SV=1
MSKKPSKSNNSPALQLGRAVEWPDTPEKAKLDRVPNPQADTDYLVRFTAPEFTSLCPVTGQPDFAHLMIDYAPGQWLLESKSLKLYIASFRNHGAFHEDCTVMIGKRIAAEIKPKWLRIGGYWYPRGGIPIDVFWQTGRVPKGMWVPEQGVAPYRGRG

SEQ ID NO: 44689 - protein, 158 aa, Bradyrhizobium canariense
  REGION 1..158: note = tr|A0A1H1PUV6|A0A1H1PUV6_9BRAD NADPH-dependent 7-cyano-7-deazaguanine reductase OS=Bradyrhizobium canariense OX=255045 GN=queF PE=3 SV=1
MSKTPRKSSKSEGLQLGRAVEWPDTPERAKLDRVPNPQADTNYVVRFTAPEFTSLCPITGQPDFAHLVIDYVPGQWLLESKSLKLYVASFRNHGAFHEDCTVAIGKRISSEIKPKWLRIGGYWYPRGGIPIDVFWQTGRLPKGMWVPEQGVAPYRGRG

SEQ ID NO: 44690 - protein, 153 aa, Bradyrhizobium canariense
  REGION 1..153: note = tr|A0A1X3H400|A0A1X3H400_9BRAD NADPH-dependent 7-cyano-7-deazaguanine reductase OS=Bradyrhizobium canariense OX=255045 GN=queF PE=3 SV=1
MTTMAKKSLQLGRAVEWPHTPEEAQLDRVPNPQKGTDYLVRFTVPEFTSLCPVTGQPDFAHLMIDYAPGQWLLESKSLKLYIASFRNHGAFHEDCTVMIGKRIASEIKPKFLRIGGYWYPRGGIPIDVFWQTGRAPKGLWVPEQGVAPYRGRG

SEQ ID NO: 44691 - protein, 153 aa, unidentified
  source 1..153: note = Bradyrhizobium centrolobii
  REGION 1..153: note = tr|A0A176YD92|A0A176YD92_9BRAD NADPH-dependent 7-cyano-7-deazaguanine reductase OS=Bradyrhizobium centrolobii OX=1505087 GN=queF PE=3 SV=1
MQTMAQKPLQLGRAVEWPHTPEEAQLDRVPNPQKGTDYLVRFTVPEFTSLCPVTGQPDFAHLMIDYAPGAWLLESKSLKLYIASFRNHGAFHEDCTVMIGKRIAAEIKPKFLRIGGYWYPRGGIPIDVFWQTGRVPKGLWVPEQGVVPYRGRG

SEQ ID NO: 44692 - protein, 162 aa, unidentified
  source 1..162: note = Bradyrhizobium daqingense
  REGION 1..162: note = tr|A0A562KWU1|A0A562KWU1_9BRAD NADPH-dependent 7-cyano-7-deazaguanine reductase OS=Bradyrhizobium daqingense OX=993502 GN=queF PE=3 SV=1
MSKKPSKSNESPAKPASLQLGRAVEWPDAPEKAKLDRVPNPQAGTDYLVRFTVPEFTSLCPVTGQPDFAHLMIDYAPGAWLLESKSLKLYIASFRNHGAFHEDCTVMIGKRIASEIKPKWLRIGGYWYPRGGIPIDVFWQTGRVPKGMWVPEQGVAPYRGRG

SEQ ID NO: 44693 - protein, 153 aa, unidentified
  source 1..153: note = Bradyrhizobium diazoefficiens
  REGION 1..153: note = tr|A0A0E4BXJ2|A0A0E4BXJ2_9BRAD NADPH-dependent 7-cyano-7-deazaguanine reductase OS=Bradyrhizobium diazoefficiens OX=1355477 GN=queF PE=3 SV=1
MTTMAKKSLQLGRAVEWPHTPEEAQLDRVPNPQKGTDYLVRFTVPEFTSLCPVTGQPDFAHLMIDYAPGPWLLESKSLKLYIASFRNHGAFHEDCTVMIGKRIASEIKPKWLRIGGYWYPRGGIPIDVFWQAGRVPKGLWVPEQGVAPYRGRG

SEQ ID NO: 44694 - protein, 153 aa, unidentified
  source 1..153: note = Bradyrhizobium diazoefficiens
  REGION 1..153: note = sp|Q89KV4|QUEF_BRADU NADPH-dependent 7-cyano-7-deazaguanine reductase OS=Bradyrhizobium diazoefficiens (strain JCM 10833 / IAM 13628 / NBRC 14792 / USDA 110) OX=2249 11 GN=queF PE=3 SV=1
MTTMAKKSLQLGRAVEWPHTPEEAQLDRVPNPQKGTDYLVRFTVPEFTSLCPVTGQPDFAHLMIDYAPGPWLLESKSLKLYIASFRNHGAFHEDCTVMIGKRIASEIKPKWLRIGGYWYPRGGIPIDVFWQTGRVPKGLWVPEQGVAPYRGRG

SEQ ID NO: 44695 - protein, 150 aa, Bradyrhizobium elkanii
  REGION 1..150: note = tr|A0A4Y3ZA09|A0A4Y3ZA09_BRAEL NADPH-dependent 7-cyano-7-deazaguanine reductase OS=Bradyrhizobium elkanii; OX = 29448 GN=queF PE=3 SV=1
MAKKTLQLGRAVAWPDSPDKAVLDRVPNPQAGTDYLVRFAIPEFTSVCPITGQPDFAHLVLDYVPGRWLLESKSLKLYAASFRNHGAFHEDCTVMIGKRIVEEIKPKWLRIGGYWYPRGGIPIDVFFQTGRLPKGVWVPDQGVATYRGRG

SEQ ID NO: 44696 - protein, 150 aa, Bradyrhizobium elkanii
  REGION 1..150: note = tr|A0A1E3ESU9|A0A1E3ESU9_BRAEL NADPH-dependent 7-cyano-7-deazaguanine reductase OS=Bradyrhizobium elkanii; OX = 29448 GN=queF PE=3 SV=1
MAKKTLQLGRAVAWPDSPDKAVLDRVPNPQAGTDYLVRFAIPEFTSVCPITGQPDFAHLVLDYVPGRWLLESKSLKLYAASFRNHGAFHEDCTVMIGKRISDEIKPKWLRIGGYWYPRGGIPIDVFFQTGRLPKGLWVPDQGVATYRGRG

SEQ ID NO: 44697 - protein, 158 aa, unidentified
  source 1..158: note = Bradyrhizobium erythrophlei
  REGION 1..158: note = tr|A0A1H4PP81|A0A1H4PP81_9BRAD NADPH-dependent 7-cyano-7-deazaguanine reductase OS=Bradyrhizobium erythrophlei OX=1437360 GN=queF PE=3 SV=1
MAKKSSKSTTSSDLQLGRAVEWPDAPEKARLDRVPNPQAGTDYLVRFTVPEFTSICPVTGQPDFAHLVIDYVPGRWLLESKSLKLFAASFRNHGAFHEDCTVMIGRRISDEIKPKWLRIGGYWYPRGGIPIDVFFQTGRLPKGLWVPDQGVATYRGRG

SEQ ID NO: 44698 - protein, 158 aa, unidentified
  source 1..158: note = Bradyrhizobium erythrophlei
  REGION 1..158: note = tr|A0A1M5SGT2|A0A1M5SGT2_9BRAD NADPH-dependent 7-cyano-7-deazaguanine reductase OS=Bradyrhizobium erythrophlei OX=1437360 GN=queF PE=3 SV=1
MSKTPAKASKPKVLQLGRAVEWPHTPEEAQIDRVPNPQRDTNYVVRFTAPEFTSLCPVTGQPDFAHLVIDYVPGQWLLESKSLKLFVASFRNHGAFHEDCTVAIGKRISAEIKPKWLRIGGYWYPRGGIPIDVFWQTGKLPKGMWIPDQGVAPYRGRG

SEQ ID NO: 44699 - protein, 153 aa, unidentified
  source 1..153: note = Bradyrhizobium genosp.
  REGION 1..153: note = tr|A0A4Q7FJS1|A0A4Q7FJS1_9BRAD NADPH-dependent 7-cyano-7-deazaguanine reductase OS=Bradyrhizobium genosp. SA-3 OX=508868 GN=queF PE=3 SV=1
MTTMAKKSLQLGRAVEWPHTPEDAQLDRVPNPQKGTDYMVRFTVPEFTSLCPVTGQPDFAHLAIDYAPGAWLLESKSLKLYIASFRNHGAFHEDCTVMIGKRIASEIKPKWLRIGGYWYPRGGIPIDVFWQTGRVPKGLWVPEQGVAPYRGRG

SEQ ID NO: 44700 - protein, 162 aa, unidentified
  source 1..162: note = Bradyrhizobium guangdongense
  REGION 1..162: note = tr|A0A410V7X8|A0A410V7X8_9BRAD NADPH-dependent 7-cyano-7-deazaguanine reductase OS=Bradyrhizobium guangdongense OX=1325090 GN=queF PE=3 SV=1
MSKKSSKSNNSPANQASLQLGRAVEWPDAPEKAKLDRVPNPQAGTYYLVRFTVPEFTSLCPVTGQPDFAHLMIDYAPGEWLLESKSLKLYIASFRNHGAFHEDCTVMIGKRIAGEIKPKWLRIGGYWYPRGGIPIDVFWQTGRVPKGLWVPEQGVAPYRGRG

SEQ ID NO: 44701 - protein, 158 aa, unidentified
  source 1..158: note = Bradyrhizobium guangzhouense
  REGION 1..158: note = tr|A0A4Q0RIY0|A0A4Q0RIY0_9BRAD NADPH-dependent 7-cyano-7-deazaguanine reductase OS=Bradyrhizobium guangzhouense OX=1325095 GN=queF PE=3 SV=1
MSKKPSKSKTSPNLQLGRAVEWPDTPEKAQLDRVPNPQGGTDYLVRFTVPEFTSLCPVTGQPDFAHLMIDYAPGPWLLESKSLKLYIASFRNHGAFHEDCTVMIGKRIASEIKPKWLRIGGYWYPRGGIPIDVFWQTGRVPKGLWVPEQGVAPYRGRG

SEQ ID NO: 44702 - protein, 150 aa, unidentified
  source 1..150: note = Bradyrhizobium huanghuaihaiense
  REGION 1..150: note = tr|A0A562RPN1|A0A562RPN1_9BRAD NADPH-dependent 7-cyano-7-deazaguanine reductase OS=Bradyrhizobium huanghuaihaiense OX=990078 GN=queF PE=3 SV=1
MAKKSLQLGRAVEWPHTPDEAQLDRVPNPQAGTDYLVRFTVPEFTSLCPVTGQPDFAHLMIDYAPGQWLLESKSLKLYIASFRNHGAFHEDCTVMIGKRIASEIKPKWLRIGGYWYPRGGIPIDVFWQTGRVPKGLWVPEQGVAPYRGRG

SEQ ID NO: 44703 - protein, 150 aa, unidentified
  source 1..150: note = Bradyrhizobium icense
  REGION 1..150: note = tr|A0A533J4R4|A0A533J4R4_9BRAD NADPH-dependent 7-cyano-7-deazaguanine reductase OS=Bradyrhizobium icense; OX = 1274631 GN=queF PE=3 SV=1
MAKKSLQLGRAVEWPDRPENAVLDRVPNPQAGTDYLVRFTAPEFTSICPVTGQPDFAHLVIDFVPGRFLLESKSLKLYIASFRNHGAFHEDCTVMIGKRIADEIKPKWLRIGGYWYPRGGIPIDVFWQTGRLPKGMWVPDQGVAPYRGRG

SEQ ID NO: 44704 - protein, 154 aa, unidentified
  source 1..154: note = Bradyrhizobium icense
  REGION 1..154: note = tr|A0A1B1UGV0|A0A1B1UGV0_9BRAD NADPH-dependent 7-cyano-7-deazaguanine reductase OS=Bradyrhizobium icense; OX = 1274631 GN=queF PE=3 SV=1
MAKKSLPQSLQLGRAVEWPDSPEKAQLDRVPNPQAGTNYLVRFTAPEFTSICPVTGQPDFAHLVIDYVPGQWLLESKSLKLYVASFRNHGAFHEDCTVMIGKRIAIEIKPKFLRIGGYWYPRGGIPIDVFWQTGKLPKDVWVPDQGVAPYRGRG

SEQ ID NO: 44705 - protein, 158 aa, Bradyrhizobium japonicum
  REGION 1..158: note = tr|A0A1L3FEF5|A0A1L3FEF5_BRAJP NADPH-dependent 7-cyano-7-deazaguanine reductase OS=Bradyrhizobium japonicum OX=375 GN=queF PE=3 SV=1
MLEQDVTTMAKKSLQLGRAVEWPHTPEEAQLDRVPNPQKGTDYLVRFTVPEFTSLCPVTGQPDFAHLMIDYAPGPWLLESKSLKLYIASFRNHGAFHEDCTVMIGKRIASEIKPKFLRIGGYWYPRGGIPIDVFWQTGRVPKGLWVPEQGVAPYRGRG

SEQ ID NO: 44706 - protein, 158 aa, Bradyrhizobium japonicum
  REGION 1..158: note = tr|A0A1Y2JAZ5|A0A1Y2JAZ5_BRAJP NADPH-dependent 7-cyano-7-deazaguanine reductase OS=Bradyrhizobium japonicum OX=375 GN=queF PE=3 SV=1
MLEQDVTTMAKKSLQLGRAVEWPHTPEEAQLDRVPNPQKGTDYLVRFTVPEFTSLCPVTGQPDFAHLMIDYAPGPWLLESKSLKLYIASFRNHGAFHEDCTVMIGKRIASEIKPKFLRIGGYWYPRGGIPIDVFWQTGRVPKGLWVPEQGVVPYRGRG

SEQ ID NO: 44707 - protein, 154 aa, Bradyrhizobium jicamae
  REGION 1..154: note = tr|A0A0R3M0H8|A0A0R3M0H8_9BRAD NADPH-dependent 7-cyano-7-deazaguanine reductase OS=Bradyrhizobium jicamae; OX = 280332 GN=queF PE=3 SV=1
MAKKSLPKSLQLGRAVEWPDSPEKAKLDRVPNPQAGTNYLVRFTAPEFTSICPVTGQPDFAHLVIDYAPGQWLLESKSLKLYVASFRNHGAFHEDCTVMIGKRIAAEIKPKWLRIGGYWYPRGGIPIDVFWQTGKLPKDMWVPDQGVAPYRGRG

SEQ ID NO: 44708 - protein, 150 aa, Bradyrhizobium lablabi
  REGION 1..150: note = tr|A0A2H9VC61|A0A2H9VC61_9BRAD NADPH-dependent 7-cyano-7-deazaguanine reductase OS=Bradyrhizobium lablabi; OX = 722472 GN=queF PE=3 SV=1
MAKKPLQLGRAVEWPDSPQKAVLDGVPNPQANTNYLVRFTVPEFTSICPVTGQPDFAHLAVDYVPGRWLLESKSLKLFVASFRSHGAFHEDCTVMIGKRITEAIKPKWLRIGGYWYPRGGIPIDVFWQTGRLPKGMWIPDQGVAPYRGRG

SEQ ID NO: 44709 - protein, 158 aa, Bradyrhizobium lablabi
  REGION 1..158: note = tr|A0A0R3MD57|A0A0R3MD57_9BRAD NADPH-dependent 7-cyano-7-deazaguanine reductase OS=Bradyrhizobium lablabi; OX = 722472 GN=queF PE=3 SV=1
MAKKSSQKSLPASLQLGRAVEWPDSPEKAKLDRVPNPQAGTNYLVRFTAPEFTSICPVTGQPDFAHLVIDYVPGQWLLESKSLKLYVASFRNHGAFHEDCTVMIGKRIAAEIKPKWLRIGGYWYPRGGIPIDVFWQTGKLPKDMWVPDQGVAPYRGRG

SEQ ID NO: 44710 - protein, 150 aa, Bradyrhizobium liaoningense
  REGION 1..150: note = tr|A0A151FJV4|A0A151FJV4_9BRAD NADPH-dependent 7-cyano-7-deazaguanine reductase OS=Bradyrhizobium liaoningense OX=43992 GN=queF PE=3 SV=1
MAKKSLQLGRAVEWPHTPEEAQLDRVPNPQKGTDYLVRFTVPEFTSLCPVTGQPDFAHLMIDYAPGAWLLESKSLKLYIASFRNHGAFHEDCTVMIGKRIASEIKPKFLRIGGYWYPRGGIPIDVFWQTGRVPKGLWVPEQGVAPYRGRG

SEQ ID NO: 44711 - protein, 154 aa, unidentified; identical to SEQ ID NO: 43810
  source 1..154: note = Bradyrhizobium lupini
  REGION 1..154: note = tr|K5CXY5|K5CXY5_RHILU NADPH-dependent 7-cyano-7-deazaguanine reductase OS=Bradyrhizobium lupini HPC(L) OX=1229491 GN=queF PE=3 SV=1

SEQ ID NO: 44712 - protein, 158 aa, unidentified
  source 1..158: note = Bradyrhizobium macuxiense
  REGION 1..158: note = tr|A0A560MD02|A0A560MD02_9BRAD NADPH-dependent 7-cyano-7-deazaguanine reductase OS=Bradyrhizobium macuxiense OX=1755647 GN=queF PE=3 SV=1
MAKKSSKSTISPGLQLGRAVEWPDAPEKAQLDRVPNPQAGTDYLVRFTVPEFTSICPVTGQPDFAHLVIDYVPSRWLLESKSLKLFAASFRNHGAFHEDCTVMIGKRISDEIKPKWLRIGGYWYPRGGIPIDVFFQTGRLPKGIWVPDQGVATYRGRG

SEQ ID NO: 44713 - protein, 158 aa, unidentified
  source 1..158: note = Bradyrhizobium macuxiense
  REGION 1..158: note = tr|A0A109JYA9|A0A109JYA9_9BRAD NADPH-dependent 7-cyano-7-deazaguanine reductase OS=Bradyrhizobium macuxiense OX=1755647 GN=queF PE=3 SV=1
MAKKSSKSKTSPALQLGRAVEWPDSPEKAVLDRVPNPQAGTDYLVRFTIPEFTSICPVTGQPDFAHLVIDFVPSRWLVESKSLKLYAASFRNHGAFHEDCTVMIGKRIAEEIKPKWLRIGGYWYPRGGIPIDVFFQTGRLPKGLWVPDQGVAPYRGRG

SEQ ID NO: 44714 - protein, 158 aa, unidentified
  source 1..158: note = Bradyrhizobium manausense
  REGION 1..158: note = tr|A0A0R3D298|A0A0R3D298_9BRAD NADPH-dependent 7-cyano-7-deazaguanine reductase OS=Bradyrhizobium manausense OX=989370 GN=queF PE=3 SV=1
MSKKPSKSNTSPSLQLGRAVEWPDAPEKAQLDRVPNPQGGTDYLVRFTVPEFTSLCPVTGQPDFAHLMIDYAPGQWLLESKSLKLYVASFRNHGAFHEDCTVMIGKRIAREIKPKWLRIGGYWYPRGGIPIDVFWQTGRVPKGLWVPEQGVAPYRGRG

SEQ ID NO: 44715 - protein, 150 aa, unidentified
  source 1..150: note = Bradyrhizobium nanningense
  REGION 1..150: note = tr|A0A4Q0S3J7|A0A4Q0S3J7_9BRAD NADPH-dependent 7-cyano-7-deazaguanine reductase OS=Bradyrhizobium nanningense OX=1325118 GN=queF PE=3 SV=1
MAKKSLQLGRAVEWPHTPEDAQLDRVPNPQKGTDYLVRFTVPEFTSLCPVTGQPDFAHLMIDYAPGAWLLESKSLKLYIASFRNHGAFHEDCTVMIGKRIAREIKPKFLRIGGYWYPRGGIPIDVFWQTGRVPKGLWVPEQGVAPYRGRG

SEQ ID NO: 44716 - protein, 150 aa, unidentified
  source 1..150: note = Bradyrhizobium neotropicale
  REGION 1..150: note = tr|A0A176Z5M2|A0A176Z5M2_9BRAD NADPH-dependent 7-cyano-7-deazaguanine reductase OS=Bradyrhizobium neotropicale OX=1497615 GN=queF PE=3 SV=1
MAKKSLQLGRAVEWPHTPEEAQLDRVPNPQKGTDYLVRFTVPEFTSLCPVTGQPDFAHLMIDYAPGQWLLESKSLKLYIASFRNHGAFHEDCTVMIGKRIAAEIKPKWLRIGGYWYPRGGIPIDVFWQTGRVPKGLWVPEQGVAPYRGRG

SEQ ID NO: 44717 - protein, 158 aa, unidentified
  source 1..158: note = Bradyrhizobium oligotrophicum
  REGION 1..158: note = tr|M4Z7K3|M4Z7K3_9BRAD NADPH-dependent 7-cyano-7-deazaguanine reductase OS=Bradyrhizobium oligotrophicum S58 OX=1245469 GN=queF PE=3 SV=1
MAKRPGKSETSAGLQLGREVAWPESPEAARLDRVPNPQKDTDYLARFTVPEFTSLCPVTGQPDFAHLVIDYAPGPWLVESKSLKLYLASFRNHGAFHEDCTVAIGKRLAAELKPKWLRIGGYWYPRGGIPIDVFWQTGKLPKGLWVPDQGVAPYRGRG

SEQ ID NO: 44718 - protein, 153 aa, unidentified
  source 1..153: note = Bradyrhizobium ottawaense
  REGION 1..153: note = tr|A0A2U8PDT0|A0A2U8PDT0_9BRAD NADPH-dependent 7-cyano-7-deazaguanine reductase OS=Bradyrhizobium ottawaense OX=931866 GN=queF PE=3 SV=1
MTTMAKKSLQLGRAVEWPHTPEDAQLDRVPNPQKGTDYLVRFTVPEFTSLCPVTGQPDFAHLMIDYAPGAWLLESKSLKLYIASFRNHGAFHEDCTVMIGKRIASEIKPKWLRIGGYWYPRGGIPIDVFWQTGRVPKGLWVPEQGVAPYRGRG

SEQ ID NO: 44719 - protein, 154 aa, unidentified
  source 1..154: note = Bradyrhizobium retamae
  REGION 1..154: note = tr|A0A0R3N7C2|A0A0R3N7C2_9BRAD NADPH-dependent 7-cyano-7-deazaguanine reductase OS=Bradyrhizobium retamae; OX = 1300035 GN=queF PE=3 SV=1
MAKKSLPTSLQLGRAVEWPDRPEKAQLDRVPNPQAGTNYLVRFTAPEFTSICPVTGQPDFAHLMIDYVPGQWLLESKSLKLYVASFRNHGAFHEDCTVMIGKRIAAEIKPKWLRIGGYWYPRGGIPIDVFWQTGKLPKDVWVPDQGVAPYRGRG

SEQ ID NO: 44720 - protein, 150 aa, unidentified
  source 1..150: note = Bradyrhizobium rifense
  REGION 1..150: note = tr|A0A5D3KAJ2|A0A5D3KAJ2_9BRAD NADPH-dependent 7-cyano-7-deazaguanine reductase OS=Bradyrhizobium rifense; OX = 515499 GN=queF PE=3 SV=1
MAKKTLQLGRAVEWPHTPEEAQLDRVPNPQGGTDYLVRFTVPEFTSLCPVTGQPDFAHLMIDYAPGQWLLESKSLKLYIASFRNHGAFHEDCTVMIGKRIAAEIKPKWLRIGGYWYPRGGIPIDVFWQTGRVPKGLWVPEQGVAPYRGRG

SEQ ID NO: 44721 - protein, 151 aa, unidentified
  source 1..151: note = Bradyrhizobium sacchari
  REGION 1..151: note = tr|A0A560K784|A0A560K784_9BRAD NADPH-dependent 7-cyano-7-deazaguanine reductase OS=Bradyrhizobium sacchari OX=1399419 GN=queF PE=3 SV=1
MMAKKSLQLGRAVEWPHTPEEAQLDRVPNPQKGTDYLVRFTVPEFTSLCPVTGQPDFAHLMIDYAPGPWLLESKSLKLYIASFRNHGAFHEDCTVMIGKRIASEIKPKWLRIGGYWYPRGGIPIDVFWQTGRVPKGLWVPEQGVAPYRGRG

SEQ ID NO: 44722 - protein, 150 aa, unidentified
  source 1..150: note = Bradyrhizobium shewense
  REGION 1..150: note = tr|A0A1C3XPZ5|A0A1C3XPZ5_9BRAD NADPH-dependent 7-cyano-7-deazaguanine reductase OS=Bradyrhizobium shewense OX=1761772 GN=queF PE=3 SV=1
MAKKSLQLGRAVEWPHTPEDAQLDRVPNPQKGTDYLVRFTVPEFTSLCPVTGQPDFAHLMIDYAPGPWLLESKSLKLYIASFRNHGAFHEDCTVMIGKRIASEIKPKWLRIGGYWYPRGGIPIDVFWQTGRVPKGLWVPEQGVAPYRGRG

SEQ ID NO: 44723 - protein, 158 aa, Bradyrhizobium sp.
  REGION 1..158: note = tr|A0A1Y6KEZ0|A0A1Y6KEZ0_9BRAD NADPH-dependent 7-cyano-7-deazaguanine reductase OS=Bradyrhizobium sp. ORS 285 OX=115808 GN=queF PE=3 SV=1
MAKKSNPSLTSAGLQLGREVAPPDSPEAARLDRVPNPQKDTDYLARFTVPEFTSLCPVTGQPDFAHLVIDYAPGPWLVESKSLKLYFASFRNHGAFHEDCTVAIGKRLTAEIKPKWLRIGGYWYPRGGIPIDVFWQTGKLPKGLWVPDQGVAPYRGRG

SEQ ID NO: 44724 - protein, 158 aa, Bradyrhizobium sp.
  REGION 1..158: note = tr|A0A1B9YQ29|A0A1B9YQ29_9BRAD NADPH-dependent 7-cyano-7-deazaguanine reductase OS=Bradyrhizobium sp. LMTR 3 OX=189873 GN=queF PE=3 SV=1
MAKKSLQKSLPKSLQLGRAVEWPDSPEKAQLDRVPNPQAGTNYLVRFTAPEFTSICPVTGQPDFAHLVIDYVPGQWLLESKSLKLYVASFRNHGAFHEDCTVMIGKRIAAEIKPKWLRIGGYWYPRGGIPIDVFWQTGKLPKDVWVPDQGVAPYRGRG

SEQ ID NO: 44725 - protein, 162 aa, unidentified
  source 1..162: note = Bradyrhizobium stylosanthis
  REGION 1..162: note = tr|A0A560DJ49|A0A560DJ49_9BRAD NADPH-dependent 7-cyano-7-deazaguanine reductase OS=Bradyrhizobium stylosanthis OX=1803665 GN=queF PE=3 SV=1
MSKKPSKSNNSPAKSASLQLGRAVEWPDAPEKARLDRVPNPQAGTDYLVRFTVPEFTSLCPVTGQPDFAHLMIDYAPGQWLLESKSLKLYIASFRNHGAFHEDCTVMIGKRIASEIKPKWLRIGGYWYPRGGIPIDVFWQTGRVPKGLWVPEQGVAPYRGRG

SEQ ID NO: 44726 - protein, 154 aa, unidentified
  source 1..154: note = Bradyrhizobium valentinum
  REGION 1..154: note = tr|A0A0R3KDB7|A0A0R3KDB7_9BRAD NADPH-dependent 7-cyano-7-deazaguanine reductase OS=Bradyrhizobium valentinum OX=1518501 GN=queF PE=3 SV=1
MAKKSLQKSLQLGRAVEWPDSPEKAQLDRVPNPQADTNYLVRFTAPEFTSICPVTGQPDFAHLMIDYVPGQWLLESKSLKLYVASFRNHGAFHEDCTVMIGKRIAAEIMPKWLRIGGYWYPRGGIPIDVFWQTGKLPNGMWVPDQGVAPYRGRG

SEQ ID NO: 44727 - protein, 153 aa, unidentified
  source 1..153: note = Bradyrhizobium vignae
  REGION 1..153: note = tr|A0A4Q0QKZ6|A0A4Q0QKZ6_9BRAD NADPH-dependent 7-cyano-7-deazaguanine reductase OS=Bradyrhizobium vignae; OX = 1549949 GN=queF PE=3 SV=1
MTMMAKKSLQLGRAVEWPHTPEEAQLDRVPNPQKGTDYLVRFTVPEFTSLCPVTGQPDFAHLMIDYAPGAWLLESKSLKLYIASFRNHGAFHEDCTVMIGKRIASEIKPKWLRIGGYWYPRGGIPIDVFWQTGRVPKGLWVPEQGVAPYRGRG

SEQ ID NO: 44728 - protein, 158 aa, Bradyrhizobium yuanmingense
  REGION 1..158: note = tr|A0A0R3BQQ1|A0A0R3BQQ1_9BRAD NADPH-dependent 7-cyano-7-deazaguanine reductase OS=Bradyrhizobium yuanmingense OX=108015 GN=queF PE=3 SV=1
MLHRTLTTMAKKSLQLGRAVEWPHTPEEAQLDRVPNPQKGTDYLVRFTVPEFTSLCPVTGQPDFAHLMIDYAPGAWLLESKSLKLYIASFRNHGAFHEDCTVMIGKRIASEIKPKFLRIGGYWYPRGGIPIDVFWQTGRVPKGLWVPEQGVAPYRGRG

SEQ ID NO: 44729 - protein, 150 aa, Bradyrhizobium yuanmingense; identical to SEQ ID NO: 44710
  REGION 1..150: note = tr|A0A1C3W7K6|A0A1C3W7K6_9BRAD NADPH-dependent 7-cyano-7-deazaguanine reductase OS=Bradyrhizobium yuanmingense OX=108015 GN=queF PE=3 SV=1

SEQ ID NO: 44730 - protein, 153 aa, unidentified
  source 1..153: note = Bradyrhizobium zhanjiangense
  REGION 1..153: note = tr|A0A4Q0QDU4|A0A4Q0QDU4_9BRAD NADPH-dependent 7-cyano-7-deazaguanine reductase OS=Bradyrhizobium zhanjiangense OX=1325107 GN=queF PE=3 SV=1
MTTMAKKSLQLGRAVEWPHTPEEAQLDRVPNPQKGTDYLVRFTVPEFTSLCPVTGQPDFAHLVIDYAPGAWLLESKSLKLYIASFRNHGAFHEDCTVMIGKRIASEIKPKWLRIGGYWYPRGGIPIDVFWQTGRVPKGLWAPEQGVAPYRGRG

SEQ ID NO: 44731 - protein, 150 aa, unidentified
  source 1..150: note = Bradyrhizobium zhanjiangense
  REGION 1..150: note = tr|A0A4Q0SJA6|A0A4Q0SJA6_9BRAD NADPH-dependent 7-cyano-7-deazaguanine reductase OS=Bradyrhizobium zhanjiangense OX=1325107 GN=queF PE=3 SV=1
MAKKSLQLGRAVEWPHTPEEAQLDRVPNPQKGTDYLVRFTVPEFTSLCPVTGQPDFAHLVIDYAPGAWLLESKSLKLYMASFRNHGAFHEDCTVMIGKRIASEIKPKWLRIGGYWYPRGGIPIDVFWQTGRAPKGLWAPEQGVAPYRGRG

SEQ ID NO: 44732 - protein, 282 aa, Brenneria alni
  REGION 1..282: note = tr|A0A421DQQ4|A0A421DQQ4_9GAMM NADPH-dependent 7-cyano-7-deazaguanine reductase OS=Brenneria alni; OX = 71656 GN=queF PE=3 SV=1
MSAYDKHQALSGLTLGKPTPYHDRYDAALLQPVPRSLNREPLGIFPQALPFHGADIWTLYELSWLNKNGVPQVAVGEMHLDAASLNLIESKSFKLYLNSFNQTVFDGWDSVRATLINDLAHCAQGRVSMTLFKLSELEGQPIAGLSGECIDDEDIHIDNYQFNADYLASTGGDATQVEETLVSHLLKSNCLITHQPDWGSVQIRYRGKRINRESLLRYIVSFRHHNEFHEQCVERIFNDLMHYCQPEQLSVYARYTRRGGLDINPWRSNIPFIAPVGRLPRQ

SEQ ID NO: 44733 - protein, 282 aa, unidentified
  source 1..282: note = Brenneria goodwinii
  REGION 1..282: note = tr|A0A0G4JQ18|A0A0G4JQ18_9GAMM NADPH-dependent 7-cyano-7-deazaguanine reductase OS=Brenneria goodwinii; OX = 1109412 GN=queF PE=3 SV=1
MSAYDKHQSLSELTLGKPTAYHDRYDAGLLQPVPRSLNREPLGIFPQALPFHGEDIWTLYELSWLNKNGVPQVAVGEMHLDAASQNLVESKSFKLYLNSFNQTVFDSWDSVRATLINDLSRCAQGRVDMTLFKLGELEGQPIAAFHGECIDDQDIHIDNYAFNADYLASSADNDIHVEETLVSHLLKSNCLITHQPDWGSVQIHYRGKRINRESLLRYIVSFRHHNEFHEQCVERIFNDLMRYCQPEQLSVYARYTRRGGLDINPWRSNVPFTAPVGRLPRQ

SEQ ID NO: 44734 - protein, 282 aa, Brenneria nigrifluens
  REGION 1..282: note = tr|A0A2U1UW53|A0A2U1UW53_9GAMM NADPH-dependent 7-cyano-7-deazaguanine reductase OS=Brenneria nigrifluens DSM 30175 = ATCC 13028 OX=1121120 GN=queF PE=3 SV=1
MSAYDKHQALSGLTLGKPTPYHDRYDAGLLQPVPRSLNREPLGILPQKLPFHGADIWTLYELSWLNQNGVPQVAVGEMHLDAASLNLIESKSFKLYLNSFNQTVFDSWERVRATLIDDLAQCAQGQVKVTLFRLGELEGRPIAAFHGECIDDQNIRIDNYAFNADYLAANAQDETWVEETLVSHLLKSNCLITHQPDWGSVQIRYRGKRINRESLLRYIVSFRHHNEFHEQCVERIFNDLMHYCRPQQLSVYARYTRRGGLDINPWRSNAPFTPATGRLPRQ

SEQ ID NO: 44735 - protein, 289 aa, unidentified
  source 1..289: note = Brenneria roseae
  REGION 1..289: note = tr|A0A2U1TZW1|A0A2U1TZW1_9GAMM NADPH-dependent 7-cyano-7-deazaguanine reductase OS=Brenneria roseae subsp. americana OX=1508507 GN=queF PE=3 SV=1
MSVYDKHQALSGLTLGKPTPYHDRYDAGLLQPVPRSLNREPLGIFPDSLPFHGADIWTLYELSWLNPNGIPQVAVGEMRLEADSLNLIESKSFKLYLNSFNQTQFDSWEAVRTTLIADLGRCAQGQVSVTLFKLSELEGLPIARFAGECIDDQDIRIDSYEFSADYLIPGASDEASSMEDDRVVEETLVSHLLKSNCLITHQPDWGSVQIHYRGRRINREALLRYIVSFRHHNEFHEQCVERIFNDLMRYYQPETLSVYARYTRRGGLDINPWRSNTAFIAPDGRLPRQ

SEQ ID NO: 44736 - protein, 288 aa, Brenneria rubrifaciens
  REGION 1..288: note = tr|A0A4P8QN21|A0A4P8QN21_9GAMM NADPH-dependent 7-cyano-7-deazaguanine reductase OS=Brenneria rubrifaciens; OX = 55213 GN=queF PE=3 SV=1
MSIDKHQALSGLTLGKPTPYHDRYDAKLLQPVPRSLNREPLGISPDSLPFHGADIWTLYELSWLKPNGVPQVAVGEMRLDANSLNLIESKSFKLYLNSFNQTRFESWEAVRTTLIKDLGQCAQGQVSVALFRLSELEGQQIARFEGECIDDQDIRIDSYAFNADHLASASPDATPSAEESPIVEETLVSHLLKSNCLITHQPDWGSIQIRYRGKRINREALLRYIVSFRHHNEFHEQCVERVFNDLMRYCQPQALSVYARYTRRGGLDINPWRSNATFNPSNVRLPRQ

SEQ ID NO: 44737 - protein, 289 aa, Brenneria salicis
  REGION 1..289: note = tr|A0A366I8B9|A0A366I8B9_9GAMM NADPH-dependent 7-cyano-7-deazaguanine reductase OS=Brenneria salicis ATCC 15712 = DSM 30166 OX=714314 GN=queF PE=3 SV=1
MSIYDKHQALSALTLGKPTPYHDHYDAGLLQPVPRSLNREPLGIFPDSQPFHGADIWTLYELSWLNPNGVPQVAVGEMHLDANSLNLIESKSFKLYLNSFNQTQFANWEEVRTTLIKDLGQCAQGQVSVALFKLSELEGQPIAGFAGECIDDQDIRIDSYAFNADYLAAGSQGGRSSAETNQIVEETLVSHLLKSNCLITHQPDWGSVQIRYRGQRINREALLRYIVSFRHHNEFHEQCVERIFNDLMRYYQPETLSVYARYTRRGGLDINPWRSNGAFIAPNGRLPRQ

SEQ ID NO: 44738 - protein, 282 aa, Brenneria sp.; identical to SEQ ID NO: 44734
  REGION 1..282: note = tr|G7LRM5|G7LRM5_9GAMM NADPH-dependent 7-cyano-7-deazaguanine reductase OS=Brenneria sp. EniD312; OX = 598467 GN=queF PE=3 SV=1

SEQ ID NO: 44739 - protein, 282 aa, Brenneria sp.
  REGION 1..282: note = tr|A0A5J5FRU4|A0A5J5FRU4_9GAMM NADPH-dependent 7-cyano-7-deazaguanine reductase QueF OS=Brenneria sp. L3-3HA OX=2590031 GN=queF PE=4 SV=1
MSLYDNHPALNELTLGKTTVWRDRYDASLLQAVPRSLNREPLGLRPDNLPFHGADIWTLYELSWLNGNGLPQVALGEMSLDAGSLNLIESKSFKLYLNSFNQTRFASWQDVRTTMERDLSQCAQGKVHIRIFKLSEIEGQAIATLAGDCIDEQDIQIDDYQFNAGYLSDAPRRQGVVEETLVSHLLKSNCLITHQPDWGSVQIHYRGARIDREALLRYLVSFRHHNEFHEQCVERIFNDIMRFYQPERLSVYARYTRRGGLDINPWRSNYPFEPPRGRLARQ

SEQ ID NO: 44740 - protein, 154 aa, Breoghania sp.
  REGION 1..154: note = tr|A0A346QY02|A0A346QY02_9RHIZ NADPH-dependent 7-cyano-7-deazaguanine reductase OS=Breoghania sp. L-A4; OX = 2304600 GN=queF PE=3 SV=1
MSNDIYAHTTALGRPVEIPTDPETAPLDRVPNPQADVDFVTRFVCPEFTSLCPVTGQPDFAHLVIDYVPDQWLVESKSLKLYLTSYRNHGAFHEDCTVKIGRRIVELLEPRWLRIGGYWYPRGGIPIDVFWQSGEAPKSVWIPDQGVPPYRGRG

SEQ ID NO: 44741 - protein, 164 aa, Brevibacillus agri
  REGION 1..164: note = tr|A0A3M8AHF7|A0A3M8AHF7_9BACL NADPH-dependent 7-cyano-7-deazaguanine reductase OS=Brevibacillus agri; OX = 51101 GN=queF PE=3 SV=1
MSEQQRDLSSLTLLGNQGTTYSYSYDPSVLESFDNKHPYRDYFVKFNCPEFTSLCPITGQPDFATIYISYIPDIKMVESKSLKLYLFSFRNHGDFHEDCVNIIMNDLIKLMDPKYIEVWGKFTPRGGISIDPYCNYGRPGTKYEEMASYRLMNHDMYPEKVDNR

SEQ ID NO: 44742 - protein, 143 aa, Brevibacillus borstelensis
  REGION 1..143: note = tr|M8D710|M8D710_9BACL NADPH-dependent 7-cyano-7-deazaguanine reductase OS=Brevibacillus borstelensis AK1 OX=1300222 GN=queF PE=3 SV=1
MKEMATVEHNHSKYNSIRFDTQDESAILVDILETIPYEYVGKRTEIMMPTNEFTSVCPWSGLPDFADLKIYLVPNEKLIEMKSLKYYLTSYRNVGIYQEHATNRILNDLVACCDPLYMRIVAVWNARGGLGTEVVVEYVKEEA

SEQ ID NO: 44743 - protein, 165 aa, Brevibacillus brevis
  REGION 1..165: note = tr|C0ZJI8|C0ZJI8_BREBN NADPH-dependent 7-cyano-7-deazaguanine reductase OS=Brevibacillus brevis (strain 47 / JCM 6285 / NBRC 100599) OX=358681 GN=queF; PE = 3 SV=1
MAHQQERDLSSLTLLGNQGTTYNYSYDPSVLESFDNKHPYRDYFVKFNCPEFTSLCPITGQPDFATIYISYIPDIKMVESKSLKLYLFSFRNHGDFHEDCVNVIMNDLIKLMDPRYIEVWGKFTPRGGISIDPYCNYGKPGTKYEEMASHRMMNHDMYPEKVDNR

SEQ ID NO: 44744 - protein, 165 aa, Brevibacillus brevis; identical to SEQ ID NO: 44743
  REGION 1..165: note = tr|A0A0J6BTP5|A0A0J6BTP5_BREBE NADPH-dependent 7-cyano-7-deazaguanine reductase OS=Brevibacillus brevis; OX = 1393 GN=queF PE=3 SV=1

SEQ ID NO: 44745 - protein, 165 aa, Brevibacillus choshinensis
  REGION 1..165: note = tr|A0A0Q3WI74|A0A0Q3WI74_BRECH NADPH-dependent 7-cyano-7-deazaguanine reductase OS=Brevibacillus choshinensis OX=54911 GN=queF PE=3 SV=1
MANQQERDLSSLTLLGNQGTTYPNTYDPSVLESFDNKHPYRDYFVKFNCPEFTSLCPITGQPDFATIYISYIPDIKMVESKALKLYLFSFRNHGDFHEDCVNIIMNDLIKLMDPRYIEVWGKFTPRGGISIDPYCNYGKPGTKYEEMAMHRLMNHDMYPEKVDNR

SEQ ID NO: 44746 - protein, 167 aa, Brevibacillus fluminis
  REGION 1..167: note = tr|A0A3M8DJB6|A0A3M8DJB6_9BACL NADPH-dependent 7-cyano-7-deazaguanine reductase OS=Brevibacillus fluminis; OX = 511487 GN=queF PE=3 SV=1
MNESTNESRDLSHLTLLGNQNTAYNYQYDPSVLETFDNKHPYRDYFVKFNCPEFTSLCPMTGQPDFATIYISYVPDIKMVESKSLKLYLFSFRNHGDFHEDCVNIIMNDLIKLMDPRYIEVWGKFTPRGGISIDPYCNYGKPGTKYEQMAEYRMMNHDMYPEKVDNR

SEQ ID NO: 44747 - protein, 165 aa, Brevibacillus formosus
  REGION 1..165: note = tr|A0A4Y4I3A6|A0A4Y4I3A6_9BACL NADPH-dependent 7-cyano-7-deazaguanine reductase OS=Brevibacillus formosus; OX = 54913 GN=queF PE=3 SV=1
MAHQQERDLSSLTLLGNQGTTYNYSYDPSVLESFDNKHPYRDYFVKFNCPEFTSLCPITGQPDFATIYISYIPDIKMVESKSLKLYLFSFRNHGDFHEDCVNVIMNDLIKLMNPRYIEVWGKFTPRGGISIDPYCNYGKPGTKYEEMASHRMMNHDMYPEKVDNR

SEQ ID NO: 44748 - protein, 165 aa, Brevibacillus formosus
  REGION 1..165: note = tr|A0A220MKE7|A0A220MKE7_9BACL NADPH-dependent 7-cyano-7-deazaguanine reductase OS=Brevibacillus formosus; OX = 54913 GN=queF PE=3 SV=1
MAHQHERDLSSLTLLGNQGTTYNYSYDPSVLESFDNKHPYRDYFVKFNCPEFTSLCPITGQPDFATIYISYIPDIKMVESKSLKLYLFSFRNHGDFHEDCVNVIMNDLIKLMDPRYIEVWGKFTPRGGISIDPYCNYGKPGTKYEEMASHRMMNHDMYPEKVDNR

SEQ ID NO: 44749 - protein, 164 aa, unidentified
  source 1..164: note = Brevibacillus gelatini
  REGION 1..164: note = tr|A0A3M8BCD3|A0A3M8BCD3_9BACL NADPH-dependent 7-cyano-7-deazaguanine reductase OS=Brevibacillus gelatini; OX = 1655277 GN=queF PE=3 SV=1
MNEQQRDLSSLTLLGNQKTTYNYSYDPSVLETFDNKHPYRDYFVKFNCPEFTSLCPITGQPDFATIYISYIPDVKMVESKSLKLYLFSFRNHGDFHEDCVNVIMNDLIKLMDPKYIEVWGKFTPRGGISIDPYCNYGRPGTKYEEMASYRLMNHDMYPEKVDNR

SEQ ID NO: 44750 - protein, 165 aa, Brevibacillus invocatus
  REGION 1..165: note = tr|A0A3M8C2S6|A0A3M8C2S6_9BACL NADPH-dependent 7-cyano-7-deazaguanine reductase OS=Brevibacillus invocatus OX=173959 GN=queF PE=3 SV=1
MANHEERDLSSLTLLGNQGTTYNYTYDPGVLETFDNKHPYRDYFVKFNCPEFTSLCPITGQPDFATIYISYVPDIKMVESKSLKLYLFSFRNHGDFHEDCVNIIMNDLIKLMEPRYIEVWGKFTPRGGISIDPYCNYGKPGTKYEEMAQFRMMNHDLYPEKVDNR

SEQ ID NO: 44751 - protein, 168 aa, Brevibacillus laterosporus
  REGION 1..168: note = tr|A0A075QZH8|A0A075QZH8_BRELA NADPH-dependent 7-cyano-7-deazaguanine reductase OS=Brevibacillus laterosporus LMG 15441 OX=1042163 GN=queF PE=3 SV=1
MTHNNQSTNPQLKDLTLLGNQQTAYHYEYNPNVLEAFDNKHPYRDYWVKFNCPEFTSLCPMTGQPDFATIYISYIPDKKMVESKSLKLYLFSFRNHGDFHEDCMNIIMNDLIKLMDPKYIEVWGKFTPRGGISIDPYCNYGKPDTKFEEMAEHRMMNHDMYPEKVDNR

SEQ ID NO: 44752 - protein, 168 aa, Brevibacillus laterosporus
  REGION 1..168: note = tr|H0UFU2|H0UFU2_BRELA NADPH-dependent 7-cyano-7-deazaguanine reductase OS=Brevibacillus laterosporus GI-9 OX=1118154 GN=queF PE=3 SV=1
MTHNNQSTNPQLKDLTLLGNQQTAYHYEYNPNVLEAFDNKHPYRDYWVKFNCPEFTSLCPMTGQPDFATIYISYIPDKKMVESKSLKLYLFSFRNHGDFHEDCMNIIMNDLIKLMDPKYIEVWGKFTPRGGISIDPYCNYGKPGTKFEEMAEHRMMNHDMYPEKVDNR

SEQ ID NO: 44753 - protein, 165 aa, unidentified
  source 1..165: note = Brevibacillus nitrificans
  REGION 1..165: note = tr|A0A3M8CTY5|A0A3M8CTY5_9BACL NADPH-dependent 7-cyano-7-deazaguanine reductase OS=Brevibacillus nitrificans OX=651560 GN=queF PE=3 SV=1
MANQQERDLASLTLLGNQGTTYPQTYDPTVLESFDNKHPYRDYFVKFNCPEFTSLCPITGQPDFATIYISYIPDIKMVESKALKLYLFSFRNHGDFHEDCVNIIMNDLIKLMDPRYIEVWGKFTPRGGISIDPYCNYGKPGTKYEEMAMHRLMNHDMYPEKVDNR

SEQ ID NO: 44754 - protein, 165 aa, Brevibacillus panacihumi
  REGION 1..165: note = tr|A0A3M8CRZ2|A0A3M8CRZ2_9BACL NADPH-dependent 7-cyano-7-deazaguanine reductase OS=Brevibacillus panacihumi OX=497735 GN=queF PE=3 SV=1
MANHEERDLSSLTLLGNQGTTYNYTYDPDVLETFYNKHPYRDYFVKFNCPEFTSLCPITGQPDFATIYISYVPDIKMVESKSLKLYLFSFRNHGDFHEDCVNIIMNDLIKLMEPRYIEVWGKFTPRGGISIDPYCNYGKPGTKYEEMANYRMMNHDLYPEKVDNR

SEQ ID NO: 44755 - protein, 165 aa, Brevibacillus panacihumi
  REGION 1..165: note = tr|V6M4T7|V6M4T7_9BACL NADPH-dependent 7-cyano-7-deazaguanine reductase OS=Brevibacillus panacihumi W25 OX=1408254 GN=queF PE=3 SV=1
MANQEERDLSSLTLLGNQGTTYNYTYDPSVLETFDNKHPYRDYFVKFNCPEFTSLCPITGQPDFATIYISYVPDIKMVESKSLKLYLFSFRNHGDFHEDCVNIIMNDLIKLMEPRYIEVWGKFTPRGGISIDPYCNYGKPGTKYEEMANYRMMNHDLYPEKVDNR

SEQ ID NO: 44756 - protein, 164 aa, Brevibacillus parabrevis
  REGION 1..164: note = tr|A0A4Y3PVJ4|A0A4Y3PVJ4_BREPA NADPH-dependent 7-cyano-7-deazaguanine reductase OS=Brevibacillus parabrevis OX=54914 GN=queF PE=3 SV=1
MNEQQRDLSSLTLLGNQGTTYNYSYDPSVLESFDNKHPYRDYFVKFNCPEFTSLCPITGQPDFATIYISYIPDIKMVESKSLKLYLFSFRNHGDFHEDCVNVIMNDLIKLMDPKYIEVWGKFTPRGGISIDPYCNYGKPGTKYEEMASYRLMNHDMYPERVDNR

SEQ ID NO: 44757 - protein, 165 aa, Brevibacillus reuszeri
  REGION 1..165: note = tr|A0A0K9YK65|A0A0K9YK65_9BACL NADPH-dependent 7-cyano-7-deazaguanine reductase OS=Brevibacillus reuszeri; OX = 54915 GN=queF PE=3 SV=1
MSNHQERDLSSLTLLGNQGTTYNYSYDPGVLESFDNKHPYRDYFVKFNCPEFTSLCPITGQPDFATIYISYIPDIKMVESKSLKLYLFSFRNHGDFHEDCVNVIMNDLIKLMDPKYIEVWGKFTPRGGISIDPYCNYGKPGTKYEEMASYRLMNHDMYPEKVDNR

SEQ ID NO: 44758 - protein, 165 aa, Brevibacillus sp.
  REGION 1..165: note = tr|A0A553KQE2|A0A553KQE2_9BACL NADPH-dependent 7-cyano-7-deazaguanine reductase OS=Brevibacillus sp. LEMMJ03 OX=2595056 GN=queF PE=3 SV=1
MDNRQERDLSSLTLLGNQQTKYSYTYDPDVLETFDNKHPYRDYFVKFNCPEFTSLCPITGQPDFATIYISYIPDKKMVESKSLKLYLFSFRNHGDFHEDCVNIIMNDLIKLMDPKYIEVWGKFTPRGGISIDPYCNYGRPGTKYEKMAEYRLMNHDMYPEKVDNR

SEQ ID NO: 44759 - protein, 165 aa, Brevibacillus sp.; identical to SEQ ID NO: 44743
  REGION 1..165: note = tr|A0A2P7ULJ9|A0A2P7ULJ9_9BACL NADPH-dependent 7-cyano-7-deazaguanine reductase OS=Brevibacillus sp. NRRL NRS-1210 OX=2126352 GN=queF PE=3 SV=1

SEQ ID NO: 44760 - protein, 165 aa, unidentified; identical to SEQ ID NO: 44356
  source 1..165: note = [Brevibacterium] frigoritolerans
  REGION 1..165: note = tr|A0A4R6AG40|A0A4R6AG40_9BACI NADPH-dependent 7-cyano-7-deazaguanine reductase OS=[Brevibacterium] frigoritolerans OX=450367 GN=queF PE=3 SV=1

SEQ ID NO: 44761 - protein, 166 aa, unidentified
  source 1..166: note = [Brevibacterium] frigoritolerans
  REGION 1..166: note = tr|A0A3Q9SF13|A0A3Q9SF13_9BACI NADPH-dependent 7-cyano-7-deazaguanine reductase OS=[Brevibacterium] frigoritolerans OX=450367 GN=queF PE=3 SV=1
MSGRKEEELKKDITLLGNQGTKYTFDYAPEILESFDNKHPNRDYFVKFNCPEFTSLCPITGQPDFATIYISYIPSVKMVESKSLKLYLFSFRNHGDFHEDCMNIIMNDLIELMDPKYIEVWGKFTPRGGISIDPYTNYGKPGTKYEEMANYRLMNHDLYPETVDNR

SEQ ID NO: 44762 - protein, 146 aa, unidentified
  source 1..146: note = Brevifollis gellanilyticus
  REGION 1..146: note = tr|A0A512MD46|A0A512MD46_9BACT NADPH-dependent 7-cyano-7-deazaguanine reductase OS=Brevifollis gellanilyticus OX=748831 GN=queF PE=3 SV=1
MSDTKSSDLSLLGRSEHRLPASPDEAALETFPNRTPGRNYTIHLSQPDFASLCPVTGQPDAAHIEIIYIPDTSCVETKSLKFYLASFRNHASFNEAIVNRILDDLVKACAPKQAIVRGRFVPRGGIQLTCEARFPNFEGTLEMPKP

SEQ ID NO: 44763 - protein, 154 aa, unidentified
  source 1..154: note = Brevirhabdus pacifica
  REGION 1..154: note = tr|A0A1U7DHJ3|A0A1U7DHJ3_9RHOB NADPH-dependent 7-cyano-7-deazaguanine reductase OS=Brevirhabdus pacifica; OX = 1267768 GN=queF PE=3 SV=1
MSDNIYQNLTMLGGDTKQPASPEEAVLERVPNPQADVNYAVRFTAPEFTSLCPMTGQPDFAHLVIDYVPGDWLVESKSLKLFLTSFRNHGAFHEDCSVTVARRLIDTLEPRWLRLGGYWYPRGGIPIDIFYQTGEVPAGVWVPDQGVSTYRGRG

SEQ ID NO: 44764 - protein, 153 aa, unidentified
  source 1..153: note = Brevundimonas abyssalis
  REGION 1..153: note = tr|U2ZDC9|U2ZDC9_9CAUL NADPH-dependent 7-cyano-7-deazaguanine reductase OS=Brevundimonas abyssalis TAR-001 OX=1391729 GN=queF PE=3 SV=1
MTTNTSGLTQLGGDVRGFDSPEQAVLERVPNPHADTLYLARFTAPEFTSLCPVTAQPDFAHLVIDYAPGDWLVESKSLKMYLTSFRNHGAFHEDCTVAIGKRLADLLAPKWLRIGGYWYPRGGIPIDVFWQTGTAPEGLWLPDQGVPTYRGRG

SEQ ID NO: 44765 - protein, 156 aa, Brevundimonas diminuta
  REGION 1..156: note = tr|A0A1R4FQ19|A0A1R4FQ19_BREDI NADPH-dependent 7-cyano-7-deazaguanine reductase OS=Brevundimonas diminuta 3F5N OX=1255603 GN=queF PE=3 SV=1
MAGMTHYTDSLSQLGAQTAAPTNPEEAVLERVPNPHADTLYVARFTAPEFTSLCPVTGQPDFAHIVIDYVPGDWLVESKSLKLYLTSFRNHGAFHEDCTVAIGKRLAELLQPKWLRIGGYWYPRGGIPIDVFWQTGAPLEGVWLPDQGVATYRGRG

SEQ ID NO: 44766 - protein, 156 aa, Brevundimonas diminuta
  REGION 1..156: note = tr|L1QLF3|L1QLF3_BREDI NADPH-dependent 7-cyano-7-deazaguanine reductase OS=Brevundimonas diminuta 470-4 OX=1035191 GN=queF PE=3 SV=1
MAGMTHYTDSLSQLGAQTAAPTNPEEAVLERVPNPHADTLYVARFTAPEFTSLCPVTNQPDFAHIVIDYVPGDWLVESKSLKLYLTSFRNHGAFHEDCTVAIGKRLAELLQPKWLRIGGYWYPRGGIPIDVFWQTGAPLEGVWLPDQGVAGYRGRG

SEQ ID NO: 44767 - protein, 153 aa, Brevundimonas intermedia
  REGION 1..153: note = tr|A0A4Y9RZI0|A0A4Y9RZI0_9CAUL NADPH-dependent 7-cyano-7-deazaguanine reductase OS=Brevundimonas intermedia OX=74315 GN=queF PE=3 SV=1
MTHYTDNLSQLGAQTAAPTSPETAVLERVPNPHADTLYLARFTAPEFTSLCPVTGQPDFAHIVIDYAPGEWLVESKSLKLYLTSFRNHGAFHEDCTVAIGRRLAELLEPKWLRIGGYWYPRGGIPIDVFWQTGVAPEGLWLPDQGVPTYRGRG

SEQ ID NO: 44768 - protein, 153 aa, Brevundimonas naejangsanensis
  REGION 1..153: note = tr|A0A172Y9B3|A0A172Y9B3_9CAUL NADPH-dependent 7-cyano-7-deazaguanine reductase OS=Brevundimonas naejangsanensis OX=588932 GN=queF PE=3 SV=1
MTHYTDSLSQLGVQTAAPTNPQEAVLERVPNPHADTLYVARFTAPEFTSLCPVTNQPDFAHLVIDYVPGDWLVESKSLKLYLTSFRNHGAFHEDCTVAIGKRLAELLQPKWLRIGGYWYPRGGIPIDVFWQTGAPLEGVWLPDQGVAGYRGRG

SEQ ID NO: 44769 - protein, 153 aa, Brevundimonas naejangsanensis
  REGION 1..153: note = tr|A0A494RIV2|A0A494RIV2_9CAUL NADPH-dependent 7-cyano-7-deazaguanine reductase OS=Brevundimonas naejangsanensis OX=588932 GN=queF PE=3 SV=1
MTHYTDSLSQLGAQTAAPTNPQEAVLERVPNPHADTLYVARFTAPEFTSLCPVTNQPDFAHLVIDYVPGDWLVESKSLKLYLTSFRNHGAFHEDCTVAIGKRLAELLQPKWLRIGGYWYPRGGIPIDVFWQTGAPLEGVWLPDQGVAGYRGRG

SEQ ID NO: 44770 - protein, 153 aa, Brevundimonas nasdae
  REGION 1..153: note = tr|A0A0B4CHW0|A0A0B4CHW0_9CAUL NADPH-dependent 7-cyano-7-deazaguanine reductase OS=Brevundimonas nasdae; OX = 172043 GN=queF PE=3 SV=1
MTHYTDNLSQLGAQTAAPTSPETAVLERVPNPHADTLYLARFTAPEFTSLCPVTGQPDFAHIVIDYAPGGWLVESKSLKLYLTSFRNHGAFHEDCTVAIGRKLADLLEPKWLRIGGYWYPRGGIPIDVFWQTGAPPEGLWMPDQGVPTYRGRG

SEQ ID NO: 44771 - protein, 153 aa, Brevundimonas sp.
  REGION 1..153: note = tr|A0A0Q7SKI8|A0A0Q7SKI8_9CAUL NADPH-dependent 7-cyano-7-deazaguanine reductase OS=Brevundimonas sp. Root1423 OX=1736462 GN=queF PE=3 SV=1
MTTDTSGLHQLGQHTVQPTSPETAELERVPNPHADTLYLTRFTAPEFTSLCPVTGQPDFAHIVIDYAPGDWLVESKSLKLYLTSFRNHGAFHEDCTVAIGKKIADLLQPKWLRIGGYWYPRGGIPIDVFWQTGAAPAGLWLPDQGVPTYRGRG

SEQ ID NO: 44772 - protein, 153 aa, Brevundimonas sp.
  REGION 1..153: note = tr|A0A2D8FRK3|A0A2D8FRK3_9CAUL NADPH-dependent 7-cyano-7-deazaguanine reductase OS=Brevundimonas sp.; OX = 1871086 GN=queF PE=3 SV=1
MTHYTDNLSQLGAQTAAPTSPETAVLERVPNPHADTLYLARFTAPEFTSLCPVTGQPDFAHIVIDYAPGDWLVESKSLKLYLTSFRNHGAFHEDCTVAIGRRLADLLEPKWLRIGGYWYPRGGIPIDVFWQTGPAPEGLWLPDQGVPTYRGRG

SEQ ID NO: 44773 - protein, 153 aa, Brevundimonas subvibrioides
  REGION 1..153: note = tr|A0A258FSW0|A0A258FSW0_9CAUL NADPH-dependent 7-cyano-7-deazaguanine reductase OS=Brevundimonas subvibrioides OX=74313 GN=queF PE=3 SV=1
MTTDTSGLSQLGRQTHQPDSPETAVLERVPNPHPDALYLARFTAPEFTSLCPVTGQPDFAHLVIDYAPAEWLVESKSLKLYLTAFRNHGAFHEDCTVAVGRRIADLLQPRWLRIGGYWYPRGGIPIDVFWQTGSPPDGLWLPDQGVPTYRGRG

SEQ ID NO: 44774 - protein, 153 aa, Brevundimonas subvibrioides
  REGION 1..153: note = tr|D9QGV6|D9QGV6_BRESC NADPH-dependent 7-cyano-7-deazaguanine reductase OS=Brevundimonas subvibrioides (strain ATCC 15264 / DSM 4735 / LMG 14903 / NBRC 16000 / CB 81 ) OX=633149 GN=queF PE=3 SV=1
MTTDTSGLSQLGQHTVQPTTPETAVLERVPNPHPDTLYLARFTAPEFTSLCPVTSQPDFAHIVIDYAPGDWLVESKSLKMYLTAFRNHGAFHEDCTVAIGKRIADLLSPRWLRIGGYWYPRGGIPIDVFWQTGAPPEGLWLPDQGVPTYRGRG

SEQ ID NO: 44775 - protein, 156 aa, Brevundimonas vancanneytii
  REGION 1..156: note = tr|A0A4P1KA21|A0A4P1KA21_9CAUL NADPH-dependent 7-cyano-7-deazaguanine reductase OS=Brevundimonas vancanneytii OX=1325724 GN=queF PE=3 SV=1
MAGMTHYTDSLSQLGVQTAAPTNPEEAVLERVSNPHADTLYVARFTAPEFTSLCPVTGQPDFAHIVIDYVPGDWLVESKSLKLYLTSFRNHGAFHEDCTVAIGKRLAELLQPKWLRIGGYWYPRGGIPIDVFWQTGAPLEGVWLPDQGVATYRGRG

SEQ ID NO: 44776 - protein, 156 aa, Brevundimonas vesicularis
  REGION 1..156: note = tr|A0A2X1B8B6|A0A2X1B8B6_BREVE NADPH-dependent 7-cyano-7-deazaguanine reductase OS=Brevundimonas vesicularis OX=41276 GN=queF PE=3 SV=1
MPGMTHYTDNLSQLGAQTAAPTSPETAVLERVPNPHADTLYLARFTAPEFTSLCPVTGQPDFAHIVIDYAPGDWLVESKSLKLYLTSFRNHGAFHEDCTVAIGRKLADLLEPKWLRIGGYWYPRGGIPIDVFWQTGAPPEGLWLPDQGVPTYRGRG

SEQ ID NO: 44777 - protein, 153 aa, Brevundimonas vesicularis
  REGION 1..153: note = tr|A0A1Z3UDA6|A0A1Z3UDA6_BREVE NADPH-dependent 7-cyano-7-deazaguanine reductase OS=Brevundimonas vesicularis OX=41276 GN=queF PE=3 SV=1
MTHYTDNLSQLGAQTAAPTSPETAVLERVPNPHADTLYLARFTAPEFTSLCPVTGQPDFAHIVIDYAPGDWLVESKSLKLYLTSFRNHGAFHEDCTVAIGRKLADLLEPKWLRIGGYWYPRGGIPIDVFWQTGAPPEGLWLPDQGVPTYRGRG

SEQ ID NO: 44778 - protein, 153 aa, unidentified
  source 1..153: note = Brevundimonas viscosa
  REGION 1..153: note = tr|A0A1I6SWF1|A0A1I6SWF1_9CAUL NADPH-dependent 7-cyano-7-deazaguanine reductase OS=Brevundimonas viscosa; OX = 871741 GN=queF PE=3 SV=1
MTTDTSGLHQLGQMTPAPTSPETAVLERVPNPHADTLYLARFTAPEFTSLCPVTGQPDFAHIVIDYAPGDWLVESKSLKLYLTSFRNHGAFHEDCTVAIGKRLVDLLHPKWLRIGGYWYPRGGIPIDVFWQTGPAPEGLWLPDQGVPTYRGRG

SEQ ID NO: 44779 - protein, 155 aa, unidentified
  source 1..155: note = Brucella abortus
  REGION 1..155: note = tr|D7GYT4|D7GYT4_BRUAO NADPH-dependent 7-cyano-7-deazaguanine reductase OS=Brucella abortus bv. 5 str. B3196 OX=520453 GN=queF PE=3 SV=1
MSENTIYSGLKQLGSHTDIPLTPEEAVLERVANPQEGTPYCVRFTAPEFSSLCPMTGQPDFAHLVIDYVPGKWLVESKSLKLFLFSFRNHGAFHEDCTVTIGKRLVDLLEPEWLRIGGYWYPRGGIPIDVFYQTGAAPLNVWIPEQGVANYRGRG

SEQ ID NO: 44780 - protein, 155 aa, unidentified; identical to SEQ ID NO: 44779
  source 1..155: note = Brucella abortus
  REGION 1..155: note = sp|Q2YRW5|QUEF_BRUA2 NADPH-dependent 7-cyano-7-deazaguanine reductase OS=Brucella abortus (strain 2308) OX=359391 GN=queF PE=3 SV=1

SEQ ID NO: 44781 - protein, 155 aa, unidentified
  source 1..155: note = Brucella canis
  REGION 1..155: note = sp|A9M5J8|QUEF_BRUC2 NADPH-dependent 7-cyano-7-deazaguanine reductase OS=Brucella canis (strain ATCC 23365 / NCTC 10854) OX=483179 GN=queF PE=3 SV=1
MSENTIYSGLKQLGSHTDIPLTPEEAVLERVANPQEGTPYCVRFTAPEFTSLCPMTGQPDFAHLVIDYVPGKWLVESKSLKLFLFSFRNHGAFHEDCTVTIGKRLVDLLEPEWLRIGGYWYPRGGIPIDVFYQTGAAPLNVWIPEQGVANYRGRG

SEQ ID NO: 44782 - protein, 155 aa, Brucella ceti; identical to SEQ ID NO: 44781
  REGION 1..155: note = tr|C0G6R9|C0G6R9_9RHIZ NADPH-dependent 7-cyano-7-deazaguanine reductase OS=Brucella ceti str. Cudo OX=595497 GN=queF PE=3 SV=1

SEQ ID NO: 44783 - protein, 155 aa, Brucella melitensis; identical to SEQ ID NO: 44779
  REGION 1..155: note = tr|A0A4P6KJJ8|A0A4P6KJJ8_BRUML NADPH-dependent 7-cyano-7-deazaguanine reductase OS=Brucella melitensis; OX = 29459 GN=queF PE=3 SV=1

SEQ ID NO: 44784 - protein, 155 aa, Brucella melitensis; identical to SEQ ID NO: 44779
  REGION 1..155: note = sp|Q8YHJ4|QUEF_BRUME NADPH-dependent 7-cyano-7-deazaguanine reductase OS=Brucella melitensis biotype 1 (strain 16M / ATCC 23456 / NCTC 10094) OX=224914; GN = queF PE=3SV=1

SEQ ID NO: 44785 - protein, 155 aa, Brucella microti; identical to SEQ ID NO: 44781
  REGION 1..155: note = tr|C7LCD4|C7LCD4_BRUMC NADPH-dependent 7-cyano-7-deazaguanine reductase OS=Brucella microti (strain CCM 4915) OX=568815 GN=queF PE=3 SV=1

SEQ ID NO: 44786 - protein, 155 aa, unidentified; identical to SEQ ID NO: 44781
  source 1..155: note = Brucella neotomae
  REGION 1..155: note = tr|A0A381B7X0|A0A381B7X0_BRUNE NADPH-dependent 7-cyano-7-deazaguanine reductase OS=Brucella neotomae; OX = 29460 GN=queF PE=3 SV=1

SEQ ID NO: 44787 - protein, 155 aa, unidentified; identical to SEQ ID NO: 44781
  source 1..155: note = Brucella ovis
  REGION 1..155: note = tr|N8NEJ6|N8NEJ6_BRUOV NADPH-dependent 7-cyano-7-deazaguanine reductase OS=Brucella ovis IntaBari-2002-82-58 OX=1293916 GN=queF PE=3 SV=1

SEQ ID NO: 44788 - protein, 155 aa, unidentified; identical to SEQ ID NO: 44781
  source 1..155: note = Brucella ovis
  REGION 1..155: note = sp|A5VQV8|QUEF_BRUO2 NADPH-dependent 7-cyano-7-deazaguanine reductase OS=Brucella ovis (strain ATCC 25840 / 63/290 / NCTC 10512) OX=444178 GN=queF PE=3; SV = 1

SEQ ID NO: 44789 - protein, 155 aa, Brucella pinnipedialis; identical to SEQ ID NO: 44781
  REGION 1..155: note = tr|A0A0E1X2I9|A0A0E1X2I9_9RHIZ NADPH-dependent 7-cyano-7-deazaguanine reductase OS=Brucella pinnipedialis M292/94/1 OX=520462 GN=queF PE=3 SV=1

SEQ ID NO: 44790 - protein, 155 aa, Brucella sp.; identical to SEQ ID NO: 44781
  REGION 1..155: note = tr|D0RJ88|D0RJ88_9RHIZ NADPH-dependent 7-cyano-7-deazaguanine reductase OS=Brucella sp. F5/99; OX = 437701 GN=queF PE=3 SV=1

SEQ ID NO: 44791 - protein, 155 aa, Brucella sp.; identical to SEQ ID NO: 44781
  REGION 1..155: note = tr|A0A1P8S5T1|A0A1P8S5T1_9RHIZ NADPH-dependent 7-cyano-7-deazaguanine reductase OS=Brucella sp. 09RB8910; OX = 1844051 GN=queF PE=3 SV=1

SEQ ID NO: 44792 - protein, 155 aa, unidentified; identical to SEQ ID NO: 44781
  source 1..155: note = Brucella suis
  REGION 1..155: note = tr|A0A4Z0EY23|A0A4Z0EY23_BRUSS NADPH-dependent 7-cyano-7-deazaguanine reductase OS=Brucella suis OX=29461; GN = queF PE=3 SV=1

SEQ ID NO: 44793 - protein, 155 aa, unidentified; identical to SEQ ID NO: 44781
  source 1..155: note = Brucella suis
  REGION 1..155: note = sp|B0CGY1|QUEF_BRUSI NADPH-dependent 7-cyano-7-deazaguanine reductase OS=Brucella suis (strain ATCC 23445 / NCTC 10510) OX=470137 GN=queF PE=3 SV=1

SEQ ID NO: 44794 - protein, 155 aa, unidentified
  source 1..155: note = Brucellaceae bacterium
  REGION 1..155: note = tr|A0A3P1UNK0|A0A3P1UNK0_9RHIZ NADPH-dependent 7-cyano-7-deazaguanine reductase OS=Brucellaceae bacterium VT-16-1752 OX=2487907 GN=queF PE=3 SV=1
MSENTIYSGLTQLGSTTGVPTSPEEAVLEKVANPQHGTRYCVRFTAPEFTSLCPMTGQPDFAHLVIDYVPDRWLVESKSLKLFLFSFRNHGAFHEDCTVTIGKRLVDLLQPEWLRIGGYWYPRGGIPIDVFYQTGAAPQDVWIPEQGVQNYRGRG

SEQ ID NO: 44795 - protein, 133 aa, unidentified
  source 1..133: note = Bryobacterales bacterium
  REGION 1..133: note = tr|A0A359LTU9|A0A359LTU9_9BACT NADPH-dependent 7-cyano-7-deazaguanine reductase OS=Bryobacterales bacterium OX=2026791 GN=queF PE=3 SV=1
MPKKEYTDEHAGAGVDAPLPDIETWPNQYREPYEIEIEIPEFTSVCPRTGLPDHGTITIRYTPDRSCLELKSLKMYMLAYRNLGIFQENIVNRFLRDLVKAARPVSITVIGEFTPRGGVYSKITASWSRKRGK

SEQ ID NO: 44796 - protein, 132 aa, unidentified
  source 1..132: note = Bryobacterales bacterium
  REGION 1..132: note = tr|A0A3D1B0C7|A0A3D1B0C7_9BACT NADPH-dependent 7-cyano-7-deazaguanine reductase OS=Bryobacterales bacterium OX=2026791 GN=queF PE=3 SV=1
MQRSYSDEHAAAGIQAPLPGIETWPNQFAGYEIEIVIPEFTSVCPKTGLPDFGTLTLRYVPDQLCLELKSLKMYTLAYRDLGIFYENVVNRFLRDIVAAIKPVSATLVGEFTPRGGLHSKITARYSREQAGA

SEQ ID NO: 44797 - protein, 141 aa, Bryocella elongata
  REGION 1..141: note = tr|A0A1H5SJK7|A0A1H5SJK7_9BACT NADPH-dependent 7-cyano-7-deazaguanine reductase OS=Bryocella elongata; OX = 863522 GN=queF PE=3 SV=1
MGMSNTDQKHTTGYTDDHAKAGLETNFPAIETWRNQFQKYEILIDDPEFTSVCPKTGLPDFGVLKIRYMPREKCLELKSLKEYLFTYRNLGIFQENIVNQVLDDVVKATEPVWAEIVGDFRPRGGISTIVTARYPRTEEMR

SEQ ID NO: 44798 - protein, 262 aa, Buchnera aphidicola
  REGION 1..262: note = tr|W0P0R5|W0P0R5_BUCMP NADPH-dependent 7-cyano-7-deazaguanine reductase OS=Buchnera aphidicola str. USDA (Myzus persicae) OX=1009856 GN=quef PE=3 SV=1
MSFKINHFSLLKSIPRKKHRKVIELNLVHLPFIGQDIWTLYELSWLNKNGLPQVSVAKIEINATSVNIIESKSFKIYINSFNQVKFDNYINFIKILQADLTKCAGGEVSIKLFNLDEIQNQKISNFSGYCIDNQNIKIKHYEYNRLLLVNSSKKEIVQESIYSNLFKSNCPITHQPDWASIQIIYTGQAINHNALLSYLISFRNCNEFHEECIERIFNDLETVCKPEKLSVYARYTRRGGIDINPWRSNAVYSPCLIRMARQ

SEQ ID NO: 44799 - protein, 263 aa, Buchnera aphidicola
  REGION 1..263: note = tr|A0A5J6ZC40|A0A5J6ZC40_9GAMM NADPH-dependent 7-cyano-7-deazaguanine reductase QueF OS=Buchnera aphidicola (Aphis gossypii) OX=98785 GN=queF PE=4 SV=1
MIVKTNQFYLLKSIPRKKHRIKIKINHINLPFIGKDIWTLYEISWLNLHGVPQVAIAKIEFNSTTENIVESKSLKIYINSFNQIKFKNSTNLIKTFISDLNKCVLGEVSVKFFDLHEIEKIGISKFSGTCIDNKNISITSYNYNKLLLKNSSKKKELVIESLYSNLFKSNCPITNQPDWASINIIYNGQKISHTALLKYLVSFRNHNEFHEECIERIFNDIQEICKPRKLSVYARYTRRGGIDINPWRSNIFFEPNFIRLSRQ

SEQ ID NO: 44800 - protein, 284 aa, Budvicia aquatica
  REGION 1..284: note = tr|A0A2C6DUT1|A0A2C6DUT1_9GAMM NADPH-dependent 7-cyano-7-deazaguanine reductase OS=Budvicia aquatica; OX = 82979 GN=queF PE=3 SV=1
MTSHYQDHQALSNLTLGKKTAYIDNYDATLLQAVPRSLNREPLGLTPDNLPFHGADIWTLYELSWLNSRGLPQVAVGEVRISSDSANLIESKSFKLYLNSFNQTRFDNWEQVNHVLSRDLSQCAQGKVNVTLFRLDQLEGQSIGAFAGECIDDQPIEIDNYQFDDKLLCHGVTDTKLLVKEQLVSHLLKSNCLITNQPDWGSVQISYQGPKINREALLRYLVSFRHHNEFHEQCVERIFNDIQSYCHPTHLTVYARYTRRGGLDINPYRTNEAFRPTVERLVRQ

SEQ ID NO: 44801 - protein, 274 aa, Burkholderia ambifaria
  REGION 1..274: note = sp|Q0BBX9|QUEF_BURCM NADPH-dependent 7-cyano-7-deazaguanine reductase OS=Burkholderia ambifaria (strain ATCC BAA-244 / AMMD) OX=339670 GN=queF PE=3 SV=1
MNPEHSPLGKATVYAAQYDASLLFPIPRAGAREQLGITSALPFFGTDIWNAYELSWLNARGKPQVAVATFYVPAESPNIVESKSFKLYLGSFAQSKFDSLDAVRDTLKRDVSAACGASVSVQLVSPHDFGKLQMEELDGLSLDRLDLDTDVYEPDPSLLSAAQDEAPVEETLVSDLLRSNCPVTGQPDWGSVQIHYVGPQIDHAGLLRYIISFRNHTGFHEQCVERIFLDILHACKPLKLAVYARYTRRGGLDINPFRTNYNQPMPDNARTARQ

SEQ ID NO: 44802 - protein, 274 aa, Burkholderia ambifaria
  REGION 1..274: note = tr|B1T7R6|B1T7R6_9BURK NADPH-dependent 7-cyano-7-deazaguanine reductase OS=Burkholderia ambifaria MEX-5 OX=396597 GN=queF PE=3 SV=1
MNPEHSPLGKATVYAAQYDASLLFPIPRAGARAQLGITSAPPFFGTDIWNAYELSWLNARGKPQVAVATFYVPAESPNIVESKSFKLYLGSFAQSKFDSVDTVRDTLKRDVSAACGASVSVQLVSPHDFGKLEMEELDGLSLDRLDLDTDVYEPDPSLLSAAQDEAPVEETLVSDLLRSNCPVTGQPDWGSVQIHYVGPQIDHAGLLRYIISFRNHTGFHEQCVERIFLDILHACKPLKLAVYARYTRRGGLDINPFRTNYNQPMPDNARTARQ

SEQ ID NO: 44803 - protein, 276 aa, Burkholderia anthina
  REGION 1..276: note = tr|A0A3P0BXJ3|A0A3P0BXJ3_9BURK NADPH-dependent 7-cyano-7-deazaguanine reductase OS=Burkholderia anthina; OX = 179879 GN=queF PE=3 SV=1
MNPEHSPLGKATVYAAQYDASLLFPIPRAGAREQLGITSALPFFGTDIWNAYELSWLNARGKPQLAIATFYVPAESPNIVESKSFKLYLGSFAQSKFDSVDAVRDVLKRDVSAACGASVSVQLVSPHEFGKLEMDELDGLSLDRLDLDTDVYEPDPSLLSAADGENEAPVEETLVSDLLRSNCPVTGQPDWGSVQIHYVGPQIDHAGLLRYIISFRNHTGFHEQCVERIFLDIMHACKPVKLAVYARYTRRGGLDINPFRTNYNQPMPDNARTARQ

SEQ ID NO: 44804 - protein, 276 aa, Burkholderia anthina
  REGION 1..276: note = tr|A0A103T6V2|A0A103T6V2_9BURK NADPH-dependent 7-cyano-7-deazaguanine reductase OS=Burkholderia anthina; OX = 179879 GN=queF PE=3 SV=1
MNPEHSPLGKATVYAAQYDASLLFPIPRAGAREQLGITSALPFFGTDIWNAYELSWLNARGKPQLAIATFYVPAESPNIVESKSFKLYLGSFAQSKFDSVDAVRDVLKRDVSAACGASVSVQLVSPHDFGKLEMDELDGLSLDRLDLDTDVYEPDPSLLSAADGENEAPVEETLVSDLLRSNCPVTGQPDWGSVQIHYVGPQIDHAGLLRYIISFRNHTGFHEQCVERIFLDILHACKPVKLAVYARYTRRGGLDINPFRTNYNQPMPDNARTARQ

SEQ ID NO: 44805 - protein, 274 aa, unidentified
  source 1..274: note = Burkholderia catarinensis
  REGION 1..274: note = tr|A0A1J9PLN6|A0A1J9PLN6_9BURK NADPH-dependent 7-cyano-7-deazaguanine reductase OS=Burkholderia catarinensis OX=1108140 GN=queF PE=3 SV=1
MNPEHSPLGKATVYAAQYDASLLFPIPRAGARAQLGITSTLPFFGTDIWNAYELSWLNARGKPQVAVATFYVPAESPNIVESKSFKLYLGSFAQSKFDSIDAVRDTLKRDVSASCGASVAVQLVSAHDFRKLEMDELDGLSLDRLDLDTDVYEPDPSLLSAAENEAPVEETLVSDLLRSNCPVTGQPDWGSVQIHYVGPQIDQAGLLRYIISFRNHTGFHEQCVERIFLDILHACKPVKLAVYARYTRRGGLDINPFRTNYNQPMPDNARTARQ

SEQ ID NO: 44806 - protein, 276 aa, Burkholderia cenocepacia
  REGION 1..276: note = sp|B4EBB9|QUEF_BURCJ NADPH-dependent 7-cyano-7-deazaguanine reductase OS=Burkholderia cenocepacia (strain ATCC BAA-245 / DSM 16553 / LMG 16656 / NCTC 13227 / J2315 /CF5610) OX=216591 GN=queF PE=3 SV=1
MNPEQSPLGKATVYAAQYDASLLFPIPRAGAREQLGITSALPFFGTDIWNAYELSWLNARGKPQVAIATFYVPAESPNIVESKSFKLYLGSFAQSKFDSVDAVRDVLKRDVSAACGASVSVQLVSAHDFRKLEMDELDGLSLDRLDLDADVYEPDPSLLSAADGEDEAPVEETLVSDLLRSNCPVTGQPDWGSVQIHYVGPQIDHAGLLRYIISFRNHTGFHEQCVERIFLDIMRACKPVKLAVYARYTRRGGLDINPFRTNYNQPMPDNARTARQ

SEQ ID NO: 44807 - protein, 276 aa, Burkholderia cenocepacia
  REGION 1..276: note = tr|A0A1V6L140|A0A1V6L140_9BURK NADPH-dependent 7-cyano-7-deazaguanine reductase OS=Burkholderia cenocepacia OX=95486 GN=queF PE=3 SV=1
MNPEQSPLGKATVYAAQYDASLLFPIPRAGAREQLGITSALPFFGTDIWNAYELSWLNARGKPQVAIATFYVPAESPNIVESKSFKLYLGSFAQSKFDSVDAVRDVLKRDVSAACGASVSVQLVSAHDFRKLEMDELDGLSLDRLDLDADVYEPDPSLLSAADGEDEAPVEETLVSDLLRSNCPVTGQPDWGSVQIHYVGPQIDHAGLLRYIISFRNHTGFHEQCVERIFLDILHACKPVKLAVYARYTRRGGLDINPFRTNYNQPMPDNARTARQ

SEQ ID NO: 44808 - protein, 274 aa, Burkholderia cepacia
  REGION 1..274: note = tr|A0A0U3TL30|A0A0U3TL30_BURCE NADPH-dependent 7-cyano-7-deazaguanine reductase OS=Burkholderia cepacia JBK9 OX=1395570 GN=queF PE=3 SV=1
MNPEHSPLGKATVYAAQYDASLLFPIPRAGAREQLGITSALPFFGTDIWNAYELSWLNARGKPQVAVATFYVPAESPAIVESKSFKLYLGSFAQSKFDSIDAVRDVLKRDVSAACGATVSVQLVSAHDFGKLEMEELDGLSLDRLDLDTDIYEPDPSLLSAAVDEAPVEETLVSDLLRSNCPVTGQPDWGSVQIHYVGPQIDHAGLLRYIISFRNHTGFHEQCVERIFLDIMHACKPVKLAVYARYTRRGGLDINPFRTNYNQPMPDNARTARQ

SEQ ID NO: 44809 - protein, 276 aa, Burkholderia cepacia
  REGION 1..276: note = tr|J7J782|J7J782_BURCE NADPH-dependent 7-cyano-7-deazaguanine reductase OS=Burkholderia cepacia GG4 OX=1009846 GN=queF PE=3 SV=1
MNPEHSPLGKATVYAAQYDASLLFPIPRAGAREQLGITSALPFFGTDIWNAYELSWLNARGKPQLAVATFFVPAESPNIVESKSFKLYLGSFAQSKFDSVDALRDVLKRDVSAACGASVSVQLVSPHDFGKLQMEELDGLSLDRLDLDTDVYEPDPSLLSAADAEDEAPVEETLVSDLLRSNCPVTGQPDWGSVQIHYVGPQIDHAGLLRYIISFRNHTGFHEQCVERIFLDILHACKPVKLAVYARYTRRGGLDINPFRTNYNQPMPDNARTARQ

SEQ ID NO: 44810 - protein, 274 aa, Burkholderia contaminans
  REGION 1..274: note = tr|A0A3N8R1X5|A0A3N8R1X5_9BURK NADPH-dependent 7-cyano-7-deazaguanine reductase OS=Burkholderia contaminans OX=488447 GN=queF PE=3 SV=1
MNPEHSPLGKATVYAAQYNASLLFPIPRAGAREQLGITSALPFFGTDIWNAYELSWLNARGKPQIAVATFYVPAESPNIVESKSFKLYLGSFAQTKFDSIDAVRDALKRDVSAACGATVSVQLVSPHDFGKLEMDELDGLSLDRLDLDTDVYEPDPSLLSAAEDEAPVEETLVSDLLRSNCPVTGQPDWGSVQIHYVGPQIDHAGLLRYIISFRNHTGFHEQCVERIFLDILHACKPVKLAVYARYTRRGGLDINPFRTNYNQPMPDNARNARQ

SEQ ID NO: 44811 - protein, 274 aa, Burkholderia contaminans
  REGION 1..274: note = tr|A0A2S5DVQ3|A0A2S5DVQ3_9BURK NADPH-dependent 7-cyano-7-deazaguanine reductase OS=Burkholderia contaminans OX=488447 GN=queF PE=3 SV=1
MNPEHSPLGKATVYAAQYDASLLFPIPRAGAREQLGITSALPFFGTDIWNAYELSWLNARGKPQIAVATFYVPAESPNIVESKSFKLYLGSFAQTKFDSIDAVRDVLKRDVSAACGATVSVQLVSPHDFGKLEMDELDGLSLDRLDLDTDVYEPDPSLLSAAEDEAPVEETLVSDLLRSNCPVTGQPDWGSVQIHYVGPQIDHAGLLRYIISFRNHTGFHEQCVERIFLDILHACKPVKLAVYARYTRRGGLDINPFRTNYNQPMPDNARNARQ

SEQ ID NO: 44812 - protein, 276 aa, unidentified
  source 1..276: note = Burkholderia dabaoshanensis
  REGION 1..276: note = tr|A0A2N7VHK4|A0A2N7VHK4_9BURK NADPH-dependent 7-cyano-7-deazaguanine reductase OS=Burkholderia dabaoshanensis OX=564714 GN=queF PE=3 SV=1
MNSISNQAPMELGKQSKYESTYNPDKLFAIPRSIKRAEIGITGALPFFGVDVWNHYEVSWLTPRGVPRVAMATIVVPCASPNVIESKSMKLYFNTFNNTRFEEQAEVERIAALDLSRCAGAAVAVTLEPLERASALRIGMPEGTSIDEQDVVIDHFTVDPQVLTTHDEHVSETLYSNLLKSNCLVTGQPDWGTVSIAYEGPRIDRAGLLKYVVSFRDHEEFHEQCVERIFKDIQAHCAPARLTVSARYTRRGGIDINPIRGSEPVQHVSNIRLIRQ

SEQ ID NO: 44813 - protein, 274 aa, unidentified
  source 1..274: note = Burkholderia dabaoshanensis
  REGION 1..274: note = tr|A0A2N7VVP0|A0A2N7VVP0_9BURK NADPH-dependent 7-cyano-7-deazaguanine reductase OS=Burkholderia dabaoshanensis OX=564714 GN=queF PE=3 SV=1
MTPDHSPLGKSTTYREQYDPALLFPIARSQAREAIGITQTLPFFGTDIWNAYELSWLNARGKPQIAIATFFVPAESPNIVESKSFKLYLGSFAQTRIESVEALRETLKRDVSAACGASVSVRLATPAEFAKLEFEEFDGLSLDRLDLDADVYEPDPTLLTAAHGEAPVEETLYSNLLKSNCPVTGQPDWGSVQIHYVGPQIDHAGLLRYIISYRSHTGFHEQCVERIFIDILRQCRPVKLAVYARYTRRGGLDINPFRTNYNLPMPDNARTARQ

SEQ ID NO: 44814 - protein, 274 aa, Burkholderia diffusa
  REGION 1..274: note = tr|A0A1B4BV25|A0A1B4BV25_9BURK NADPH-dependent 7-cyano-7-deazaguanine reductase OS=Burkholderia diffusa; OX = 488732 GN=queF PE=3 SV=1
MNPEHSPLGKATVYAAQYDASLLFPIPRAGSREQLGITSALPFFGTDIWNAYELSWLNARGKPQLAVATFFVPAESPNIVESKSFKLYLGSFAQSKFDSVDAVRDVLKRDVSAACGASVSVQLVSPHDFGKLEMEELDGLSLDRLDLDTDVYEPDPSLLSAAEDEAPVEETLVSDLLRSNCPVTGQPDWGSVQIHYVGPQIDHAGLLRYIISFRNHTGFHEQCVERIFLDILHACKPVKLAVYARYTRRGGLDINPFRTNYNQPMPDNARTARQ

SEQ ID NO: 44815 - protein, 274 aa, Burkholderia dolosa
  REGION 1..274: note = tr|A2W7H0|A2W7H0_9BURK NADPH-dependent 7-cyano-7-deazaguanine reductase OS=Burkholderia dolosa AU0158 OX=350701 GN=queF PE=3 SV=1
MNPEHSPLGKATVYASQYDASLLFPIPRAGAREQIGITSALPFFGTDIWNAYELSWLNARGKPQVAVATFYVPAESPNIVESKSFKLYLGSFAQSKFDSVDAVRDVLKRDVSAACGASVAVQLVSPHDFGKLEMDELDGLSLDRLDLDADVYEPDPSLLSAAENEAPIEETLVSDLLRSNCPVTGQPDWGSVQIHYVGPQIDHAGLLRYIISFRNHTGFHEQCVERIFLDILQRCKPVKLAVYARYTRRGGLDINPFRTNYNQPMPDNARTARQ

SEQ ID NO: 44816 - protein, 274 aa, Burkholderia gladioli
  REGION 1..274: note = tr|F2LBW7|F2LBW7_BURGS NADPH-dependent 7-cyano-7-deazaguanine reductase OS=Burkholderia gladioli (strain BSR3) OX=999541 GN=queF PE=3 SV=1
MTPEHSPLGKATAYTTDYDAALLFPIPRAGAREQIGIGAALPFFGTDIWNAYELSWLNRRGKPQIAVATVLVPADSPNIVESKSFKLYLGSFAQTAFDSLEAVRDALKRDVSAACGASVAVQLASPAEFRKLRLDELDGIPLDRLDLDTDIYHPDPSLLSAAHEESPVEETLVSDLLKSNCPVTGQPDWGSVQIHYVGPQIDQAGLLRYLISFRNHTGFHEQCVERIFVDILRECRPVKLAVYARYTRRGGLDINPFRTNFNQPMPDNARTARQ

SEQ ID NO: 44817 - protein, 274 aa, Burkholderia gladioli
  REGION 1..274: note = tr|A0A095Y847|A0A095Y847_BURGA NADPH-dependent 7-cyano-7-deazaguanine reductase OS=Burkholderia gladioli; OX = 28095 GN=queF PE=3 SV=1
MTPEHSPLGKATAYTTDYDAALLFPIPRAGAREQIGIGAALPFFGTDIWNAYELSWLNRRGKPQIAVATFLVPADSPNIVESKSFKLYLGSFAQTAFDSLEAVRDALKRDVSAACGASVAVQLASPAEFRKLRLDELDGIPLDRLDLDTDIYHPDPSLLSAAHEESPVEETLVSDLLKSNCPVTGQPDWGSVQIHYVGPQIDQAGLLRYLISFRNHTGFHEQCVERIFVDILRECRPVKLAVYARYTRRGGLDINPFRTNFNQPMPDNARTARQ

SEQ ID NO: 44818 - protein, 274 aa, Burkholderia glumae
  REGION 1..274: note = tr|A0A2J9H7E2|A0A2J9H7E2_BURGL NADPH-dependent 7-cyano-7-deazaguanine reductase OS=Burkholderia glumae; OX = 337 GN=queF PE=3 SV=1
MTPEHSPLGKAAVYTTDYDAALLFPIPRAAAREQIGIGATLPFFGTDIWNAYELSWLTPRGKPQIAVATFLVPADSPNIVESKSFKLYLGSFAQTAFDSADAVRDTLKRDVSAACGASVAVQLASPSGFAKLKLEELAGLSLDRLDLDTDVYHPDPTLLSASHDESPVEETLVSDLLKSNCPVTGQPDWGSVQIHYVGAPIDHAGLLRYLISFRNHTGFHEQCVERIFVDVLRECRPLKLAVYARYTRRGGLDINPFRTNFNQPLPDNARTARQ

SEQ ID NO: 44819 - protein, 274 aa, Burkholderia glumae; identical to SEQ ID NO: 44818
  REGION 1..274: note = tr|C5AD36|C5AD36_BURGB NADPH-dependent 7-cyano-7-deazaguanine reductase OS=Burkholderia glumae (strain BGR1) OX=626418 GN=queF PE=3 SV=1

SEQ ID NO: 44820 - protein, 274 aa, unidentified
  source 1..274: note = Burkholderia insecticola
  REGION 1..274: note = tr|R4WT13|R4WT13_9BURK NADPH-dependent 7-cyano-7-deazaguanine reductase OS=Burkholderia insecticola OX=758793 GN=queF PE=3 SV=1
MTPEQSPLGKPVHYTEQYDASLLFPIDRKRARDAIGVPARLPFFGTDVWNAYELSWLNQRGKPQIAVATFFVPADSPNIVESKSFKLYLGSFAQTRFDSIDDVRAAIKRDVSAICGATVSVQLTPPMDFGKLVMEEFEGLSLDRLDLDCDVYAPDASLLSAAKDEVPVEETLFSNLLKSNCPVTGQPDWGSVQIRYYGGQIDHAGLLRYIVSFREHTGFHEQCVERIFMDIMRECKPERLAVYARYTRRGGLDINPFRTNFNLPMPDNARLARQ

SEQ ID NO: 44821 - protein, 274 aa, Burkholderia lata
  REGION 1..274: note = sp|Q39D07|QUEF_BURL3 NADPH-dependent 7-cyano-7-deazaguanine reductase OS=Burkholderia lata (strain ATCC 17760 / DSM 23089 / LMG 22485 / NCIMB 9086 / R18194 / 383) OX =482957 GN=queF PE=3 SV=1
MNPEHSPLGKATVYAAQYDASLLFPIPRAGAREQLGITSALPFFGTDIWNAYELSWLNARGKPQIAVATFYVPAESPNIVESKSFKLYLGSFAQTTFDSIDAVRDTLKRDVSAACGATVSVQLVSPHDFGKLEMEELDGLSLDRLDLDTDVYEPDPSLLKAAEDEAPVEETLVSDLLRSNCPVTGQPDWGSVQIHYVGPQIDHAGLLRYIISFRNHTGFHEQCVERIFLDILHACKPVKLAVYARYTRRGGLDINPFRTNYNQPMPDNARNARQ

SEQ ID NO: 44822 - protein, 274 aa, Burkholderia lata
  REGION 1..274: note = tr|A0A3G3H890|A0A3G3H890_BURL3 NADPH-dependent 7-cyano-7-deazaguanine reductase OS=Burkholderia lata (strain ATCC 17760 / DSM 23089 / LMG 22485 / NCIMB 9086 / R18194/ 383) OX=482957 GN=queF PE=3 SV=1
MHPEHSPLGKATVYAAQYDASLLFPIPRAGAREQLGITSALPFFGTDIWNAYELSWLNARGKPQIAVATFYVPAESANIVESKSFKLYLGSFAQTKFDSIDAVRDTLKRDVSAACGATVSVQLVSPHDFGKLEMDELDGLSLDRLDLDTDVYEPDPSLLSAAEDEAPVEETLVSDLLRSNCPVTGQPDWGSVQIHYVGPQIDHAGLLRYIISFRNHTGFHEQCVERIFLDILHACKPVKLAVYARYTRRGGLDINPFRTNYNQPMPDNARNARQ

SEQ ID NO: 44823 - protein, 276 aa, Burkholderia latens
  REGION 1..276: note = tr|A0A1B4NUJ8|A0A1B4NUJ8_9BURK NADPH-dependent 7-cyano-7-deazaguanine reductase OS=Burkholderia latens; OX = 488446 GN=queF PE=3 SV=1
MNPEQSPLGKATVYAAQYDASLLFPIPRAGAREQLGITSALPFFGTDIWNAYELSWLNARGKPQLAIATFYVPAESPNIVESKSFKLYLGSFAQSKFDSVDAVRDVLKRDVSAACGASVSVQLVSPHDFGKLEMEELDGLSLDRLDLDTDVYEPDPSLLSAADAEDEAPVEETLVSDLLRSNCPVTGQPDWGSVQIHYVGPQIDHAGLLRYIISFRNHTGFHEQCVERIFLDILHACKPVKLAVYARYTRRGGLDINPFRTNYNQPMPDNARTARQ

SEQ ID NO: 44824 - protein, 274 aa, Burkholderia mallei
  REGION 1..274: note = sp|Q62MP8|QUEF_BURMA NADPH-dependent 7-cyano-7-deazaguanine reductase OS=Burkholderia mallei (strain ATCC 23344) OX=243160 GN=queF PE=3 SV=1
MNPEHSPLGKATVYANQYDASLLFPIPRAGAREQIGIGAPLPFFGTDIWNAYELSWLNARGKPQIAIATFYVPAESPNIVESKSFKLYLGSFAQTAFESADAVRDALKRDVSAACGASVTVRLATPAEFRKLQMDELDGLSLDRLDLDAHVYETDPSFLTASHDEAPVEETLVTDLLKSNCPVTGQPDWGSVQIHYVGAPIDHAGLLRYIISFRNHTGFHEQCVERIFVDILRACQPVKLAVYARYTRRGGLDINPFRTNYNQPMPDNARTARQ

SEQ ID NO: 44825 - protein, 274 aa, Burkholderia mallei; identical to SEQ ID NO: 44824
  REGION 1..274: note = sp|A1V760|QUEF_BURMS NADPH-dependent 7-cyano-7-deazaguanine reductase OS=Burkholderia mallei (strain SAVP1) OX=320388 GN=queF PE=3 SV=1

SEQ ID NO: 44826 - protein, 274 aa, Burkholderia metallica
  REGION 1..274: note = tr|A0A1B4HWJ3|A0A1B4HWJ3_9BURK NADPH-dependent 7-cyano-7-deazaguanine reductase OS=Burkholderia metallica; OX = 488729 GN=queF PE=3 SV=1
MNPEHSPLGKATVYAAQYDASLLFPIPRAGAREQLGITSALPFFGTDIWNAYELSWLNTRGKPQLAVATFYVPAESPNIVESKSFKLYLGSFAQSKFDSIDAVRDTLKRDVSAACGATVSVQLVSPHDFGKLEMDELDGLSLDRLDLDTDVYEPDPSLLSAAEDEAPVEETLVSDLLRSNCPVTGQPDWGSVQIHYVGPQIDHAGLLRYIISFRNHTGFHEQCVERIFLDILHACKPVKLAVYARYTRRGGLDINPFRTNYNQPMPDNARTARQ

SEQ ID NO: 44827 - protein, 274 aa, Burkholderia multivorans
  REGION 1..274: note = sp|A9AFB4|QUEF_BURM1 NADPH-dependent 7-cyano-7-deazaguanine reductase OS=Burkholderia multivorans (strain ATCC 17616 / 249) OX=395019 GN=queF; PE = 3 SV=1
MNPEHSPLGKATVYASQYDASLLFPIPRAGAREQIGITSALPFFGTDIWNAYELSWLNARGKPQVAVATFYVPAESPNIVESKSFKLYLGSFAQSKFDSVDAVRDVLKRDVSAACGASVSVQLVSPHDFGKLEMDELDGLSLDRLDLDADVYEPDPSLLSAAEDEAPVEETLVSDLLKSNCPVTGQPDWGSVQIHYVGPQIDHAGLLRYIISFRNHTGFHEQCVERIFLDILHRCKPVKLAVYARYTRRGGLDINPFRTNYNQPMPDNARTARQ

SEQ ID NO: 44828 - protein, 274 aa, Burkholderia multivorans; identical to SEQ ID NO: 44827
  REGION 1..274: note = tr|A0A1W0YAT6|A0A1W0YAT6_9BURK NADPH-dependent 7-cyano-7-deazaguanine reductase OS=Burkholderia multivorans OX=87883 GN=queF PE=3 SV=1

SEQ ID NO: 44829 - protein, 274 aa, unidentified
  source 1..274: note = Burkholderia novacaledonica
  REGION 1..274: note = tr|A0A2U3I505|A0A2U3I505_9BURK NADPH-dependent 7-cyano-7-deazaguanine reductase OS=Burkholderia novacaledonica OX=1544861 GN=queF PE=3 SV=1
MTPDQSPLGKPVHYTEQYDASLLFPIDRKRARDSIGVPARLPFFGTDIWNAYELSWLNRRGKPQIAVATFFVPADSPNIVESKSFKLYLGSFAQTPFDSIDDVRAAIKRDVSAICGATVSVQLAAPGDFGKLTMEEFDGLSLDRLDLDCDVFSPDPSLLKAAHDEAPTDETLFSNLLKSNCPVTGQPDWGSVQIRYYGGQIDHAGLLRYIVSYREHTGFHEQCVERIFMDIMRECKPERLAVYARYTRRGGLDINPFRTNFNLPMPDNARLARQ

SEQ ID NO: 44830 - protein, 274 aa, Burkholderia oklahomensis
  REGION 1..274: note = tr|A0A381BVD9|A0A381BVD9_9BURK NADPH-dependent 7-cyano-7-deazaguanine reductase OS=Burkholderia oklahomensis OX=342113 GN=queF PE=3 SV=1
MNPEHSPLGKTTVYSGAYDASLLFPIPRAGAREQIGIGAQLPFFGTDIWNAYELSWLNARGKPQVAIATFYVPAESPNIVESKSFKLYLGSFAQTAFESVDAVRDTLKRDVSAACGANVTARLSTPAEFRKLRMEELDGLSLDRLDLEADVYEPDPSFLTASHEEAPIEETLVTDLLKSNCPVTGQPDWGSVQIHYVGAPIDHAGLLRYIISFRNHTGFHEQCVERIFIDILRECKPVKLAVYARYTRRGGLDINPFRTNYNQPMPDNARTARQ

SEQ ID NO: 44831 - protein, 274 aa, Burkholderia plantarii
  REGION 1..274: note = tr|A0A0B6RWE6|A0A0B6RWE6_9BURK NADPH-dependent 7-cyano-7-deazaguanine reductase OS=Burkholderia plantarii; OX = 41899 GN=queF PE=3 SV=1
MTPEHSPLGKAAAYTTDYDASLLFPIPRAGAREQIGIGAALPFFGTDIWNAYELSWLTPRGKPQIAVATFLVPADSPHIVESKSFKLYLGSFAQTAFDSVDAVRDTLKRDVSAACGASVAVQLASPSGFAKLKLEELDGLSLDRLDLDTDVYHPDPTLLSASHDESPVEETLVSDLLKSNCPVTGQPDWGSVQVHYVGAPIDHAGLLRYLISFRNHTGFHEQCVERIFVDILRECRPLKLAVYARYTRRGGLDINPFRTNFNQPLPDNARTARQ

SEQ ID NO: 44832 - protein, 274 aa, Burkholderia pseudomallei
  REGION 1..274: note = sp|Q63XA4|QUEF_BURPS NADPH-dependent 7-cyano-7-deazaguanine reductase OS=Burkholderia pseudomallei (strain K96243) OX=272560 GN=queF PE=3 SV=1
MNPEHSPLGKATVYANQYDASLLFPIPRAGAREQIGIGAPLPFFGTDIWNAYELSWLNARGKPQIAIATFYVPAESPNIVESKSFKLYLGSFAQTAFESADAVRDALKRDVSAACDASVTVRLATPAEFRKLQMDELDGLSLDRLDLDAHVYETDPSFLTASHGEAPVEETLVTDLLKSNCPVTGQPDWGSVQIHYVGAPIDHAGLLRYIISFRNHTGFHEQCVERIFVDILRACQPVKLAVYARYTRRGGLDINPFRTNYNQPMPDNARTARQ

SEQ ID NO: 44833 - protein, 274 aa, Burkholderia pseudomallei; identical to SEQ ID NO: 44832
  REGION 1..274: note = tr|A8E9I9|A8E9I9_BURPE NADPH-dependent 7-cyano-7-deazaguanine reductase OS=Burkholderia pseudomallei 406e OX=360118 GN=queF PE=3 SV=1

SEQ ID NO: 44834 - protein, 274 aa, unidentified
  source 1..274: note = Burkholderia pseudomultivorans
  REGION 1..274: note = tr|A0A132F590|A0A132F590_9BURK NADPH-dependent 7-cyano-7-deazaguanine reductase OS=Burkholderia pseudomultivorans OX=1207504 GN=queF PE=3 SV=1
MNPEHSPLGKATVYASQYDASLLFPIPRAGAREQIGITAALPFFGTDIWNAYELSWLNARGKPQVAVATFYVPAESPNIVESKSFKLYLGSFAQSRFDSVDAVRDVLKRDVSAACGASVSVQLVSPHDFRKLEMDELDGLSLDRLDLDADVYEPDPTLLSAAEDEAPVEETLVSDLLKSNCPVTGQPDWGSVQIHYVGPQIDHAGLLRYIISFRNHTGFHEQCVERIFLDILHRCKPVKLAVYARYTRRGGLDINPFRTNYNQPMPDNARTARQ

SEQ ID NO: 44835 - protein, 274 aa, unidentified
  source 1..274: note = Burkholderia pseudomultivorans
  REGION 1..274: note = tr|A0A132EJ88|A0A132EJ88_9BURK NADPH-dependent 7-cyano-7-deazaguanine reductase OS=Burkholderia pseudomultivorans OX=1207504 GN=queF PE=3 SV=1
MNPEHSPLGKATVYASQYDASLLFPIPRAGAREQIGITAALPFFGTDIWNAYELSWLNARGKPQVAVATFYVPAESPNIVESKSFKLYLGSFAQSRFDSVDAVRDVLKRDVSAACGASVSVQLVSPHDFRKLEMDELDGLSLDRLDLDADVYEPDPSLLSAAEDEAPVEETLVSDLLKSNCPVTGQPDWGSVQIHYVGPQIDHAGLLRYIISFRNHTGFHEQCVERIFLDILHRCKPVKLAVYARYTRRGGLDINPFRTNYNQPMPDNARTARQ

SEQ ID NO: 44836 - protein, 276 aa, unidentified
  source 1..276: note = Burkholderia puraquae
  REGION 1..276: note = tr|A0A1X1P900|A0A1X1P900_9BURK NADPH-dependent 7-cyano-7-deazaguanine reductase OS=Burkholderia puraquae; OX = 1904757 GN=queF PE=3 SV=1
MNPEHSPLGKATVYAAQYDASLLFPIPRAGARAQLGITSALPFFGTDIWNAYELSWLNTRGKPQVAVATFYVPAESPNIVESKSFKLYLGSFAQSKFDSVDAVRDTLKRDVSAACGASVSVQLVSPHDFGKLEMEELDGLSLDRLDLDTDVYEPDPSLLTAADGENEAPVEETLVSDLLRSNCPVTGQPDWGSVQIHYVGPQIDHAGLLRYIISFRNHTGFHEQCVERIFLDIMHACKPVKLAVYARYTRRGGLDINPFRTNYNQPMPDNARTARQ

SEQ ID NO: 44837 - protein, 276 aa, Burkholderia pyrrocinia
  REGION 1..276: note = tr|A0A0G3WPD7|A0A0G3WPD7_BURPY NADPH-dependent 7-cyano-7-deazaguanine reductase OS=Burkholderia pyrrocinia OX=60550 GN=queF PE=3 SV=1
MNPEHSPLGKATVYAAQYDASLLFPIPRAGAREQLGIASALPFFGTDIWNAYELSWLNARGKPQVAVATFYVPAESPNIVESKSFKLYLGSFAQSKFDSIDAVRDTLKRDVSAACGASVAVQLVSAHDFGKLEMEELDGLSLDRLDLDADVYEPDPSLLSAADAEGEAPVEETLVSDLLRSNCPVTGQPDWGSVQIHYVGPQIDHAGLLRYIISFRNHTGFHEQCVERIFLDILQACKPVKLAVYARYTRRGGLDINPFRTNYNQPMPDNARTARQ

SEQ ID NO: 44838 - protein, 274 aa, Burkholderia pyrrocinia
  REGION 1..274: note = tr|A0A087P1S7|A0A087P1S7_BURPY NADPH-dependent 7-cyano-7-deazaguanine reductase OS=Burkholderia pyrrocinia OX=60550 GN=queF PE=3 SV=1
MNPEHSPLGKATVYAAQYDASLLFPIPRAGAREQLGIASALPFFGTDIWNAYELSWLNPRGKPQVAVATFYVPAESPNIVESKSFKLYLGSFAQSKFDSIDAVRDTLKRDVSAACGASVAVQLVSAHDFGKLEMDELDGLSLDRLDLDTDVYEPDPSLLSAAENEAPVEETLVSDLLRSNCPVTGQPDWGSVQIHYVGPQIDHAGLLRYIISFRNHTGFHEQCVERIFLDILHACKPVKLAVYARYTRRGGLDINPFRTNYNQPMPDNARTARQ

SEQ ID NO: 44839 - protein, 274 aa, unidentified
  source 1..274: note = Burkholderia reimsis
  REGION 1..274: note = tr|A0A365QK83|A0A365QK83_9BURK NADPH-dependent 7-cyano-7-deazaguanine reductase OS=Burkholderia reimsis; OX = 2234132 GN=queF PE=3 SV=1
MNPEHSPLGKATVYAAQYDASLLFPIPRAGAREQLGIASALPFFGTDIWNAYELSWLNARGKPQIAVATFYVPAESPNIVESKSFKLYLGSFAQTKFDSIDAVRDTLKRDVSAACGASVAVQLVSPHDFGKLEMDELDGLSLDRLDLDTDVYEPDPSLLSAAVDEAPVEETLVSDLLRSNCPVTGQPDWGSVQIHYVGPQIDHAGLLRYIISFRNHTGFHEQCVERIFLDILHACKPVKLAVYARYTRRGGLDINPFRTNYNQPMPDNARNARQ

SEQ ID NO: 44840 - protein, 274 aa, Burkholderia seminalis
  REGION 1..274: note = tr|A0A103KE39|A0A103KE39_9BURK NADPH-dependent 7-cyano-7-deazaguanine reductase OS=Burkholderia seminalis; OX = 488731 GN=queF PE=3 SV=1
MNPEHSPLGKATVYAAQYDASLLFPIPRAGAREQLGITSALPFFGTDIWNAYELSWLNARGKPQVAVATFYVPAESPNIVESKSFKLYLGSFAQSKFDSIEAVRDVLKRDVSAACGATVSVQLVSAHDFGKLEMDELDGLSLDRLDLDTDIYEPDPSLLSAAEDEAPVEETLVSDLLRSNCPVTGQPDWGSVQIHYVGPQIDHAGLLRYIISFRNHTGFHEQCVERIFLDIMHACKPVKLAVYARYTRRGGLDINPFRTNYNQPMPDNARTARQ

SEQ ID NO: 44841 - protein, 274 aa, unidentified
  source 1..274: note = Burkholderia singularis
  REGION 1..274: note = tr|A0A118DNU8|A0A118DNU8_9BURK NADPH-dependent 7-cyano-7-deazaguanine reductase OS=Burkholderia singularis OX=1503053 GN=queF PE=3 SV=1
MNPEHSPLGKTTVYSNQYDASLLFPIPRAGSREQIGIGASLPFFGTDIWNAYELSWLNARGKPQVAIATFYVPAESPNIVESKSFKLYLGSFAQTAFESIEAVRDTIKRDVSAVCGANVGVQLAAPADFRKLSLDELDGLSLDRLDLEADVYHPDASLLAASHDEAPVEETLVSDLLKSNCPVTGQPDWGSVQIRYVGAPIDHAGLLRYIISYRDHTGFHEQCVERIFIDILNACKPVKLAVYARYTRRGGLDINPFRTNYNQPMPDNARTARQ

SEQ ID NO: 44842 - protein, 267 aa, unidentified
  source 1..267: note = Burkholderia singularis
  REGION 1..267: note = tr|A0A238H8H8|A0A238H8H8_9BURK NADPH-dependent 7-cyano-7-deazaguanine reductase OS=Burkholderia singularis OX=1503053 GN=queF PE=3 SV=1
MELGQPSKYESTYNAERLFAIARAVKREEISITGPLPFFGFDVWNHYEVSWLTPRGLPRVAIATVIVPCTSPNVIESKTMKLYFNTFNNTPFTDRAEVEQIASRDLSRCAGAPVSVTLEPLEYATALRIDAPPGTSIDEQDIAIDQYHVDPQLLFVHDEPVSETLYSNLLKSNCLVTGQPDWGTVSIAYEGRRIDRAALLKYIVSFRNHEEFHEQCVERIFKDIQDRCAPTRLTVNARYTRRGGIDINPIRSSAPLNEAPNTRLVRQ

SEQ ID NO: 44843 - protein, 580 aa, Burkholderia sp.
  REGION 1..580: note = tr|A0A1G6YZM0|A0A1G6YZM0_9BURK NADPH-dependent 7-cyano-7-deazaguanine reductase OS=Burkholderia sp. TNe-862 OX=416944 GN=queF PE=3 SV=1
MSVSLSDKLVVAISSRALFDFEEENRVFETGDLQAYEALQRERLNVPARPGVAFALIQKLLALNNGAHHVEVVILSRSDPISGLRAFSSCREHGLDIQRGVFTRGSEPWHYLKPLNASLFLSANPPDVRSALDAGFPAARVFPESATMAQRNAHEIRIAFDGDAVLFSDEAEQIFQSHGLGAFVSHERDNRELPLAHGPLQPLLAALNRLQKLAGANAQMRIRTALVTARSAPAHERAIRTLMAWNIEIDEAMFLGGLDKGPFLREFEPDFFFDDQIRHCESARSVTATGHVASRRDQSRNRSQRIMTPDQSPLGKPAAYTEQYDASLLFPIPRAGAREQIGIGAQLPFFGSDIWNAYELSWLNARGKPQIAIATFFIPADSPNIIESKSFKLYLGSFAQTPFESAEVVRDTIKRDVTAACGASVSLRLEQPGAFGKIPFEEFDGLSLDRLDLDTEIYQPEPTLLKAAFDEAPVEETLVSNLLKSNCPVTGQPDWGSVQIHYVGPQIDQAGLLRYIISYRNHTGFHEQCAERIFMDILRECKPDRLAVYARYTRRGGLDINPFRTNFNMPMPDNARLARQ

SEQ ID NO: 44844 - protein, 274 aa, Burkholderia sp.
  REGION 1..274: note = tr|U2FYX1|U2FYX1_9BURK NADPH-dependent 7-cyano-7-deazaguanine reductase OS=Burkholderia sp. AU4i; OX = 1335308 GN=queF PE=3 SV=1
MNPEHSPLGKATAYAAQYDASLLFPIPRAGAREQLGIASALPFFGTDIWNAYELSWLNARGKPQIAVATFYVPAESPNIVESKSFKLYLGSFAQTKFDSIDAVRDTLKRDVSAACGASVAVQLVSPHDFGKLEMDELDGLSLDRLDLDTDVYEPDPSLLSAAVDEAPVEETLVSDLLRSNCPVTGQPDWGSVQIHYVGPQIDHAGLLRYIISFRNHTGFHEQCVERIFLDILHACKPVKLAVYARYTRRGGLDINPFRTNYNQPMPDNARNARQ

SEQ ID NO: 44845 - protein, 276 aa, Burkholderia stabilis
  REGION 1..276: note = tr|A0A1Y1BKB2|A0A1Y1BKB2_9BURK NADPH-dependent 7-cyano-7-deazaguanine reductase OS=Burkholderia stabilis; OX = 95485 GN=queF PE=3 SV=1
MNPEHSPLGKATVYAARYDASLLFPIPRAGAREQLGITSALPFFGTDIWNAYELSWLNARGKPQVAVATFYVPAESPNIVESKSFKLYLGSFAQSKFDSIDAVRDTLKRDVSAACGASVSVQLVSAHDFGKLEMEELDGLSLDRLDLDTDVYEPDPSLLSAADAEDEAPVEETLVSDLLRSNCPVTGQPDWGSVQIHYVGPQIDHAGLLRYIISFRNHTGFHEQCVERIFLDILHACKPVKLAVYARYTRRGGLDINPFRTNYNQPMPDNARTARQ

SEQ ID NO: 44846 - protein, 276 aa, Burkholderia stabilis
  REGION 1..276: note = tr|A0A4Q2AR37|A0A4Q2AR37_9BURK NADPH-dependent 7-cyano-7-deazaguanine reductase OS=Burkholderia stabilis; OX = 95485 GN=queF PE=3 SV=1
MNPEHSPLGKATVYAAQYDASLLFPIPRAGAREQIGITSALPFFGTDIWNAYELSWLNARGKPQVAVATFYVPAESPNIVESKSFKLYLGSFAQSTFDSVDAVRDTLKRDVSAACGASVSVQLVSPHDFGKLQMDELDGLSLDRLDLDTDVYEPDPSLLSAADAEDEAPVEETLVSDLLRSNCPVTGQPDWGSVQIHYVGPQIDHAGLLRYIISFRNHTGFHEQCVERIFLDILHACKPVKLAVYARYTRRGGLDINPFRTNYNQPMPDNARTARQ

SEQ ID NO: 44847 - protein, 276 aa, unidentified
  source 1..276: note = Burkholderia stagnalis
  REGION 1..276: note = tr|A0A107ADM3|A0A107ADM3_9BURK NADPH-dependent 7-cyano-7-deazaguanine reductase OS=Burkholderia stagnalis; OX = 1503054 GN=queF PE=3 SV=1
MNTISNQGAMELGKQSKYESIYNPEKLYAIPRTIKREEIGITGALPFFGVDVWNHYEVSWLTPRGVPRVAIATIVVPCASANVIESKSMKLYFNTFNNTTFADHAEVERIAARDLSHCAGAPVSVTLEPLERAAALRIGAPAGTSIDDEDIDIGTFSVDRQLLATHDEQVSETLYSNLLKSNCLVTGQPDWGTVEIAYEGRRIDRAALLRYVVSFRNHEEFHEQCVERIFKDIQDQCAPTRLTVAARYTRRGGLDINPVRSSAPVHDAPNTRLVRQ

SEQ ID NO: 44848 - protein, 267 aa, unidentified
  source 1..267: note = Burkholderia stagnalis
  REGION 1..267: note = tr|A0A3P0F2L6|A0A3P0F2L6_9BURK NADPH-dependent 7-cyano-7-deazaguanine reductase OS=Burkholderia stagnalis; OX = 1503054 GN=queF PE=3 SV=1
MELGKQSKYESIYNPEKLYAIPRTIKREEIGITGALPFFGVDVWNHYEVSWLTPRGVPRVAIATIVVPCASANVIESKSMKLYFNTFNNTTFADHAEVERIAARDLSHCAGAPVSVTLEPLERAAALRIGAPAGTSIDDEDIDIGTFSVDRQLLATHDEQVSETLYSNLLKSNCLVTGQPDWGTVEIAYEGRRIDRAALLRYVVSFRNHEEFHEQCVERIFKDIQDQCAPTRLTVAARYTRRGGLDINPVRSSVPVHDAPNTRLVRQ

SEQ ID NO: 44849 - protein, 274 aa, unidentified
  source 1..274: note = Burkholderia territorii
  REGION 1..274: note = tr|A0A107JR92|A0A107JR92_9BURK NADPH-dependent 7-cyano-7-deazaguanine reductase OS=Burkholderia territorii OX=1503055 GN=queF PE=3 SV=1
MNPEHSPLGKATVYAAQYDASLLFPIPRAGSREQLGITSALPFFGTDIWNAYELSWLNARGKPQLAVATFFVPAESPNIVESKSFKLYLGSFAQSKFDSVDAVRDVLKRDVSAACGASVSVQLVSPHDFGKLQMEELDGLSLDRLDLDTDVYEPDPSLLSAAEDEAPVEETLVSDLLRSNCPVTGQPDWGSVQIHYVGPQIDHAGLLRYIISFRNHTGFHEQCVERIFLDILHACKPVKLAVYARYTRRGGLDINPFRTNYNQPMPDNARTARQ

SEQ ID NO: 44850 - protein, 274 aa, Burkholderia thailandensis
  REGION 1..274: note = sp|Q2T144|QUEF_BURTA NADPH-dependent 7-cyano-7-deazaguanine reductase OS=Burkholderia thailandensis (strain ATCC 700388 / DSM 13276 / CIP 106301 / E264) OX=271848 GN =queF PE=3 SV=1
MNPEHSPLGKTTVYANQYDASLLFPIPRAGAREQIGIGAPLPFFGTDIWNAYELSWLNARGKPQVAIATFYVPAESPNIVESKSFKLYLGSFAQTAFESIDAVRDALKRDVSAACGASVTVRLATPAEFRKLQMDELDGLSLDRLDLDADVYETDPSFLTASHDEAPVEETLVTDLLKSNCPVTGQPDWGSVQIHYVGAPIDHAGLLRYIISFRNHTGFHEQCVERIFIDILRACKPVKLAVYARYTRRGGLDINPFRTNYNQPMPDNARTARQ

SEQ ID NO: 44851 - protein, 274 aa, Burkholderia thailandensis; identical to SEQ ID NO: 44850
  REGION 1..274: note = tr|A0A2Z4SGT6|A0A2Z4SGT6_BURTH NADPH-dependent 7-cyano-7-deazaguanine reductase OS=Burkholderia thailandensis OX=57975 GN=queF PE=3 SV=1

SEQ ID NO: 44852 - protein, 276 aa, Burkholderia ubonensis
  REGION 1..276: note = tr|A0A119NVW5|A0A119NVW5_9BURK NADPH-dependent 7-cyano-7-deazaguanine reductase OS=Burkholderia ubonensis; OX = 101571 GN=queF PE=3 SV=1
MNSLSNQGALELGKQSKYESIYNPEKLYAIPRTIKREEIGITDTLPFFGVDVWNHYEVSWLTPRGVPRVAIATIVVPCTSPNVIESKSMKLYFNTFNNTSFESREEVERIAANDLSRCAGTPVSVTLESLEYAAALQIGAPVGASIDEQDIDIAQFSVDRQLLATHDEHVSETLYSNLLKSNCLVTGQPDWGTVSIEYEGRRIDRDALLRYVVSFRNHEEFHEQCVERIFKDIQDQCAPARLTVSARYTRRGGLDINPVRSSAPVQDVPNTRLIRQ

SEQ ID NO: 44853 - protein, 274 aa, Burkholderia ubonensis
  REGION 1..274: note = tr|A0A107BE30|A0A107BE30_9BURK NADPH-dependent 7-cyano-7-deazaguanine reductase OS=Burkholderia ubonensis; OX = 101571 GN=queF PE=3 SV=1
MNPEHSPLGKATVYANQYDASLLFPIPRAGARAQIGITSALPFFGTDIWNAYELSWLNARGKPQVAVATFYVPAESPNIVESKSFKLYLGSFAQTKFDSIDAVRDALKRDVSAACGASVSVQLVSPHDFGKLEMDELDGLSLDRLDLDTDIYEPDPSLLAAAHDEAPVEETLVSDLLRSNCPVTGQPDWGSVQIHYVGPQIDHAGLLRYIISFRNHTGFHEQCVERIFLDILHACKPVKLAVYARYTRRGGLDINPFRTNYNQPMPDNARTARQ

SEQ ID NO: 44854 - protein, 274 aa, Burkholderia vietnamiensis
  REGION 1..274: note = sp|A4JHT1|QUEF_BURVG NADPH-dependent 7-cyano-7-deazaguanine reductase OS=Burkholderia vietnamiensis (strain G4 / LMG 22486) OX=269482 GN=queF; PE = 3 SV=1
MNPEHSPLGKATVYAAQYDASLLFPIPRAGAREQLGIAAALPFFGTDIWNAYELSWLNARGKPQLAVATFYVPAESPNIVESKSFKLYLGSFAQSKFDSVDAVRDVLKRDVSAACGASVSVQLVSPHDFGKLQMEELDGLSLDRLDLDTDVYEPDPSLLSAAADEAPVEETLVSDLLRSNCPVTGQPDWGSVQIHYVGPQIDHAGLLRYIISFRNHTGFHEQCVERIFLDILQACKPLKLAVYARYTRRGGLDINPFRTNYNQSMPDNARTARQ

SEQ ID NO: 44855 - protein, 274 aa, Burkholderia vietnamiensis
  REGION 1..274: note = tr|A0A103GIM4|A0A103GIM4_BURVI NADPH-dependent 7-cyano-7-deazaguanine reductase OS=Burkholderia vietnamiensis OX=60552 GN=queF PE=3 SV=1
MNPEHSPLGKATVYAAQYDASLLFPIPRAGAREQLGIAAALPFFGTDIWNAYELSWLNARGKPQLAVATFYVPAESPNIVESKSFKLYLGSFAQSKFDSVDAVRDVLKRDVSAACGASVSVQLVSPHDFGKLQMEELDGLSLDRLDLDTDVYEPDPSLLSAAADEAPVEETLVSDLLRSNCPVTGQPDWGSVQIHYVGPQIDHAGLLRYIISFRNHTGFHEQCVERIFLDILQACKPLKLAVYARYTRRGGLDINPFRTNYNQPMPDNARTARQ

SEQ ID NO: 44856 - protein, 278 aa, unidentified
  source 1..278: note = Burkholderiaceae bacterium
  REGION 1..278: note = tr|A0A0F0DUX8|A0A0F0DUX8_9BURK NADPH-dependent 7-cyano-7-deazaguanine reductase OS=Burkholderiaceae bacterium 26 OX=1619951 GN=queF PE=3 SV=1
MSNQPEHSPLGKTSAYKTEYDPSLLFPIPRQGKRDEIGLAAGTPLPFFGVDLWNLYELSWLNLRGKPQVALGTVIVPADSPNIVESKSFKLYLNSFNQTKVASHEALQQLIHHDLSEACGAPVQVRIVPPEEFSRQKMGELDGLLLDRLDIETDVYQPTPELLHADEEESPVEETLVSHLLKSNCLVTGQPDWGSVQIRYVGAPINQEGLLKYLISFREHNEFHEQCVERIFTDILRQCRPVKLAVYARYTRRGGLDINPFRTNYNTPWPDNLRNARQ

SEQ ID NO: 44857 - protein, 216 aa, unidentified
  source 1..216: note = Burkholderiaceae bacterium
  REGION 1..216: note = tr|A0A522ZXQ3|A0A522ZXQ3_9BURK NADPH-dependent 7-cyano-7-deazaguanine reductase QueF (Fragment); OS = Burkholderiaceae bacterium OX=2030806 GN=queF PE=4 SV=1
VALAHIVVPCESPYLVESKSFKLYLGSFSNTRFADEQAVRECIRSDLNDAVWRGGPLQSSVGVRILAPALFDQEPVHELDGLSLDRLDIECSRYTPAPELLTAAFDEQPVTEVLTSNLLKSNCPVTGQPDWAGVQIRYSGPQIGQGGLLQYLVSFRNHSGFHEHCVERIFMDIWTRCQPVQLAVYARYTRRGGLDINPFRTSYPQALPPNVRTARQ

SEQ ID NO: 44858 - protein, 279 aa, unidentified
  source 1..279: note = Burkholderiales bacterium
  REGION 1..279: note = tr|A0A433SEK6|A0A433SEK6_9BURK NADPH-dependent 7-cyano-7-deazaguanine reductase OS=Burkholderiales bacterium CNM695-12 OX=1965230 GN=queF_1 PE=3 SV=1
MSNSAASSPLGKSSEYRDTYSPELLFPIPRSTNRLQLGITDNAALPFDGVDIWNSYEFSWLTPSGKPAVALVEFRVPANSPNLIESKSFKLYLNSFNQTVFDSLEKIRQILEHDLSAAAGSRVAVRLSDIHDTSAYSVTSPHAQCIDALEVQIASYSHPSVSMLKASACHDTTEQLCSHLLKSNCPVTGQPDWGSVFINYQADNKLDQASLLQYIISFRQHADFHEHCVERIFMDIYTLLAPRQLEVYARYTRRGGLDINPYRTLDAHGVFHNRRLVRQ

SEQ ID NO: 44859 - protein, 139 aa, unidentified
  source 1..139: note = Burkholderiales bacterium
  REGION 1..139: note = tr|A0A1Q3Y1U4|A0A1Q3Y1U4_9BURK NADPH-dependent 7-cyano-7-deazaguanine reductase OS=Burkholderiales bacterium 67-32 OX=1895729 GN=queF PE=3 SV=1
MPSQPSKSLDTFANPSPGRDFQIHIEVPEFTCLCPMTGQPDFALLVIDYIPDQLCVELKSLKLYAWSFRNEGKFHEAVTNEILDDLVRALSPRFMRITAKWYVRGGIFTNVVAEHRQPGWTPQPAVQLQEFAPGSNIRG

SEQ ID NO: 44860 - protein, 280 aa, Buttiauxella agrestis
  REGION 1..280: note = tr|A0A381C3L8|A0A381C3L8_9ENTR NADPH-dependent 7-cyano-7-deazaguanine reductase OS=Buttiauxella agrestis; OX = 82977 GN=queF PE=3 SV=1
MSYENHQALSGLTLGKPTAYQDQYQPSLLQAVPRSLNRDPLGLHADNLPFSGGDIWTLYELSWLNSNGLPQVAVGHVQLNANSVNLVESKSFKLYLNSFNQTQFADWETVQETLKRDLSACAQGDVSVVLFRLHELEGQEIAAFTGVCIDEQNITIDNYEFNANYLSGAAGDEIVDETLVSHLLKSNCLITHQPDWGSVQIRYRGPRIDREKLLRYLVSFRQHNEFHEQCVERIFNDIQQFCRPESLSVYARYTRRGGLDINPWRTNTDFHPAFGRLVRQ

SEQ ID NO: 44861 - protein, 280 aa, Buttiauxella agrestis
  REGION 1..280: note = tr|A0A085G453|A0A085G453_9ENTR NADPH-dependent 7-cyano-7-deazaguanine reductase OS=Buttiauxella agrestis ATCC 33320 OX=1006004 GN=queF PE=3 SV=1
MSYENHQALSGLTLGKPTAYQDQYQPSLLQAVPRSLNRDPLGLHADNLPFSGGDIWTLYELSWLNSNGLPQVAVGHMQLDANSVNLVESKSFKLYLNSFNQTQFADWETVQEALKRDLSACAQGDVSVVLFRLHELEGQEIAAFTGECIDEQNITIDNYEFNADYLSGAAGDEIVDETLVSHLLKSNCLITHQPDWGSVQIRYRGPRIDREKLLRYLVSFRQHNEFHEQCVERIFNDIQQFCCPESLSVYARYTRRGGLDINPWRTNTDFHPAFGRLVRQ

SEQ ID NO: 44862 - protein, 280 aa, Buttiauxella brennerae
  REGION 1..280: note = tr|A0A1B7ILN2|A0A1B7ILN2_9ENTR NADPH-dependent 7-cyano-7-deazaguanine reductase OS=Buttiauxella brennerae ATCC 51605 OX=1354251 GN=queF PE=3 SV=1
MSYEKHQALSGLTLGKPTAYQDKYQPSLLQAVPRSLNRDPLGLQADNLPFSGGDIWTLYELSWLNSNGLPQVAVGHVQLDANSVNLVESKSFKLYLNSFNQTQFADWESVEETLKRDLSACAQGDVSVVLFRLRELEGQEIAAFTGECIDEQNITIDNYEFNADYLNGAAGEEIVEETLVSHLLKSNCLITHQPDWGSVQIRYRGPRIDREKLLRYLVSFRHHNEFHEQCVERIFNDIQHFCSPESLSVYARYTRRGGLDINPWRTNTDFHPAFGRLVRQ

SEQ ID NO: 44863 - protein, 280 aa, Buttiauxella gaviniae
  REGION 1..280: note = tr|A0A1B7I396|A0A1B7I396_9ENTR NADPH-dependent 7-cyano-7-deazaguanine reductase OS=Buttiauxella gaviniae ATCC 51604 OX=1354253 GN=queF PE=3 SV=1
MSYEKHQALSGLTLGKPTAYQDKYQASLLQPVPRSLNRDPLGLQADNLPFSGGDIWTLYELSWLNSNGLPQVAVGHVQLDANSVNLVESKSFKLYLNSFNQTQFADWESVEETLKRDLSACAQGDVSVVLFRLRELEGQEIAAFTGECIDEQNITIDNYEFNADYLTGAAGDEIVEETLVSHLLKSNCLITHQPDWGSVQIRYRGPRIDREKLLRYLVSFRHHNEFHEQCVERIFNDIQHFCNPESLSVYARYTRRGGLDINPWRTNTDFHPAFGRLVRQ

SEQ ID NO: 44864 - protein, 280 aa, Buttiauxella izardii
  REGION 1..280: note = tr|A0A3A5K493|A0A3A5K493_9ENTR NADPH-dependent 7-cyano-7-deazaguanine reductase OS=Buttiauxella izardii; OX = 82991 GN=queF PE=3 SV=1
MSYEKHQALSGLTLGKPTAYQDKYQPSLLQAVPRSLNRDPLGLQADNLPFSGGDIWTLYELSWLNSNGLPQVAVGHVQLDANSVNLVESKSFKLYLNSFNQTQFADWETVQEALKRDLSACAQGDVSVVLFRLHELEGQEIAAFNGECIDEQNIAIDNYDFNADYLSGAAGDDIVEESLVSHLLKSNCLITHQPDWGSVQIRYRGPRIDREKLLRYLVSFRQHNEFHEQCVERIFNDIQKFCAPETLSVYARYTRRGGLDINPWRTNTDFHPSFGRLVRQ

SEQ ID NO: 44865 - protein, 280 aa, Buttiauxella noackiae
  REGION 1..280: note = tr|A0A1B7HLZ4|A0A1B7HLZ4_9ENTR NADPH-dependent 7-cyano-7-deazaguanine reductase OS=Buttiauxella noackiae ATCC 51607 OX=1354255 GN=queF PE=3 SV=1
MSYEKHQALSGLTLGKPTAYQDKYQASLLQPVPRSLNRDPLGLQADNLPFSGGDIWTLYELSWLNSNGLPQVAVGHVQLDANSVNLIESKSFKLYLNSFNQTQFADWETVQETLKRDLSACAQGDVSVVLFRLHELEGQEIAAFTGECIDDQNITIDNYEFNTDYLSGAAGDEIVEETLVSHLLKSNCLITHQPDWGSVQIRYRGPRIDREKLLRYLVSFRHHNEFHEQCVERIFNDIQHFCHPESLSVYARYTRRGGLDINPWRTNTDFHPAFGRLVRQ

SEQ ID NO: 44866 - protein, 280 aa, Buttiauxella sp.; identical to SEQ ID NO: 44863
  REGION 1..280: note = tr|A0A4V3GR61|A0A4V3GR61_9ENTR NADPH-dependent 7-cyano-7-deazaguanine reductase OS=Buttiauxella sp. BIGb0552 OX=2485120 GN=queF PE=3 SV=1

SEQ ID NO: 44867 - protein, 280 aa, Buttiauxella sp.
  REGION 1..280: note = tr|A0A4P5QD24|A0A4P5QD24_9ENTR NADPH-dependent 7-cyano-7-deazaguanine reductase OS=Buttiauxella sp. A111; OX = 2563088 GN=queF PE=3 SV=1
MSYEKHQALSGLTLGKPTAYQDKYQPSLLQAVPRSLNRDPLGLQADNLPFSGGDIWTLYELSWLNSNGLPQVAVGHVQLDANSVNLVESKSFKLYLNSFNQTKFADRETVQETLKRDLSACAQGDVSVVLFRLHELEGQEIAAFTGECIDEQNITIDNYEFNANYLSESAGVEIVEETLVSHLLKSNCLITHQPDWGSVQIRYRGPRIDREKLLRYLVSFRQHNEFHEQCVERIFNDIQHFCQPETLSVYARYTRRGGLDINPWRTNTDFHPAFGRLVRQ

SEQ ID NO: 44868 - protein, 280 aa, Buttiauxella warmboldiae
  REGION 1..280: note = tr|A0A3N5D296|A0A3N5D296_9ENTR NADPH-dependent 7-cyano-7-deazaguanine reductase OS=Buttiauxella warmboldiae OX=82993 GN=queF PE=3 SV=1
MSYEKHQALSGLTLGKPTAYQDKYQAALLQPVPRSLNRDPLGLQADSLPFSGGDIWTLYELSWLNSKGLPQVAIGHVQLDANSVNLIESKSFKLYLNSFNQTQFADWEAVQETLKRDLSLCAQGDVSVVLFRLHELEGQEIAAFSGECIDEQNITIDNYQFNADYLSGAAGDEIVEETLVSHLLKSNCLITHQPDWGSVQIRYRGPRIDREKLLRYLVSFRHHNEFHEQCVERIFNDIHHFCQPQNLSVYARYTRRGGLDINPWRTNTDFHPSFGRLVRQ

SEQ ID NO: 44869 - protein, 165 aa, unidentified
  source 1..165: note = Butyricicoccus porcorum
  REGION 1..165: note = tr|A0A252F744|A0A252F744_9CLOT NADPH-dependent 7-cyano-7-deazaguanine reductase OS=Butyricicoccus porcorum OX=1945634 GN=queF PE=3 SV=1
MAGRNTEETQGITLLGNQGTKYRDDYAPEVLETFVNKHPENDYFVKFNCPEFTSLCPITGQPDFATITISYVPSERMVESKSLKLYLFSFRNHGDFHEDCVNIIMKDLIRLMDPKYIEVWGKFTPRGGISIDPYCNYGKPGTRWEEVAWNRMANHDLYPEKIDNR

SEQ ID NO: 44870 - protein, 165 aa, Butyricicoccus sp.
  REGION 1..165: note = tr|A0A417HNV3|A0A417HNV3_9CLOT NADPH-dependent 7-cyano-7-deazaguanine reductase OS=Butyricicoccus sp. AM28-25 OX=2292294 GN=queF PE=3 SV=1
MTGRNKEELNGVTLLGSQKNKYPSDYAPEMLETFPNKHPDNDYFVKFNCPEFTSLCPMTGQPDFATIYISYVPGERMVESKSLKLYLFSFRNHGDFHEDCVNIIMKDLIRLMDPKYIEVWGKFTPRGGISIDPYCNYGKPGTRWEEVAFERLTHHDLYPEKVDNR

SEQ ID NO: 44871 - protein, 165 aa, Butyricicoccus sp.; identical to SEQ ID NO: 44870
  REGION 1..165: note = tr|A0A416P9Y6|A0A416P9Y6_9CLOT NADPH-dependent 7-cyano-7-deazaguanine reductase OS=Butyricicoccus sp. AF22-28AC OX=2292198 GN=queF PE=3 SV=1

SEQ ID NO: 44872 - protein, 292 aa, unidentified
  source 1..292: note = Butyricimonas faecalis
  REGION 1..292: note = tr|A0A3S9VQX2|A0A3S9VQX2_9BACT NADPH-dependent 7-cyano-7-deazaguanine reductase QueF OS=Butyricimonas faecalis OX=2093856 GN=D8S85_04750 PE=4 SV=1
MSIEAKVLGQQVAYPTNYCPSILVPVPRYLNREIYDIHAPEELFQGYDTWHAYEAGFLTRNGLPVCGVLKLVYPASSPCIVESKSLKLYLNSLNMTRLGEDIPSGIETYLQTIKSDLEQILQTRVETTFFQRAPEKLYFDFQNYTLLEATPGIERETFTEYTETPTLLLENQTIGSGEIKVCSHLLRSNCKITKQPDWGSIYIHMQADHLPDQFSLLKYIVSLRNENHFHEEICEMTYKRLNDLFHPEILAVSCIYTRRGGIDICPSRANKAEYLPKYLHTSETLTQKLVRQ

SEQ ID NO: 44873 - protein, 291 aa, Butyricimonas sp.
  REGION 1..291: note = tr|A0A3D2E1M7|A0A3D2E1M7_9BACT NADPH-dependent 7-cyano-7-deazaguanine reductase QueF OS=Butyricimonas sp.; OX = 1969738 GN=DFK15_15710 PE=4 SV=1
MSIESKVLGQQVAYPTDYCPSILVPVPRNLNREIYDIHTPEELFRGFDTWHAYEAGFLTRNGLPVCGVLKLIYPANSPCIVESKSLKLYLNSLNMTRLGEDIPSGIETYLQTVKSDLEQILQTRVEATFFRQVPEKTYFDFQDYTLLETTPGIERETFTEYSENPALLESRTTGRGEIKVGSHLLRSNCKITKQPDWGSIYIHMQADRLPDHASLLKYIVSLRNENHFHEEICEMTYKRLWDLFHPEILAVSCIYTRRGGIDICPSRANQAEYLPEHLQAPEILTQKLLRQ

SEQ ID NO: 44874 - protein, 291 aa, Butyricimonas sp.
  REGION 1..291: note = tr|A0A1Y3VY36|A0A1Y3VY36_9BACT NADPH-dependent 7-cyano-7-deazaguanine reductase QueF OS=Butyricimonas sp. An62 OX=1965649 GN=B5G13_05400 PE=4 SV=1
MSIESKVLGQQVAYPTDYCPSILVPVPRSLNREIYDIHTPEELFLGFDTWHAYEAGFLARNGLPVCGVLKLVYPANSPCIVESKSLKLYLNSLNMTRLGEDTPSGIETYLQTVKSDLKQILQTRVEATFFRQTPEKPYFDFQDYTLLEATPGIERETFTEYNENPALLESRTTGRGEIKVCSHLLRSNCKITKQPDWGSIYIHIQADCLPDHTSLLKYIVSLRNENHFHEEICEMTYKRLWDLFHPEILAVSCIYTRRGGIDICPSRANQAEYLPEHLQAPETLTRKLLRQ

SEQ ID NO: 44875 - protein, 291 aa, Butyricimonas virosa
  REGION 1..291: note = tr|A0A415QRR7|A0A415QRR7_9BACT NADPH-dependent 7-cyano-7-deazaguanine reductase QueF OS=Butyricimonas virosa OX=544645 GN=DWZ68_00920 PE=4 SV=1
MSIESKVLGQQVAYPTDYCPSILVPVPRNLNREIYDIHSPEELFRGFDTWHAYEAGFLTRNGLPVCGVLKLIYPANSPCIVESKSLKLYLNSLNMTRLGEDIPSGIETYLQTVKSDLEQILQTCVEATFFRQVPEKTYFDFQDYTLLETTPGIERETFTKYSENPALLESRTTGRGEIKVGSHLLRSNCKITKQPDWGSIYIHMQADRLPDHASLLKYIVSLRNENHFHEEICEMTYKRLWDLFHPEILAVSCIYTRRGGIDICPSRANQAEYLPEHLQAPEILTQKLLRQ

SEQ ID NO: 44876 - protein, 291 aa, Butyricimonas virosa; identical to SEQ ID NO: 44873
  REGION 1..291: note = tr|A0A412X5W1|A0A412X5W1_9BACT NADPH-dependent 7-cyano-7-deazaguanine reductase QueF OS=Butyricimonas virosa OX=544645 GN=DWW18_02015 PE=4 SV=1

SEQ ID NO: 44877 - protein, 165 aa, Butyrivibrio crossotus
  REGION 1..165: note = tr|R5LHJ3|R5LHJ3_9FIRM NADPH-dependent 7-cyano-7-deazaguanine reductase OS=Butyrivibrio crossotus CAG:259 OX=1263062 GN=queF PE=3 SV=1
MSGRSKEETEGVTLLGNQKVKYADNYAPEVLETFINKHQDNDYFVKFNCPEFTSLCPITGQPDFATITISYVPDVRMVESKSLKLYLFSFRNHGDFHEDCVNIIMKDLIKLMDPKYIEVWGKFTPRGGISIDPYCNYGKPGTKWERIAGDRMANHDMYPEKIDNR

SEQ ID NO: 44878 - protein, 167 aa, Butyrivibrio crossotus
  REGION 1..167: note = tr|D4RWH2|D4RWH2_9FIRM NADPH-dependent 7-cyano-7-deazaguanine reductase OS=Butyrivibrio crossotus DSM 2876 OX=511680 GN=queF PE=3 SV=1
MNMSGRSKEETEGVTLLGNQKVKYADNYAPEVLETFINKHQDNDYFVKFNCPEFTSLCPITGQPDFATITISYVPDVRMVESKSLKLYLFSFRNHGDFHEDCVNIIMKDLIKLMEPKYIEVWGKFTPRGGISIDPYCNYGKPGTKWERIAGDRMANHDMYPEKIDNR

SEQ ID NO: 44879 - protein, 163 aa, Butyrivibrio fibrisolvens
  REGION 1..163: note = tr|D4IW43|D4IW43_BUTFI NADPH-dependent 7-cyano-7-deazaguanine reductase OS=Butyrivibrio fibrisolvens 16/4 OX=657324 GN=queF PE=3 SV=1
MADRAAEGTLTLLGNKNNQYPDNYAPEMLQTFLNKHPENDYFVKFNCPEFTSLCPITGQPDFANIIISYVPGEKMVESKSLKLYLFSFRNHGDFHEDCVNIIMKDLIKLMDPKYIEVWGKFTPRGGISIDPYCNYGKPGTKWEEVAFNRMANHDMYPEKVDNR

SEQ ID NO: 44880 - protein, 165 aa, Butyrivibrio sp.
  REGION 1..165: note = tr|A0A350RPY5|A0A350RPY5_9FIRM NADPH-dependent 7-cyano-7-deazaguanine reductase OS=Butyrivibrio sp.; OX = 28121 GN=queF PE=3 SV=1
MSGRSKEETEGVTLLGNQKVKYADNYAPEVLETFINKHQDNDYFVKFNCPEFTSLCPITGQPDFATITISYVPDVRMVESKSLKLYLFSFRNHGDFHEDCVNIIMKDLIKLMEPKYIEVWGKFTPRGGISIDPYCNYGKPGTKWERIAGDRMANHDMYPEKIDNR

SEQ ID NO: 44881 - protein, 160 aa, Butyrivibrio sp.
  REGION 1..160: note = tr|R6RBN5|R6RBN5_9FIRM NADPH-dependent 7-cyano-7-deazaguanine reductase OS=Butyrivibrio sp. CAG:318 OX=1262761 GN=queF PE=3 SV=1
MREKENLTKLGSQGTEYKTEYDRELLETFGNKHPDNDYFVKFNCPEFTSLCPITGQPDFATITISYVPDERLVESKSLKLYLFSFRNHGDFHEDVVNVIMKDLIYKMDPKYIEVHGKFLPRGGISIDPYCNYGKAGTRWEKVAWERLSMHDLNPEKVDNR

SEQ ID NO: 44882 - protein, 118 aa, unidentified
  source 1..118: note = Bythopirellula goksoyri
  REGION 1..118: note = tr|A0A5B9QC36|A0A5B9QC36_9PLAN NADPH-dependent 7-cyano-7-deazaguanine reductase OS=Bythopirellula goksoyri OX=1400387 GN=queF PE=3 SV=1
MSDFRTKLETFENQFPERDYRIEIVCPEFTSVCPKTGQPDFATITFTYIPHKLCVELKSLKLYLQSYRNEGIFYENITNVILDDMTAVLSPRWLKIVAAFTARGGITETVTAEFASAM

SEQ ID NO: 44883 - protein, 274 aa, unidentified
  source 1..274: note = Caballeronia arationis
  REGION 1..274: note = tr|A0A158DVX7|A0A158DVX7_9BURK NADPH-dependent 7-cyano-7-deazaguanine reductase OS=Caballeronia arationis; OX = 1777142 GN=queF PE=3 SV=1
MTPEQSPLGKAVVYTEQYDPTLLFPIERKSARDAIGIGARLPFFGTDIWNAYELSWLNRRGKPQIAVATFFVPADSPKIVESKSFKLYLGSFAQTAFDSIDDVKAAIKRDVSTVCGATVSVQLAAPGDFGKLAMEEFDGLSLDRLDLDTDVYSPDPSLLKAVHGEAPVDETLFSNLLKSNCPVTGQPDWGSVQVRYYGGQIDHAGLLRYIVSFREHTGFHEQCVERIFMDIMRECRPERLAVYARYTRRGGLDINPFRTNFNLPMPDNARLARQ

SEQ ID NO: 44884 - protein, 274 aa, unidentified
  source 1..274: note = Caballeronia arvi
  REGION 1..274: note = tr|A0A158IP39|A0A158IP39_9BURK NADPH-dependent 7-cyano-7-deazaguanine reductase OS=Caballeronia arvi; OX = 1777135 GN=queF PE=3 SV=1
MTPDQSPLGKPVHYTEQYDASLLFPIDRKRARDSIGVPARLPFFGTDIWNAYELSWLNRRGKPQIAVATFFVPADSPNIVESKSFKLYLGSFAQTQFDSIDDVRAAIKRDVSAICGATVSVQLAAPADFGKLAMEEFDGLSLDRLDLDCEVFSPDPSLLKAVHDEGSVDETLFSNLLKSNCPVTGQPDWGSVQIRYYGGQIDHASLLRYIVSFREHTGFHEQCVERIFMDIMRECKPERLAVYARYTRRGGLDINPFRTNFNLPMPDNARLARQ

SEQ ID NO: 44885 - protein, 274 aa, unidentified
  source 1..274: note = Caballeronia calidae
  REGION 1..274: note = tr|A0A158C7M0|A0A158C7M0_9BURK NADPH-dependent 7-cyano-7-deazaguanine reductase OS=Caballeronia calidae; OX = 1777139 GN=queF PE=3 SV=1
MTPDQSPLGKPVHYTEQYDASLLFPIDRKRARDAIAVPARLPFFGTDIWNAYELSWLNRRGKPQIAVATFFVPADSPNIVESKSFKLYLGSFAQTQFDSIDDVRAAIKRDVSAVCGATVSVQLAAPADFQKLQMEEFDGLSLDRLDLDCEVFSPDPSLLKATHDEAPVDETLFSNLLKSNCPVTGQPDWGSVQIRYYGGQIDHAGLLRYIVSFREHTGFHEQCVERIFMDIMRECKPERLAVYARYTRRGGLDINPFRTNFNLPMPDNARLARQ

SEQ ID NO: 44886 - protein, 274 aa, unidentified
  source 1..274: note = Caballeronia catudaia
  REGION 1..274: note = tr|A0A158CNU6|A0A158CNU6_9BURK NADPH-dependent 7-cyano-7-deazaguanine reductase OS=Caballeronia catudaia; OX = 1777136 GN=queF PE=3 SV=1
MTPDQSPLGKPVHYTEQYDASLLFPIDRKRARDSIGVPARLPFFGTDIWNAYELSWLNRRGKPQIAVATFFVPADSPNIVESKSFKLYLGSFAQTQFDSIDDVRAAIKRDVSAICGATVSVQLAAPADFGKLAMEEFDGLSLDRLDLDCEVFSPDPSLLKAVHDEGSVDETLFSNLLKSNCPVTGQPDWGSVQIRYYGGQIDHASLLRYIVSFRGHTGFHEQCVERIFMDIMRECKPERLAVYARYTRRGGLDINPFRTNFNLPMPDNARLARQ

SEQ ID NO: 44887 - protein, 274 aa, unidentified
  source 1..274: note = Caballeronia choica
  REGION 1..274: note = tr|A0A158FYS6|A0A158FYS6_9BURK NADPH-dependent 7-cyano-7-deazaguanine reductase OS=Caballeronia choica; OX = 326476 GN=queF PE=3 SV=1
MTPDQSPLGKAVVYTEQYDPMLLFPIERKSARDAIGIGARLPFFGTDIWNAYELSWLNRRGKPQIAVATFFVPAESPNIVESKSFKLYLGSFAQTAFDSIDDVRAAIKRDVSAICGVNVSVQLAGPADFGKLAMEEFDGLSLDRLDLDTDVYSPDPSLLKAVHDEAPVDETLFSNLLKSNCPVTGQPDWGSVQIRYYGGQIDHAGLLRYIVSYREHTGFHEQCVERIFMDIMRECRPERLAVYARYTRRGGLDINPFRTNFNLPMPDNARLARQ

SEQ ID NO: 44888 - protein, 274 aa, unidentified
  source 1..274: note = Caballeronia cordobensis
  REGION 1..274: note = tr|A0A158EUT1|A0A158EUT1_9BURK NADPH-dependent 7-cyano-7-deazaguanine reductase OS=Caballeronia cordobensis OX=1353886 GN=queF PE=3 SV=1
MTPDQSPLGKPVHYTEQYDASLLFPIDRKRARDAIGVPARLPFFGTDIWNAYELSWLNARGKPQIAVATFFVPADSPNIVESKSFKLYLGSFAQTQFNSIDDVRAAIKRDVSAICGATVSVQLSAPGDFGKLVMEEFDGLSLDRLDLDCEVFSPDPSLLKAAHDEVPVDETLFSNLLKSNCPVTGQPDWGSVQIRYYGGQIDHASLLRYIVSYRGHTGFHEQCVERIFMDVMRECRPERLAVYARYTRRGGLDINPFRTNFNLPMPDNARLARQ

SEQ ID NO: 44889 - protein, 274 aa, unidentified
  source 1..274: note = Caballeronia fortuita
  REGION 1..274: note = tr|A0A157ZDT1|A0A157ZDT1_9BURK NADPH-dependent 7-cyano-7-deazaguanine reductase OS=Caballeronia fortuita; OX = 1777138 GN=queF PE=3 SV=1
MTPDQSPLGKPVHYTEQYDASLLFPIDRKRARDAIAVPARLPFFGTDIWNAYELSWLNKRGKPQIAVATFFVPADSPNIVESKSFKLYLGSFAQTQFDSIDDVRAAIKRDVSAVCGATVSVQLAAPADFGKLTMEEFDGLSLDRLDLDCEVFSPDPSLLKAAHDEAPVDETLFSNLLKSNCPVTGQPDWGSVQIRYYGGQIDHAGLLRYIVSYREHTGFHEQCVERIFMDIMRECKPERLAVYARYTRRGGLDINPFRTNFNLPMPDNARLARQ

SEQ ID NO: 44890 - protein, 274 aa, unidentified
  source 1..274: note = Caballeronia glathei
  REGION 1..274: note = tr|A0A069PVH9|A0A069PVH9_9BURK NADPH-dependent 7-cyano-7-deazaguanine reductase OS=Caballeronia glathei; OX = 60547 GN=queF PE=3 SV=1
MTPEHSPLGKPVHYTEQYDPALLFPIERKTARDAIGIGARLPFFGTDIWNAYELSWLNRRGKPQIAVATFFVPADSPNIVESKSFKLYLGSFAQTAFDSFDDVRAAIKRDVSAACGMNVSVQLAAPGDFGKLVMEEFEGLSLDRLDLDTDVYSPDPSLLKAVHDEAPVDETLVSNLLKSNCPVTGQPDWGSVQIRYFGGQIDHAGLLRYIVSYREHTGFHEQCVERIFMDILRECRPERLAVYARYTRRGGLDINPFRTNFNLPMPDNARLARQ

SEQ ID NO: 44891 - protein, 274 aa, unidentified
  source 1..274: note = Caballeronia glebae
  REGION 1..274: note = tr|A0A157Z9K8|A0A157Z9K8_9BURK NADPH-dependent 7-cyano-7-deazaguanine reductase OS=Caballeronia glebae; OX = 1777143 GN=queF PE=3 SV=1
MTPDQSPLGKPVHYTEQYDASLLFPIDRKRARDAIAVPERLPFFGTDIWNAYELSWLNKRGKPQIAVATFFVPADSPNIVESKSFKLYLGSFAQTQFDSIDDVRAAIKRDVSAVCGATVSVQLAAPADFGKLAMEEFDGLSLDRLDLDCDVFSPDPSLLKATHDEAPVDETLFSNLLKSNCPVTGQPDWGSVQIRYYGGQIDHAGLLRYIVSFREHTGFHEQCVERMFMDIMRECKPERLAVYARYTRRGGLDINPFRTNFNLPMPDNARLARQ

SEQ ID NO: 44892 - protein, 274 aa, unidentified
  source 1..274: note = Caballeronia grimmiae
  REGION 1..274: note = tr|A0A069P6B3|A0A069P6B3_9BURK NADPH-dependent 7-cyano-7-deazaguanine reductase OS=Caballeronia grimmiae; OX = 1071679 GN=queF PE=3 SV=1
MTPDQSPLGKAVNYTEQYDSSLLFPIDRKRARDAIGVPARLPFFGTDIWNAYELSWLNRNGKPQIAVATFFVPAESPNIVESKSFKLYLGSFAQTRFDSIDEVRAAIKRDVSAICGATVSVLLTPPPDFGKLSMEEFDGLSLDRLDLDCEVYSPDASLLKASHDEAPVDETLFSNLLKSNCPVTGQPDWGSVQIRYYGGQIDHAGLLRYIVSYREHTGFHEQCVERIFMDIMRECKPERLAVYARYTRRGGLDINPFRTNFNLPMPDNARLARQ

SEQ ID NO: 44893 - protein, 274 aa, unidentified
  source 1..274: note = Caballeronia humi
  REGION 1..274: note = tr|A0A158F159|A0A158F159_9BURK NADPH-dependent 7-cyano-7-deazaguanine reductase OS=Caballeronia humi; OX = 326474 GN=queF PE=3 SV=1
MTPDQSPLGKEVVYTEQYDPLLLFPIDRKTARDAIGIGARLPFFGTDIWNAYELSWLNRRGKPQIAVATFFVPAESPNIVESKSFKLYLGSFAQTAFDSIDDVRAAIKRDVSAICGVNVSVQLAAPGDFGKLQMEEFDGLSLDRLDLDTDVYSPDPSLLKATHDEAPVDETLFSNLLKSNCPVTGQPDWGSVQIRYYGGQIDHAGLLRYVISYRGHTGFHEQCVERIFMDIMRECQPERLAVYARYTRRGGLDINPFRTNFNLPMPDNARLARQ

SEQ ID NO: 44894 - protein, 274 aa, unidentified
  source 1..274: note = Caballeronia hypogeia
  REGION 1..274: note = tr|A0A157Z464|A0A157Z464_9BURK NADPH-dependent 7-cyano-7-deazaguanine reductase OS=Caballeronia hypogeia; OX = 1777140 GN=queF PE=3 SV=1
MTPDQSPLGKPVHYTEQYDASLLFPIDRKRARDAIAVPARLPFFGTDIWNAYELSWLNRRGKPQIAVATFFVPADSPNIVESKSFKLYLGSFAQTQFDSIDNVRAAIKRDVSAVCGATVSVQLAAPADFAKLQMEEFEGLSLDRLDLDCDVFSPDPSLLKAAHDEAPTEETLFSNLLKSNCPVTGQPDWGSVQIRYYGGQIDHAGLLRYIVSFREHTGFHEQCVERIFMDIMRECKPERLAVYARYTRRGGLDINPFRTNFNLPMPDNARLARQ

SEQ ID NO: 44895 - protein, 274 aa, unidentified
  source 1..274: note = Caballeronia jiangsuensis
  REGION 1..274: note = tr|A0A038H6D9|A0A038H6D9_9BURK NADPH-dependent 7-cyano-7-deazaguanine reductase OS=Caballeronia jiangsuensis OX=1458357 GN=queF PE=3 SV=1
MTPDQSPLGKPVHYTEQYDASLLFPIDRKRARDSIGVPERLPFFGTDIWNAYELSWLNRRGKPQIAVATFFVPADSPNIVESKSFKLYLGSFAQTPFDSIDDVRAAIKRDVSAICGATVSVQLAAPGDFGKLAMEEFEGLSLDRLDLDCDVFSPDPSLLKATHDEAPTDETLFSNLLKSNCPVTGQPDWGSVQIRYYGGQIDHAGLLRYIVSYRGHTGFHEQCVERIFMDIMRECKPERLAVYARYTRRGGLDINPFRTNFNLPMPDNARLARQ

SEQ ID NO: 44896 - protein, 274 aa, unidentified
  source 1..274: note = Caballeronia megalochromosomata
  REGION 1..274: note = tr|A0A149Q0D9|A0A149Q0D9_9BURK NADPH-dependent 7-cyano-7-deazaguanine reductase OS=Caballeronia megalochromosomata OX=1399969 GN=queF PE=3 SV=1
MTPDQSPLGKPVHHTEQYDASLLFPIDRKRARDAIAVPARLPFFGTDIWNAYELSWLNRRGKPQIAVATFFVPADSPNIVESKSFKLYLGSFAQTPFDSIDDVRAAIKRDVSAVCGATVSVQLAAPADFGKLTMEEFEGLSLDRLDLDCEVFSPDPSLLKAAHDEVPVDETLFSNLLKSNCPVTGQPDWGSVQIRYYGGQIDHAGLLRYIVSYRGHTGFHEQCVERIFMDIMRECKPERLAVYARYTRRGGLDINPFRTNFNLPMPDNARLARQ

SEQ ID NO: 44897 - protein, 276 aa, unidentified
  source 1..276: note = Caballeronia mineralivorans
  REGION 1..276: note = tr|A0A0J1FSK8|A0A0J1FSK8_9BURK NADPH-dependent 7-cyano-7-deazaguanine reductase OS=Caballeronia mineralivorans PML1(12) OX=908627 GN=queF PE=3 SV=1
MNTPEQSSLGKPVQYTERYDPALLFSIDRAAGREAIGVTAQLPFFGTDIWNAYELSWLNRKGKPQIAVATFIVPAESPNIVESKSFKLYLGSFSQTAFDSIDEVRAALRKDVSAVCGANVSVQLVAPYEFALKLKMEEFEGLSLDRLDLDAEVYSPDPSLLRASFGESPVDETVFSNLLKSNCPVTGQPDWGSVQIRYVGAPIDHAGLLRYIISYREHTGFHEQCVERIFMDVMRECKPERLAVYARYTRRGGLDINPFRTNFNLPLPDNARLARQ

SEQ ID NO: 44898 - protein, 274 aa, unidentified
  source 1..274: note = Caballeronia pedi
  REGION 1..274: note = tr|A0A157Z3H5|A0A157Z3H5_9BURK NADPH-dependent 7-cyano-7-deazaguanine reductase OS=Caballeronia pedi; OX = 1777141 GN=queF PE=3 SV=1
MTPDQSPLGKPVHYTEQYDASLLFPIDRKRARDAIAVPARLPFFGTDIWNAYELSWLNRRGKPQIAVATFFVPADSPNIVESKSFKLYLGSFAQTPFDSIDDVRAAIKRDVSAVCGATVSVQLAAPADFSKLAMEEFDGLSLDRLDLDCDVFSPDPSLLKAAHDEVPVEETLFSNLLKSNCPVTGQPDWGSVQIRYYGGQIDHAGLLRYVVSYRGHTGFHEQCVERIFMDIMRECKPERLAVYARYTRRGGLDINPFRTNFNLPMPDNARLARQ

SEQ ID NO: 44899 - protein, 274 aa, unidentified
  source 1..274: note = Caballeronia peredens
  REGION 1..274: note = tr|A0A158G6H0|A0A158G6H0_9BURK NADPH-dependent 7-cyano-7-deazaguanine reductase OS=Caballeronia peredens; OX = 1777132 GN=queF PE=3 SV=1
MTPDQSPLGKPVQYTEQYDASLLFPIDRKRARDSIGVPARLPFFGTDIWNAYELSWLNARGKPQIAVATFFVPADSPNIVESKSFKLYLGSLAQTPFDSIDDVRAAIKRDVSAICGATVSVQLTPPVEFGKLVMEEFDGLSLDRLDLDCEVFSPDASLLKAAHDEVPVEETLFSNLLKSNCPVTGQPDWGSVQIRYYGGQIDHAGLLRYIVSFREHTGFHEQCVERIFMDIMRECKPERLAVYARYTRRGGLDINPFRTNFNLPMPDNARLARQ

SEQ ID NO: 44900 - protein, 274 aa, unidentified
  source 1..274: note = Caballeronia ptereochthonis
  REGION 1..274: note = tr|A0A158DS60|A0A158DS60_9BURK NADPH-dependent 7-cyano-7-deazaguanine reductase OS=Caballeronia ptereochthonis OX=1777144 GN=queF PE=3 SV=1
MTPDQSPLGKPVHYTEQYDASLLFPIDRKRARDAIGVPGRLPFFGTDIWNAYELSWLNRRGKPQIAVATFFVPADSPNIVESKSFKLYLGSFAQTQFDSIDDVRAAIKRDVSATCGANVSVQLAAPADFGKLTMEEFDGLSLDRLDLDCEVFSPEPSLLSATHDEAPVDETLFSNLLKSNCPVTGQPDWGSVQIRYYGGQIDHAGLLRYIVSYRGHTGFHEQCVERIFMDIMRECKPERLAVYARYTRRGGLDINPFRTNFNLPMPDNARLARQ

SEQ ID NO: 44901 - protein, 276 aa, unidentified
  source 1..276: note = Caballeronia sordidicola
  REGION 1..276: note = tr|A0A4R1PQY0|A0A4R1PQY0_9BURK NADPH-dependent 7-cyano-7-deazaguanine reductase OS=Caballeronia sordidicola OX=196367 GN=queF PE=3 SV=1
MNTPEHSPLGKPVQYSERYDPALLFPIARAAGREAIGVPAQLPFFGTDIWNAYELSWLNKKGKPQIAVATFIVPAESPNIVESKSFKLYLGSFSQTAFESIDEVRAAIRKDVSAVCGANVSVQLVAPYEFALKLKMEEFEGLSLDRLDLDTDVYSPDPSLLRASFDESPVDETLFSNLLKSNCPVTGQPDWGSVQIRYVGAPIDHAGLLRYIISYREHTGFHEQCVERIFMDVMRECKPQRLAVYARYTRRGGLDINPFRTNFNLPLPDNARLARQ

SEQ ID NO: 44902 - protein, 275 aa, unidentified
  source 1..275: note = Caballeronia sordidicola
  REGION 1..275: note = tr|A0A242M5J1|A0A242M5J1_9BURK NADPH-dependent 7-cyano-7-deazaguanine reductase OS=Caballeronia sordidicola OX=196367 GN=queF PE=3 SV=1
MTPEQSPLGKPVQYREQYDPSLLFPIDRASGRAAIGLTARLPFFGTDIWNGYELSWLNRKGKPQIAVATFIVPADSPNIVESKSFKLYLGSFSQTAFDSIDEVRAAIRKDVSAICGANVSVQLVAPYEFGVKLKMEEFEGLSLDRLDLDADIYTPDPSLLSASHGESPVDETLFSNLLKSNCPVTGQPDWGSVQIRYVGAPIDHAGLLRYIISYREHTGFHEQCVEKIFVDVMRECKPERLAVYARYTRRGGLDINPFRTNFNLPMPDNARLARQ

SEQ ID NO: 44903 - protein, 274 aa, unidentified
  source 1..274: note = Caballeronia telluris
  REGION 1..274: note = tr|A0A158FSN4|A0A158FSN4_9BURK NADPH-dependent 7-cyano-7-deazaguanine reductase OS=Caballeronia telluris; OX = 326475 GN=queF PE=3 SV=1
MTPDQSPLGKAVVYTEQYDPMLLFPIERKSARDAIGIGARLPFFGTDIWNAYELSWLNRRGKPQIAVATFFVPADSPNIVESKSFKLYLGSFAQTAFDSIDDVKAAIKRDVSAICGATVSVQLAAPGDFGKLAMEEFDGLSLDRLDLDTDVYSPDPSLLTAVHDEAPVDETLFSNLLKSNCPVTGQPDWGSVQIRYYGGQIDHAGLLRYIVSFREHTGFHEQCVERIFVDIMRECRPERLAVYARYTRRGGLDINPFRTNFNLPMPDNARLARQ

SEQ ID NO: 44904 - protein, 274 aa, unidentified
  source 1..274: note = Caballeronia temeraria
  REGION 1..274: note = tr|A0A157ZNE4|A0A157ZNE4_9BURK NADPH-dependent 7-cyano-7-deazaguanine reductase OS=Caballeronia temeraria; OX = 1777137 GN=queF PE=3 SV=1
MTPDQSPLGKPVHYTEQYDASLLFPIDRKRARDAIAVPERLPFFGTDIWNAYELSWLNKRGKPQIAVATFFVPADSPNIVESKSFKLYLGSFAQTQFDSVDDVRAAIKRDVSAVCGATVSVQLAAPADFGKLAMEEFDGLSLDRLDLDCDVFSPDPSLLTATHDEAPVDETLFSNLLKSNCPVTGQPDWGSVQIRYYGGQIDHAGLLRYIVSFREHTGFHEQCVERIFMDIMRECKPERLAVYARYTRRGGLDINPFRTNFNLPMPDNARLARQ

SEQ ID NO: 44905 - protein, 274 aa, unidentified
  source 1..274: note = Caballeronia terrestris
  REGION 1..274: note = tr|A0A158HIK2|A0A158HIK2_9BURK NADPH-dependent 7-cyano-7-deazaguanine reductase OS=Caballeronia terrestris OX=1226301 GN=queF PE=3 SV=1
MTPDQSPLGKEVVYTEQYDPLLLFPIDRKTARDAIGIGARLPFFGTDIWNAYELSWLNRRGKPQIAVATFLVPAESPNIVESKSFKLYLGSFAQTAFDSTDDVRAAIKRDVSAICGVNVSVQLAAPADFGKLQMEEFEGLSLDRLDLDTDVYSPDPSLLKATHDEAPVDETLFSNLLKSNCPVTGQPDWGSVQIRYYGGQIDHAGLLRYVISYRGHTGFHEQCVERIFMDIMRECQPERLAVYARYTRRGGLDINPFRTNFNLPMPDNARLGRQ

SEQ ID NO: 44906 - protein, 274 aa, unidentified
  source 1..274: note = Caballeronia turbans
  REGION 1..274: note = tr|A0A158GBP1|A0A158GBP1_9BURK NADPH-dependent 7-cyano-7-deazaguanine reductase OS=Caballeronia turbans; OX = 1777134 GN=queF PE=3 SV=1
MTPDQSPLGKPVHYTEQYDASLLFPIDRKRARDSIGVPARLPFFGTDIWNAYELSWLNRRGKPQVAVATFFVPADSPNIVESKSFKLYLGSFAQTQFDSIDDVRAAIKRDVSAICGATVSVQLAAPGDFGKLTMEEFDGLSLDRLDLDCEVFTPDPSLLKAAHDETPTDETLFSNLLKSNCPVTGQPDWGSVQIRYYGGQIDHAGLLRYIVSYRGHTGFHEQCVERIFMDIMRECRPERLAVYARYTRRGGLDINPFRTNFNLPMPDNARLARQ

SEQ ID NO: 44907 - protein, 276 aa, unidentified
  source 1..276: note = Caballeronia udeis
  REGION 1..276: note = tr|A0A158IH77|A0A158IH77_9BURK NADPH-dependent 7-cyano-7-deazaguanine reductase OS=Caballeronia udeis; OX = 1232866 GN=queF PE=3 SV=1
MNTPEHSPLGKPVQYSERYDPALLFPIARAAGREAIGVPAQLPFFGTDIWNAYELSWLNKKGKPQIAVATFIVPAESPNIVESKSFKLYLGSFSQTAFDSVDDVRAAIRKDVSAVCGANVSVQLVAPYEFAVKLKMEEFEGLSLDRLDLDADVYSPDPSLLRASFDESPVDETLFSNLLKSNCPVTGQPDWGSVQIRYVGTPIDHAGLLRYIISYREHTGFHEQCVERIFMDVMRECKPQRLAVYARYTRRGGLDINPFRTNFNLPLPDNARLARQ

SEQ ID NO: 44908 - protein, 276 aa, unidentified
  source 1..276: note = Caballeronia udeis
  REGION 1..276: note = tr|A0A3M0VDJ0|A0A3M0VDJ0_9BURK NADPH-dependent 7-cyano-7-deazaguanine reductase OS=Caballeronia udeis; OX = 1232866 GN=queF PE=3 SV=1
MNTPEQSSLGKPVQYTERYDPALLFPIDRAAGREAIGVTAQLPFFGTDIWNAYELSWLNRKGKPQIAVATFIVPAESPNIVESKSFKLYLGSFSQTAFDSIDEVRAALRKDVSAVCGANVSVQLVAPYEFALKLKMEEFEGLSLDRLDLDADVYSPDPSLLRASFGESPVDETLFSNLLKSNCPVTGQPDWGSVQIRYVGAPVDHAGLLRYIISYREHTGFHEQCVERIFMDVMRECKPQRLAVYARYTRRGGLDINPFRTNFNLPLPDNARLARQ

SEQ ID NO: 44909 - protein, 281 aa, Caenimonas sp.
  REGION 1..281: note = tr|A0A562ZKN1|A0A562ZKN1_9BURK NADPH-dependent 7-cyano-7-deazaguanine reductase OS=Caenimonas sp. HX-9-20; OX = 2596921 GN=queF PE=3 SV=1
MNTPDQSLLGKQAHYADQYDPALLFPLARAPARHEIGLTGALPFFGADLWTAFELSWLNPRGKPQVAIAHVTVPCETPNIVESKSFKLYLGSFSNTVFATADAVRDRLRADLSEAVWRGAESPATVGVRLVLPEVFDREPVHELDGLSLDRLDIECTDYTPAPHLLTTVAGEPPVEEVLTSNLLKSNCLVTGQPDWGSIRIRYTGPQIEQGGLLRYLVSFRNHNEFHEQCVERIFMDLWRQCKPTRLAVYARYTRRGGLDINPLRTSHPMPLPPNVRTARQ

SEQ ID NO: 44910 - protein, 142 aa, Caenispirillum bisanense
  REGION 1..142: note = tr|A0A286GUC4|A0A286GUC4_9PROT NADPH-dependent 7-cyano-7-deazaguanine reductase OS=Caenispirillum bisanense OX=414052 GN=queF PE=3 SV=1
MTEKLSDTSTLTQLGRDTRYEYDTANPALLERFPNPMKAAKGRSVVKVVAPEFTSLCPLTGQPDYATIVLEYTPRDWCLESKSWKVYLMSFRNIGEFHESCVTRMHADLVALLDPAWMVIEGQFTPRGGISFWPRIEYTREG

SEQ ID NO: 44911 - protein, 142 aa, unidentified
  source 1..142: note = Caenispirillum salinarum
  REGION 1..142: note = tr|K9H344|K9H344_9PROT NADPH-dependent 7-cyano-7-deazaguanine reductase OS=Caenispirillum salinarum AK4 OX=1238182 GN=queF PE=3 SV=1
MTDRLSDASGLKSLGRETRFEYDTANADLLERFPNPMKSAKGRKVIKVVAPEFTSLCPMTGQPDYATIVLEYSPRDWCVESKSWKLYLMSFRNVGEFHEACVTRMHNDLVALLDPEWMVIEGQFTPRGGISFWPRIEYTREG

SEQ ID NO: 44912 - protein, 146 aa, Caldalkalibacillus thermarum
  REGION 1..146: note = tr|F5L3Y3|F5L3Y3_CALTT NADPH-dependent 7-cyano-7-deazaguanine reductase OS=Caldalkalibacillus thermarum (strain TA2.A1) OX=986075 GN=queF PE=3 SV=1
MAKKEVNHKKYENIRFDIQDESVILDDILETIPYEYVGKRTEVTIPTSEFTSVCPWSGLPDFAELEITYIPRETLIELKSLKYYLTSFRNVGIYQEHATQRILHDLVKICDPLMMRVEAYWNARGGLGTRTVAEYIAPDAEGTEQI

SEQ ID NO: 44913 - protein, 115 aa, Caldanaerobacter subterraneus
  REGION 1..115: note = tr|A0A124FC76|A0A124FC76_9THEO NADPH-dependent 7-cyano-7-deazaguanine reductase (Fragment); OS = Caldanaerobacter subterraneus OX=911092 GN=XD49_2174; PE = 3 SV=1
MTDKYKERRFDIYGYEKIDKEVLEYIEYEYPEKNTIVEYITDEFSSVCPWTGLPDNAKLTIRYIPHKKLVELKSLKYYLTSYRNVGILQEHAINRILDDLVELLQPKFMEIIGEF

SEQ ID NO: 44914 - protein, 133 aa, Caldanaerobacter subterraneus
  REGION 1..133: note = tr|A0A0F5PLM9|A0A0F5PLM9_9THEO NADPH-dependent 7-cyano-7-deazaguanine reductase OS=Caldanaerobacter subterraneus subsp. pacificus DSM 12653 OX=391606 GN=queF; PE = 3 SV =1
MTDKYKERRFDIYGYEKIDKEVLESIEYEYPEKNTIVEYITDEFSSVCPWTGLPDNAKLTIRYIPHKKLVELKSLKYYLTSYRNVGILQEHAINRILDDLVELLQPKFMEIIGEFQERGGIATRIIARYEEEE

SEQ ID NO: 44915 - protein, 131 aa, Caldanaerobius fijiensis
  REGION 1..131: note = tr|A0A1M5ATM2|A0A1M5ATM2_9THEO NADPH-dependent 7-cyano-7-deazaguanine reductase OS=Caldanaerobius fijiensis DSM 17918 OX=1121256 GN=queF PE=3 SV=1
MSKYDKRWDIDGYDAIDTDILEAIPFEYPDSHTEVKYIEPEFTSVCPWTGLPDFGTITIKYIPSDKLVELKSLKYYLNSFRNVGILQEHVVNRILNDLKNLLDPIEMTVTAEFNARGGISTVATVNYKKEI

SEQ ID NO: 44916 - protein, 133 aa, Caldanaerovirga acetigignens
  REGION 1..133: note = tr|A0A1M7M7L1|A0A1M7M7L1_9FIRM NADPH-dependent 7-cyano-7-deazaguanine reductase OS=Caldanaerovirga acetigignens OX=447595 GN=queF PE=3 SV=1
MDKYGKRRFDIYGYEKIDTEVLEAIKYEYPGRDTVIEYITEEFSSVCPWTGLPDNARLTIRYIPNEKLVELKSLKYYLTSYRNIGILQEHAVNRILDDLVKLLEPKYMEVIGEFLARGGISTRVVAKYGTIPK

SEQ ID NO: 44917 - protein, 131 aa, Caldicellulosiruptor bescii
  REGION 1..131: note = sp|B9MPS5|QUEF_CALBD NADPH-dependent 7-cyano-7-deazaguanine reductase OS=Caldicellulosiruptor bescii (strain ATCC BAA-1888 / DSM 6725 / Z-1320); OX = 521460 GN=queF PE= 3 SV=1
MSDKYQQRRFDIYGYEKIDTEVLEAIPYEYPEKNTVVEYITEEFSSVCPWTGLPDTAKLTIRYIPHQKLVELKSLKYYLTSYRNVGILQEHAVNRILDDLVKLLEPKFMEVIGEFHERGGISTKVVARYEK

SEQ ID NO: 44918 - protein, 136 aa, unidentified
  source 1..136: note = Caldicellulosiruptor changbaiensis
  REGION 1..136: note = tr|A0A3T0D8X0|A0A3T0D8X0_9FIRM NADPH-dependent 7-cyano-7-deazaguanine reductase OS=Caldicellulosiruptor changbaiensis OX=1222016 GN=queF PE=3 SV=1
MQSPNLNDKYQQRRFDIYGYEKIDTEVLEAIDYEYPEKNTVVEYITDEFSSVCPWTGLPDTARLTIRYIPNKKLVELKSLKYYLTSFRNVGILQEHTVNRILDDLVKLLEPKFMEVIGEFHERGGISTRVVARYEK

SEQ ID NO: 44919 - protein, 131 aa, Caldicellulosiruptor hydrothermalis
  REGION 1..131: note = tr|E4Q9W3|E4Q9W3_CALH1 NADPH-dependent 7-cyano-7-deazaguanine reductase OS=Caldicellulosiruptor hydrothermalis (strain DSM 18901 / VKM B-2411 / 108); OX = 632292 GN=que F PE=3 SV=1
MADKYQQRRFDIYGYEKIDTEVLEAIPYEYPEKSTVVEYVTEEFSSVCPWTGLPDTAKLTIRYIPHQKLVELKSLKYYLTSYRNVGILQEHAVNRILDDLVKLLEPKFMEVIGEFHERGGISTKVVARYEK

SEQ ID NO: 44920 - protein, 131 aa, Caldicellulosiruptor kristjanssonii
  REGION 1..131: note = tr|E4S8G3|E4S8G3_CALKI NADPH-dependent 7-cyano-7-deazaguanine reductase OS=Caldicellulosiruptor kristjanssonii (strain ATCC 700853 / DSM 12137 / I77R1B); OX = 632335 GN =queF PE=3 SV=1
MADKYQQRRFDIYGYEKIDTEVLEAIPYEYPEKSTVVEYVTEEFSSVCPWTGLPDTAKLTIRYIPYQKLVELKSLKYYLTSYRNVGILQEHAVNRILDDLVKLLDPKFMEVIGEFHERGGISTKVVARYEK

SEQ ID NO: 44921 - protein, 131 aa, Caldicellulosiruptor kronotskyensis; identical to SEQ ID NO: 44917
  REGION 1..131: note = tr|E4SHQ9|E4SHQ9_CALK2 NADPH-dependent 7-cyano-7-deazaguanine reductase OS=Caldicellulosiruptor kronotskyensis (strain DSM 18902 / VKM B-2412 / 2002); OX = 632348 GN=qu eF PE=3 SV=1

SEQ ID NO: 44922 - protein, 131 aa, Caldicellulosiruptor lactoaceticus
  REGION 1..131: note = tr|G2PY38|G2PY38_9FIRM NADPH-dependent 7-cyano-7-deazaguanine reductase OS=Caldicellulosiruptor lactoaceticus 6A OX=632516 GN=queF PE=3 SV=1
MADKYQQRRFDIYGYEKIDTEVLEAIPYEYPEKSTVVEYVTEEFSSVCPWTGLPDTAKLTIRYIPYQKLVELKSLKYYLTSYRNVGILQEHAVNRILNDLVKLLEPKFMEVIGEFHERGGISTRIVARYEK

SEQ ID NO: 44923 - protein, 131 aa, unidentified; identical to SEQ ID NO: 44917
  source 1..131: note = Caldicellulosiruptor obsidiansis
  REGION 1..131: note = tr|D9TH86|D9TH86_CALOO NADPH-dependent 7-cyano-7-deazaguanine reductase OS=Caldicellulosiruptor obsidiansis (strain ATCC BAA-2073 / strain OB47) OX=608506; GN = queF PE =3 SV=1

SEQ ID NO: 44924 - protein, 131 aa, Caldicellulosiruptor owensensis; identical to SEQ ID NO: 44917
  REGION 1..131: note = tr|E4Q724|E4Q724_CALOW NADPH-dependent 7-cyano-7-deazaguanine reductase OS=Caldicellulosiruptor owensensis (strain ATCC 700167 / DSM 13100 / OL) OX=632518; GN = queF PE =3 SV=1

SEQ ID NO: 44925 - protein, 136 aa, Caldicellulosiruptor saccharolyticus
  REGION 1..136: note = tr|A4XGU8|A4XGU8_CALS8 NADPH-dependent 7-cyano-7-deazaguanine reductase OS=Caldicellulosiruptor saccharolyticus (strain ATCC 43494 / DSM 8903 / Tp8T 6331); OX = 351627GN=queF PE=3 SV=1
MQSPNLNDKYQQRRFDIYGYEKIDTDVLEAIDYEYPEKNTVVEYITDEFSSVCPWTGLPDTARLTIRYIPNKKLVELKSLKYYLTSFRNVGILQEHAVNRILDDLVKLLEPKFMEVIGEFHERGGISTRVVARYEK

SEQ ID NO: 44926 - protein, 134 aa, unidentified
  source 1..134: note = Caldicoprobacter faecalis
  REGION 1..134: note = tr|A0A1I5XJU4|A0A1I5XJU4_9FIRM NADPH-dependent 7-cyano-7-deazaguanine reductase OS=Caldicoprobacter faecalis OX=937334 GN=queF PE=3 SV=1
MDKYSNKRFDVYGYDRIDTEVLEAMDYEYPGRDTLVEYYTEEFSSVCPWTGLPDNAKLTIKYIPSNKLVELKSLKYYLTSYRNVGILQEHAVNRILDDLVNLIKPRYMEVIGEFVARGGISTRVTAKYDGKERP

SEQ ID NO: 44927 - protein, 136 aa, unidentified
  source 1..136: note = Caldilineae bacterium
  REGION 1..136: note = tr|A0A3M1EVU0|A0A3M1EVU0_9CHLR NADPH-dependent 7-cyano-7-deazaguanine reductase OS=Caldilineae bacterium; OX = 2420332 GN=queF PE=3 SV=1
MTEKSDLKDLTLLGREVTQPQRKLETFPNRHPGRPYTVRLETDEFTCVCPMTGQPDFARLVIEYIPDQRIVESKSVKLYLWSFRNEGHFHEHVTNTILDDFVAALDPLYCKVTGYFNIRGGIKITVEAEHRKETPA

SEQ ID NO: 44928 - protein, 124 aa, unidentified
  source 1..124: note = Caldimicrobium thiodismutans
  REGION 1..124: note = tr|A0A0U5ARK9|A0A0U5ARK9_9BACT NADPH-dependent 7-cyano-7-deazaguanine reductase OS=Caldimicrobium thiodismutans OX=1653476 GN=queF PE=3 SV=1
MVKKYGEIAIAEAQLEAWENPYPDRDYLIEITFPEFTCLCPRSGYPDFAIIKISYLPDQKIVELRSLKLWLNKFRDRYLSHEAVTNEIFDALWNLLQPRRLKVVADFHPRGNVHTVITVEKERA

SEQ ID NO: 44929 - protein, 129 aa, unidentified
  source 1..129: note = Caldimicrobium thiodismutans
  REGION 1..129: note = tr|A0A2N7PIC6|A0A2N7PIC6_9BACT NADPH-dependent 7-cyano-7-deazaguanine reductase OS=Caldimicrobium thiodismutans OX=1653476 GN=queF PE=3 SV=1
MSKDVVQKKYGEKAIEEAELEAWENPYPDRDYLIEITFPEFTCLCPRSGYPDFAVIKISYIPDKYIVELRSLKLWLNKFRNRYISHEAATNEIFDALWNLLKPRRLKVVGDFHPRGNVHTVITVERENQ

SEQ ID NO: 44930 - protein, 120 aa, Caldithrix abyssi
  REGION 1..120: note = tr|H1XNE9|H1XNE9_9BACT NADPH-dependent 7-cyano-7-deazaguanine reductase OS=Caldithrix abyssi DSM 13497 OX=880073 GN=queF PE=3 SV=1
MAQIEVFENKYPDRDYYITHVNEEFTSVCPKTGLPDFGTITINYIPDKLCLELKSLKYYFLDFRNKGIFYESVINQILDELVEACKPRFMEVRGDFTTRGGMHTTVVAVYDPQKRGGFQK

SEQ ID NO: 44931 - protein, 115 aa, Caldithrix sp.
  REGION 1..115: note = tr|A0A523HNT3|A0A523HNT3_9BACT NADPH-dependent 7-cyano-7-deazaguanine reductase OS=Caldithrix sp.; OX = 1962856 GN=queF PE=3 SV=1
MERLETFDNKYPNRDYTVTIVNDEYTSVCPMTGLPDFGTITINYVPDKKCLELKALKYYFLEYRNEGIFYEAVINKILDDLVEVCDPKSMEVIGEFTVRGGLRSVVKASHKKDTK

SEQ ID NO: 44932 - protein, 115 aa, Caldithrix sp.
  REGION 1..115: note = tr|A0A523IBI4|A0A523IBI4_9BACT NADPH-dependent 7-cyano-7-deazaguanine reductase OS=Caldithrix sp.; OX = 1962856 GN=queF PE=3 SV=1
MERLETFDNKYPNRDYTVTIVNDEYTSVCPMTGLPDFGTITINYVPDKKCLELKALKYYFMEYRNEGIFYEAVINKILDDLVEVCDPKSMEVIGEFTVRGGLRSVVKASHKKDTK

SEQ ID NO: 44933 - protein, 118 aa, unidentified
  source 1..118: note = Calditrichaeota bacterium
  REGION 1..118: note = tr|A0A3M2FQY4|A0A3M2FQY4_9BACT NADPH-dependent 7-cyano-7-deazaguanine reductase OS=Calditrichaeota bacterium OX=2212469 GN=queF PE=3 SV=1
MAQIDVFENAYPERIYNIVHVNEEFTSVCPKTGLPDFGTITIDYIPGKLCLELKSLKYYFLEYRNKGVFYEKLVNDILDDLVKACQPRSMTVIGEFTTRGGMHSTVTAVYKPEDKRED

SEQ ID NO: 44934 - protein, 144 aa, unidentified
  source 1..144: note = Calditrichaeota bacterium
  REGION 1..144: note = tr|A0A3M1X866|A0A3M1X866_9BACT NADPH-dependent 7-cyano-7-deazaguanine reductase OS=Calditrichaeota bacterium OX=2212469 GN=queF PE=3 SV=1
MRNKGEELKDLTLLGSGPRARPSRKLEAFPNRHPGRYYRVVLETDEFTCLCPKTGQPDFAHITIEYVPDQKIVESKSLKLYFWSYRDEGVFHEHVVNRILDDLVAVLDPHWCRVTGKFNVRGGIAITVVAEHTRTPEARQAVLG

SEQ ID NO: 44935 - protein, 118 aa, unidentified
  source 1..118: note = Calditrichales bacterium
  REGION 1..118: note = tr|A0A524L5P3|A0A524L5P3_9BACT NADPH-dependent 7-cyano-7-deazaguanine reductase OS=Calditrichales bacterium OX=2528038 GN=queF PE=3 SV=1
MANVDVFENKYPDRDYQITHVNNEYTSMCPKTGLPDFGKITINYIPDKLCLELKSLKYYYLEFRNKGIFYEAVINQILDELVAVCEPRYMEVVGEFTARGGLNSTIRAVYDPKGRGQF

SEQ ID NO: 44936 - protein, 128 aa, unidentified
  source 1..128: note = Calothrix brevissima
  REGION 1..128: note = tr|A0A1Z4K813|A0A1Z4K813_9CYAN NADPH-dependent 7-cyano-7-deazaguanine reductase OS=Calothrix brevissima NIES-22 OX=1973478 GN=queF PE=3 SV=1
MTTDTKEIKYGEREIAEGKLITFPNPRVGRRYEVSITLPEFTCKCPFSGYPDFATIYITYVPDERVVELKALKLYINSYRDRYISHEESANQILDDFVAACDPLEATVKADFTPRGNVHTVVEVRHQK

SEQ ID NO: 44937 - protein, 141 aa, unidentified
  source 1..141: note = Calothrix desertica
  REGION 1..141: note = tr|A0A3S1J536|A0A3S1J536_9CYAN NADPH-dependent 7-cyano-7-deazaguanine reductase OS=Calothrix desertica PCC 7102 OX=232991 GN=queF PE=3 SV=1
MSNLSPEITTQSIEEAPTQSVKYGEREIAEGQLITFPNPRVGRRYNINITLPEFTCKCPFSGYPDFATIYISYIPDAKVVELKALKLYINSYRDRYISHEESANLILDDFVAACDPLEVTVKADFTPRGNVHTVVEVKHTK

SEQ ID NO: 44938 - protein, 136 aa, unidentified
  source 1..136: note = Calothrix elsteri
  REGION 1..136: note = tr|A0A2A2THP1|A0A2A2THP1_9CYAN NADPH-dependent 7-cyano-7-deazaguanine reductase OS=Calothrix elsteri CCALA 953 OX=987040 GN=queF PE=3 SV=1
MSNFSPQINTEAVPEMKYGEREIQEGQLITFPNPRIGRRYSVDITLPEFTCKCPFSGYPDFATVYISYIPNEKVVELKALKLYINNYRDRYISHEESANQILDDFVAACDPLEVTVKTDFTPRGNVHTVVEVKHVK

SEQ ID NO: 44939 - protein, 128 aa, Calothrix parasitica
  REGION 1..128: note = tr|A0A1Z4LPL3|A0A1Z4LPL3_9CYAN NADPH-dependent 7-cyano-7-deazaguanine reductase OS=Calothrix parasitica NIES-267 OX=1973488 GN=queF PE=3 SV=1
MTDTSIEVKYGEREIDEGKLITFPNPRVGRRYNISITLPEFTCKCPFSGYPDFATIYVNYVPDEKVVELKAIKLYINSYREKYISHEESANQILDDIVEACDPLEITVKADFTPRGNVHTVVEVSHQK

SEQ ID NO: 44940 - protein, 141 aa, Calothrix sp.
  REGION 1..141: note = tr|A0A1Q4RFQ9|A0A1Q4RFQ9_9CYAN NADPH-dependent 7-cyano-7-deazaguanine reductase OS=Calothrix sp. HK-06; OX = 1137096 GN=queF PE=3 SV=1
MSNSLSEMTTQPSLEAPTQEVKYGEREIAEGQLITFPNPRVGRRYNINITLPEFTCKCPFSGYPDFATIYISYIPDAKVVELKALKLYINSYRDRYISHEESANLILDDFVAACDPLEVTVKADFTPRGNVHTVVEVKHVK

SEQ ID NO: 44941 - protein, 141 aa, Calothrix sp.
  REGION 1..141: note = tr|A0A1Z4R4G8|A0A1Z4R4G8_9CYAN NADPH-dependent 7-cyano-7-deazaguanine reductase OS=Calothrix sp. NIES-4101 OX=2005461 GN=queF PE=3 SV=1
MSSSSSEITTPAIQEIPVPEMKYGEREIQEGKLITFPNPRIGRRYNIDITLPEFTCKCPFSGYPDFATIYISYIPNEKVVELKALKLYINSYRDRYISHEESANQILDDFVAACDPLEATVKTDFTPRGNVHTVVEVKHIK

SEQ ID NO: 44942 - protein, 155 aa, Camelimonas lactis
  REGION 1..155: note = tr|A0A4R2GWG7|A0A4R2GWG7_9RHIZ NADPH-dependent 7-cyano-7-deazaguanine reductase OS=Camelimonas lactis; OX = 659006 GN=queF PE=3 SV=1
MSNADLTQHLSHLGQQSAAPADPATAVLDRVPNPHPDTDYVARFTAPEFTSICPVTGQPDFAILVIDYVPDQWLVESKSLKLYLHAFRNHGAFHEDCTVAIGKRLAGLLAPRFLRIGGYWFPRGGIPIDVFWQTGELPKNVWLPDTGVQPYRARF

SEQ ID NO: 44943 - protein, 132 aa, Caminibacter mediatlanticus
  REGION 1..132: note = tr|A0A4P9DQF8|A0A4P9DQF8_9PROT NADPH-dependent 7-cyano-7-deazaguanine reductase OS=Caminibacter mediatlanticus TB-2 OX=391592 GN=queF PE=3 SV=1
MNELKYGEKEIVEFNPEKDLEIWPNKNKKNYVIKITLPEFMCKCPRSGYPDFATIYLEYIPNEWVVELKALKLYINSFMNRYISHEDSANEIFDTLYNKLKPKKMKLTMDFNPRGNVHTVIEIDSEKIENES

SEQ ID NO: 44944 - protein, 128 aa, Campylobacter avium
  REGION 1..128: note = tr|A0A222N0D5|A0A222N0D5_9PROT NADPH-dependent 7-cyano-7-deazaguanine reductase OS=Campylobacter avium LMG 24591 OX=522484 GN=queF PE=3 SV=1
MRYGEKEIKEFDVDKDLELWENKAENDYLVKITLPEFACLCPRSGYPDFATLKLEYIPDKFIVELKAIKIYINSFMYKHISHEASVNEIYSTLKNKLKPKYIKLVAEFNPRGNVYTSIECRSDLVVPK

SEQ ID NO: 44945 - protein, 127 aa, Campylobacter coli
  REGION 1..127: note = tr|W8KDB8|W8KDB8_CAMCO NADPH-dependent 7-cyano-7-deazaguanine reductase OS=Campylobacter coli RM4661 OX=1183379 GN=queF PE=3 SV=1
MRYGEKEIKEFDVENMEIWPNDAKNDYIIKITLPEFMCCCPRSGYPDFATIYLEYIPDQFVVELKAIKLYINTFMHRNVSHEASINEIYNTLKDKLKPKWIKVVGDFNPRGNVHTVIECRSDMVVPK

SEQ ID NO: 44946 - protein, 127 aa, Campylobacter coli
  REGION 1..127: note = tr|A0A400IRD7|A0A400IRD7_CAMCO NADPH-dependent 7-cyano-7-deazaguanine reductase OS=Campylobacter coli; OX = 195 GN=queF PE=3 SV=1
MRYGEKEIKEFDVENMEIWPNDAKNDYIIKITLPEFMCCCPRSGYPDFATIYLEYIPDQFVVELKAIKLYINTFMHRNISHEASINEIYNTLKDKLKPKWIKVVGDFNPRGNVHTVIECRSDMVVPK

SEQ ID NO: 44947 - protein, 205 aa, Campylobacter concisus
  REGION 1..205: note = tr|U2GC89|U2GC89_9PROT NADPH-dependent 7-cyano-7-deazaguanine reductase OS=Campylobacter concisus UNSW3 OX=1242966 GN=queF PE=3 SV=1
MSEEMKYGEKILKEFDVESDLEVWENKQTRDYVIKITLPEFCCLCPRSGYPDFATIYLEYIPNKLVVELKAIKLYINSFMNRNISHEDSINEIYSVLEKKLEPKFMKIVGDFNPRGNVHTVIEISSDLVVKKPAEEKEYAPRSRERSFSDKPRERRSTSDRASSRGSRDDKFKKDDKPRRSSNKEGFRKISYADDKKPKVVKKDK

SEQ ID NO: 44948 - protein, 205 aa, Campylobacter concisus
  REGION 1..205: note = tr|U2GNU5|U2GNU5_9PROT NADPH-dependent 7-cyano-7-deazaguanine reductase OS=Campylobacter concisus ATCC 51561 OX=1243032 GN=queF PE=3 SV=1
MSEEMKYGEKILKEFDVESDLEVWENKQTRDYVIKITLPEFCCLCPRSGYPDFATIYLEYIPNKLVVELKAIKLYINSFMNRNISHEDSINEIYSVLEKKLEPKFMKIVGDFNPRGNVHTVIEIISDLVVKKPAEEKEYAPRSRERSFGDKPRERRSTSDRGSSRGSRDDKFKKDDKPRRSSNKEGFRKISYADDKKPKVVKKDK

SEQ ID NO: 44949 - protein, 128 aa, Campylobacter cuniculorum
  REGION 1..128: note = tr|A0A1W6BUC1|A0A1W6BUC1_9PROT NADPH-dependent 7-cyano-7-deazaguanine reductase OS=Campylobacter cuniculorum DSM 23162 = LMG 24588 OX=1121267 GN=queF PE=3; SV = 1
MHYGEKEIKKFDANKDLELWKNEAENDYIIKITLPEFCCLCPRSGYPDFATIYLEYIPDEFVVELKAVKLYINSFMHKYISHEASVNEIYQTLKNKLKPKWIKVVGDFNPRGNVHTLIECRSDMVIPH

SEQ ID NO: 44950 - protein, 213 aa, Campylobacter curvus
  REGION 1..213: note = tr|A0A0M3V1R2|A0A0M3V1R2_CAMC5 NADPH-dependent 7-cyano-7-deazaguanine reductase OS=Campylobacter curvus (strain 525.92) OX=360105 GN=queF PE=3 SV=1
MSEEQNQMRYGEKILKEFDPQTDLEVWENKHEREYTIKITLPEFCCLCPRSGYPDFATIYLEYIPNKLVVELKAIKLYINSFMNRNISHEDSINEIYDVLFTKLEPKFMKIIGDFNPRGNVHTIIEVCSESILKKSENLEPVREFKYFNDSKRATARRINERDSGKRSSGRDNAKSSTRKFSDEKPKRAVNKDGFRKISYEGDKKPRVVKKEK

SEQ ID NO: 44951 - protein, 146 aa, Campylobacter fetus
  REGION 1..146: note = tr|A0A0E1GFR4|A0A0E1GFR4_CAMFE NADPH-dependent 7-cyano-7-deazaguanine reductase OS=Campylobacter fetus subsp. fetus 04/554 OX=1240980 GN=queF PE=3 SV=1
MENKKYGEKIINEFDIEKNLEIWPNSSKNDYAIRITLPEFACFCPRSGYPDFATIYLTYVPRDFVVELKAIKLYINSFLNRHISHEASINEIYDTLDKKLNPKYLRVVGDFNPRGNVHTVIELDSNLVRKEKFDVSSITLETTRKF

SEQ ID NO: 44952 - protein, 146 aa, Campylobacter fetus
  REGION 1..146: note = tr|A0A433YHN9|A0A433YHN9_CAMFE NADPH-dependent 7-cyano-7-deazaguanine reductase OS=Campylobacter fetus; OX = 196 GN=queF PE=3 SV=1
MENKKYGEKIINEFDIEKDLEIWPNSSKNDYAIRITLPEFACFCPRSGYPDFATIYLTYVPRDFVVELKAIKLYINSFLNRHISHEASINEIYDTLDKKLNPKYLRVVGDFNPRGNVHTVIELDSNLVRKEKFDVSSITLETTRKF

SEQ ID NO: 44953 - protein, 257 aa, unidentified
  source 1..257: note = Campylobacter geochelonis
  REGION 1..257: note = tr|A0A128EBZ0|A0A128EBZ0_9PROT NADPH-dependent 7-cyano-7-deazaguanine reductase OS=Campylobacter geochelonis OX=1780362 GN=queF PE=3 SV=1
MRYGEEIIKEFDVESDLEIWPNKQERDYLIKITLPEFMCLCPRSGYPDFATIYLEYMPGEFVVELKAIKLYINSFINRNISHEDSINEIYSVLQTKLKPKWMKIIGDFNPRGNVHTVIEIDSNLASKDSQEKPQSANNDEIIDAIKEEFKKEKEQEKLEREERKKSFNDRKPRDGVRSFSDRKPREGGFGDRKPRREFDKKDGKSFDKKPRVGGYSDRKPRDRDDKFDDKPRVKKEPFYKSNFSDRKPQVVKKDDKS

SEQ ID NO: 44954 - protein, 126 aa, Campylobacter gracilis
  REGION 1..126: note = tr|C8PKQ8|C8PKQ8_9PROT NADPH-dependent 7-cyano-7-deazaguanine reductase OS=Campylobacter gracilis RM3268 OX=553220 GN=queF PE=3 SV=1
MRYGEEEIEKFDIENLEVWPNKQERDYLIKITLPEFCCRCPRSGYPDFATIYLEYIPDKLVVELKAIKLYINSFMNRYISHEDSINEIYGALQSKLKPKFMKITGDFNPRGNVHTVIEINSDQIYR

SEQ ID NO: 44955 - protein, 130 aa, Campylobacter helveticus
  REGION 1..130: note = tr|A0A1V0RD49|A0A1V0RD49_9PROT NADPH-dependent 7-cyano-7-deazaguanine reductase OS=Campylobacter helveticus OX=28898 GN=queF PE=3 SV=1
MRYGEKEIKEFDVDKDLELWENTAENDYVIKITLPEFCCLCPRSGYPDFATIYVEYMPDKLVVELKAIKIYINSFMNRNVSHEASINEIYNTLKDKLKPKWIKVVGDFNPRGNVHTLIECRSDIVVPKCL

SEQ ID NO: 44956 - protein, 129 aa, unidentified
  source 1..129: note = Campylobacter hepaticus
  REGION 1..129: note = tr|A0A424Z0T4|A0A424Z0T4_9PROT NADPH-dependent 7-cyano-7-deazaguanine reductase OS=Campylobacter hepaticus OX=1813019 GN=queF PE=3 SV=1
MLYGEKEIKEFDVENMEIWPNEAKNDYIIKITLPEFMCFCPRSGYPDFAKIYLEYIPDQFVIELKAIKLYINTFMHKNVSHEASINEIYTTLKEKLKPKWIKVVGDFNPRGNVHTLIECRSDIVIPKSE

SEQ ID NO: 44957 - protein, 184 aa, Campylobacter hominis
  REGION 1..184: note = tr|A7HZD7|A7HZD7_CAMHC NADPH-dependent 7-cyano-7-deazaguanine reductase OS=Campylobacter hominis (strain ATCC BAA-381 / LMG 19568 / NCTC 13146 / CH001A); OX = 360107 GN =queF PE=3 SV=1
MEDLKYGESQILNFDVEKDFEIWPNKNERNFVIKITLPEFCCLCPRSGYPDFATIYLEYIPNEFVAELKALKLYINSFMNRHISHEDSINEIYSVLEKKLKPKYMKIAADFNPRGNVHTTIEISSDIISKNFSEKKDKKPVEKRNFSEKKFEKTDKNFKSKPRKNASREPFAKIDKSSPKVVKK

SEQ ID NO: 44958 - protein, 143 aa, Campylobacter hyointestinalis
  REGION 1..143: note = tr|A0A172SUB1|A0A172SUB1_CAMHY NADPH-dependent 7-cyano-7-deazaguanine reductase OS=Campylobacter hyointestinalis subsp. lawsonii CCUG 27631 OX=1031752; GN = queF PE=3 S V=1
MKYGEKIINKFDIEKDLEIWPNSSKNDYAIRITLPEFACFCPRSGYPDFATIYLTYVPRDFVVELKAIKLYINSFLNRHISHEASINEIYDTLDKKLNPKYLRVVGDFNPRGNVHTVIELDSNLVRKEKFDVSSITLETTRKF

SEQ ID NO: 44959 - protein, 143 aa, Campylobacter hyointestinalis
  REGION 1..143: note = tr|A0A562XLH0|A0A562XLH0_CAMHY NADPH-dependent 7-cyano-7-deazaguanine reductase OS=Campylobacter hyointestinalis OX=198 GN=queF PE=3 SV=1
MKYGEKIINEFDIEKDLEIWPNSSKNDYAIRITLPEFACFCPRSGYPDFATIYLTYVPRDFVVELKAIKLYINSFLNRHISHEASINEIYDTLDKKLNPKYLRVVGDFNPRGNVHTVIELDSNLVRKEKFDVSSITLETTRKF

SEQ ID NO: 44960 - protein, 146 aa, unidentified
  source 1..146: note = Campylobacter iguaniorum
  REGION 1..146: note = tr|A0A076F6F6|A0A076F6F6_9PROT NADPH-dependent 7-cyano-7-deazaguanine reductase OS=Campylobacter iguaniorum OX=1244531 GN=queF PE=3 SV=1
MENKKYGEKIINEFNIEKDFEIWPNSSKNDYAIRITLPEFACFCPRSGYPDFATIYLTYVPRELVVELKAIKLYINSFLNRHISHEASINEIYDLLDKKLNPKYLRVVGDFNPRGNVHTVIEVDSNLVRGEKYDTSSITLETTRKF

SEQ ID NO: 44961 - protein, 128 aa, Campylobacter insulaenigrae
  REGION 1..128: note = tr|A0A0A8GZF4|A0A0A8GZF4_9PROT NADPH-dependent 7-cyano-7-deazaguanine reductase OS=Campylobacter insulaenigrae NCTC 12927 OX=1031564 GN=queF PE=3 SV=1
MRYGEKEIKEFDVENMEVWPNDAKNDYVIKITLPEFMCCCPRSGYPDFATIFLEYIPNKLVVELKAIKLYINTFMHRNVSHEASINEIYNTLKDKLDPKWIKVVGDFNPRGNVHTVIECRSDLVVPKL

SEQ ID NO: 44962 - protein, 281 aa, Campylobacter jejuni
  REGION 1..281: note = tr|A0A4U9P3I0|A0A4U9P3I0_CAMJU NADPH-dependent 7-cyano-7-deazaguanine reductase OS=Campylobacter jejuni; OX = 197 GN=queF_2 PE=3 SV=1
MSSYQDNPALAQLTLGKSTAYVDHYDASLLQAVPRSMNREPLGLYPDNLPFHGADIWTLYELSWLNAKGLPQVAVGEISLNANSQNLIESKSFKLYLNSFNQTVFPDWQSVQETLTRDLSACAQGDVTVTVSRLSEIEGSPVGHFDGVCIDDQDIEIDSYEFSTDYLATAKGEDIVEESLVSHLLKSNCLITHQPDWGSVQIQYRGPKIDREALLRYLVSFRHHNEFHEQCVERIFNDLLHFCQPEKLAVYARYTRRGGLDINPWRSNFPFEPATARLVRQ

SEQ ID NO: 44963 - protein, 127 aa, Campylobacter jejuni
  REGION 1..127: note = sp|A8FP38|QUEF_CAMJ8 NADPH-dependent 7-cyano-7-deazaguanine reductase OS=Campylobacter jejuni subsp. jejuni serotype O:6 (strain 81116 / NCTC 11828); OX = 407148 GN=que F PE=3 SV=1
MRYGEKEIKEFDVENMEIWPNDAKNDYIIKITLPEFMCCCPRSGYPDFATIYLEYMPDKFVVELKAIKLYINTFMYRNVSHEASINEIYNTLKDKLKPKWIKVVGDFNPRGNVHTVIECCSDMVVPK

SEQ ID NO: 44964 - protein, 147 aa, Campylobacter lanienae
  REGION 1..147: note = tr|A0A381D6C4|A0A381D6C4_9PROT NADPH-dependent 7-cyano-7-deazaguanine reductase OS=Campylobacter lanienae; OX = 75658 GN=queF PE=3 SV=1
MENLKYGEKIIAEFDIDKDFEIWPNSANKDYAIKITLPEFVCFCPRSGYPDFATIYLTYVPDKFVVELKALKLYINSFLNRHISHESSINEIYDTLDNKLKPKYLRVVGDFNPRGNVHTIIEVDSNMIKEQKYDTSSIVFENTRKFN

SEQ ID NO: 44965 - protein, 147 aa, Campylobacter lanienae
  REGION 1..147: note = tr|A0A562YAB2|A0A562YAB2_9PROT NADPH-dependent 7-cyano-7-deazaguanine reductase OS=Campylobacter lanienae; OX = 75658 GN=queF PE=3 SV=1
MENLKYGEKIIAEFDIDKDFEIWPNSANKDYAIKITLPEFACFCPRSGYPDFATIYLTYVPDKFVVELKALKLYINSFLNRHISHESSINEIYDTLDNKLKPKYLRVVGDFNPRGNVHTIIEVDSNMIKEQKYDTSSIVFENTRKFN

SEQ ID NO: 44966 - protein, 128 aa, Campylobacter lari
  REGION 1..128: note = tr|A0A0A8H304|A0A0A8H304_CAMLA NADPH-dependent 7-cyano-7-deazaguanine reductase OS=Campylobacter lari subsp. concheus LMG 11760 OX=1031536 GN=queF PE=3 SV=1
MRYGEKEIKEFSVENMEVWPNDAKNDYMIKITLPEFMCCCPRSGYPDFATIYLEYIPNKLVVELKAIKLYINTFMYRNISHEASINEIYNTLKEKLDPKWIKVVGDFNPRGNVHTVIECRSDLVVPQN

SEQ ID NO: 44967 - protein, 127 aa, Campylobacter lari
  REGION 1..127: note = sp|B9KE89|QUEF_CAMLR NADPH-dependent 7-cyano-7-deazaguanine reductase OS=Campylobacter lari (strain RM2100 / D67 / ATCC BAA-1060) OX=306263 GN=queF; PE = 3 SV=1
MRYGEKEIKEFDVENMEVWPNDAKNDYVIKITLPEFMCCCPRSGYPDFATIYLEYIPNKLVVELKAIKLYINTFMYRNVSHEASINEIYNTLKEKLDPKWIKVVGDFNPRGNVHTVIECRSDLVVPQ

SEQ ID NO: 44968 - protein, 128 aa, unidentified
  source 1..128: note = Campylobacter ornithocola
  REGION 1..128: note = tr|A0A1C2FUS1|A0A1C2FUS1_9PROT NADPH-dependent 7-cyano-7-deazaguanine reductase OS=Campylobacter ornithocola OX=1848766 GN=queF PE=3 SV=1
MRYGEKEIKEFSVENMEVWPNDAKNDYVIKITLPEFMCCCPRSGYPDFATIYLEYIPNKLVVELKAIKLYINTFMYKNISHEASINEIYNTLKEKLDPKWIKVVGDFNPRGNVHTVIECRSDLVVPQN

SEQ ID NO: 44969 - protein, 127 aa, Campylobacter peloridis
  REGION 1..127: note = tr|A0A5C7DWI6|A0A5C7DWI6_9PROT NADPH-dependent 7-cyano-7-deazaguanine reductase OS=Campylobacter peloridis OX=488546 GN=queF PE=3 SV=1
MKYGEKEIKEFSVENMEVWPNDAKNDYVIKITLPEFMCCCPRSGYPDFATIYLEYIPNKLVVELKAIKLYINTFMYKNVSHEASINEIYNTLKEKLDPKWIKVVGDFNPRGNVHTIIECRSDLVVPK

SEQ ID NO: 44970 - protein, 127 aa, Campylobacter peloridis
  REGION 1..127: note = tr|A0A0A8GQS0|A0A0A8GQS0_9PROT NADPH-dependent 7-cyano-7-deazaguanine reductase OS=Campylobacter peloridis LMG 23910 OX=1388753 GN=queF PE=3 SV=1
MRYGEKEIKEFDVENIEVWPNDAKNDYVIKITLPEFMCCCPRSGYPDFATIYLEYIPNKLVVELKAIKLYINTFMYKNVSHEASINEIYNTLKEKLDPKWIKVVGDFNPRGNVHTIIECRSDLVIPK

SEQ ID NO: 44971 - protein, 236 aa, unidentified
  source 1..236: note = Campylobacter pinnipediorum
  REGION 1..236: note = tr|A0A1S6TLR8|A0A1S6TLR8_9PROT NADPH-dependent 7-cyano-7-deazaguanine reductase OS=Campylobacter pinnipediorum subsp. pinnipediorum OX=1660067 GN=queF PE=3; SV = 1
MQYGEEIIKEFDVERDLEVWENKNEREFVIRITLPEFCCLCPRSGYPDFATIYVDYIPDKLVVELKAIKLYINSFMSRKISHEDSINEIYSAIEKKIQPKWMKIVGDFNPRGNVHTVVEICSESFIKEKKVEAETRQDNRSAGARRINERENDRKRDFAPRRSNDRRDSFRGNDRDRGDRGNFRGGDRDRGNFRGNDRDRGDRGNNSRGDNRGGSRDGYRKIQYENDKQPNIVKKD

SEQ ID NO: 44972 - protein, 252 aa, unidentified
  source 1..252: note = Campylobacter pinnipediorum
  REGION 1..252: note = tr|A0A1S6U563|A0A1S6U563_9PROT NADPH-dependent 7-cyano-7-deazaguanine reductase OS=Campylobacter pinnipediorum subsp. caledonicus OX=1874362 GN=queF PE=3; SV = 1
MQYGEEIIKEFDVERDLEVWENKNEREFVIRITLPEFCCLCPRSGYPDFATIYVDYVPDKLVVELKAIKLYINSFMSRKISHEDSINEIYSAIEKKIQPKWMKIVGDFNPRGNVHTVVEICSESFIKEKKVEAETRQDNRSAGARRINERENDRKRDFAPRRNDRRDSFRGNDRDRGDRGSFRGGDRDRGNSRDRGNFRGNDRGDRGDRGDRGDRGNNSRGDSRDRSGGGSRDGYRKIQYENDKQPNIIKKD

SEQ ID NO: 44973 - protein, 235 aa, Campylobacter rectus
  REGION 1..235: note = tr|A0A3P1X288|A0A3P1X288_CAMRE NADPH-dependent 7-cyano-7-deazaguanine reductase OS=Campylobacter rectus; OX = 203 GN=queF PE=3 SV=1
MQENEVSEPKYGEKIISEFDVEKDLEIWENKHERDYKIKITLPEFCCLCPRSGYPDFATIYLEYVPAKFVVELKAIKLYINSFMTRNISHEDSINEIYDVLERKLAPKWMKITGDFNPRGNVHTVIEICSDEIIKKTQEQSFETPKFEKFARDSERSFDRGGYGARESKFSKDGSRGKSFGADKRDAKTSDRKPRASKDKFDDKPRRMGSKDGFKKPEFAGEKRARIVKKSSEDK

SEQ ID NO: 44974 - protein, 235 aa, Campylobacter rectus
  REGION 1..235: note = tr|B9CY82|B9CY82_CAMRE NADPH-dependent 7-cyano-7-deazaguanine reductase OS=Campylobacter rectus RM3267 OX=553218 GN=queF PE=3 SV=1
MQENEVSEPKYGEKIISEFDIEKDLEIWENKHERDYKIKITLPEFCCLCPRSGYPDFATIYLEYVPAKFVVELKAIKLYINSFMTRNISHEDSINEIYDVLERKLAPKWMKITGDFNPRGNVHTVIEICSDEIIKKTQEQSFETPKFEKFARDSERSFDRGGYGARESKFSKDGSRGKSFGADKRDAKTGDRKPRASKDKFDDKPRRTGSKEGFKKPEFAGEKRARIVKKSSEDK

SEQ ID NO: 44975 - protein, 234 aa, Campylobacter showae
  REGION 1..234: note = tr|M3IJW3|M3IJW3_9PROT NADPH-dependent 7-cyano-7-deazaguanine reductase OS=Campylobacter showae CC57C OX=1073353 GN=queF PE=3 SV=1
MQENEVIEPKYGEKIISEFDVEKDLEIWENKHERDYKIKITLPEFCCLCPRSGYPDFATIYLEYVPAKFVVELKAIKLYINSFMTRNISHEDSINEIYDVLERKLAPKWMKITGDFNPRGNVHTVIEICSDEIIKKTQEQSFEAPKFEKFTRDNERNFDRSGYGARESKFSKDGSRGKSFGADRRDTKTGDRKPRASKDKFDDKPRRTGNKDGFKKPEFAGEKRARVVKKSDDK

SEQ ID NO: 44976 - protein, 235 aa, Campylobacter showae
  REGION 1..235: note = tr|C6RJ29|C6RJ29_9PROT NADPH-dependent 7-cyano-7-deazaguanine reductase OS=Campylobacter showae RM3277 OX=553219 GN=queF PE=3 SV=1
MQENEVVEPKYGEKIISEFDVEKDLEIWENKHERDYKIKITLPEFCCLCPRSGYPDFATIYLEYVPAKFVVELKAIKLYINSFMTRNISHEDSINEIYGVLERKLAPKWMKITGDFNPRGNVHTIIEICSDEIIKKTQEQSFEAPKFEKFTRDSDRSFDRGGYGARESKFSKDGSRGKSFGADKKGAKTGDRKPRASKDKFDDKPRRAGSKEGFKKPEFAGEKRARVVKKSSEDK

SEQ ID NO: 44977 - protein, 147 aa, Campylobacter sp.
  REGION 1..147: note = tr|A0A1X9SUB0|A0A1X9SUB0_9PROT NADPH-dependent 7-cyano-7-deazaguanine reductase OS=Campylobacter sp. RM6137 OX=1660073 GN=queF PE=3 SV=1
MQNLKYGEKIIAQFDLDKDFEIWPNSANKDYAIKITLPEFACFCPRSGYPDFATIYLTYVPDKFVVELKALKLYINSFLNRHISHEASINEIYDTLDSKLKPKYLRVVGDFNPRGNVHTIIEVDSNMIREQKYDTSSIEFQSTRKFN

SEQ ID NO: 44978 - protein, 130 aa, Campylobacter sp.
  REGION 1..130: note = tr|A0A4U7BDV4|A0A4U7BDV4_9PROT NADPH-dependent 7-cyano-7-deazaguanine reductase OS=Campylobacter sp. MIT 12-5580 OX=2040651 GN=queF PE=3 SV=1
MRYGEKEIKEFDVEKDLELWENKAENDYIIKISLPEFMCLCPRSGYPDFATLNLEYIPDQFVVELKAIKIYINSFMYKNISHEAVVNEIYSTLKAKLKPKWIKLEADFNPRGNVHTIIECRSDLVVPKQN

SEQ ID NO: 44979 - protein, 143 aa, Campylobacter sputorum
  REGION 1..143: note = tr|A0A381DJQ6|A0A381DJQ6_9PROT NADPH-dependent 7-cyano-7-deazaguanine reductase OS=Campylobacter sputorum biovar sputorum OX=32024 GN=queF PE=3 SV=1
MRYGEKIIKEFDIDKDMEIWPNKWENDYVIRITLPEFVCLCPRSGYPDFAKIFLIYVPDKKVIELKAIKLYINSFMNKNMSHEDSINEIYHTLDKLLEPKYIRVVGDFNPRGNVHTVIELDSNLVRKEKFDISAISKEELREF

SEQ ID NO: 44980 - protein, 128 aa, Campylobacter subantarcticus
  REGION 1..128: note = tr|A0A0A8H716|A0A0A8H716_9PROT NADPH-dependent 7-cyano-7-deazaguanine reductase OS=Campylobacter subantarcticus LMG 24374 OX=1388751 GN=queF PE=3 SV=1
MKYGEKEIKEFSVENMEVWPNNTKNDYVIKITLPEFMCCCPRSGYPDFATIYLEYIPNKLVVELKAIKLYINTFMYRNVSHEASINEIYNTLKEKLDPKWIKVIGDFNPRGNVHTVIECRSDLVVPQN

SEQ ID NO: 44981 - protein, 130 aa, Campylobacter upsaliensis
  REGION 1..130: note = tr|A0A3S4TEE8|A0A3S4TEE8_CAMUP NADPH-dependent 7-cyano-7-deazaguanine reductase OS=Campylobacter upsaliensis OX=28080 GN=queF PE=3 SV=1
MRYGEKEIKEFDVDKDLELWENTAQNDYVIKITLPEFCCLCPRSGYPDFATIYVEYMPDKLVVELKAIKIYINSFMNRNISHEASINEIYSTLKDKLKPKWIKVVGDFNPRGNVHTLIECRSDMVVPQCL

SEQ ID NO: 44982 - protein, 130 aa, Campylobacter upsaliensis
  REGION 1..130: note = tr|E6LBW3|E6LBW3_CAMUP NADPH-dependent 7-cyano-7-deazaguanine reductase OS=Campylobacter upsaliensis JV21 OX=888826 GN=queF PE=3 SV=1
MRYGEKEIKEFNVDKDLELWENTAQNDYVIKITLPEFCCLCPRSGYPDFATIYVEYMPDKLVIELKAIKIYINSFMNRNVSHEASINEIYSTLKDKLKPKWIKVVGDFNPRGNVHTIIECRSDMVVPKCL

SEQ ID NO: 44983 - protein, 128 aa, Campylobacter ureolyticus
  REGION 1..128: note = tr|A0A2I1N9P5|A0A2I1N9P5_9PROT NADPH-dependent 7-cyano-7-deazaguanine reductase OS=Campylobacter ureolyticus OX=827 GN=queF PE=3 SV=1
MRYGEKILNEFNPEKDLEIWENKHKKDYVIKITLPEFTCLCPRSGYPDFATIYLEYIPNEWVVELKAIKLYINSFMNKNISHEDSINEIYDLLEKKLKPKWMKIVGDFNPRGNVHTVIEIDSNLVKKQ

SEQ ID NO: 44984 - protein, 128 aa, Campylobacter ureolyticus
  REGION 1..128: note = tr|S3XJ34|S3XJ34_9PROT NADPH-dependent 7-cyano-7-deazaguanine reductase OS=Campylobacter ureolyticus ACS-301-V-Sch3b OX=883165 GN=queF PE=3 SV=1
MRYGEKILNEFDPEKDLEIWPNKHKKDYIIKITLPEFTCLCPRSGYPDFATIYLEYIPNEWVVELKAIKLYINSFMNKNISHEDSINEIYDLLDRKLKPKWMKIVGDFNPRGNVHTVIEIDSNLVKKQ

SEQ ID NO: 44985 - protein, 127 aa, Campylobacter volucris
  REGION 1..127: note = tr|A0A5C8KYT7|A0A5C8KYT7_9PROT NADPH-dependent 7-cyano-7-deazaguanine reductase OS=Campylobacter volucris; OX = 1031542 GN=queF PE=3 SV=1
MRYGEKEIKEFSVENMEVWPNDAKNDYVIKITLPEFMCCCPRSGYPDFATIYLEYIPNKLVVELKAIKLYINTFMHRNVSHEASINEIYNTLKEKLDPKWIKVVGDFNPRGNVHTVIECRSDLVVPK

SEQ ID NO: 44986 - protein, 125 aa, unidentified
  source 1..125: note = Campylobacteraceae bacterium
  REGION 1..125: note = tr|A0A1V4R6G6|A0A1V4R6G6_9PROT NADPH-dependent 7-cyano-7-deazaguanine reductase OS=Campylobacteraceae bacterium 4484_166 OX=1956165 GN=queF PE=3 SV=1
MRYGEKEIDQFDINLTENFWENKHRKNYNIKITLPEFMCRCPRSGYPDFATIYLSYKPDKLVIELKALKLYINSFAQNYISHEDATNLIFDTLYSKLAPKHLNIKAVFNPRGNVSTTIIIDSDEN

SEQ ID NO: 44987 - protein, 129 aa, unidentified
  source 1..129: note = Campylobacterales bacterium
  REGION 1..129: note = tr|A0A258X346|A0A258X346_9PROT NADPH-dependent 7-cyano-7-deazaguanine reductase OS=Campylobacterales bacterium 16-40-21 OX=1970501 GN=queF PE=3 SV=1
MKYGEQIVADFDIEKDFEIWPNAHERDYVVKVTLPEFTCLCPRSGYPDFATITIEYTPNKFVAELKAIKLYINSFRNRHISHENSANEIYSLFEDKIAPKRLKVVADFYPRGNVHTVIEIDSEKNGISA

SEQ ID NO: 44988 - protein, 129 aa, unidentified
  source 1..129: note = Zixibacteria bacterium
  REGION 1..129: note = tr|A0A1F4YSW6|A0A1F4YSW6_9BACT NADPH-dependent 7-cyano-7-deazaguanine reductase OS=candidate division Zixibacteria bacterium RBG_16_53_22 OX=1802787 GN=queF; PE = 3 SV= 1
MGRKARPGKKLEAFPNRATGRYYLVTLEAGEFTCVCPITGQPDFADIRVEYVPDRKIVESKSFKLYLWSYRNEGTFHEHVVNKILDDFVKAVNPHWCRVTGRFNVRGGIGITVEAEHVKTPKARAAVKM

SEQ ID NO: 44989 - protein, 135 aa, unidentified
  source 1..135: note = Unknown
  REGION 1..135: note = tr|A0A1V5M9L8|A0A1V5M9L8_9BACT NADPH-dependent 7-cyano-7-deazaguanine reductase OS=candidate division TA06 bacterium ADurb.Bin417 OX=1852828 GN=queF PE=3 SV=1
MAEYTAKEAKRGIRERLPEIEVWPNQFPGYEITVTYPEFTSVCPKTGLPDFGTITIRYQPDRSCLELKSLKFYFLAYRNLGIFYENAVNRILRDIVKAAAPLRAKVTGEFHTRGGMHCLVEATYEAESNLPPRKR

SEQ ID NO: 44990 - protein, 141 aa, unidentified
  source 1..141: note = Accumulibacter sp.
  REGION 1..141: note = tr|A0A080MCB4|A0A080MCB4_9PROT NADPH-dependent 7-cyano-7-deazaguanine reductase OS=Candidatus Accumulibacter sp. SK-02 OX=1453999 GN=queF PE=3 SV=1
MTTTTISASTLETFPNPAPQRDFHIHMEIPEFTCLCPKTGQPDFATLLLDYIPDQTCVELKSLKLYIWSFRNTGCFHEAVTNRILDDLASATQPRYMRLTARFYVRGGIFTTVIADHRQAGWTPAPMVQLADFASQSNTRA

SEQ ID NO: 44991 - protein, 142 aa, unidentified
  source 1..142: note = Accumulibacter aalborgensis
  REGION 1..142: note = tr|A0A1A8XK21|A0A1A8XK21_9PROT NADPH-dependent 7-cyano-7-deazaguanine reductase OS=Candidatus Accumulibacter aalborgensis OX=1860102 GN=queF PE=3 SV=1
MSTTPAKNLETFPNPAPQRDFQIHMEIPEFTCLCPKTGQPDFATLWLDYIAEKTCIELKSLKLYIWSFRNVGCFHEAVTNRILDDLVSATRPRYMKLTARFYVRGGIFTTVVAEHRKKGWTPAPAVAMADLADRAGQSPTRG

SEQ ID NO: 44992 - protein, 149 aa, unidentified
  source 1..149: note = Acididesulfobacter guangdongensis
  REGION 1..149: note = tr|A0A519BEG6|A0A519BEG6_9DELT NADPH-dependent 7-cyano-7-deazaguanine reductase OS=Candidatus Acididesulfobacter guangdongensis OX=2597225 GN=queF PE=3; SV = 1
MSDLYEQYNHYDDNKYKEKRFDIKTEAGIDVKVLETIPFDYPQSGTEVNIGTKEFTSVCPWSGLPDTAELNIKYIPNDSLVEMKSLKYYLLSFRNIGILQEHAVNRILNDLTDLLKPQYMEIEAKFESRGGLDTIVKVKYNSVNRGTQV

SEQ ID NO: 44993 - protein, 147 aa, unidentified
  source 1..147: note = Acididesulfobacter diazotrophicus
  REGION 1..147: note = tr|A0A519BNM6|A0A519BNM6_9DELT NADPH-dependent 7-cyano-7-deazaguanine reductase OS=Candidatus Acididesulfobacter diazotrophicus OX=2597226 GN=queF PE=3; SV = 1
MANLYEQYNHYDDNKYKEKRFDIKTEDSVDVKVLETIPFCYPLSQTKVSITTKEFTSVCPWSGLPDTAELNITYTPNNHLVEMKSLKYYLLSFRNIGILQEHAVNRILNDLAKLLEPKNMEVEAKFESRGGLDTVVKVEYNAANVEK

SEQ ID NO: 44994 - protein, 135 aa, unidentified
  source 1..135: note = Acidulodesulfobacterium ferriphilum
  REGION 1..135: note = tr|A0A519B9N9|A0A519B9N9_9DELT NADPH-dependent 7-cyano-7-deazaguanine reductase OS=Candidatus Acidulodesulfobacterium ferriphilum OX=2597223 GN=queF; PE = 3 SV=1
MKDKYLKKRFDVLTEDNIDLDILETMDFEYPASDTSVTVRTKEFTSVCPWTGLPDTAELLITYIPFKKLVEMKSLKYYLLSFRNVGILQEHAVNRIINDLSKLLKPKSMEVEARFESRGGLDTVVKTAYKSKRKQ

SEQ ID NO: 44995 - protein, 136 aa, unidentified
  source 1..136: note = Aegiribacteria bacterium
  REGION 1..136: note = tr|A0A1V4MY41|A0A1V4MY41_9BACT NADPH-dependent 7-cyano-7-deazaguanine reductase OS=Candidatus Aegiribacteria bacterium MLS_C OX=1775674 GN=queF PE=3 SV=1
MTDESDLEGLSVLGGASVPTRKLETFPNHHPGREYMVTLTTDEFTCLCPKTGQPDFAALTIEYVPGERILESKSLKLYLWTFRNEGVFHEHVANRILDDLVDALEPLWCRVLADFGIRGGISISVDAEYRRPGGED

SEQ ID NO: 44996 - protein, 127 aa, unidentified
  source 1..127: note = Aerophobetes bacterium
  REGION 1..127: note = tr|A0A523Y569|A0A523Y569_9BACT NADPH-dependent 7-cyano-7-deazaguanine reductase OS=Candidatus Aerophobetes bacterium OX=2030807 GN=queF PE=3 SV=1
MGKTFDPSVIDRSILETFPYQYHYRPIHMEHATDEFTCVCPFSGLPDQATLTVKYIPGELCIELKSLKYYFYSFRQVKIFHEHVVNKILEDLVAVLDPVEMTIEAKFTLRGGIASTAIATYKKEEKS

SEQ ID NO: 44997 - protein, 146 aa, unidentified
  source 1..146: note = Aerophobetes bacterium
  REGION 1..146: note = tr|A0A565EAY6|A0A565EAY6_9BACT NADPH-dependent 7-cyano-7-deazaguanine reductase OS=Candidatus Aerophobetes bacterium Ae_b3a OX=2012485 GN=queF PE=3 SV=1
MKYENRISSELEAKARKAVGKTFDPSVIDRSILETFPYQYHYRPIHMEHATDEFTCVCPFSGLPDQATLTVKYIPGELCIELKSLKYYFYSFRQVKIFHEHVVNKILEDLVAVLDPVEMTIEAKFALRGGIASTAIATYKKEEKKG

SEQ ID NO: 44998 - protein, 132 aa, unidentified
  source 1..132: note = Aminicenantes bacterium
  REGION 1..132: note = tr|A0A1F5B4Z4|A0A1F5B4Z4_9BACT NADPH-dependent 7-cyano-7-deazaguanine reductase OS=Candidatus Aminicenantes bacterium RBG_19FT_COMBO_65_30 OX=1797277; GN = queF PE=3 SV =1
MPRYTDREAKAGLEAKLPPLETFPNQFPDYEIAIEFPEFTSVCPKTGRPDFGTITLRYVPAGRVLELKSLKEYFLAYRNLGIFYENVVNRVLEDVVRACRPAGAVVRGEFNPRGGLSSVVEARYPRPRKRRS

SEQ ID NO: 44999 - protein, 132 aa, unidentified
  source 1..132: note = Aminicenantes bacterium
  REGION 1..132: note = tr|A0A1F5AZU5|A0A1F5AZU5_9BACT NADPH-dependent 7-cyano-7-deazaguanine reductase OS=Candidatus Aminicenantes bacterium RBG_13_64_14 OX=1797271 GN=queF; PE = 3 SV=1
MPGYTDREAKAGLDAKLPPLETFPNQFPDYEIAIDFPEFTSVCPKTGLPDFGTITLRYVPAGRVLELKSLKEYFLAYRNLGIFYENVVNRILEDVVRACRPKSAIVRGEFNPRGGLRSIVEARTPRPRTRRS

SEQ ID NO: 45000 - protein, 155 aa, unidentified
  source 1..155: note = Amulumruptor caecigallinarius
  REGION 1..155: note = tr|A0A4Q0U9Y4|A0A4Q0U9Y4_9BACT NADPH-dependent 7-cyano-7-deazaguanine reductase OS=Candidatus Amulumruptor caecigallinarius OX=2109911 GN=queF PE=3 SV=1
MRTPDQLQGVTHLGSKATEYPTDYDPSLLQTFNNLHPERDYLVSLDCPEFTSLCPKTGQPDFAKIIINYIPDQSMVESKSLKLYLFSFRNHGDFHEDCVNIILNDLRNLMQPRYIEVIGLFTPRGGIAIHPYANWADEAHRHIAEQRLLACMPVN

SEQ ID NO: 45001 - protein, 269 aa, unidentified
  source 1..269: note = Aquarickettsia rohweri
  REGION 1..269: note = tr|A0A429XUU5|A0A429XUU5_9RICK NADPH-dependent 7-cyano-7-deazaguanine reductase OS=Candidatus Aquarickettsia rohweri OX=2602574 GN=queF PE=3 SV=1
MHVNSSALGKKSIYTDQYNPSLLFAIPRVDKRNEIGIDNNNMTFYGYDIWNAYEISWLRPDRRPDIATSEIIYSCRSEYIIESKSLKLYLNSFNGTIFKSKDHVKTTIEQDLSHKLSTDVIVKLEDINTEVTLKNPEGKNIDNYYDKKLDNCKIEITDKTIVQDEKIYTHLLKSNCPVTMQPDWGTLIINYSGAKINYSSLINYIISLRNLNEFHEQCIEKIYMDIYRNCKTSNLEVYGRYTRRGGIDINPYRSTKDTPIPENIRTYRQ

SEQ ID NO: 45002 - protein, 132 aa, unidentified
  source 1..132: note = Atelocyanobacterium thalassa
  REGION 1..132: note = tr|A0A086CG79|A0A086CG79_9CHRO NADPH-dependent 7-cyano-7-deazaguanine reductase OS=Candidatus Atelocyanobacterium thalassa isolate SIO64986 OX=1527444; GN = queF PE=3 S V=1
MNEISNADSSKIKYGERNILEGELITFPNPRIGRIYNILITLPEFTCKCPFSGHPDFATLELNYVPNQKILELKALKLYINGFRDKYISHEESINQILDDFVEACEPLEANLKGNFNPRGNVHTIIEVCYKK

SEQ ID NO: 45003 - protein, 136 aa, unidentified
  source 1..136: note = Atribacteria bacterium
  REGION 1..136: note = tr|A0A4Y8HYN5|A0A4Y8HYN5_9BACT NADPH-dependent 7-cyano-7-deazaguanine reductase OS=Candidatus Atribacteria bacterium MT.SAG.1 OX=2552984 GN=queF PE=3; SV = 1
MMDKYEEKRFDIYDYKKIDTEVLEVIKYEYSGKDTIVEYCTEEFSSVCPWTGLPDNAVLTIKYIPYEKLVELKSLKYYLTSYRNIGILQEHVINRMLDDLTELLSPKSMEIIGDFQARGGLSTRVVAKYDKIEKGK

SEQ ID NO: 45004 - protein, 281 aa, unidentified
  source 1..281: note = Azambacteria bacterium
  REGION 1..281: note = tr|A0A350QGI0|A0A350QGI0_9BACT NADPH-dependent 7-cyano-7-deazaguanine reductase QueF OS=Candidatus Azambacteria bacterium OX=2053511 GN=queF PE=3 SV=1
MTKSHSEIMAGLTLGKTTAYAEQYDPSLLQPVPRTSGRDTLGLDQSDPLPFIGEDIWHGYELSWLNAKGKPMVALATFVVPVTSANLIESKSFKLYLNSFNQSRFDDLRQVYQALQRDLAACAGSTVKVTLHNVNEIMVFQPTWIPGHCIDDLDITIDSYQYDPSLLQLTAAAETIEEKVHSHLLKSNCLITSQPDWASVYIHYRGNAIDHAALLRYLISFRSHNEFHEQCIERIFLDIWQRCAPEYLLVYARYTRRGGLDINPVRASASYQLPNLRLSRQ

SEQ ID NO: 45005 - protein, 287 aa, unidentified
  source 1..287: note = [Bacteroides] periocalifornicus
  REGION 1..287: note = tr|A0A0Q4B6P8|A0A0Q4B6P8_9BACT QueF_N domain-containing protein OS=Candidatus [Bacteroides] periocalifornicus OX=1702214 GN=AL399_06515 PE=4 SV=1
MVRECRPSVPTLLGQKTESPTSYAPEVLTPIPRQHPEVEREDALTRAVGYDAWHAWEASCLTNGGLPVVTMLKVVYSSDSPYLVESKSFKLYLHSLNSTRFGSTPAEARSELAQLVAQDLSSVLQTKVRCYPHVALGGQFDFEGFEILEEGLNGLDLNQQESYLLPPVGEPHEVRVCTHLLRSNCPVTGQPDWGNLYVQALVNGSINPAQLLRMVVGMRDERMFHEQACEQIYGQLWGGLHPARLLVACLYTRRGGIDICPVRASDAGYLPRFLGQPEVLTRPSWRQ

SEQ ID NO: 45006 - protein, 287 aa, unidentified
  source 1..287: note = Baumannia cicadellinicola
  REGION 1..287: note = tr|A0A088MYK4|A0A088MYK4_9GAMM NADPH-dependent 7-cyano-7-deazaguanine reductase OS=Candidatus Baumannia cicadellinicola OX=186490 GN=queF PE=3 SV=1
MSKDILNNQQYKSLQALTLGKPTSYSIYYDPTLLQVIPRTLHRKLLGLSAAVSLPFHGADLWTLYELSWLNNHGLPQVAIGQIAFDATSDNLIESKSLKLYLNSLNQTCFLSHYELQKTLVIDLSKCVNSHVLVKICSLREWTQVPVLNFEGECIDNQQIHIEYHGTFNNNWLTNAAVGQKVNETLVSNLLKSNCLITNQPDWGSVQISYYGTRINREALIRYLISFRQHNMFHEQCVEQIFSDIMQFCQPDTLSVYARYTRRGGLDINPWRSNTHFLPINGRLARQ

SEQ ID NO: 45007 - protein, 274 aa, unidentified
  source 1..274: note = Burkholderia pumila
  REGION 1..274: note = tr|A0A0J7JIN8|A0A0J7JIN8_9BURK NADPH-dependent 7-cyano-7-deazaguanine reductase OS=Candidatus Burkholderia pumila OX=1090375 GN=queF PE=3 SV=1
MTPKQSTLGKPTHYSEQYDASLLFPIHRKSGRDSIGVPVRLPFFGTDIWNAYEPSWLNARGKPQLAVATFFVPADSPNIVESKSFKLYLGSFAQTRFDSIDDVRAAIKRDVSAICGATVSVQLTAPADFDRLSMEEFDGLSLDRLDLDCDIYAPDPSLLKANHEEGPTDETLFSNLLKSNCPVTGQPDWGSVQIRYYGAQIDHAGLLRYIVSYREHAEFHEQCVERMFMDIMRECKPERLAIYARYTRRGGLDINPFRTSFNLPMPDNVRLARQ

SEQ ID NO: 45008 - protein, 274 aa, unidentified
  source 1..274: note = Burkholderia verschuerenii
  REGION 1..274: note = tr|A0A0L0ME14|A0A0L0ME14_9BURK NADPH-dependent 7-cyano-7-deazaguanine reductase OS=Candidatus Burkholderia verschuerenii OX=242163 GN=queF PE=3 SV=1
MTPEQSPLGKPTHYTEQYDATLLFPIERQTARDAIGVPARLPFFGTDIWNAYELSWLNMRGKPQIAVATFFVPADSPNIVESKSFKLYLGSFAQTRFDSIDDVRAAIKRDVSACCGATVSVQLAAPADFAKLSMEEFDGMPLDRLDLECEVYVPDASLLKAAHDEAPIDETVFSNLLKSNCPVTGQPDWGSVQIRYYGTQIDHASLLQYIVSFREHTGFHEQCVERIFMDIMRECKPERLAVYARYTRRGGLDINPFRTNFNLPMPDNARLARQ

SEQ ID NO: 45009 - protein, 158 aa, unidentified
  source 1..158: note = Carbobacillus altaicus
  REGION 1..158: note = tr|A0A2R6Y5I3|A0A2R6Y5I3_9BACL NADPH-dependent 7-cyano-7-deazaguanine reductase OS=Candidatus Carbobacillus altaicus OX=2163959 GN=queF PE=3 SV=1
MQSKPKHLGRSDTTYPMDYDPSVLDVVPYDFPDRDMFVKFNAPEFTTLCPITGQPDFANIVLSYVPDRLLVESKSLKLYLFSFRNHGSFHEAVVNMILNDLKAVLDPKYIEVWGRFLPRGGLSIDPYVNYGKPGTVWEDVARRRLFEHDMHPEWVDNR

SEQ ID NO: 45010 - protein, 132 aa, unidentified
  source 1..132: note = Cloacimonas sp.
  REGION 1..132: note = tr|A0A1W9P3K6|A0A1W9P3K6_9BACT NADPH-dependent 7-cyano-7-deazaguanine reductase OS=Candidatus Cloacimonas sp. 4484_209 OX=1968525 GN=queF PE=3 SV=1
MRKKLKNRVKSPTIIKKDIIEIVDYEYKGKKDVEIVIENGEFTSVCPRTGLPDFGKITIRYVPDKKIIELKSLKFYFLQFRNVGIFYEHVVNKILGDLVSLVKPKWMEVIGEFNIRGGIRTTTKVEWGSRKI

SEQ ID NO: 45011 - protein, 134 aa, unidentified
  source 1..134: note = Cloacimonas sp.
  REGION 1..134: note = tr|A0A3D5V9F1|A0A3D5V9F1_9BACT NADPH-dependent 7-cyano-7-deazaguanine reductase OS=Candidatus Cloacimonas sp. OX=2053534 GN=queF PE=3 SV=1
MQKLGNHKNYDVEELNNIENQADIFDIFENPHPDMDYVIRSETAEFTAICPITGQPDFGKIIIETTPDKYCIELKSLKMYLLSFRNRGIFHEAVTGKIAKDIIDTIKPKWLKVTGEFSVRGGISTTVVFEYPQK

SEQ ID NO: 45012 - protein, 138 aa, unidentified
  source 1..138: note = Cloacimonetes bacterium
  REGION 1..138: note = tr|A0A523R2I6|A0A523R2I6_9BACT NADPH-dependent 7-cyano-7-deazaguanine reductase OS=Candidatus Cloacimonetes bacterium OX=2030808 GN=queF PE=3 SV=1
MDGKEIKKELKKDIKSVDTIKKDVIEVVDYDYRKKRDVKIIIENEEFTSVCPRTGLPDFGRITIRYIPLNKIIELKSLKLYFLQYRNVGIFYEHIVNKILEDLVSLVKPKWMEVTGEFRIRGGIKTTTKTEYRKNSRE

SEQ ID NO: 45013 - protein, 143 aa, unidentified
  source 1..143: note = Cloacimonetes bacterium
  REGION 1..143: note = tr|A0A523XKE6|A0A523XKE6_9BACT NADPH-dependent 7-cyano-7-deazaguanine reductase OS=Candidatus Cloacimonetes bacterium OX=2030808 GN=queF PE=3 SV=1
MNEKEIIKKLKKAIPSPDTIKKDMIEVVDYEYSGKRDIEIVIENEEFTSICPRTGLPDFGRITIRYIPRKKIIELKSLKYYFLQYREVGIFYEHVINKILEDLVSLVKPSWMEIVGSFRIRGGIKTTTKTEYRKNTKEHRHQT

SEQ ID NO: 45014 - protein, 137 aa, unidentified
  source 1..137: note = Competibacteraceae bacterium
  REGION 1..137: note = tr|A0A433HXV1|A0A433HXV1_9GAMM NADPH-dependent 7-cyano-7-deazaguanine reductase OS=Candidatus Competibacteraceae bacterium OX=2053538 GN=queF PE=3 SV=1
MAEIEGLTLLGQANTEYPQHYTPQLLERFPNRYPQHEYAVELDCPEFTCLCPITGQPDFARLTIRYSPLAYLVESKSLKLYLFSFRNQGTFNEEVVNRIASDLFALLQPRWIEVRGDFLPRGGIAIKPSVRLTGAPA

SEQ ID NO: 45015 - protein, 140 aa, unidentified
  source 1..140: note = Competibacteraceae bacterium
  REGION 1..140: note = tr|A0A433IKV0|A0A433IKV0_9GAMM NADPH-dependent 7-cyano-7-deazaguanine reductase OS=Candidatus Competibacteraceae bacterium OX=2053538 GN=queF PE=3 SV=1
MSDIEGLTLLGHSQTEYPREYAPQVLERFANLYPQYPYEVELDCPEFTCLCPVTGQPDLARILIRYCPRGWLVESKSLKLYLFSFRNQGSFSENSINRIARDLFDLLQPEWLEVRGDFAPRGGIAIKPSVRLASGQAALP

SEQ ID NO: 45016 - protein, 155 aa, unidentified
  source 1..155: note = Contendobacter odensis
  REGION 1..155: note = tr|A0A2G6PFL1|A0A2G6PFL1_9GAMM NADPH-dependent 7-cyano-7-deazaguanine reductase OS=Candidatus Contendobacter odensis OX=1400860 GN=queF PE=3 SV=1
MSHQDMYSELTQLGGPAALPENPDVAVLERVPNPQKGISYLVRFTAPEFTSLCPITGAPDFAHLVIDYIPQDWLIESKSLKLFLGSFRNHGAFHEDCTVSIALRLVKELEPKWLRMGGYWYPRGGIPIDVFYQTAPPPGNVWIPKQGVPAYRGRG

SEQ ID NO: 45017 - protein, 281 aa, unidentified
  source 1..281: note = Dactylopiibacterium carminicum
  REGION 1..281: note = tr|A0A272EXV2|A0A272EXV2_9RHOO NADPH-dependent 7-cyano-7-deazaguanine reductase OS=Candidatus Dactylopiibacterium carminicum OX=857335 GN=queF PE=3 SV=1
MSDFQSSLNTPSDSPLGKSSAYRSDYAPELLFPIPRRGKREEIGVDEAALPFVGEDLWNAYELSWLDPRGKPVVALGEFRVPASSPCLIESKSLKLYLNSFNQTRLAGLGEAQALIARDLSQAAGSEVQVCLQSLDAERVFVKPVGVCLDAQEIEIDRYQPEPELLRADPARVVQNELLYSHLLKSNCLVTGQPDWGAVFVRYSGLAIDREALLRYIVSFREHNEFHEQCVERIFCDLMRQCRPATLMVWARYTRRGGLDINPCRVTPGMSLAENLGEVRQ

SEQ ID NO: 45018 - protein, 137 aa, unidentified
  source 1..137: note = Dadabacteria bacterium
  REGION 1..137: note = tr|A0A3M1K628|A0A3M1K628_9BACT NADPH-dependent 7-cyano-7-deazaguanine reductase OS=Candidatus Dadabacteria bacterium OX=2080303 GN=queF PE=3 SV=1
METEREQALRQRLAAQRVDPDDVDATVLDPVPFAHAGRELDITIETDEFTHICPMTGLPDFGTLRIRYAPSDKIVELKSLKYYLVQYRQVGIFYEHVIFRILDDLVAAVAPRWMEIIYEVQARGGIRSVVTARYPQP

SEQ ID NO: 45019 - protein, 119 aa, unidentified
  source 1..119: note = Dadabacteria bacterium
  REGION 1..119: note = tr|A0A520V6U8|A0A520V6U8_9BACT NADPH-dependent 7-cyano-7-deazaguanine reductase OS=Candidatus Dadabacteria bacterium OX=2080303 GN=queF PE=3 SV=1
MSILETFPNKVKKRDYKIDIVCPEFTSLCPATGQPDFGEIRISYVPDKLCVELKSLKLYIYSFRDVGEFHEHVTNKILDDFVKACKPKSAIVTGDFNVRGGIKTVVKAEYDKKFKNKKL

SEQ ID NO: 45020 - protein, 151 aa, unidentified
  source 1..151: note = Deianiraea vastatrix
  REGION 1..151: note = tr|A0A5B8XE36|A0A5B8XE36_9RICK NADPH-dependent 7-cyano-7-deazaguanine reductase OS=Candidatus Deianiraea vastatrix OX=2163644 GN=queF PE=3 SV=1
MSIGNYDNLTQLGSKVLAESDPKLSQLEVVQNPHKNINYVARFSTREFTSLCPITGQPDYAVIVIDYVPDEYIVESKSLKLFLQSFRNHGDFHEACTIYIAQRLIDIAKPKWLRICAYWAPRGGIPIDVFYQTGEAPNGVFIESTDEFRRR

SEQ ID NO: 45021 - protein, 211 aa, unidentified
  source 1..211: note = Delongbacteria bacterium
  REGION 1..211: note = tr|A0A2G6P1B0|A0A2G6P1B0_9BACT NADPH-dependent 7-cyano-7-deazaguanine reductase QueF OS=Candidatus Delongbacteria bacterium OX=2044594 GN=CSA15_08285 PE=4; SV = 1
MRLAIPATSKFIIESKSLKLYLNSFNFSEFQSVEEVKNTIEQDLSNALQTQVIAEIFSINDNENLAISQVDGICIDDSLNQSDKKIAIVDDVNADMLTNASDTISKQSYHSHLLRSNCPVTNQPDWATVQIDITSAEIDKASLLEYILTYRQHNGFHEQCVEQIFADLTQKFAPTQLMVRAWYTRRGGIDINPCRVSHSELMPTPSRLIRQ

SEQ ID NO: 45022 - protein, 130 aa, unidentified
  source 1..130: note = Delongbacteria bacterium
  REGION 1..130: note = tr|A0A2G6P3P7|A0A2G6P3P7_9BACT NADPH-dependent 7-cyano-7-deazaguanine reductase OS=Candidatus Delongbacteria bacterium OX=2044594 GN=queF PE=3 SV=1
MAVAEGRVFKFDDESEIKTEFLENFEYGGKKQEIVYETDEFNAVCPFSGLPDFGVLTIKYIPKKHIVELKSLKYYIISFRNVGIYQEKATDRIFNDLLNCLNPEYLEVKTVYNIRGGIKSTCTMNSKDYK

SEQ ID NO: 45023 - protein, 127 aa, unidentified; identical to SEQ ID NO: 44087
  source 1..127: note = Dependentiae bacterium
  REGION 1..127: note = tr|A0A1V5U6X6|A0A1V5U6X6_9BACT NADPH-dependent 7-cyano-7-deazaguanine reductase OS=Candidatus Dependentiae bacterium ADurb.Bin246 OX=1852839 GN=queF; PE = 3 SV=1

SEQ ID NO: 45024 - protein, 132 aa, unidentified
  source 1..132: note = Desantisbacteria bacterium
  REGION 1..132: note = tr|A0A2H0A3D5|A0A2H0A3D5_9BACT NADPH-dependent 7-cyano-7-deazaguanine reductase OS=Candidatus Desantisbacteria bacterium CG23_combo_of_CG06-09_8_20_14_all_40_23 OX=1 974550; GN = queF PE=3 SV=1
MQQSLNLSEYKGKQDNIRGLKITPDLEVVENQYNDNDYLVELKTNEFTTVCPKTGLPDFAIVTIQYKPDQYLVEQKSLKLYLVGYRNIGIFQEHATNKILEDFIACVQPKWAKIETIWNARGGIDVRVKRES

SEQ ID NO: 45025 - protein, 132 aa, unidentified; identical to SEQ ID NO: 45024
  source 1..132: note = Desantisbacteria bacterium
  REGION 1..132: note = tr|A0A2M7P528|A0A2M7P528_9BACT NADPH-dependent 7-cyano-7-deazaguanine reductase OS=Candidatus Desantisbacteria bacterium CG_4_10_14_3_um_filter_40_18; OX = 1974544 GN=q ueF PE=3 SV=1

SEQ ID NO: 45026 - protein, 125 aa, unidentified
  source 1..125: note = Desulfofervidus auxilii
  REGION 1..125: note = tr|A0A127AMG4|A0A127AMG4_9DELT NADPH-dependent 7-cyano-7-deazaguanine reductase OS=Candidatus Desulfofervidus auxilii OX=1621989 GN=queF PE=3 SV=1
MSTLKYGEKAIAEAQLETWPNPCPERNYTIEITFPEFTCLCPRSGYPDFAVIRIKYIPDKYIIELKSLKLYLNKYRSVYLSHEEATNKIYAELYALLKPRFLEVIGDFNPRGNVKTIIKVSSEGN

SEQ ID NO: 45027 - protein, 172 aa, unidentified
  source 1..172: note = Desulfovibrio trichonymphae
  REGION 1..172: note = tr|A0A1J1DP96|A0A1J1DP96_9DELT NADPH-dependent 7-cyano-7-deazaguanine reductase OS=Candidatus Desulfovibrio trichonymphae OX=1725232 GN=queF PE=3 SV=1
MASRSQDQTQNLRVLGTGRLSPAKNGPGAYLLESFGNCYPARMYVISIVFPEFTSLCPVTGQPDTGVICVEYIPDALCVESKSFKLYMFAFRNHQSFMETITNTVLDDLRVAIAPRWCRVKGFFAPRGGTRIHVFAEDFKQMSMEQDACVREAARAWKTEPCPHTVQPYAVV

SEQ ID NO: 45028 - protein, 140 aa, unidentified
  source 1..140: note = Dormibacter sp.
  REGION 1..140: note = tr|A0A2W5Z9F2|A0A2W5Z9F2_9BACT NADPH-dependent 7-cyano-7-deazaguanine reductase OS=Candidatus Dormibacter sp. RRmetagenome_bin12 OX=2599630 GN=queF PE=3 SV=1
MSEDAEPRSLLESFDNRSPERDYTIQFTLPEFTCLCPRSGFPDFAVVHVRYVPGPRCVELKSLKMYVNAFRNVGVFHEDVVNGILSDLVSLLAPRYCEVIGDFNVRGNIKTVVRATHRDPGFGREPDGWWTPRDEHSATF

SEQ ID NO: 45029 - protein, 133 aa, unidentified
  source 1..133: note = Edwardsbacteria bacterium
  REGION 1..133: note = tr|A0A1F5RDM0|A0A1F5RDM0_9BACT NADPH-dependent 7-cyano-7-deazaguanine reductase OS=Candidatus Edwardsbacteria bacterium GWF2_54_11 OX=1817851 GN=queF; PE = 3 SV=1
MPKKNYGLTLLGKKVTRPGGKLEAFPNKYPKRDYQVVLESAEFTAVCPITGQPDFGTITINYVPDRLIIESKSLKLYLWSFRNQGIFHEEAVNKILDDIVKIAKPRRCKVTGFFNARGGIAINVSASYNCEEK

SEQ ID NO: 45030 - protein, 133 aa, unidentified; identical to SEQ ID NO: 45029
  source 1..133: note = Edwardsbacteria bacterium
  REGION 1..133: note = tr|A0A3B9EB38|A0A3B9EB38_9BACT NADPH-dependent 7-cyano-7-deazaguanine reductase OS=Candidatus Edwardsbacteria bacterium OX=2053551 GN=queF PE=3 SV=1

SEQ ID NO: 45031 - protein, 126 aa, unidentified
  source 1..126: note = Eisenbacteria bacterium
  REGION 1..126: note = tr|A0A538TSI3|A0A538TSI3_9BACT NADPH-dependent 7-cyano-7-deazaguanine reductase OS=Candidatus Eisenbacteria bacterium OX=2212470 GN=queF PE=3 SV=1
MPTRPSQSLATFPNPSPGRDYVIRHECPEYTAVCPMTGQPDFGTIIVIYVPDRRCVELKSLKLYLWSFRDQGHFFEQATNQILEDLVRALRPRRMTVIGRFNVRGGIGTTVVARHEGPRRSARRRA

SEQ ID NO: 45032 - protein, 149 aa, unidentified
  source 1..149: note = Eisenbacteria bacterium
  REGION 1..149: note = tr|A0A538U7N9|A0A538U7N9_9BACT NADPH-dependent 7-cyano-7-deazaguanine reductase OS=Candidatus Eisenbacteria bacterium OX=2212470 GN=queF PE=3 SV=1
MPGRPSRQLATFSNPHPQRDYVIRHECPEYTALCPVTGQPDFGTIVVVYTPDRHCIELKSLKLYLWSFRDEGHFFEQVTNQILDDLVRACRPRRMTVIGRFNVRGGIASTVVARHPASTGRTARRAGTRRGAERPGRRGGLSARRGARG

SEQ ID NO: 45033 - protein, 279 aa, unidentified
  source 1..279: note = Endobugula sertula
  REGION 1..279: note = tr|A0A1D2QPL7|A0A1D2QPL7_9GAMM NADPH-dependent 7-cyano-7-deazaguanine reductase OS=Candidatus Endobugula sertula OX=62101 GN=queF PE=3 SV=1
MNFMPAQNPLGEKISYSGQYDAGLLFPIARTESRQHLVLAGELPFRGEDRWTAYEVSWLDQQGKPQVRLAEFLLNSDSPNIIESKSFKLYLNSFNHTRFDDEQQVKSQFITDLSAVAGSVVTVEMMPLNSAHMLLMDGPIGICLDGIDVTIDEYHPNPKLLKVLTSQSVNEVLYSHLLKTNCPVTGQPDWATVFIEYTGPTICQHSLLKYIISFREHHDFHENSVERLFCDINAYCCPEHLAVYARYTRRGGLDINPLRSNYPEGIGVLGCNTMRIIRQ

SEQ ID NO: 45034 - protein, 155 aa, unidentified
  source 1..155: note = Endolissoclinum sp.
  REGION 1..155: note = tr|A0A1Z8SPB2|A0A1Z8SPB2_9PROT NADPH-dependent 7-cyano-7-deazaguanine reductase OS=Candidatus Endolissoclinum sp. TMED37 OX=1986638 GN=queF PE=3 SV=1
MSDPNIYKDLTLLGGETNLPNNPDEAILESVPNPQKDVNYCVRFTAPEFTSLCPLTGQPDFAHLVIDYVPKDWLVESKSLKLYLGAFRNHGAFHEDCTISIARKITDLLEPEWLRIGGYWFPRGGIPIDIFYQTGNGPKGVWIPDQNVPTYRGRG

SEQ ID NO: 45035 - protein, 157 aa, unidentified
  source 1..157: note = Endolissoclinum sp.
  REGION 1..157: note = tr|A0A1Z9XY96|A0A1Z9XY96_9PROT NADPH-dependent 7-cyano-7-deazaguanine reductase OS=Candidatus Endolissoclinum sp. TMED26 OX=1986636 GN=queF PE=3 SV=1
MPADNGDRLATLTQLGGNSDLPESPEAAILEKVANGQAGTDYLVRFTCPEFTSLCPMTGQPDFAHLVIDYVPEQWLVESKSLKLFLGAFRNHGAFHEDCTVMIGKRLIDTLTPKWLRIGGYWYPRGGIPIDVFFQSGPAPQSIWLPDQGVPSYRGRG

SEQ ID NO: 45036 - protein, 126 aa, unidentified
  source 1..126: note = Endomicrobium trichonymphae
  REGION 1..126: note = tr|A0A1E5IM38|A0A1E5IM38_9BACT NADPH-dependent 7-cyano-7-deazaguanine reductase OS=Candidatus Endomicrobium trichonymphae OX=1408204 GN=queF PE=3 SV=1
MKNNFPVFNKVTPSVLETMPYEYAGKDINVRIETGEFTCLCPWTGLPDFAYVVINYTPAKSVVEFKSLKLYLQSYRMVGMVHESVVNNILSDLVKTVKPKEMCVNMEFGIRGGLTATVSAEYYGKK

SEQ ID NO: 45037 - protein, 93 aa, unidentified
  source 1..93: note = Endomicrobium trichonymphae
  REGION 1..93: note = tr|A0A1E5IJZ8|A0A1E5IJZ8_9BACT Uncharacterized protein OS=Candidatus Endomicrobium trichonymphae; OX = 1408204 GN=ATZ36_17430 PE=4 SV=1
MANAALVCRKIIFGGAFMKNNSLVFDKVATLKLYLRSYRMVGMVHESVVNSILSDLVKTIKPKEMCMNMEFGIRGGLTATVFGEYLSRETKEK

SEQ ID NO: 45038 - protein, 281 aa, unidentified
  source 1..281: note = Enterovibrio luxaltus
  REGION 1..281: note = tr|A0A291B714|A0A291B714_9GAMM NADPH-dependent 7-cyano-7-deazaguanine reductase OS=Candidatus Enterovibrio luxaltus OX=1927128 GN=queF PE=3 SV=1
MHKYKAAHKLAGMTLRQKTDYQNHYAPELLQPISRSLNRDNLNLKQILPFTGYDVWTLYELSWLNIKGLPQVGIGEVRIPATSPNLIESKSFKLYLNSLNQTKFAIWQEVVNVLATDLSACVGKSVDVTILPLEKFTNTTIVAFSGEHIDTQDIFIDDYEFNADLLKGAADGTIVTETLHSHLLKSNCLITNQPDWGSVQITYKGKRINRTKLLRYIVSFRHHKEFHEQCVERIFTDLMKYCQPKLLTVYARYTRRGGLDINPYRTNMGNIPSENNRLARQ

SEQ ID NO: 45039 - protein, 281 aa, unidentified
  source 1..281: note = Enterovibrio escacola
  REGION 1..281: note = tr|A0A2A5SZJ0|A0A2A5SZJ0_9GAMM NADPH-dependent 7-cyano-7-deazaguanine reductase OS=Candidatus Enterovibrio escacola OX=1927127 GN=queF PE=3 SV=1
MREYKDAKELFGLTLRPQIDYLEYYTPDLLQSVPRSLNRDYLNFGKILPFTGFDIWTLYELSWLNTKGLPQVAIGEVRLPATCENLIESKSFKLYLNSFNQTRFENWQKVVDTLTKDLSACAGEKVDVTIIPLEDFSNTPVVTLSGENIDKQDIEINNYTLNPNLLEGAANKPVVTETLNSNLLKSNCLVTKQPDWASVLIAYKGKRINREKLLRYIVSFRRHNEFHEQCVERIFTDLMTYCQPESLTVYARYTRRGGLDINPYRTNKGKTPNGNSRLARQ

SEQ ID NO: 45040 - protein, 127 aa, unidentified
  source 1..127: note = Entotheonella gemina
  REGION 1..127: note = tr|W4LPN0|W4LPN0_9BACT NADPH-dependent 7-cyano-7-deazaguanine reductase OS=Candidatus Entotheonella gemina OX=1429439 GN=queF PE=3 SV=1
MQRVAAAADLDVIDLPEIVIVDNLVRERSYSVTFTIPEFTCVCPMTGQPDFATFRITYVPDAYLIELKGLKLYINAYRNVGIYHEFVTNKILDDLVSACQPLRMDIEGDFNVRGGIHTVVNAGYERA

SEQ ID NO: 45041 - protein, 127 aa, unidentified
  source 1..127: note = Entotheonella factor
  REGION 1..127: note = tr|W4LCQ1|W4LCQ1_9BACT NADPH-dependent 7-cyano-7-deazaguanine reductase OS=Candidatus Entotheonella factor OX=1429438 GN=queF PE=3 SV=1
MQRVAAAADLDVMDLPEIVIVDNLVRERSYSVTFTIPEFTCVCPMTGQPDFATFRITYVPDAHLIELKGLKLYINAYRNVGIYHEFVTNKILDDLVSACQPLRMEIEGDFNVRGGIHTVVHASYERP

SEQ ID NO: 45042 - protein, 283 aa, unidentified
  source 1..283: note = Erwinia haradaeae
  REGION 1..283: note = tr|A0A451DME3|A0A451DME3_9GAMM NADPH-dependent 7-cyano-7-deazaguanine reductase OS=Candidatus Erwinia haradaeae OX=1922217 GN=queF PE=3 SV=1
MSTSNYFNSHILPEQFLGKPTTYHDIYQPMLLRAIPRSLNRELINFDLNHIGLTGEDIWTLYEISWLNQKGLPQVSIGELVLDMRSTNLIESKSLKLYLNSFSQTRFLSLETVRQTIEHDLSNCAIGLVTVTLFQLKDVRKTTIGHLPGVCIDEQDIRINNYELNSHYLHNSTAQDIVQEQLVSHLFKSNCLITRQPDWATIQISYYGLRIHHESLLRYLISYRKHYEFHEQCAERIFHDILTYCNPNKLSVYIRYTRRGGIDINPWRSNTEYIPYRTRLVRQ

SEQ ID NO: 45043 - protein, 281 aa, unidentified
  source 1..281: note = Erwinia dacicola
  REGION 1..281: note = tr|A0A1E7YXR6|A0A1E7YXR6_9GAMM NADPH-dependent 7-cyano-7-deazaguanine reductase OS=Candidatus Erwinia dacicola OX=252393 GN=queF PE=3 SV=1
MSSYDHHQALEDLTLGKPTQYHDSYQPALLQAVPRSLNREPLGLYQDTLPFTGADIWTLYELSWLNSKGLPQVAVGEVVLDADSVNLIESKSFKLYLNSFNQTKFADWGEVRQTLERDLSACAEGKVSVALFRLQEIEGQPLGHFDGTCIDEQDIVINDYQFNADYLRNAADGKIVEEQLVSHLLKSNCLITNQPDWGSVQISYRGSRIQRAVLLRYLVSFRHHNEFHEQCVERIFSDILRYCQPESLSIYARYTRRGGLDINPWRTNVQFKPGRSRLVRQ

SEQ ID NO: 45044 - protein, 133 aa, unidentified
  source 1..133: note = Fermentibacteria bacterium
  REGION 1..133: note = tr|A0A496UE75|A0A496UE75_9BACT NADPH-dependent 7-cyano-7-deazaguanine reductase OS=Candidatus Fermentibacteria bacterium OX=2044591 GN=queF PE=3 SV=1
MTDKADLNGLSSLGSGSDPSRRLETFPNHHTDRDYIVTLQTDEFTCICPKTGQPDFAGINIEYIPDERIVESKSLKLYFWSFRNEGVFHEHVANIMLDDLVEALKPRWCRVIANFGIRGGISISVDAEYSRDK

SEQ ID NO: 45045 - protein, 133 aa, unidentified
  source 1..133: note = Fermentibacteria bacterium
  REGION 1..133: note = tr|A0A2G6LWZ8|A0A2G6LWZ8_9BACT NADPH-dependent 7-cyano-7-deazaguanine reductase OS=Candidatus Fermentibacteria bacterium OX=2044591 GN=queF PE=3 SV=1
MGEQTLDGLTLLGGSNQFQGLETFPNMNPERDYTVTLSTDEFTCVCPKTGQPDFASITVTYIPESKIVESKSLKLYFLSFRNRGIFHEHVTNVILDDLVEALEPRWCQVTADFGVRGGISIRVNAQFRKGGTT

SEQ ID NO: 45046 - protein, 152 aa, unidentified
  source 1..152: note = Filomicrobium marinum
  REGION 1..152: note = tr|A0A0D6JJ30|A0A0D6JJ30_9RHIZ NADPH-dependent 7-cyano-7-deazaguanine reductase OS=Candidatus Filomicrobium marinum OX=1608628 GN=queF PE=3 SV=1
MGSKPDVTLLGHAAAIPQAPEEAVLERVENPHVDTHYLARFTAPEFTSVCPVTGQPDFAHLVIDYVPDAWLVESKSLKLYLTSFRNHGAFHEDCTVTIGKRIADLIAPHYLRIGGYWYPRGGIPIDVFWQVGKCPEDVWLPDQGVAPYRGRG

SEQ ID NO: 45047 - protein, 130 aa, unidentified
  source 1..130: note = Firestonebacteria bacterium
  REGION 1..130: note = tr|A0A1F5UNH2|A0A1F5UNH2_9BACT NADPH-dependent 7-cyano-7-deazaguanine reductase OS=Candidatus Firestonebacteria bacterium GWA2_43_8 OX=1817858 GN=queF; PE = 3 SV=1
MKRHYTDKHAIAGIKTTMPELETFPNQYKNYVITIDIPEYSSICPKSGLPDCGKMTLKYIPNKKCMELKSLKYYILAYRNLGIFYENATNKIFADFLKAVKPKGAYIKGEFTPRGGISTSIEVAYGRTIK

SEQ ID NO: 45048 - protein, 130 aa, unidentified
  source 1..130: note = Firestonebacteria bacterium
  REGION 1..130: note = tr|A0A1F5V1X6|A0A1F5V1X6_9BACT NADPH-dependent 7-cyano-7-deazaguanine reductase OS=Candidatus Firestonebacteria bacterium RIFOXYC2_FULL_39_67 OX=1817861; GN = queF PE=3SV=1
MKRQYTDKHAIAGINTVMPELETFPNQYKNYIITIDIPEYSSICPKSGLPDCGKLVIRYIPDKKCMELKSLKYYILAFRNLGIFYENATNKIFSDFIKAVKPKGAYIKGDFTPRGGISTSVEVFYGKPVK

SEQ ID NO: 45049 - protein, 117 aa, unidentified
  source 1..117: note = Fischerbacteria bacterium
  REGION 1..117: note = tr|A0A1F5VB02|A0A1F5VB02_9BACT NADPH-dependent 7-cyano-7-deazaguanine reductase OS=Candidatus Fischerbacteria bacterium RBG_13_37_8 OX=1817863 GN=queF; PE = 3 SV=1
MKKEMVTLIETFDNPKPERDYEIVIECPEFTCLCPKTGQPDFASITIAYIPDTLCIELKSLKLYIWSYRNEGAFHEAVANKILDDLVWACKPRSMKITADFNLRGGIHTTVIAEYKK

SEQ ID NO: 45050 - protein, 281 aa, unidentified
  source 1..281: note = Fokinia solitaria
  REGION 1..281: note = tr|A0A2U8BRG7|A0A2U8BRG7_9RICK NADPH-dependent 7-cyano-7-deazaguanine reductase OS=Candidatus Fokinia solitaria OX=1802984 GN=Fsol_00127 PE=4 SV=1
MDTFLGKNTKIPTQYAPYVLCKIPREFSRKTFIDSQSSVSKMHGFDLWRCYELIWLDSYHIPEACVLEFKYDAQSEYLLESKSAKIYLSSLRNRTFRDRDELSITISDDLSSALETTINVRIFDIDSYLQPVKRQGICLDTKTKELEELSMAALAKDTFHRRMDYVTHCNSTTNVDDVMYTNTFRCNCPITEQPDLATVTIHYTGIELNKSALSIYLNSFEKQSGFHEFSIERILLDITLKYEASNVMVYGNYMRRGGIEINPYRANYLIDSHHISRTLRQ

SEQ ID NO: 45051 - protein, 281 aa, unidentified
  source 1..281: note = Fukatsuia symbiotica
  REGION 1..281: note = tr|A0A2U8I7Y0|A0A2U8I7Y0_9GAMM NADPH-dependent 7-cyano-7-deazaguanine reductase OS=Candidatus Fukatsuia symbiotica OX=1878942 GN=queF PE=3 SV=1
MSSYHTSQVFSKLTLGKVTKFKDQYDETLLQTLPRSTNREQIGLCPDNLPFHGADIWTLYELSWLNNKGVPQVAVGEISIKADSPYLIESKSFKLYLNSFNQTRFLNWETVADRLKNDLSTRAESDVSVTLRHLDEIVNQSITNLSGECIDQEDISIDDYAFSTKYLQTACGESIVEETLVSHLLKSNCLITNQPDWGSVQIYYRGKKINRAALLHYLVSFRHHNEFHEHCVERIFNDLINFCRPEQLSVYARYTRRGGLDINPWRSNTDFTPATGRLARQ

SEQ ID NO: 45052 - protein, 139 aa, unidentified
  source 1..139: note = Gallionella acididurans
  REGION 1..139: note = tr|A0A139BVQ2|A0A139BVQ2_9PROT NADPH-dependent 7-cyano-7-deazaguanine reductase OS=Candidatus Gallionella acididurans OX=1796491 GN=queF PE=3 SV=1
MTTQPTKTLETFPNPGPQRDYHIHMEIPEFTCLCPKTGQPDFATLILDYIADQKCVELKSLKLYIWSFRNEGHFHEDVTNRILDDLAAAIQPRFMRLTAKFYVRGGIFTNVVAEHRKPGWQPAPRVELNRFDSQPSTRG

SEQ ID NO: 45053 - protein, 316 aa, unidentified
  source 1..316: note = Gastranaerophilales bacterium
  REGION 1..316: note = tr|A0A292QT11|A0A292QT11_9BACT NADPH-dependent 7-cyano-7-deazaguanine reductase QueF OS=Candidatus Gastranaerophilales bacterium HUM_1 OX=1916322; GN = CPT83_03535 PE=4SV=1
MWFWKLRLVLERISLMIEKDRTEEIASTHLGKRVEMCDQYNPNLLVAVPRIDNRRHYNIDNNNLPFEGWDIWHAYEFSALTENGLPVTRLLKIKYNCTSEFIIESKSLKLYLNSYNMTRLGENISECLNICKEKIEKDLSDKLKTNVTVKFLDNDIKKIEIFQQFRNILNFVDENSLKINHFKESPELLEAEDNNQKSEHRIMFDSLRSNCRVTHQPDFGDVFIYYKSKKHIKEHSLVKYLCSFRSEYHFHEECCEMIYKRLYDLLDKDDELFVSALYTRRGGIDICPTRWSKNFTPKEVADLIDTSKYARCGIKQ

SEQ ID NO: 45054 - protein, 300 aa, unidentified
  source 1..300: note = Gastranaerophilales bacterium
  REGION 1..300: note = tr|A0A292SUD7|A0A292SUD7_9BACT NADPH-dependent 7-cyano-7-deazaguanine reductase QueF OS=Candidatus Gastranaerophilales bacterium HUM_21 OX=1916319; GN = CPT85_01940 PE= 4 SV=1
MQNKTEKIASTHLGKKSTGSLSYDPSLLVPIPRNENRELYKIDNDNLPFLGVDVWHAYEFSCLTSNGLPVTRVIKLKYNSDSEYLIESKSLKLYLNSFNMSSFGQTIDDCLEICKSIIEKDLSNALKTEVSINFLTDDTKRVQIFDEFENILNFVDTNKLKIEKFKESPQLLELELLSDEKEYYLTFDSLRSNCRVTHQPDFGDIFIYYKSNHHIKEDSLVKYLCSFRSEFHFHEECCEMIYKRLYDVLNINKNGDLFVCALYTRRGGIDICPVRWSKDCKNMAVPLIDTAQYARKSIKQ

SEQ ID NO: 45055 - protein, 273 aa, unidentified
  source 1..273: note = Glomeribacter gigasporarum
  REGION 1..273: note = tr|G2JAM6|G2JAM6_9BURK NADPH-dependent 7-cyano-7-deazaguanine reductase OS=Candidatus Glomeribacter gigasporarum BEG34 OX=1070319 GN=queF PE=3; SV = 1
MSNLSPLGKPVTYTGQYDAGLLCPLDRRRSRDAIGVPAQLPFFGADIWNAYELSWLNERGKPHIAIATFCVPANSPNIVESKSFKLYLGSFSSTQVASVDALCDTLKRDVSACAGATVSVQLTPPVGFGQLMLGELGGVSLDRLDLDIEIDEPDASLLSADAKQAPIDETVVSNLLKSNCPVTGQPDWGSVQIRYVGPPIDHAGLLRYIVSYRHYADFHEQCVERMFMDIQRMCKPVKLAIYARYTRRGGLDINPFRASFDAPLPDNVRTARQ

SEQ ID NO: 45056 - protein, 129 aa, unidentified
  source 1..129: note = Goldbacteria bacterium
  REGION 1..129: note = tr|A0A2N1W2C4|A0A2N1W2C4_9BACT NADPH-dependent 7-cyano-7-deazaguanine reductase OS=Candidatus Goldbacteria bacterium HGW-Goldbacteria-1 OX=2013807; GN = queF PE=3 SV=1
MAKAEGRSYNFLPESKIDTKALETIKYDGGNQLIEYKTREFSAVCPFSGLPDVAEVVITYIPSAKILELKALKYYFVSFRNVGIYQEKATDRIFSDIKKILNPKYLLVETIYNTRGGIDAKCAMEFGKR

SEQ ID NO: 45057 - protein, 280 aa, unidentified
  source 1..280: note = Gullanella endobia
  REGION 1..280: note = tr|A0A143WPY4|A0A143WPY4_9ENTR NADPH-dependent 7-cyano-7-deazaguanine reductase OS=Candidatus Gullanella endobia OX=1070130 GN=queF PE=3 SV=1
MYNNQYQYLKSLTLGKPTKYQECYNPSLLQTVPRSFNRDSLGLKTTKLPFHGADIWTLYELSWLNNAGLPQLAIGEVSFNATNTYLIESKSFKLYLNSFNQTCFPSCEAVRIRLSEDLSRCANGEVQVILRTLSDFARSPILDFDGECIDNQPICINNYTLTNRYLEGASSGSVVNEILVSHLLKSNCLITHQPDWGSVQIRYQGKCIDREALLRYLVSFRQHNEFHEQCVERIFCDLMHFCHPKTLTVYARYNRRGGLDINPWRSNIHFSPETGRLVRQ

SEQ ID NO: 45058 - protein, 280 aa, unidentified
  source 1..280: note = Hamiltonella defensa
  REGION 1..280: note = tr|A0A249DZ95|A0A249DZ95_9ENTR NADPH-dependent 7-cyano-7-deazaguanine reductase OS=Candidatus Hamiltonella defensa (Bemisia tabaci) OX=672795 GN=queF; PE = 3 SV=1
MHDNEDVYSKYLGKKSDYIDTYTPSLLEPIPRVLGREKIGLMDDTIPFDGFDLWTAFELSWLNQKGKPMVGMAEFKVPAQSKNLIESKSLKLYLNSLNQSHFDSLKSLQSVLSKDFSNAAMGAVSVTVSEGMKNDDLHIHHPKAVNIDDIDIEVHDYRFNEGYLKDATHETAPFVSETLMSHLLKSNCLVTHQPDWGSVFIKYEGHPIDKEKLLRYIISFRQHHEFHEQCVERIFLDIKKYCRPEKLTVFARYTRRGGLDINPFRSDYESSSNVGRLIRQ

SEQ ID NO: 45059 - protein, 280 aa, unidentified
  source 1..280: note = Hamiltonella defensa
  REGION 1..280: note = tr|A0A2D3T770|A0A2D3T770_9ENTR NADPH-dependent 7-cyano-7-deazaguanine reductase OS=Candidatus Hamiltonella defensa OX=138072 GN=queF PE=3 SV=1
MQDNDGIYAKHLGEKSDYIETYTPSLLEPVPRAFGREKIGLIDDTLPFDGFDLWTAFELSWLNQKGKPMVGMAEFKVPAQSKNLIESKSLKLYLNSLNQSHFDSSKSLQSVLSKDLSNTAMGAVSVTVFEGMKNDDLHIHHPEGVNIDDIDIQVDDYRFNEGYLKDATQETAPFVSETLMSHLLKSNCLVTHQPDWGSVFIKYEGNKIDREKLLRYIISFRQHHEFHEQCVERIFLDIKKYCRPEKLTVFARYTRRGGLDINPFRSNYESIPNIKRLIRQ

SEQ ID NO: 45060 - protein, 132 aa, unidentified
  source 1..132: note = Hydrogenedentes bacterium
  REGION 1..132: note = tr|A0A3M1IJF6|A0A3M1IJF6_9BACT NADPH-dependent 7-cyano-7-deazaguanine reductase OS=Candidatus Hydrogenedentes bacterium OX=2030809 GN=queF PE=3 SV=1
MANPVQGTYEGKQDHIRELQTPDVEVFKNIYEDKNYKIRLKFPEFTAICPKTGLPDFGTVFIEYVPDKVCLELKSLKEYFLFYRDVGIFHENVVNKILDDLVAVASPRKMKVKVTYRVRGGIKTTVCRKYKK

SEQ ID NO: 45061 - protein, 272 aa, unidentified
  source 1..272: note = Hydrogenedentes bacterium
  REGION 1..272: note = tr|A0A2A5E3Z3|A0A2A5E3Z3_9BACT NADPH-dependent 7-cyano-7-deazaguanine reductase QueF OS=Candidatus Hydrogenedentes bacterium OX=2030809 GN=COA73_06500 PE=3; SV = 1
  VARIANT 16: note = Xaa can be any naturally occurring amino acid
  VARIANT 19..20: note = Xaa can be any naturally occurring amino acid
  VARIANT 204: note = Xaa can be any naturally occurring amino acid
MADHIPLGKPTSYTDXYDXXLLFPVPRKEGREDLGLSGELPFSGEDIWNAYEISWLTPSGKPEVATAEIRVPAVSPNLVESKSLKLYLNSLNGTMYQNMADVESVIQNDLSKVAGVTVTVNILGPSHPQKSADVPVQGECIDNLDVSVSSSDVSANLLSVNTVGVNIEETLYTHLFRSLCPITGQPDWATVSIQYAGNRIDQAXLLTYLISYRSHNEFHEHCVERIFMDILNRCEPEKLSVYARYTRRGGIDINPYRSNFPSTPDNVPAWRQ

SEQ ID NO: 45062 - protein, 112 aa, unidentified
  source 1..112: note = Kapabacteria sp.
  REGION 1..112: note = tr|A0A1M3KYK8|A0A1M3KYK8_9BACT NADPH-dependent 7-cyano-7-deazaguanine reductase OS='Candidatus Kapabacteria' thiocyanatum OX=1895771 GN=queF PE=3 SV=1
MTIETFPNPRPERPYTITHVNPEFTSVCPKTGLPDFGTMTVEYVPDATCIELKALKYYYLDFRNKGIFYEAVTNQILDDLVACCAPRSMKVTAEWKARGGINSIIVAEYVKS

SEQ ID NO: 45063 - protein, 123 aa, unidentified
  source 1..123: note = Kentron sp.
  REGION 1..123: note = tr|A0A451C2U0|A0A451C2U0_9GAMM NADPH-dependent 7-cyano-7-deazaguanine reductase OS=Candidatus Kentron sp. G OX=2126341 GN=queF PE=3 SV=1
MPNPGSLETFENPYPRREYTIRIHVPEFTCLCPKTGQPDFATLHIEYIPGQRCVELKSLKQYVWSYRGEGAFHEAVTNRILDDLVAACAPRFLRVTAEFNVRGGIYTTVAVEHGEGNVSKGMS

SEQ ID NO: 45064 - protein, 131 aa, unidentified
  source 1..131: note = Kentron sp.
  REGION 1..131: note = tr|A0A450XNJ2|A0A450XNJ2_9GAMM NADPH-dependent 7-cyano-7-deazaguanine reductase OS=Candidatus Kentron sp. MB OX=2138164 GN=queF PE=3 SV=1
MTMTTSAAATGLEIFENPYPEREYTIRIRIPEFTCVCPKTGQPDFATLHLEYIPQTACIELKSLKNYVWSYREVGAFHEAVTNRILEDLVSACQPRFLRISAEFNVRGGIYTTVTAEHRARGWSPLAAVPG

SEQ ID NO: 45065 - protein, 271 aa, unidentified
  source 1..271: note = Kinetoplastibacterium galatii
  REGION 1..271: note = tr|M1LTN0|M1LTN0_9PROT NADPH-dependent 7-cyano-7-deazaguanine reductase OS=Candidatus Kinetoplastibacterium galatii TCC219 OX=1208921; GN = ST1E_0458 PE=3 SV=1
MGNINPLGHDIEYSFKYDPNYLFAIPRKTISKIPMYGLDIWNIYELSWLNNNGKPEIAIAKIEIPSNSLNIIESKSLKLYLNSFNNTNFENINEVKDILNKDISNAIQCPVFIKMITPENFHMLYIEKSSDVGLCIDDIEVKINIYKPSPELLELSNTSVDVVSETIISRMFRSRCPVTGQPDWASIKIKYKGIKIDHSSILKYIISYRDHLGFHENCIDKIFMDISYTCQPNYLSVYGNFTRRGGIDINPWRTSDRNEPPPLENCRTERQ

SEQ ID NO: 45066 - protein, 275 aa, unidentified
  source 1..275: note = Kinetoplastibacterium desouzaii
  REGION 1..275: note = tr|M1M3C9|M1M3C9_9PROT NADPH-dependent 7-cyano-7-deazaguanine reductase OS=Candidatus Kinetoplastibacterium desouzaii TCC079E OX=1208919; GN = CDSE_0416 PE=3 SV=1
MSKIENPLGKNIEYPSKYNPNILFPICRKNHIEIPHISYEGFDLWNAYELSWLNKNGKPEIAIGKFQFPCNSKNIIESKSLKIYLNSLNQTRFIDHNDLQKTIYKDLSIATESNVLVDIIMPSNFKDMHMEDLDGLCIDNINIETNTYLPSPELLKNDNQKNIAYVNETIMSRLLRSNCPITKQPDWACIQIKYRGFKINHESLLKYIISYRNHDAYHENCIEKIFVDIMQNCNPEFLSVYAKYTRRGGIDINPWRTTNLQEYNPIINNTKTTRQ

SEQ ID NO: 45067 - protein, 129 aa, unidentified
  source 1..129: note = Kryptonium thompsoni
  REGION 1..129: note = tr|A0A0P1M056|A0A0P1M056_9BACT NADPH-dependent 7-cyano-7-deazaguanine reductase OS=Candidatus Kryptonium thompsoni OX=1633631 GN=queF PE=3 SV=1
MEERKLKYGEEAILNAQLETWENPYPDRDYKIEITFPEFTCLCPRSGYPDFATIKIVYIPDKYIVELRSLKLYLNKYRSEYISHEAATNKIYDDLEKILKPRFLEVVGDWNPRGNVKTIITVSSKDKQR

SEQ ID NO: 45068 - protein, 134 aa, unidentified
  source 1..134: note = Lambdaproteobacteria bacterium
  REGION 1..134: note = tr|A0A1F6GPZ3|A0A1F6GPZ3_9PROT NADPH-dependent 7-cyano-7-deazaguanine reductase OS=Candidatus Lambdaproteobacteria bacterium RIFOXYD2_FULL_56_26; OX = 1817773 GN=queF P E=3 SV=1
MAEASGKSFEFEGPEKIQTGFLETFEFLSPNQYILTETPEFSAVCPFSGLPDVGVLRIEYYPRGHKCIELKSLKYYMTSFRNVGLFQEGVTKRIYDDLAQVLGTTDLKVTTIYLPRGGFTTTCVEGRLSHTPTL

SEQ ID NO: 45069 - protein, 133 aa, unidentified
  source 1..133: note = Lambdaproteobacteria bacterium
  REGION 1..133: note = tr|A0A1F6GFT2|A0A1F6GFT2_9PROT NADPH-dependent 7-cyano-7-deazaguanine reductase OS=Candidatus Lambdaproteobacteria bacterium RIFOXYD2_FULL_50_16; OX = 1817772 GN=A2527_ 02590 PE=3 SV=1
MAQAEGLTFEFDGPEAIRTDLLETFAFDSKGQYIHTETSEFSAVCPFSGLPDLGVLTIEYYPEGGRCVELKSLKYYMTSFRNVGLYQEGVTKRIFEDLKVLLGTHNLKVSTLYQPRGGFTTRCVEGRLNPEPH

SEQ ID NO: 45070 - protein, 124 aa, unidentified
  source 1..124: note = Latescibacteria bacterium
  REGION 1..124: note = tr|A0A496SCI3|A0A496SCI3_9BACT NADPH-dependent 7-cyano-7-deazaguanine reductase OS=Candidatus Latescibacteria bacterium OX=2053570 GN=queF PE=3 SV=1
MDEKLKELRSVLRTIPNEFEGRDYTVEIFTEELTSLCPFRGLPDFYGLRIVYVPDASLVELKSLKFYLQGFREVGITHESLLNVIFEDLLELLKPKYLKAELYVNIRGGIRTTVRREYGDQGTK

SEQ ID NO: 45071 - protein, 122 aa, unidentified
  source 1..122: note = Latescibacteria bacterium
  REGION 1..122: note = tr|A0A3D4H191|A0A3D4H191_9BACT NADPH-dependent 7-cyano-7-deazaguanine reductase OS=Candidatus Latescibacteria bacterium OX=2053570 GN=queF PE=3 SV=1
MGSEENRSLVTVPNPEPDCRYTVTFRYSEFTALYPTTFEPVFATVSIRYVPGETCLETVSLKRYLGTFRNETMFYEGLVNRILDDLVSACKPREMDVTGAFTVRGGIESSVSARYLSGGSDD

SEQ ID NO: 45072 - protein, 154 aa, unidentified
  source 1..154: note = Liberibacter africanus
  REGION 1..154: note = tr|A0A0G3I240|A0A0G3I240_LIBAF NADPH-dependent 7-cyano-7-deazaguanine reductase OS=Candidatus Liberibacter africanus PTSAPSY OX=1277257 GN=queF PE=3 SV=1
MSEKTIEGLSILGGKGKLFNTPQEALLEKIPSQNQQLNYVVRFTIPEFTSLCPVTSQPDFAHIIIDYIPKDWLVESKSLKLFMASFRNYHSFHEDCTLYIAQRLMSSLEPKWLRIGAYWYPRGGIPIDIFWQNCAPPTGIFLPNQDVPQYRGRG

SEQ ID NO: 45073 - protein, 154 aa, unidentified
  source 1..154: note = Liberibacter europaeus
  REGION 1..154: note = tr|A0A2T4VXU1|A0A2T4VXU1_9RHIZ NADPH-dependent 7-cyano-7-deazaguanine reductase OS=Candidatus Liberibacter europaeus OX=744859 GN=queF PE=3 SV=1
MPKSKVEGLSILGKKTKICNNPDNAVLEKIPSKNNELNYVVRFTVPEFTSLCPITAQPDFAHIIIDYIPKDWLIESKSLKLFMASFRNYHSFHEDCSIYIAKRLVTALEPKWMRIGAYWYPRGGIPIDIFWQTSSPPDGIFLPIQDVHSYRGRG

SEQ ID NO: 45074 - protein, 109 aa, unidentified
  source 1..109: note = Lindowbacteria bacterium
  REGION 1..109: note = tr|A0A1F6LN34|A0A1F6LN34_9BACT Uncharacterized protein OS=Candidatus Lindowbacteria bacterium RIFCSPLOWO2_12_FULL_62_27 OX=1817870 GN=A3G34_11370 PE=4; SV = 1
MSAFDTLPNVHGISEVALRSAFSTICSVTDERFAGEVIVTYRPGALLIEYLSFGDFIRGFDEAETSSEALAREIFDTVKEIAQPTALRVEIDIQTASHIPAWCKIEEGY

SEQ ID NO: 45075 - protein, 141 aa, unidentified
  source 1..141: note = Lloydbacteria bacterium
  REGION 1..141: note = tr|A0A1G2DGW8|A0A1G2DGW8_9BACT NADPH-dependent 7-cyano-7-deazaguanine reductase OS=Candidatus Lloydbacteria bacterium RIFCSPHIGHO2_02_FULL_54_17; OX = 1798664 GN=A3C93_ 04210 PE=3 SV=1
MKLSQAKKVWSDSSILKSIPNPSKKGYEIKIKNPEVTFLGVNDQPDFTTIFLTFYPSEKVIELRSLKKYFQQFRNSIVSYERLINVIYDDLVKVYEPERLRIVMTFAARGGLSSRLAIDSDWKVRGGKEQFRDWIGQREEW

SEQ ID NO: 45076 - protein, 133 aa, unidentified
  source 1..133: note = Lloydbacteria bacterium
  REGION 1..133: note = tr|A0A1G2DDF4|A0A1G2DDF4_9BACT NADPH-dependent 7-cyano-7-deazaguanine reductase OS=Candidatus Lloydbacteria bacterium RIFCSPLOWO2_01_FULL_50_20; OX = 1798665 GN=A2942_0 4260 PE=3 SV=1
MWSDCSILKAILNPSRKGYEVKIKNPEVTFLGVSNQPDYATVFLTFYPAMRVIELRSLKLYFHQFRDMIVSYERLINIIYDDLMKVYEPERLRVVMTFAARGGISSKLTIDSDWKVRGGKERFKDWFGQPEEW

SEQ ID NO: 45077 - protein, 132 aa, unidentified
  source 1..132: note = Macondimonas diazotrophica
  REGION 1..132: note = tr|A0A4Z0F9S9|A0A4Z0F9S9_9GAMM NADPH-dependent 7-cyano-7-deazaguanine reductase OS=Candidatus Macondimonas diazotrophica OX=2305248 GN=queF PE=3 SV=1
MPAPGAPTPALLETFPNPHPERDYTIRIRMPEFTCLCPKTGQPDFAVLHLEYVADQRCVELKSLKQYIWAYRDQGAFHEAVTNRILGDLVTACAPRAMRLTAEFNVRGGIYTHVVVEHRAPGWTPPAPLHLP

SEQ ID NO: 45078 - protein, 136 aa, unidentified
  source 1..136: note = Magasanikbacteria bacterium
  REGION 1..136: note = tr|A0A0G1YCS8|A0A0G1YCS8_9BACT NADPH-dependent 7-cyano-7-deazaguanine reductase OS=Candidatus Magasanikbacteria bacterium GW2011_GWA2_56_11 OX=1619044; GN = queF PE=3 S V=1
MPTSASDLKNLTKLGSKAAPSRTLEVFPNHAPGKLTVKLECTEFTCRCPLTGQPDYAVIDIYYVPDKFVVESKSLKLYLETFRDSGIFHEHLAVDIAGDFARFVKPLSVDVVVKFNVRGGIAIAAEYHWERAARKK

SEQ ID NO: 45079 - protein, 165 aa, unidentified
  source 1..165: note = Magasanikbacteria bacterium
  REGION 1..165: note = tr|A0A1F6NW72|A0A1F6NW72_9BACT NADPH-dependent 7-cyano-7-deazaguanine reductase OS=Candidatus Magasanikbacteria bacterium RIFOXYC2_FULL_42_28 OX=1798704; GN = queF PE=3SV=1
MPTTKEDLKKLTQLGKGSAKPARTLEVFPNHSGQNLEVELHCTEFTCRCPLTGQPDYAEILITYVPNKYVVESKSMKLYLETFREVGVFHEHLAVDIGNDFVKFVKPKKCEVEVIFNTRGGIAISARWKMGNKATNSEGFDDDETYFTKDDSGIIRAYVNGREEK

SEQ ID NO: 45080 - protein, 128 aa, unidentified
  source 1..128: note = Magnetobacterium bavaricum
  REGION 1..128: note = tr|A0A0F3GPA1|A0A0F3GPA1_9BACT NADPH-dependent 7-cyano-7-deazaguanine reductase OS=Candidatus Magnetobacterium bavaricum OX=29290 GN=queF PE=3 SV=1
MQYGEENIANAQLELWGNPAPEKDYEISIEFPEFTCLCPRSGYPDFATIKITYIPDANIVELKSLKLYLNSFRNKAISHEQAANVIYDELYKKLTPRYLCVVGDFNPRGNVKTIIKVTSSNIEKIQVI

SEQ ID NO: 45081 - protein, 105 aa, unidentified
  source 1..105: note = Magnetoglobus multicellularis
  REGION 1..105: note = tr|A0A1V1P4W1|A0A1V1P4W1_9DELT NADPH-dependent 7-cyano-7-deazaguanine reductase OS=Candidatus Magnetoglobus multicellularis str. Araruama OX=890399; GN = queF PE=3 SV=1
MTKPFDNVNQINDIQSDLLEVVSYDYKGHRKIDVKIEQPEFSSLCPMTGLPDFASIHIHYTPNQYIVELKSLKYYLLQYRNVGIFYEHLINVILDHLVCKVQPEK

SEQ ID NO: 45082 - protein, 132 aa, unidentified
  source 1..132: note = Magnetomorum sp.
  REGION 1..132: note = tr|A0A0N0V140|A0A0N0V140_9DELT NADPH-dependent 7-cyano-7-deazaguanine reductase OS=Candidatus Magnetomorum sp. HK-1 OX=1509431 GN=queF PE=3 SV=1
MDQKNLTTQKADAIQSSVLEVVSYDYCNKRNIEVNIKQPEFTSLCPMTGLPDFASIYIQYIPDKHIVELKSLKYYLLQYRNVGIFYEHLVNVILDHLVEKVKPVQMTIIGDFTPRGGIQTTVKATYPESRNS

SEQ ID NO: 45083 - protein, 119 aa, unidentified
  source 1..119: note = Magnetoovum chiemensis
  REGION 1..119: note = tr|A0A0F2J228|A0A0F2J228_9BACT NADPH-dependent 7-cyano-7-deazaguanine reductase OS=Candidatus Magnetoovum chiemensis OX=1609970 GN=queF PE=3 SV=1
MKYGEKNIAASKIETWPNPFPDKDYEIAISFSEFTCLCPRSGYPDFATIKIMYVPDKFIVELKSLKLYLNSFRNIAVSHEEVTNLIHNELVLNLNPRSIEVIGDFNPRGNVKTIIKVAK

SEQ ID NO: 45084 - protein, 129 aa, unidentified
  source 1..129: note = Margulisbacteria bacterium
  REGION 1..129: note = tr|A0A1F6QC48|A0A1F6QC48_9BACT NADPH-dependent 7-cyano-7-deazaguanine reductase OS=Candidatus Margulisbacteria bacterium GWE2_39_32 OX=1817872 GN=queF; PE = 3 SV=1
MVKAEGISFDFFGVEYIKSSFLEVFPYQGEKQYITYTTKEFSAVCPFSGLPDIAQVTIEYIPDEFCLELKSLKYYFISYRNVGIYQEAVTNMLFSDIYAVLKPHYLKVTTVYNTRGGIDATCYIEKGNK

SEQ ID NO: 45085 - protein, 129 aa, unidentified; identical to SEQ ID NO: 45084
  source 1..129: note = Margulisbacteria bacterium
  REGION 1..129: note = tr|A0A2W4K4D5|A0A2W4K4D5_9BACT NADPH-dependent 7-cyano-7-deazaguanine reductase OS=Candidatus Margulisbacteria bacterium OX=2053573 GN=queF PE=3 SV=1

SEQ ID NO: 45086 - protein, 126 aa, unidentified
  source 1..126: note = Marinamargulisbacteria bacterium
  REGION 1..126: note = tr|A0A328RQH7|A0A328RQH7_9BACT NADPH-dependent 7-cyano-7-deazaguanine reductase OS=Candidatus Marinamargulisbacteria bacterium SCGC AG-439-L15; OX = 2184346 GN=queF PE= 3 SV=1
MPKAEGLTLPFESEDKVRVDLLEVFEYEGNRQNIKYETKEFSAVCPFSGLPDFAQVIIEYIPNTLIVELKSLKYYLTSYRQVGIYQEHLTNRLANDLYTLLSPESLKITTIYNTRGGIDTTCVIEK

SEQ ID NO: 45087 - protein, 268 aa, unidentified
  source 1..268: note = Marinamargulisbacteria bacterium
  REGION 1..268: note = tr|A0A328RV62|A0A328RV62_9BACT NADPH-dependent 7-cyano-7-deazaguanine reductase QueF OS=Candidatus Marinamargulisbacteria bacterium SCGC AAA071-K20; OX = 2184347 GN=DID 80_02950 PE=4 SV=1
MEEKVTLGKPIIYPNTYNKNYLEKISRESYRNSISIDHLSPYGFDAWNIYEFSCLTNKNTPMVAVGQLIIPSSSNYIVESKSLKYYLNSFNMASFESLNQVQSVILVDLEQLLDVKCSIKLNPPSDWKMALSEPNGICLDSSNSNSDSRPVPELITSKSSISIQEQFYSHHFRSLCPVTGQPDWASIVIDFEGPTPDLDSLYTYITSFREHKGFHEQCVEKMYNDIKLALNPKKCIIYAYFLRRGGIDIVPVRGSEKIIFEPKRTYRQ

SEQ ID NO: 45088 - protein, 120 aa, unidentified
  source 1..120: note = Marinimicrobia bacterium
  REGION 1..120: note = tr|A0A4Y8I731|A0A4Y8I731_9BACT NADPH-dependent 7-cyano-7-deazaguanine reductase OS=Candidatus Marinimicrobia bacterium MT.SAG.3 OX=2552982 GN=queF PE=3; SV = 1
MKSTDAIRADVLDTFEYEYPERDVELDISTEEFTSVCPKSGLPDFATIRINYIPDKKCVELRSWKFYLMSYRHVGIFHEHVVNRILEDFVAAVEPKRATVFGDFTIRGGVHTTSKVSWEK

SEQ ID NO: 45089 - protein, 129 aa, unidentified
  source 1..129: note = Marinimicrobia bacterium
  REGION 1..129: note = tr|A0A2E0HWS5|A0A2E0HWS5_9BACT NADPH-dependent 7-cyano-7-deazaguanine reductase OS=Candidatus Marinimicrobia bacterium OX=2026760 GN=CMF88_07030 PE=3; SV = 1
MPKAEGKYFEFEGEDQINTDFLETFSFDSPDQYIMTETDEFSAVCPFSGLPDLAYVKIEYYPVGGKCIELKSLKYYFVSFRNVGIYQEGATKRIYLDLKKVLNSNKVKVTTIYNTRGGFDTTCSEGKID

SEQ ID NO: 45090 - protein, 297 aa, unidentified
  source 1..297: note = Melainabacteria bacterium
  REGION 1..297: note = tr|A0A1D7YRT9|A0A1D7YRT9_9BACT QueF_N domain-containing protein OS=Candidatus Melainabacteria bacterium MEL.A1 OX=1899017 GN=BHV42_03160 PE=4 SV=1
MKTDEIASKFLGKRVSGSENYDPSLLVAIPREENRKQYNLQNDKLPFCGWDIWHAYEFSAMTENGIPVTRLIKLKYSCNSEFLVESKSLKLYLNSFNMSRFGQNIEECLKICKSKIEKDLSEKLQTEVRINFIDNKTQKVQIFQNFQNIMQFVNEKDITVEKFKEAPEVLQTKENEETKEYYLTFDSLRSNCRVTHQPDFGDMFLYYKSKKHITEKSLVKYLSSFRSEYHFHEECCEMIFKRLSDILNKGDKLLVCALYTRRGGIDICPSRWTKNCEIKDVEILNDITKFARGSIKQ

SEQ ID NO: 45091 - protein, 141 aa, unidentified
  source 1..141: note = Melainabacteria bacterium
  REGION 1..141: note = tr|A0A3S0EQN3|A0A3S0EQN3_9BACT NADPH-dependent 7-cyano-7-deazaguanine reductase OS=Candidatus Melainabacteria bacterium OX=2052166 GN=queF PE=3 SV=1
MTVTQNLKHLGNKTEYVYTNPTVEILEHVPNPFSDREQNRHQVAGTVHIEANEFTSLCPITGQPDFATIVIDYIPRERLVESKSLKLYLGSFRQFGEFHESCVNRIANDLIELLDPSYIKVEGRFTPRGGISIWPVAEFHR

SEQ ID NO: 45092 - protein, 121 aa, unidentified
  source 1..121: note = Methylomirabilis oxyfera
  REGION 1..121: note = tr|D5MEZ4|D5MEZ4_9BACT NADPH-dependent 7-cyano-7-deazaguanine reductase OS=Candidatus Methylomirabilis oxyfera OX=671143 GN=queF PE=3 SV=1
MPTQPSKALDTFANPEPGRDYEIRMICPEFTCLCPKTGQPDFATLTLTYVPDRLCIELKSLKLYLWSFRNEGHFHEAVTNRILDDLVKACRPRSMKLIADFYIRGGIHTIITVTHQTDDRR

SEQ ID NO: 45093 - protein, 121 aa, unidentified
  source 1..121: note = Methylomirabilis lanthanidiphila
  REGION 1..121: note = tr|A0A564ZI64|A0A564ZI64_9BACT NADPH-dependent 7-cyano-7-deazaguanine reductase OS=Candidatus Methylomirabilis lanthanidiphila OX=2211376 GN=queF PE=3; SV = 1
MPTQPSKALETFPNPEPGRDYEIQMTCPEFTCLCPKTGQPDFATLTLSYVPDRLCIELKSLKLYLWSFRNEGHFHEAVTNRIMDDLVKACRPRFMKLVADFYVRGGIHTMITVTHQNETRR

SEQ ID NO: 45094 - protein, 148 aa, unidentified
  source 1..148: note = Methylopumilus planktonicus
  REGION 1..148: note = tr|A0A5B8D196|A0A5B8D196_9PROT NADPH-dependent 7-cyano-7-deazaguanine reductase OS=Candidatus Methylopumilus planktonicus OX=1581557 GN=queF PE=3 SV=1
MNALSLGKKPSAKPTKKLETFANPCTSRDFHIQMQIPEFTCLCPKTGQPDFATLYLDYIPNKKCVELKSLKLYIWSFRDEGCFHEAVTNRILDDLVKATEPRFMRLRAEFFVRGGVFTNVVVEHKKKGWKPEPTIDLTQFSKQSNTRS

SEQ ID NO: 45095 - protein, 148 aa, unidentified
  source 1..148: note = Methylopumilus universalis
  REGION 1..148: note = tr|A0A5B8CXP0|A0A5B8CXP0_9PROT NADPH-dependent 7-cyano-7-deazaguanine reductase OS=Candidatus Methylopumilus universalis OX=2588536 GN=queF PE=3 SV=1
MNALSLGKKPSAKPTKKLETFVNPCPSRDFHIHMQIPEFTCLCPKTGQPDFATLYLDYIPNKKCVELKSLKLYIWSFRDEGCFHEAVTNRILDDLVKATEPRFMRLRAEFFVRGGVFTNVVAEHKKKGWKPEPTIDLTQFSKQSNARS

SEQ ID NO: 45096 - protein, 129 aa, unidentified
  source 1..129: note = Methyloumidiphilus alinensis
  REGION 1..129: note = tr|A0A2W4R932|A0A2W4R932_9GAMM NADPH-dependent 7-cyano-7-deazaguanine reductase OS=Candidatus Methyloumidiphilus alinensis OX=2202197 GN=queF PE=3 SV=1
MSTNPSKEIETFANPQPGRSYTIRIEAPEFTCLCPKTGQPDFATFLIEYVPDAVCVELKSLKLYFWSYRDEGAFHEAVTNQVLDDLVAATLPNFMRIIAKFNVRGGLYTTVVVEYRKESWIAPEAVVLP

SEQ ID NO: 45097 - protein, 768 aa, unidentified
  source 1..768: note = Micropelagos thuwalensis
  REGION 1..768: note = tr|U2XWR9|U2XWR9_9PROT Outer membrane protein assembly factor BamA OS=Candidatus Micropelagos thuwalensis OX=1397666 GN=queF PE=3 SV=1
MTNSKFSAFIALFAFTYLATIIAEPLAAQENRAPAEEDFSIQFIEVEGSQRVEADTVRSYMILKPGMTADPLLLDQSLKSMFASGLFADVTIRRERGGLIVTVVENPIVNRVIFEGNDKLDDDDLYEESSLRPRQVYTRSKIQNDVEKFVELYRRSGRFSAKVEPKVIQLPQNRVDVVFEIEEGETTRVRSINFIGNKRFDDDRLREEISTQESRWWRFLSSNDKYDPDRIAYDSDLLRRFYLSKGYADFRVISSFAELTRDGKKFFVTFNVEEGEKYEFGDSVIDTNLKDVNIQELEQLIRHETGRVYNSKKVDDTVDDLTEALGTKGYAFADVRPRVRRNRKDLIVNITYRIQEGPRVYVERINVNNNVRTQDRVIRREMYLREGDAFNRALLNKSERNIKALNFFGEVEITETPGDDEDSVVLDIDVEEQSTGELAFGIGYSSVEDLSTQFSIVERNLLGRGQLLSLSTSISSQRTFLNLRFAEPYFLNRDLFGSVDVFRTTTDYDTEAALETSETGLGGSIGFPVAEDARLNIFVRLSENELINDAYTPQFGAYLRPFTELKAQLGYTYTIDKRDDVIDPTEGWDFIFSQNIATPLGDVTYIRSTIVADYYKPFFEEWVFHAKLSGGIIGDYEKEGISYNDNFFVGGSIIRGFKRSGVGPRDLQTDYVLGAKQYLVGTLEAKVPLGIPKDFGIKTYIFTDFGVIGKTDVEATNVQDDTAFRASYGLTFNWKSPFGPVRFDLARPLAEEEYDRAQFFRFTAGTRF

SEQ ID NO: 45098 - protein, 156 aa, unidentified
  source 1..156: note = Micropelagos thuwalensis
  REGION 1..156: note = tr|U2XWT5|U2XWT5_9PROT NADPH-dependent 7-cyano-7-deazaguanine reductase OS=Candidatus Micropelagos thuwalensis OX=1397666 GN=queF PE=3 SV=1
MSTKQGSDTTGSTMLGQQTPMPNSPDEAVLERVPNPHPDTLYVARFAVPEFTSICPKTGQPDFARLIIDYVPEKYLVESKSFKLFMGSFRNHGAFHEDCTIEIAKRLIACMEPRWLRIGGYWYPRGGIPIDVFYQTGEPPADLYIPDQDVASYSGR

SEQ ID NO: 45099 - protein, 137 aa, unidentified
  source 1..137: note = Moanabacter tarae
  REGION 1..137: note = tr|A0A2Z4AS26|A0A2Z4AS26_9BACT NADPH-dependent 7-cyano-7-deazaguanine reductase OS=Candidatus Moanabacter tarae OX=2200854 GN=queF PE=3 SV=1
MTHKHTTKTDVKNLSILGGSTTKPARSLETFPNKHPGRDYMVTLESNEFTCLCPVTGQPDFARIEVRYVPNKRIVESKSLKLYLWSFRSEGIFHEHLANIILDDLVKALKPRWCEVLAKFNSRGGISIKVHAEHKGK

SEQ ID NO: 45100 - protein, 760 aa, unidentified
  source 1..760: note = Muproteobacteria bacterium
  REGION 1..760: note = tr|A0A1F6TDW6|A0A1F6TDW6_9PROT NADPH-dependent 7-cyano-7-deazaguanine reductase OS=Candidatus Muproteobacteria bacterium RBG_16_64_11 OX=1817758 GN=queF; PE = 3 SV=1
MPTKPSKQLETFANPNPARDYTIEIRIPEFTCLCPKTGQPDFATLYLDYVPDQRCVELKSLKLYIWSYRDEGAFHEAVTNAILNDLVSATAPRFMRLRAEFNVRGGLYTAVTVDYRMPGWTPPVPVPKPLPESTAADTPPASEPTPASTPTTASISPPSAPAPEPSAPVVPTVKAELPRSAQPWDRGARQPAPAMDGGRFGLLPSRGITPSMEGRSAESANTPIITTGRTSEASRASDSARGPRLDPIGENAGAVFPQAKTAEPASRGLAQQRKLPESLQPPAPRVPEPKPIEAKAPAKEPAPPAPPKAEAPPPPAPKKKPEPVFLGIDLGSVGCRLCAIDEQRRVVATAQTPLPAAIKRGSEISQDPNLWWQAVSAGLHELFKTLAPERVRRIAIDGTSGTLLLCGRDGTPITDAILYNDGRALAQAERIAAYAVRHSGAHGVGSALAKLLWFHDKNLHKTAAFAAHPADWIMGKLTGRWGHSDYNNCLKLGYNAEAMRWPEWLAALDINMELLPTVHASGEPVAAISAENARAFGLPPDCAVVAGTTDGVASFLAAGGSRPGHAVTALGSTLVLKLLSDKPVFAPEHGVYSHRLGRYWLAGGASNSGGAVLLQYFDVEQMEEMTSLIDPEQFTGLDYYPLLDIGERFPHNDPKKTAVLEPLPNNSVTFFQGLLEGIARIEAQGYELLQQLGAPAISEVRTTGGGSRNPAWQRLRERILGVPLKKPVSDQAAYGSALLAAGLIDKSLLSESAPRAVQIS

SEQ ID NO: 45101 - protein, 129 aa, unidentified
  source 1..129: note = Nitrosoglobus terrae
  REGION 1..129: note = tr|A0A1Q2SMH2|A0A1Q2SMH2_9GAMM NADPH-dependent 7-cyano-7-deazaguanine reductase OS=Candidatus Nitrosoglobus terrae OX=1630141 GN=queF PE=3 SV=1
MPSQPSRELETFSNPFPNRDYTIRIKIPEFTCLCPKTGQPDFATLHLEYVPDHNCVELKALKLYIWSYRNQGAFHEAVTNQILDDLIAVCNPRFIRLTAEFSVRGGIYTTVIAEYRQPNWNTPKIVQLP

SEQ ID NO: 45102 - protein, 133 aa, unidentified
  source 1..133: note = Nitrospira nitrificans
  REGION 1..133: note = tr|A0A0S4LBI9|A0A0S4LBI9_9BACT NADPH-dependent 7-cyano-7-deazaguanine reductase OS=Candidatus Nitrospira nitrificans OX=1742973 GN=queF PE=3 SV=1
MRDKQKATKLGYNERHAKSGITDPLPNIETFPNQYKGYEITIEIPEYTAICPKTNLPDFGTITLHYMPDKDCLELKALKMYIHAYRNLGIFYENAVNRILQDIVKACRPVRATVTGAFTARGGLSSKIEARYP

SEQ ID NO: 45103 - protein, 143 aa, unidentified
  source 1..143: note = Nitrospira nitrosa
  REGION 1..143: note = tr|A0A0S4L9U9|A0A0S4L9U9_9BACT NADPH-dependent 7-cyano-7-deazaguanine reductase OS=Candidatus Nitrospira nitrosa OX=1742972 GN=queF PE=3 SV=1
MKRETVARKPKATKLGYNERHAKSGITAPLPEIETFPNQYEGYEITIEIPEYTAICPKTNLPDFGTITLHYMPDKECLELKALKMYIHAYRNLGIFYENAVNRILQDIVKSCRPVWATVTGTFTARGGLSSKIEARYPQTRKA

SEQ ID NO: 45104 - protein, 139 aa, unidentified
  source 1..139: note = Nitrotoga sp.
  REGION 1..139: note = tr|A0A3E1DPK0|A0A3E1DPK0_9PROT NADPH-dependent 7-cyano-7-deazaguanine reductase OS=Candidatus Nitrotoga sp. LAW OX=2184310 GN=queF PE=3 SV=1
MSALPSKFLETFANPSLERDYHIHMEIPEFTCLCPKTGQPDFATLILDYIADTTCVELKSLKLYIWSFRNEGHFHEDVTNRILDDLVAAIQPRFMRLTAKFYVRGGIFTNIVAEHRKPGWQAQPLVDLMQFGMQSNTRG

SEQ ID NO: 45105 - protein, 144 aa, unidentified
  source 1..144: note = Nitrotoga sp.
  REGION 1..144: note = tr|A0A3E1D4X5|A0A3E1D4X5_9PROT NADPH-dependent 7-cyano-7-deazaguanine reductase OS=Candidatus Nitrotoga sp. SPKER OX=2184312 GN=queF PE=3 SV=1
MSALPSNTVASKLLETFANPNLQRDYHIHMEIPEFTCLCPKTGQPDFATLILDYIADTTCVELKSLKLYIWSFRNEGHFHEDVTNRILDDLVAAIQPRFMRLTAKFYVRGGIFTNIVAEHRKPGWQAQPLVDLMQFETQSNTRG

SEQ ID NO: 45106 - protein, 131 aa, unidentified
  source 1..131: note = Omnitrophica bacterium
  REGION 1..131: note = tr|A0A3C0MZ35|A0A3C0MZ35_9BACT NADPH-dependent 7-cyano-7-deazaguanine reductase OS=Candidatus Omnitrophica bacterium OX=2035772 GN=queF PE=3 SV=1
MKKRSSYEGLQKNIRSLETPEIEAWENQYPDRRYVVHIEIPEFTCICPKTGLPDFAAISIEYIPAKLCVELKSLKEYLMFYRDIGIFHEHFANKLMDDFVHACRPRWAKMTTKFNPRGGIGTTVVREHRGR

SEQ ID NO: 45107 - protein, 135 aa, unidentified
  source 1..135: note = Omnitrophica bacterium
  REGION 1..135: note = tr|A0A2H0Y5Q3|A0A2H0Y5Q3_9BACT NADPH-dependent 7-cyano-7-deazaguanine reductase OS=Candidatus Omnitrophica bacterium CG08_land_8_20_14_0_20_41_16; OX = 1974743 GN=queFPE=3 SV=1
MKVRKSPYERLQENIRGLKTPEIEVWQNQYRDKLYTICLEIPEFTCICPKTGLPDFAVIKIEYSPDKYCVELKSFKMYTIFYRNIGIFHEHLTNKMLEDFVKACSPRWAKIISEFNPRGGIKTTVIREYRSKEGR

SEQ ID NO: 45108 - protein, 129 aa, unidentified
  source 1..129: note = Omnitrophus magneticus
  REGION 1..129: note = tr|A0A0F0CP69|A0A0F0CP69_9BACT NADPH-dependent 7-cyano-7-deazaguanine reductase OS=Candidatus Omnitrophus magneticus OX=1609969 GN=queF PE=3 SV=1
MEKTYDGLQNNIRGLQLPSIEVWENKYNDKTYMIKSDTNEFTCICPKTGLPDFAHIFIEYSPDKWCIELKSFKEYLFAYRTIGIFHEHVVNKLLEDLVKAASPRYMKIKGIFNIRGGITTIVEAEYKNS

SEQ ID NO: 45109 - protein, 274 aa, unidentified
  source 1..274: note = Pandoraea novymonadis
  REGION 1..274: note = tr|A0A2P6UYH6|A0A2P6UYH6_9BURK NADPH-dependent 7-cyano-7-deazaguanine reductase OS=Candidatus Pandoraea novymonadis OX=1808959 GN=queF PE=3 SV=1
MTPEKSPLGKKIAHTEQYEPSLLFSISRDNARKEIGVPVKLPFFGADLWTAYELSWLNKKGKPQITIATLIVPADSPNIIESKSLKLYLCSFAQTKIDSNDTLRELLEHDLSKACGKSVQVQLTKQSDFRDIEFDKPDSLLLDDLDIETTIYKPDSSLLNTCTHKAPIEETLMSNLLKSNCPVTGQPDWGSVKIHYFGKPIDQKGLLKYIISFRQHTGFHEQCVEHIFIDIMRQCQPSKLSVYARYTRRGGLDINPFRTNFNVPLPKNKRTARQ

SEQ ID NO: 45110 - protein, 282 aa, unidentified
  source 1..282: note = Pantoea carbekii
  REGION 1..282: note = tr|U3U7A0|U3U7A0_9GAMM NADPH-dependent 7-cyano-7-deazaguanine reductase OS=Candidatus Pantoea carbekii OX=1235990 GN=queF PE=3 SV=1
MTFKNQHKIINNLVLGKPTSYPIGYQDTLLQSLPRNLSRNVLNIQKNKLSFHGADIWTLYELSWLNKKGLPQVAIGQVIISADSQNFIESKSFKLYLNSFNQAIFADWDEVHHILQKDISNCAMGNVCIKLFKLSDLNDQKIGYFEGELLDEQDIIITDYNLNINYLACMNSNDKIVTETLISHLLKSNCMITNQPDWASIMIRYEGPRINRESLLSYLVSFRQHNEFHEQCIERIFSDLLRFCKPTALTVYARYTRRGGIDINPWRSNVTFLPNYLRLARQ

SEQ ID NO: 45111 - protein, 274 aa, unidentified
  source 1..274: note = Paraburkholderia kirkii
  REGION 1..274: note = tr|G4MER7|G4MER7_9BURK NADPH-dependent 7-cyano-7-deazaguanine reductase OS=Candidatus Paraburkholderia kirkii UZHbot1 OX=1055526 GN=queF PE=3; SV = 1
MTPDQSPLGKPVHYTEQYDASLLFPIDRQRARDAIGVPGRLPFFGTDVWNAYELSWLNRRGKPQIAVATFFVPADSPNIVESKSFKLYLGSFAQTQFDSIDDVRAAIRRDVSATCGANVSVQLAAPADFGKLTMEEFDGLSLDRLDLDCDVFSPEPSLLSTAHDEAPVDETLFSNLLKSNCPVTGQPDWGSVQIRYYGGQIDHAGLLRYVVSYRGHTGFHEQCVERIFMDIMRECKPERLAVYARYTRRGGLDINPFRTNFNLPMPDNAQLARQ

SEQ ID NO: 45112 - protein, 274 aa, unidentified
  source 1..274: note = Paraburkholderia sp.
  REGION 1..274: note = tr|A0A4V2ZY42|A0A4V2ZY42_9BURK NADPH-dependent 7-cyano-7-deazaguanine reductase OS=Candidatus Paraburkholderia sp. 4M-K11 OX=2528715 GN=queF PE=3 SV=1
MTPEQSPLGKAARYTEQYDASLLFPIPRAAAREAIGIGAQLPFFGTDIWNAYELSWLNARGKPQIAIATFFIPADSPNIVESKSFKLYLGSFAQTPFESAEVVRDTIKRDVSAACGAPVSVRLDQPGAFGKIPFEEFEGLSLDRLDLDTEVYHPDPTLLKAALDESPVEETLVSNLLKSNCPVTGQPDWGSVQIHYVGPQIDQAGLLRYIISYRNHTGFHEQCAERIFMDILRECKPDRLAVYARYTRRGGLDINPFRTNFNMPMPDNARLARQ

SEQ ID NO: 45113 - protein, 133 aa, unidentified
  source 1..133: note = Peregrinibacteria bacterium
  REGION 1..133: note = tr|A0A2M7UNY8|A0A2M7UNY8_9BACT NADPH-dependent 7-cyano-7-deazaguanine reductase OS=Candidatus Peregrinibacteria bacterium CG_4_10_14_0_2_um_filter_38_24; OX = 1974774 G N=queF PE=3 SV=1
MFNEKNSQEIRKDIKKIAPLLTFKFQRLENSEHWVTIASPEYTSICPFSDWPDFGTVEISYVPDKVCLELKSFKIYINAFRDVKIFHETVTEVILKDFLEAVKPKKAKIVVDMNVRGNVKTICRKFYKCKQND

SEQ ID NO: 45114 - protein, 113 aa, unidentified
  source 1..113: note = Peregrinibacteria bacterium
  REGION 1..113: note = tr|A0A1F7ABN0|A0A1F7ABN0_9BACT NADPH-dependent 7-cyano-7-deazaguanine reductase OS=Candidatus Peregrinibacteria bacterium RIFCSPLOWO2_01_FULL_39_12; OX = 1801897 GN=que F PE=3 SV=1
MLTFNFQEQSRGEHWVTISTEEYTSICPFSNWPDFGRVEISYVPNKKCLELKSFKLYINAFRNIKIFHETALEVIFADFLEVVNPKKAVIKVDMNVRGNVKTVCKKYFKTSQS

SEQ ID NO: 45115 - protein, 152 aa, unidentified
  source 1..152: note = Phaeomarinobacter ectocarpi
  REGION 1..152: note = tr|X5MN66|X5MN66_9RHIZ NADPH-dependent 7-cyano-7-deazaguanine reductase OS=Candidatus Phaeomarinobacter ectocarpi OX=1458461 GN=queF PE=3 SV=1
MSDVPGATQLGQQTALPASPEEADLERVANPHPGTDYVARFTAPEFTSLCPVTGQPDFAHIVIDYVPGEWLVESKSLKLYLGSFRNHGAFHEDCTIAIAKRLADLLKPKWLRIGGYWYPRGGIPIDVFWQTGDVPQGVWLPDQGVPAYRGRG

SEQ ID NO: 45116 - protein, 188 aa, unidentified
  source 1..188: note = Photodesmus blepharus
  REGION 1..188: note = tr|A0A084CNW2|A0A084CNW2_9GAMM NADPH-dependent 7-cyano-7-deazaguanine reductase OS=Candidatus Photodesmus blepharus OX=1179155 GN=queF PE=4 SV=1
MKLYLNSFHQTKFNSKIQVLETIKKDISFASGSTVDINFFSIEKSQKLNINQSFFCLDKLDINILQYDYSEDFLQNSTSNKEVTEKLCSHLFKSNCLITNQPDFASVYIIYTGRKINHETLLKYIISFRNHNEFHEQCVERIYSDIKRCCRSKQLTVFSRYTRRGGLDINPFRSDSCNHTLVSRMPRQ

SEQ ID NO: 45117 - protein, 231 aa, unidentified
  source 1..231: note = Photodesmus katoptron
  REGION 1..231: note = tr|S3EG85|S3EG85_9GAMM NADPH-dependent 7-cyano-7-deazaguanine reductase OS=Candidatus Photodesmus katoptron Akat1 OX=1236703 GN=O1U_0011 PE=3 SV=1
MFKGFDIWTAFELSWLNKKGKPEVAIAEFIIPQSSPNLIESKSFKLYLNSFNQIKFNSKEMLLNVLQNDLTKTSGSPVKIRFIPVDQPKKLNVVPDFFCIDILDIHISQYNYEEGYLKGSISNEIVTEFLCSHLLKSNCLVTNQPDWGSVYIIYSGFQINHEILLKYLISFRNHKAFHEQCVETIFSDIKYHCQTEKLTVFARYTRRGGLDINPFRSDSDNQVFIGRMPRQ

SEQ ID NO: 45118 - protein, 269 aa, unidentified
  source 1..269: note = Phycorickettsia trachydisci
  REGION 1..269: note = tr|A0A2P1P9H3|A0A2P1P9H3_9RICK NADPH-dependent 7-cyano-7-deazaguanine reductase OS=Candidatus Phycorickettsia trachydisci OX=2115978 GN=phytr_9910 PE=3; SV = 1
MSLDLSILGKKVDAPESYNPAILFPISRSGQRAEFANKIEFKGVDIWYAYEISWLNPKGKPQVALGRFIFDANSENIVESKSLKLYLNSLNNFNVENMQTLQNIIKGDLSKASSSDVDVTLFSVKDKFEFLEYDGIYLDDLDVEINYEKKVDTSYLKKSDTLVKEKVYTDLFKANCLVTHQADWATLFIEYEGHKIDHEGLLKYLISYRNHNSFHEHCVEHIYADLLTILKPTFLNVYAKFTRRGGLDITPYRTNQTLKLPSFGRTTRQ

SEQ ID NO: 45119 - protein, 266 aa, unidentified
  source 1..266: note = Phycorickettsia trachydisci
  REGION 1..266: note = tr|A0A2P1P881|A0A2P1P881_9RICK NADPH-dependent 7-cyano-7-deazaguanine reductase OS=Candidatus Phycorickettsia trachydisci OX=2115978 GN=phytr_5200 PE=3; SV = 1
MDSSLLGKKISAPSFYDPQILFPIARSQQRLNLPGVKFEGVDIWYAYEVSWLDLQGKACVKIGRFIFDANSEFLVESKSLKLYLNSFNNTRFESAEKVAQLISKDLSAVSNSKVEVELLNLDDRYEFFQYDGICLDSLEIEMDYEKDVDTAFLARHDTWVKEKLYTNLFKSNCLVTNQADWASLYIEYEGYQMDYKGLLKYLLSYRNHSSFHEHCVENVYHDLLNTFECSFLSVYGKYTRRGGLDIAPYRATKMENLPSFDRTSRQ

SEQ ID NO: 45120 - protein, 155 aa, unidentified
  source 1..155: note = Phycosocius bacilliformis
  REGION 1..155: note = tr|A0A2P2E8V8|A0A2P2E8V8_9PROT NADPH-dependent 7-cyano-7-deazaguanine reductase OS=Candidatus Phycosocius bacilliformis OX=1445552 GN=queF PE=3 SV=1
MTHSSIYDGLNTLGQDVRGYASPEEAILEKVANPHPGTDYVARFVAPEFTSLCPVTGQPDFAHLVIDYVPGDWLVESKSLKLFLTSFRNHGAFHEDCTVAIGKRLVALLTPRWLRIGGYWYPRGGIPIDVFYATGPAPEGVWIPDQGVPPYRGRG

SEQ ID NO: 45121 - protein, 133 aa, unidentified
  source 1..133: note = Poribacteria bacterium
  REGION 1..133: note = tr|A0A496AHG4|A0A496AHG4_9BACT NADPH-dependent 7-cyano-7-deazaguanine reductase OS=Candidatus Poribacteria bacterium OX=2026781 GN=queF PE=3 SV=1
MPQNSNYANLQTHIRQLKTPPLETWENQYPHRDYTIEITHLEFTAVCPKTGLPDFATLRVTYVPDKECVELKSLKEYLLFYRDVGIFHEHVVNKVLEDVVAACQPREVEVIGDFNVRGGIKTVVRASYQKNTD

SEQ ID NO: 45122 - protein, 135 aa, unidentified; identical to SEQ ID NO: 44493
  source 1..135: note = Poribacteria bacterium
  REGION 1..135: note = tr|A0A2E8DNQ2|A0A2E8DNQ2_9BACT NADPH-dependent 7-cyano-7-deazaguanine reductase OS=Candidatus Poribacteria bacterium OX=2026781 GN=queF PE=3 SV=1

SEQ ID NO: 45123 - protein, 139 aa, unidentified
  source 1..139: note = Propionivibrio aalborgensis
  REGION 1..139: note = tr|A0A1A8XM76|A0A1A8XM76_9RHOO NADPH-dependent 7-cyano-7-deazaguanine reductase OS=Candidatus Propionivibrio aalborgensis OX=1860101 GN=queF PE=3 SV=1
MSSPSAKALETFPNSAAQRDFHVHMEIPEFTCLCPKTGQPDFATLFLDYIPEKTCVELKSLKLYIWSFRDQGCFHEDVTNRILDDLVRATRPRFMRLTARFNVRGGIFTHVVVEHRKKGWKPAPLVDLVEFSPQAANRG

SEQ ID NO: 45124 - protein, 276 aa, unidentified
  source 1..276: note = Pseudomonas adelgestsugas
  REGION 1..276: note = tr|A0A481QMV4|A0A481QMV4_9PSED NADPH-dependent 7-cyano-7-deazaguanine reductase OS=Candidatus Pseudomonas adelgestsugas OX=1302376 GN=queF PE=3 SV=1
MHIVARHSPLGKSSEYISTYAPSLLFPISRSIRWAELGLTIETLPYIGVDFWNCFELSWLLPSGKPVVAIGEFSIPANSPNIIESKSFKLYLNSLNQTVFINTQSLETTLRTDLSTVAGTPMRVRIRALAEITSEGIQALPGVCIDDLDISISKYKHPCPELLRCDDSRTTEESVHSHLLKSNCPVTGQPDWGSVVVTYSGNVLNHASLLEYIVSFRQHSDFHEQCIDRIFLDLQHLLQPKKLTVYARYVRRGGLDINPYRSTEAMQFQNSRLARQ

SEQ ID NO: 45125 - protein, 149 aa, unidentified
  source 1..149: note = Puniceispirillum sp.
  REGION 1..149: note = tr|A0A1Z8USF4|A0A1Z8USF4_9PROT NADPH-dependent 7-cyano-7-deazaguanine reductase OS=Candidatus Puniceispirillum sp. TMED52 OX=1986639 GN=queF PE=3 SV=1
MENLTHLGKPSSLPQSPEEAVLDRVPNPHPDTMFVARFTQPEFTSLCPVTAQPDFAHLVIDYIPNKWMVESKSLKIYLNSFRNHQAFHEACTVGIGKRLVELMEPHWLRIGGYWYPRGGMPIDVFWQHGTAPDGVWIPDQGVAGYRGRG

SEQ ID NO: 45126 - protein, 149 aa, unidentified
  source 1..149: note = Puniceispirillum sp.
  REGION 1..149: note = tr|A0A2D4UNX8|A0A2D4UNX8_9PROT NADPH-dependent 7-cyano-7-deazaguanine reductase OS=Candidatus Puniceispirillum sp. OX=2026719 GN=queF PE=3 SV=1
MENLKALGQAAKQPNSPEEAELERVPNPHPDCNFVARFTQPEFTSLCPVTAQPDFAHLMIDYIPDQWMVESKSLKLYLGSFRNHQAFHEACTVDIAKELIALLSPRWLRIGGYWYPRGGIPIDVFWQHGAIPEGTWVPDQGVAGYRGRG

SEQ ID NO: 45127 - protein, 135 aa, unidentified
  source 1..135: note = Raymondbacteria bacterium
  REGION 1..135: note = tr|A0A1F7EZG3|A0A1F7EZG3_9BACT NADPH-dependent 7-cyano-7-deazaguanine reductase OS=Candidatus Raymondbacteria bacterium RIFOXYD12_FULL_49_13 OX=1817890; GN = queF PE=3SV=1
MAHKKPHLTILGSAHTAYPTSPDKARLEAIPFNNQGNHTTVTLSTDEFTSLCPVTGQPDFGEIVIEYVPEKLLVESKSLKLYLFSFRNLGIFQEEIVNRILNDLKKALKPRSIKVTGRFKARGGIVIAPVAQWNR

SEQ ID NO: 45128 - protein, 279 aa, unidentified
  source 1..279: note = Regiella insecticola
  REGION 1..279: note = tr|G2GW87|G2GW87_9ENTR NADPH-dependent 7-cyano-7-deazaguanine reductase OS=Candidatus Regiella insecticola 5.15 OX=1005043 GN=queF PE=3 SV=1
MNNNQHVYSKHLGQKSQYIDTYNEKLLVAIPRSAGRKEIGLIDEQIPFHGFDLWTAYELSWLNKKGKPQVAMAEFTVPATSQNLIESKSLKLYLNSLNQSHLDSSEVHQHISKDLSHIAEAEVKVTLFEGMKNYSKKIDEPDYISIDESDIEVNDYKFNADHLKNAVTEKSPFVTEHLMSNLLKSNCLVTLQPDWASVFIKYEGKKIDREKLLRYIISFRKHNEFHEQCVERIFLDIKKYCHPQKLTVFARYTRRGGLDINPFRSDYESTSAIGRLVRQ

SEQ ID NO: 45129 - protein, 279 aa, unidentified
  source 1..279: note = Regiella insecticola
  REGION 1..279: note = tr|E0WTA3|E0WTA3_9ENTR NADPH-dependent 7-cyano-7-deazaguanine reductase OS=Candidatus Regiella insecticola LSR1 OX=663321 GN=queF PE=3 SV=1
MNNSQYLYSKHLGQKSQYIDTYNEKLLVAIPRSVGRKEIGLIDEKIPFTGFDLWTAYELSWLNKKGKPQVAMAEFTVPATSPNLIESKSLKLYLNSLNQSYLDSSEVHQHISKDLSHIAEAEVKVTLFEGMKNYSKKIDEPDYISIDESDIEVNDYKFNADHLKNAVTEKSPFVTERLTSNLLKSNCLVTLQPDWASVFIKYEGKKIDREKLLRYIISFRKHNEFHEQCVERIFLDIKKYCHPQKLTVFARYTRRGGLDINPFRSDYESTSAIGRLVRQ

SEQ ID NO: 45130 - protein, 121 aa, unidentified
  source 1..121: note = Rokubacteria bacterium
  REGION 1..121: note = tr|A0A1Q6WGK7|A0A1Q6WGK7_9BACT NADPH-dependent 7-cyano-7-deazaguanine reductase OS=Candidatus Rokubacteria bacterium 13_2_20CM_69_10 OX=1805371 GN=queF; PE = 3 SV=1
MPTRPSRSLEVVSNPHPDRDYEVAMTAPEFTCVCPMTGQPDFATIRIRYVPDQHLVELKSLKLYLWSYRDEGAFHEDVTNRILNDFVTAARPRFVEVVGDFSVRGGIKTEVRATYGKRPEI

SEQ ID NO: 45131 - protein, 121 aa, unidentified
  source 1..121: note = Rokubacteria bacterium
  REGION 1..121: note = tr|A0A1Q7I7N9|A0A1Q7I7N9_9BACT NADPH-dependent 7-cyano-7-deazaguanine reductase OS=Candidatus Rokubacteria bacterium 13_1_40CM_4_67_11 OX=1805361; GN = queF PE=3 SV=1
MPTRPSRSLEVVSNPHPDRDYEVAMTAPEFTCVCPMTGQPDFATIRIRYVPDQHLVELKSLKLYLWSYRDEGAFHEDVTNRILNDFVTAARPRFVEVIGDFSVRGGIKTEVRATYGKRPEI

SEQ ID NO: 45132 - protein, 135 aa, unidentified
  source 1..135: note = Saccharicenans subterraneum
  REGION 1..135: note = tr|A0A3E2BNL2|A0A3E2BNL2_9BACT NADPH-dependent 7-cyano-7-deazaguanine reductase OS=Candidatus Saccharicenans subterraneum OX=2508984 GN=queF PE=3 SV=1
MAGKKATQKLEYGEKEARAGLKTRLPELQTFPNQFPDYEITIEIPEYTSVCPKTGLPDYGKVTLWYVPDKKVIELKSLKMYILAYRNLGIFYENAVNRILEDVVRACKPKKALVRGEFTPRGGLKSTVEARYPRG

SEQ ID NO: 45133 - protein, 118 aa, unidentified
  source 1..118: note = Saganbacteria bacterium
  REGION 1..118: note = tr|A0A2H0Y1U2|A0A2H0Y1U2_9BACT NADPH-dependent 7-cyano-7-deazaguanine reductase OS=Candidatus Saganbacteria bacterium CG08_land_8_20_14_0_20_45_16; OX = 2014293 GN=queFPE=3 SV=1
MPIEVVENKYPHKDYVVNIEFPEFTCVCPKTGLPDFATIKIEYTPDKLLVELKSLKLYFVSYRNEGSFHETVINKILDDFVAACQPRKAKIIGEFNVRGGIKTSVTAQYLSPTQYPKA

SEQ ID NO: 45134 - protein, 127 aa, unidentified
  source 1..127: note = Schekmanbacteria bacterium
  REGION 1..127: note = tr|A0A1F7RMW7|A0A1F7RMW7_9BACT NADPH-dependent 7-cyano-7-deazaguanine reductase OS=Candidatus Schekmanbacteria bacterium RBG_16_38_10 OX=1817879 GN=queF; PE = 3 SV=1
MKYGQKAIKSAKLEIWDNPNPEKNYEIEISFPEFTCLCPRSGYPDFATIKVRYVPDKHVIELKSLKLYFNKFRNQYISHEAATNKIYDHIKKTIKPRYIEVTGDFTPRGNVKTVIFISSDKEKNSLP

SEQ ID NO: 45135 - protein, 141 aa, unidentified
  source 1..141: note = Schekmanbacteria bacterium
  REGION 1..141: note = tr|A0A1F7RF27|A0A1F7RF27_9BACT NADPH-dependent 7-cyano-7-deazaguanine reductase OS=Candidatus Schekmanbacteria bacterium GWA2_38_11 OX=1817876 GN=queF; PE = 3 SV=1
MKYGQRAIKASKLEVWGNPTPDRDYEIEISFPEFTCLCPRSGYPDFATISIKYIPDKYIVELKSLKLYFNKYRDEHISHEAAVNKIYDLLKKNLRPKYIEVTGDFNPRGNVKTLIRVSSDMGKIIPPLKPACQQAGRGTSS

SEQ ID NO: 45136 - protein, 161 aa, unidentified
  source 1..161: note = Schmidhempelia bombi
  REGION 1..161: note = tr|A0A484GD53|A0A484GD53_9GAMM NADPH-dependent 7-cyano-7-deazaguanine reductase OS=Candidatus Schmidhempelia bombi str. Bimp OX=1387197 GN=queF PE=3 SV=1
MNINNSSITLLGDQAVAYPTDYSPSILETFDNKHPDNDYFVKFNCPEFTSLCPITGQPDFACIYISYVPDIKMVESKSLKLYLFSFRNHGDFHEDCINTIMKDLIKLLSPKYIEVWGKFTPRGGISIDPYVNYGKPDTPWQQIAFNRLANHDLYPEKIDNR

SEQ ID NO: 45137 - protein, 129 aa, unidentified
  source 1..129: note = Sulfobium mesophilum
  REGION 1..129: note = tr|A0A2U3QIT8|A0A2U3QIT8_9BACT NADPH-dependent 7-cyano-7-deazaguanine reductase OS=Candidatus Sulfobium mesophilum OX=2016548 GN=queF PE=3 SV=1
MVDFKMKYGEKAIGKARLEVWENPNPERDYEINIALPEFTCLCPRSGYPDFATFTVRYVPDKKIVELKALKLYLNSFRDIHISHEAVTNKIYSELTRKLKPRFLEVVGDFNPRGNVKTVIRVSSDREEI

SEQ ID NO: 45138 - protein, 141 aa, unidentified
  source 1..141: note = Sulfopaludibacter sp.
  REGION 1..141: note = tr|A0A2U3LK46|A0A2U3LK46_9BACT NADPH-dependent 7-cyano-7-deazaguanine reductase OS=Candidatus Sulfopaludibacter sp. SbA4 OX=2043165 GN=queF PE=3 SV=1
MKRAYTDEHARAGVNAALPEIETWPNQYPDYEIEIVTPEFTSVCPKTGLPDFGKLVLRYAPDQRCLELKSYKMYLLAYRDLGIFQENAVNRVLGDVVKAARPKMATVIGDFSPRGGLGTIVTATWTGRPRRPEARAPRGKR

SEQ ID NO: 45139 - protein, 136 aa, unidentified
  source 1..136: note = Sulfopaludibacter sp.
  REGION 1..136: note = tr|A0A2N9N4H2|A0A2N9N4H2_9BACT NADPH-dependent 7-cyano-7-deazaguanine reductase OS=Candidatus Sulfopaludibacter sp. SbA3 OX=2043164 GN=queF PE=3 SV=1
MKRAYTDEHAAAGVHAPLPEIETWPNQYADYEIEIVMPEFTSVCPKTALPDFGKIVLRYVPDQLCLELKSYKMYLLAYRDLGIFQENVVNRVLRDIVKAANPISATVVGDFSARGGLTTLVTASFQRAKRTPRGKR

SEQ ID NO: 45140 - protein, 134 aa, unidentified
  source 1..134: note = Sulfotelmatobacter sp.
  REGION 1..134: note = tr|A0A2N9N9N7|A0A2N9N9N7_9BACT NADPH-dependent 7-cyano-7-deazaguanine reductase OS=Candidatus Sulfotelmatobacter sp. SbA7 OX=2043160 GN=queF PE=3 SV=1
MPKPRRYTDEHASAGLDHNFPEIETWPNQFPAYEIVVDDPEFTSVCPKTGLPDFGNIVIRYMPDRRCLELKSLKEYLQAYRNLGIFQENIVNQVLEDVVRCAKPVWAEVKGEFRPRGGISTVVIARWPRKRGQR

SEQ ID NO: 45141 - protein, 154 aa, unidentified
  source 1..154: note = Sulfotelmatobacter kueseliae
  REGION 1..154: note = tr|A0A2U3L2C5|A0A2U3L2C5_9BACT NADPH-dependent 7-cyano-7-deazaguanine reductase OS=Candidatus Sulfotelmatobacter kueseliae OX=2042962 GN=queF PE=3 SV=1
MVPVWMRTAGFGGMGATRYNSGMAKSPRYTPQHAAAGLDAKFPEIETWPNQFPGYEIVVDDPEFTSVCPKTGLPDFGVLTIRYMPDQHCLELKSLKEYLHAYRNLGIFQENVVNRVLEDVVKWAKPVWAEVKGEFRPRGGISTTIVAKWPRPKS

SEQ ID NO: 45142 - protein, 134 aa, unidentified
  source 1..134: note = Sulfotelmatomonas gaucii
  REGION 1..134: note = tr|A0A2N9LSV8|A0A2N9LSV8_9BACT NADPH-dependent 7-cyano-7-deazaguanine reductase OS=Candidatus Sulfotelmatomonas gaucii OX=2043161 GN=queF PE=3 SV=1
MGMASTRRYTAKHAGAGRDFAFPAIETWENQFPGYEIEIDDPELTSVCPKTGLPDFGKLTIRYMPRKHCLELKSLKEYLFSYRNLGIFQENIVNQVLEDVVKACRPVWAVVRGEFRPRGGIGTTIEARWPRPKS

SEQ ID NO: 45143 - protein, 129 aa, Sulfuricurvum sp.
  REGION 1..129: note = tr|K7SXU8|K7SXU8_9HELI NADPH-dependent 7-cyano-7-deazaguanine reductase OS=Candidatus Sulfuricurvum sp. RIFRC-1 OX=1249480 GN=queF PE=3 SV=1
MKYGEQIVENFDIEKDFEIWPNQHERDYVIKVTLPEFTCLCPRSGYPDFATIYVEYTPDKWVAELKAIKLYINSFRNRHISHENSANEIYSTFESKIAPKRLKVVADYFPRGNVHTVVEIDSEKMERSR

SEQ ID NO: 45144 - protein, 131 aa, unidentified
  source 1..131: note = Synechococcus spongiarum
  REGION 1..131: note = tr|A0A1T1CNS8|A0A1T1CNS8_9SYNE NADPH-dependent 7-cyano-7-deazaguanine reductase OS=Candidatus Synechococcus spongiarum LMB bulk15M OX=1943582 GN=queF; PE = 3 SV=1
MTERQTTTPRYGERAIAAAELICFDNPNPGRPYHIAIELPDFTCKCPFSGYPDFAVLRLRYQPGPKVLELKALKLYVNSWRDLCISHEEVANRILDDCVAACSPRWMELVADFSPRGNVHTVITVHHGQPR

SEQ ID NO: 45145 - protein, 131 aa, unidentified
  source 1..131: note = Synechococcus spongiarum
  REGION 1..131: note = tr|A0A171DGF6|A0A171DGF6_9SYNE NADPH-dependent 7-cyano-7-deazaguanine reductase OS=Candidatus Synechococcus spongiarum OX=431041 GN=queF PE=3 SV=1
MTERQTTTPRYGERAIAAAELICFDNPNPGRPYHVAIELPDFTCKCPFSGYPDFAVLRLCYQPGPKVLELKALKLYVNSWRDHCISHEEVANRILDDCVAACSPRWMELVADFSPRGNVHTMITVHHGQRQ

SEQ ID NO: 45146 - protein, 278 aa, unidentified
  source 1..278: note = Tachikawaea gelatinosa
  REGION 1..278: note = tr|A0A090AR70|A0A090AR70_9ENTR NADPH-dependent 7-cyano-7-deazaguanine reductase OS=Candidatus Tachikawaea gelatinosa OX=1410383 GN=queF PE=3 SV=1
MNKNFIINLKRKMLKNNIYKNQYSPELLQKISRKKNRILLKSNNSFSYGEDIWNLYEISWLQKNGFPQIAIGEIIVPFDTEYFIESKSLKLYLNSLNQTFFDNESDVSKVIQSDLTHCILHDIKVTLFPISYFSSKKINFFEGECLDDYNINIKNFEYNTNDLLNATEPVKIKNKTLFTNLFKANCPITNQPDWGSVQIIYSGNRIKKKNIIKYLFSFRKHREYHEQCAEIIFDDIKHFCKPNELFIYLRFVRRGGIDINIWRGTRSFAPINSRLARQ

SEQ ID NO: 45147 - protein, 132 aa, unidentified
  source 1..132: note = Tectomicrobia bacterium
  REGION 1..132: note = tr|A0A1F7T779|A0A1F7T779_9BACT NADPH-dependent 7-cyano-7-deazaguanine reductase OS=Candidatus Tectomicrobia bacterium RIFCSPLOWO2_12_FULL_69_37; OX = 1802343 GN=queF PE =3 SV=1
MAGEKKYGARMIAGAKLEAVPNPSRERDYVIDFTIPEFTCLCPISNFPDFAAIRIRYVPGETIVELKSLKLYINRFRDQELFHEQAVNRILNDLVAACSPKWAWIEGDFNVRGNIKTRVRAAHGARPPGVPD

SEQ ID NO: 45148 - protein, 132 aa, unidentified; identical to SEQ ID NO: 45147
  source 1..132: note = Tectomicrobia bacterium
  REGION 1..132: note = tr|A0A1F7T9J1|A0A1F7T9J1_9BACT NADPH-dependent 7-cyano-7-deazaguanine reductase OS=Candidatus Tectomicrobia bacterium RIFCSPLOWO2_02_FULL_70_19; OX = 1802342 GN=queF PE =3 SV=1

SEQ ID NO: 45149 - protein, 129 aa, unidentified
  source 1..129: note = Tenderia electrophaga
  REGION 1..129: note = tr|A0A0S2TEE1|A0A0S2TEE1_9GAMM NADPH-dependent 7-cyano-7-deazaguanine reductase OS=Candidatus Tenderia electrophaga OX=1748243 GN=queF PE=3 SV=1
MSTQPTKELETFANPMPQRDYTIRIDVPEFTCLCPKTGQPDFATFKIEYVPEQKCVELKALKLYMWSFRDAGAFHEKVTNDILADLVAATAPRFMRITGVFNVRGGIYTTVIAEHRAPNWTPPTPVSLP

SEQ ID NO: 45150 - protein, 155 aa, unidentified
  source 1..155: note = Terasakiella magnetica
  REGION 1..155: note = tr|A0A1C3RLY4|A0A1C3RLY4_9RHIZ NADPH-dependent 7-cyano-7-deazaguanine reductase OS=Candidatus Terasakiella magnetica OX=1867952 GN=queF PE=3 SV=1
MSDQTIYANLEQLGSTTHSPTHPDEANLEAVKNPHPGTDYLVRFTCPEFTSLCPVTGQPDFAHIVIDYVPEDLLVESKSLKVFLTSFRNHGDFHEACTVGIAKRLVELLKPKWLRIGGYWYPRGGIPIDVFWQTGEAPKAVWIPDQDVPGYRGRG

SEQ ID NO: 45151 - protein, 133 aa, unidentified
  source 1..133: note = Termititenax aidoneus
  REGION 1..133: note = tr|A0A388T876|A0A388T876_9BACT NADPH-dependent 7-cyano-7-deazaguanine reductase OS=Candidatus Termititenax aidoneus OX=2218524 GN=queF PE=3 SV=1
MVKAEGLKLPFETPDKIAPETLEVFPYTLPELKVGRIPKQLITYTTKEFSAVCPFSGLPDIATVTIEYVPDKKVLELKSLKYYFLSYRNVGIYQEHATQKIFADLQKALCPQKLKVTTLYNTRGGLDTTCVLE

SEQ ID NO: 45152 - protein, 134 aa, unidentified
  source 1..134: note = Termititenax persephonae
  REGION 1..134: note = tr|A0A388TFC8|A0A388TFC8_9BACT NADPH-dependent 7-cyano-7-deazaguanine reductase OS=Candidatus Termititenax persephonae OX=2218525 GN=queF PE=3 SV=1
MVRADGEKLPFAKPDSIRPELLETFPYALPELAIGQTPNQRITCTTPEFSAVCPFSGLPDIATVTIEYTPNQKIIELKSLKYYLLSYRQVGIYQEHATQKIFADLQKVLRAKQLKVTTSYNTRGGIDTTCVIEK

SEQ ID NO: 45153 - protein, 131 aa, unidentified
  source 1..131: note = Thermochlorobacter aerophilum
  REGION 1..131: note = tr|A0A395LZT5|A0A395LZT5_9BACT NADPH-dependent 7-cyano-7-deazaguanine reductase OS=Candidatus Thermochlorobacter aerophilum OX=1868324 GN=queF PE=3 SV=1
MKPELLETFENKFPDRDYVIEIVNPEFTSVCPRTGLPDFGTVTIRYVPDKVCVELKSLKYYFLEYRNAGIFYENVTNTILDHLQQVLKPREITVITEWRARGGITEKVTAEYKAKPQRTRTGFVLEERAQS

SEQ ID NO: 45154 - protein, 128 aa, unidentified
  source 1..128: note = Thermochlorobacteriaceae bacterium
  REGION 1..128: note = tr|A0A081SIQ4|A0A081SIQ4_9BACT NADPH-dependent 7-cyano-7-deazaguanine reductase OS=Candidatus Thermochlorobacteriaceae bacterium GBChlB OX=1519464; GN = queF PE=3 SV=1
MKPELLEVFENQFPNRDYTIEIVNPEFTSVCPKTGLPDFGTVTMRYIPDKVCVELKSLKYYFLEFRNAGIFYENVTNTILDHLIDKLKPREIVVKSEWKARGGITETVTAEYKGKSQKSRIGFASAEQ

SEQ ID NO: 45155 - protein, 133 aa, unidentified
  source 1..133: note = Thermofonsia Clade
  REGION 1..133: note = tr|A0A2M8QEB0|A0A2M8QEB0_9CHLR Uncharacterized protein OS=Candidatus Thermofonsia Clade 3 bacterium; OX = 2364212 GN=CUN48_05205 PE=4 SV=1
MLRCYDPSALSRCDAMIQADIKTIPNAKSLRTYTVTLTYPAFRCRYEMEPEKTNFAVMTITYAPNEVIFDFPSFMAYLRSFEDTPISLESAANRVLDDMFERLRPIWARVHVRTEREHGVVIEIAAEHGQPVR

SEQ ID NO: 45156 - protein, 131 aa, unidentified
  source 1..131: note = Thermokryptus mobilis
  REGION 1..131: note = tr|A0A0S4N7E2|A0A0S4N7E2_9BACT NADPH-dependent 7-cyano-7-deazaguanine reductase OS=Candidatus Thermokryptus mobilis OX=1643428 GN=queF PE=3 SV=1
MEDRKLKYGEEAILNAQLETWENPYPDRDYKIEITFPEFTCLCPRSGYPDFATIRITYIPDKYIVELRSLKLYLNKYRSEYISHEAATNKIYDDLEKLLKPRFLEVVGDWNPRGNVKTIITVSSKDKETVK

SEQ ID NO: 45157 - protein, 129 aa, unidentified
  source 1..129: note = Thiodiazotropha endoloripes
  REGION 1..129: note = tr|A0A1E2USV9|A0A1E2USV9_9GAMM NADPH-dependent 7-cyano-7-deazaguanine reductase OS=Candidatus Thiodiazotropha endoloripes OX=1818881 GN=queF PE=3 SV=1
MPSEPSKDLETFQNPQPERDYTIRINIPEFTCLCPKTGQPDFAEMTLEYVPEKLCVELKALKMYIWSFRDQGAFHEAVTNEILADLVAATQPRYMRLTAEFNVRGGIYTTVVADHRAEDWQPPVPVTLP

SEQ ID NO: 45158 - protein, 129 aa, unidentified
  source 1..129: note = Thiodictyon syntrophicum
  REGION 1..129: note = tr|A0A2K8U1Z0|A0A2K8U1Z0_9GAMM NADPH-dependent 7-cyano-7-deazaguanine reductase OS=Candidatus Thiodictyon syntrophicum OX=1166950 GN=queF PE=3 SV=1
MPSAPSRSLETFDNPQPGRDYTIRIRVPEFTCLCPKTGQPDFAELTLEYIPDQRCVELKSLKLYVWSYRDEGAFHEAVTNRILDDLVAATGPRFMRLTADFNLRGGIDTTVIAEHRAPGWSAPSLVQLP

SEQ ID NO: 45159 - protein, 78 aa, unidentified
  source 1..78: note = Thioglobus sp.
  REGION 1..78: note = tr|A0A432TVH6|A0A432TVH6_9GAMM NADPH-dependent 7-cyano-7-deazaguanine reductase (Fragment) OS=Candidatus Thioglobus sp. OX=2026721 GN=DSZ17_05430 PE=3 SV=1
MPSKPSKELEIFDNPNADRDYVIRIDMPEFTCLCPKTGQPDFATLHLEYIADKACVELKSLKMYIWSFRDEGTFHEAV

SEQ ID NO: 45160 - protein, 131 aa, unidentified
  source 1..131: note = Thioglobus sp.
  REGION 1..131: note = tr|A0A432TSA9|A0A432TSA9_9GAMM NADPH-dependent 7-cyano-7-deazaguanine reductase OS=Candidatus Thioglobus sp. OX=2026721 GN=queF PE=3 SV=1
MPSKPSKELEIFDNPNADRDYVIRIDMPEFTCLCPKTGQPDFATLHLEYIADKACVELKSLKMYIWSFRDEGTFHEAVTNQILDDLVAATNPRFMRLKSIFNVRGGVYTEVITEYQHPGWTQQPVVNLQHL

SEQ ID NO: 45161 - protein, 129 aa, unidentified
  source 1..129: note = Thiomargarita nelsonii
  REGION 1..129: note = tr|A0A0A6P6Y3|A0A0A6P6Y3_9GAMM NADPH-dependent 7-cyano-7-deazaguanine reductase OS=Candidatus Thiomargarita nelsonii OX=1003181 GN=queF PE=3 SV=1
MPSQPSKKFEIFDNPNPERDYTIHIRMPEFTCLCPKTGQPDFATLFLDYVPDKLCIELKSLKNYIWSYRNEGAFHEAVTNQILNDLVEACMPRFMRLRAEFNVRGGIYTIVTCEHFAPGWTPPMAVHLP

SEQ ID NO: 45162 - protein, 129 aa, unidentified
  source 1..129: note = Thiomargarita nelsonii
  REGION 1..129: note = tr|A0A0A6P2D9|A0A0A6P2D9_9GAMM NADPH-dependent 7-cyano-7-deazaguanine reductase OS=Candidatus Thiomargarita nelsonii OX=1003181 GN=queF PE=3 SV=1
MPSQASKRFEIFDNPNSERDYTIHIRIPEFTCLCPKTGQPDFATLFLDYVPDKLCIELKSLKNYIWSYRNEGAFHEAVTNQILNDLVQACMPRFMRLRAEFNVRGGIYTIVTCEHFAPGWTPPRPVHLP

SEQ ID NO: 45163 - protein, 154 aa, unidentified
  source 1..154: note = Tokpelaia hoelldoblerii
  REGION 1..154: note = tr|A0A1U9JUV7|A0A1U9JUV7_9RHIZ NADPH-dependent 7-cyano-7-deazaguanine reductase OS=Candidatus Tokpelaia hoelldoblerii OX=1902579 GN=queF PE=3 SV=1
MTDTIYSNLTQLGGKADLPASPEQAILEKVPNPQSGTLYAVRFAAPEFTSLCPITAQPDFAHLVIDYVPDSWLVESKSLKLYLGSFRNHGAFHEDCTVSIGRKLAELLSPHWLRIGGYWYPRGGIPIDVFWQTGTAPEGVWIPDQGVPPYRGRG

SEQ ID NO: 45164 - protein, 285 aa, unidentified
  source 1..285: note = Candidimonas bauzanensis
  REGION 1..285: note = tr|A0A1M5N7F0|A0A1M5N7F0_9BURK NADPH-dependent 7-cyano-7-deazaguanine reductase OS=Candidimonas bauzanensis OX=658167 GN=queF PE=3 SV=1
MDGRCPSHSFAMPDPILARAPLGQDVSYPDSYDPALLFPIDRAANREKLRIPHPWHGDDIWNAYEMSWLTPKGKPVAGVARFTFPADSPRLVESKSFKLYLNSLNEERFEHSGLVRACLARDLAEAAGAPVEVEIDTHIGQSTQLCRPMEGIRIDDADIDVSAYRPSAGLLRCQPDAALVSETLMSDLLKSNCPVTGQPDWGSVQVRYTGPQIDRAALLEYIVSLRRHNEFHEHCVEQMYCDIWQACQPESLLVYARYTRRGGLDINPWRSSRPASVSQVRTVRQ

SEQ ID NO: 45165 - protein, 285 aa, Candidimonas nitroreducens
  REGION 1..285: note = tr|A0A225N3Z7|A0A225N3Z7_9BURK NADPH-dependent 7-cyano-7-deazaguanine reductase OS=Candidimonas nitroreducens OX=683354 GN=queF PE=3 SV=1
MTDIDTKLTHAPLGHEVAYPRSYDPALLFPIERRASRASLPQPRPGWHGADIWNAYEISWLGPRGKPLAAAASFVFPQDSTHLIESKSFKLYLNSYNESRHESAAQVCTLMQRDLQQACGAPVEVKIYKLDGPDGADRSDGPCAPPRPLQGLNIDGLDVDIARYTPAPQLLRLAADAARVEETLVSDLLKTNCPVTGQPDWGSVQIRYAGPRIDRGALLAYIVSLRQHNEFHEHCVERMYCDIWQACRPEALFVYARYTRRGGLDINPWRASHPAQVANVRTVRQ

SEQ ID NO: 45166 - protein, 274 aa, Candidimonas sp.
  REGION 1..274: note = tr|A0A522Q202|A0A522Q202_9BURK NADPH-dependent 7-cyano-7-deazaguanine reductase OS=Candidimonas sp.; OX = 1912597 GN=queF PE=3 SV=1
MSKSGLRGAPLGHDVAYPDHYDPDLLFPIARQTNRATLAPLPTWTGADIWTAYEVSWLNSRGKPIVAMAQLLFPESSPCLIESKSLKLYLNSLTETRFDEEEAVRALIARDLSLAAGAPVAIALSRLDRQAPITLSPMSGINIDGLDIDVKHYRPAPNLLRCEPGGTMVDETLTSDLLKSNCPVTGQPDWGSVQIRYRGPRIDRRSLLEYIVSLRTHREFHEHCVEKMYCDLWRACQPAWLLVYARYTRRGGLDINPWRASSATEVSQGRTPRQ

SEQ ID NO: 45167 - protein, 276 aa, Candidimonas sp.
  REGION 1..276: note = tr|A0A522PQ71|A0A522PQ71_9BURK NADPH-dependent 7-cyano-7-deazaguanine reductase OS=Candidimonas sp.; OX = 1912597 GN=queF PE=3 SV=1
MTDSILAKAPLGHDAPYPTAYDPTVLFPIARQGNRQTLAIQPAPAWHGADIWNAYELSWLNLKGKPVVATGCFVFSQASPCIIESKSFKLYLNSFNEGRYENLASVQQRMQHDLSDAAGAPVEVRLNPMATDSKENYRPLAGINIDGIDVDIDRYTPAPELLRCMPQAAAASEVLVSDLLKSNCPVTGQPDWGSLQVSYSGPQMDRAALLKYIISLRRHNEFHEHCVERMYCDIWQACRPSALRVYARYTRRGGLDINPWRASVAAHVDNRRTVRQ

SEQ ID NO: 45168 - protein, 289 aa, unidentified
  source 1..289: note = Carboxylicivirga sp.
  REGION 1..289: note = tr|A0A553GN16|A0A553GN16_9BACT NADPH-dependent 7-cyano-7-deazaguanine reductase QueF OS=Carboxylicivirga sp. M1479 OX=2594476 GN=FNN09_08790 PE=4 SV=1
MLEDKFLGKQVDYPQSYAPEMLVAVPRYLNREKYHLSNDQLPFIGFDSWHAYELSFLTKKGLPVTGLLKIVYPATNPSIVESKSLKLYLNSFNMHRFGTSAKEGLDLVLSTIKKDLDKLLETDVNLGFFNAENDDAQFDFDNYTILEQSKNVDEIEFVHFNENPQLLTPSNKKGELKVASHLLRSNCKITNQPDWGSVYIHINGDALPDLDGLLQYIVSIRNENHFHEEICEMIYKRLWDTYSPNELAVSCIYTRRGGIDICPVRVSHQHLLPSKLISSDILSSKLLRQ

SEQ ID NO: 45169 - protein, 146 aa, unidentified
  source 1..146: note = Carboxylicivirga sp.
  REGION 1..146: note = tr|A0A553G884|A0A553G884_9BACT NADPH-dependent 7-cyano-7-deazaguanine reductase OS=Carboxylicivirga sp. M1479 OX=2594476 GN=queF PE=3 SV=1
MEQKVLTYKNIDTTILKSLPNPSGEAYEIKIKIPEFTFLGVKNQPDFADVFITFYPKKKIIELKSLKEYVQHLRNITVSYERLINVFYDHMVEAYDPERIRVTMICNPRGGISSKLTVDSDWKVRGGNEKFSDWKNNLEDTWQVTM

SEQ ID NO: 45170 - protein, 153 aa, Cardiobacterium hominis
  REGION 1..153: note = tr|C8N6P7|C8N6P7_CARH6 NADPH-dependent 7-cyano-7-deazaguanine reductase OS=Cardiobacterium hominis (strain ATCC 15826 / DSM 8339 / NCTC 10426 / 6573); OX = 638300 GN=qu eF PE=3 SV=1
MTKPEAPAGISLLGNHNAAVPHTYAPEILEAFPNKHPDNDYLVSLVCPEFTSICPITGQPDFATIRIAYIPDGKLVESKSLKLYLFSFRNHGDFHEDCVNIIMKDLIRLMQPKYIEVFGEFTPRGGIAIHPLAVYGRPGTVYETRAADRLHHR

SEQ ID NO: 45171 - protein, 153 aa, Cardiobacterium hominis; identical to SEQ ID NO: 45170
  REGION 1..153: note = tr|A0A1C3H241|A0A1C3H241_9GAMM NADPH-dependent 7-cyano-7-deazaguanine reductase OS=Cardiobacterium hominis OX=2718 GN=queF PE=3 SV=1

SEQ ID NO: 45172 - protein, 151 aa, Cardiobacterium valvarum
  REGION 1..151: note = tr|A0A381EE45|A0A381EE45_9GAMM NADPH-dependent 7-cyano-7-deazaguanine reductase OS=Cardiobacterium valvarum OX=194702 GN=queF PE=3 SV=1
MTNLTLLGDKNAAIPSNYAPDILEAFPNKHPGNDYLVTLHCPEFTSLCPITGQPDFAAIHIAYIPDALLVESKSLKLYLFSFRNHGDFHEDCVNIIMKDLIRLMQPKYIEVYGAYTPRGGIAIHPYANYGQPGTRYAEHAAARLLNRPLTA

SEQ ID NO: 45173 - protein, 145 aa, Cardiobacterium valvarum
  REGION 1..145: note = tr|G9ZGE4|G9ZGE4_9GAMM NADPH-dependent 7-cyano-7-deazaguanine reductase OS=Cardiobacterium valvarum F0432 OX=797473 GN=queF PE=3 SV=1
MTTLTLLGDKNAAIPSGYAPDILEAFPNKHPGNDYLVTLHCPEFTSLCPITGQPDFAAIHIAYIPDALLVESKSLKLYLFSFRNHGDFHEDCVNIIMKDLIRLMQPKYIEVYGAYTPRGGIAIHPYANYGIGPAPATPNTPLPAF

SEQ ID NO: 45174 - protein, 166 aa, Caryophanon tenue
  REGION 1..166: note = tr|A0A1C0YCZ3|A0A1C0YCZ3_9BACL NADPH-dependent 7-cyano-7-deazaguanine reductase OS=Caryophanon tenue; OX = 33978 GN=queF PE=3 SV=1
MSTRKQTEGLQDLTLLGNQNVQYAFSYAPEVLEAVPNKHTGRDYFVKFNCPEFTSLCPITNQPDFATMYISYVPDEQIVESKSLKLYLFSFRNHGDFHEDCVNIIMDDLIKLLNPRYIEVWGKFTPRGGISIDPWCNYGRPGTKYEEIAHYRLMNHDMNPETIDNR

SEQ ID NO: 45175 - protein, 276 aa, Castellaniella defragrans
  REGION 1..276: note = tr|W8X3R2|W8X3R2_CASDE NADPH-dependent 7-cyano-7-deazaguanine reductase OS=Castellaniella defragrans 65Phen OX=1437824 GN=queF PE=3 SV=1
MNPDSLSASPLGRSTPGSAHYDPALLFPIARADTRAGLDLPQATHGADIWNAYELSWLNAKGKPVVAIGRFTVPMDSPSLIESKSLKLYLNSYNEERFEYADIVRQRLHTDLSRACGKPVHVEILSVRPAFELSCAPLRGTCIDDQDLDFEAGRTPRPDSLVLSEPAPFVREVLVSELLKSNCPVTGQPDWASLQIRYAGPRIDHAGLLRYIVSLRQHQEFHELCVEKIYGEIMRRCAPEELLVYARYTRRGGLDINPWRASHQPTDIGQTRTLRQ

SEQ ID NO: 45176 - protein, 276 aa, Castellaniella sp.
  REGION 1..276: note = tr|A0A522TJU9|A0A522TJU9_9BURK NADPH-dependent 7-cyano-7-deazaguanine reductase OS=Castellaniella sp.; OX = 1955812 GN=queF PE=3 SV=1
MDRSSLADSPLGHSTHGSDHYDPTLLFPIERALTRASLGPLQATHGADIWNAYELSWLDKNGKPVVAMGRFTVPMDTPRLIESKSLKLYLNSFNEERFEYADIVRQRLYTDLSRACGKPVHIEILSVRPAFELSCAPLQGTCIDDQDVACEPATAPHPEFLKQTQPAPFMRETLVSELLKSNCPVTGQPDWASLQIRYAGPRIDRAGLLQYIVSLRRHQEFHELCVEKIYGEILQRCAPEQLMVYARYTRRGGLDINPWRANFDPGDVGQTRTLRQ

SEQ ID NO: 45177 - protein, 281 aa, Catenovulum agarivorans
  REGION 1..281: note = tr|W7QSC9|W7QSC9_9ALTE NADPH-dependent 7-cyano-7-deazaguanine reductase OS=Catenovulum agarivorans DS-2 OX=1328313 GN=queF PE=3 SV=1
MSEQNTSVLPELKLGKATEYIDRYDPTQLQAVPRKLMRDKLPKNTQAFLGVDIWTGYEISWLLPSGKPVVYIGEFIFSANSSNIVESKSFKLYLNSFNQSKFDSIEDVVELMQNDLTQCCGAPVEVKLYPLGQFAKRRVTYFAGQCIDNIDVEITRYDYAPNQLQLADSRQIVEETLVSHLLKSNCLVTGQPDWASIEIYYQGQAFDHASVLKYLIGFRNHNEFHEHCVERIFRDLETQLRPDKLSVYARYTRRGGLDINPLRVSHMSLLKSKPEHRLVRQ

SEQ ID NO: 45178 - protein, 282 aa, unidentified
  source 1..282: note = Catenovulum maritimum
  REGION 1..282: note = tr|A0A0J8GSH5|A0A0J8GSH5_9ALTE NADPH-dependent 7-cyano-7-deazaguanine reductase OS=Catenovulum maritimum; OX = 1513271 GN=queF PE=3 SV=1
MSDINSSNLLKELKLGKETTYVSHYDPSQLEAVPRALTRESLPKLEQEFTGYDLWTGYEISWLDLNGKPIVKIGEFRFSANSDNLVESKSFKLYLNSFNQSQFSSVEEVVTKMTTDLAKTSGLAVEVKLFDLAEYTEFGLAKLVSTNLDKQAIKITEYDYNPDLLKLASESQEVTESICSHLLKSNCLVTGQPDWGSLVIEYTGQKICHEGLLKYIISFRGHNEFHEHCVERIYSDIQSKFNPKALLVYARYTRRGGLDINPLRASSPELINQVNNLRLVRQ

SEQ ID NO: 45179 - protein, 284 aa, Catenovulum sp.
  REGION 1..284: note = tr|A0A2S0VM01|A0A2S0VM01_9ALTE NADPH-dependent 7-cyano-7-deazaguanine reductase OS=Catenovulum sp. CCB-QB4 OX=2172099 GN=queF PE=3 SV=1
MPKNNTSHLLDQLTLGKNTEYKSSYDPSLLDTVPRSLTRQTLGIDEQHLPFVGVDIWTGYEVSWLNNKGKPQVAIAEFNFQFDSDVLVESKSFKLYLNSFNQSRFENWQQVQSVMTQDLTQASGKPVQVSLFSLDDYTNKGLCRPAQNHSVNLDQLDIDIDIYDYEPNLLKPLDKPLNVSETLVSHLLKSNCLVTGQPDWASVVIEYSGQALDHESVLKYLISFRGHNEFHEHCVERIYVDINNLIKPERLMVYARYTRRGGLDINPLRSSTKINAPFERLVRQ

SEQ ID NO: 45180 - protein, 151 aa, unidentified
  source 1..151: note = Caulobacter flavus
  REGION 1..151: note = tr|A0A2N5CZK7|A0A2N5CZK7_9CAUL NADPH-dependent 7-cyano-7-deazaguanine reductase OS=Caulobacter flavus; OX = 1679497 GN=queF PE=3 SV=1
MTELSVTQLGQTVAAPESPEEAVLEAVPNPQSDVLYLARFVAPEFTSLCPVTGQPDFAHLVIDYAPGDWLIESKSLKLYLTSFRNHGSFHEDCTVKVARKIVEVAKPRWLRIGGYWYPRGGIPIDVFWQTGPAPEGLWVPDQGVAPYRGRG

SEQ ID NO: 45181 - protein, 151 aa, Caulobacter henricii
  REGION 1..151: note = tr|A0A0P0NX70|A0A0P0NX70_9CAUL NADPH-dependent 7-cyano-7-deazaguanine reductase OS=Caulobacter henricii; OX = 69395 GN=queF PE=3 SV=1
MTDLNVTQLGQMVDAPVSPDAAILERVPNPQSDVLYLARFVAPEFTSLCPVTSQPDFAHLVIDYAPGDWLIESKSLKLYLTSFRNHGSFHEDCTVKVARKIVEIAEPRWLRIGGYWYPRGGIPIDVFWQTGPAPEGLWVPDQGVAPYRGRG

SEQ ID NO: 45182 - protein, 151 aa, Caulobacter mirabilis
  REGION 1..151: note = tr|A0A2D2B3Q5|A0A2D2B3Q5_9CAUL NADPH-dependent 7-cyano-7-deazaguanine reductase OS=Caulobacter mirabilis; OX = 69666 GN=queF PE=3 SV=1
MTTEHLTQLGRAVEAPDRPEDAVLERVPNPQNDTLYLARFVAPEFTSVCPVTGQPDFAHLVIDYAPGDWLIESKSLKLYLTSFRNHGAFHEDCTVAIGRKIFDTAQPKWLRIGGYWYPRGGIPIDVFWQSGPAPEGLWLPDQGVPPYRGRG

SEQ ID NO: 45183 - protein, 151 aa, unidentified
  source 1..151: note = Caulobacter radicis
  REGION 1..151: note = tr|A0A2T9K4H5|A0A2T9K4H5_9CAUL NADPH-dependent 7-cyano-7-deazaguanine reductase OS=Caulobacter radicis; OX = 2172650 GN=queF PE=3 SV=1
MTELSVTQLGQTVAAPASPEEAVLEAVPNPQNDVLYLARFVAPEFTSLCPVTGQPDFAHLVIDYAPGDWLIESKSLKLYLTSFRNHGSFHEDCTVKVARKIVEVAKPRWLRIGGYWYPRGGIPIDVFWQTGPAPEGLWVPDQGVAPYRGRG

SEQ ID NO: 45184 - protein, 151 aa, unidentified
  source 1..151: note = Caulobacter rhizosphaerae
  REGION 1..151: note = tr|A0A561NXY3|A0A561NXY3_9CAUL NADPH-dependent 7-cyano-7-deazaguanine reductase OS=Caulobacter rhizosphaerae OX=2010972 GN=queF PE=3 SV=1
MTELHVTQLGQVVEPAASPDQAVLERVPNPQSDVTYLARFVAPEFTSLCPVTGQPDFAHLVIDYAPGDWLIESKSLKLYLTSFRNHGSFHEDCTVKIGRKIVEIAAPRWLRIGGYWYPRGGIPIDVFWQTGPAPEGLWVPDQGVAPYRGRG

SEQ ID NO: 45185 - protein, 151 aa, Caulobacter segnis
  REGION 1..151: note = tr|A0A2W5V4X4|A0A2W5V4X4_9CAUL NADPH-dependent 7-cyano-7-deazaguanine reductase OS=Caulobacter segnis; OX = 88688 GN=queF PE=3 SV=1
MTDLNVTQLGRVVDAPDSPEAAVLERVPNPQSDVLYLARFVAPEFTSLCPVTGQPDFAHLVIDYAPGDWLIESKSLKLYLTSFRNHGSFHEDCTVKVARKIVEIAEPRWLRIGGYWYPRGGIPIDVFWQTGPAPEGLWVPDQGVAPYRGRG

SEQ ID NO: 45186 - protein, 151 aa, Caulobacter segnis
  REGION 1..151: note = tr|D5VIH6|D5VIH6_CAUST NADPH-dependent 7-cyano-7-deazaguanine reductase OS=Caulobacter segnis (strain ATCC 21756 / DSM 7131 / JCM 7823 / NBRC 15250 / LMG 17158 / TK0 059) OX=509190 GN=queF PE=3 SV=1
MTDLNVTQLGRVVDAPDSPEAAVLERVPNPQSDVLYLARFVAPEFTSLCPVTGQPDFAHLVIDYAPGDWLIESKSLKLYLTSFRNHGSFHEDCTVKVARKIVEIAQPRWLRIGGYWYPRGGIPIDVFWQTGSAPEGLWVPDQGVAPYRGRG

SEQ ID NO: 45187 - protein, 151 aa, Caulobacter sp.
  REGION 1..151: note = tr|A0A0Q7W289|A0A0Q7W289_9CAUL NADPH-dependent 7-cyano-7-deazaguanine reductase OS=Caulobacter sp. Root1472 OX=1736470 GN=queF PE=3 SV=1
MTELHVTQLGQVVEPAASPDQAVLERVPNPQSDVTYLARFVAPEFTSLCPVTGQPDFAHLVIDYAPGDWLIESKSLKLYLTSFRNHGSFHEDCTVKIGRKIVEIAAPRWLRIGGYWYPRGGIPIDVFWQTGPAPEGLWVPDQGVAAYRGRG

SEQ ID NO: 45188 - protein, 151 aa, Caulobacter sp.
  REGION 1..151: note = sp|B0T8W6|QUEF_CAUSK NADPH-dependent 7-cyano-7-deazaguanine reductase OS=Caulobacter sp. (strain K31) OX=366602 GN=queF PE=3 SV=1
MTELHVTQLGQVVEPAASPDQAVLERVPNPQSDVTYLARFVAPEFTSLCPVTGQPDFAHLVIDYAPGDWLIESKSLKLYLTSFRSHGSFHEDCTVKIGRKIVEIAQPRWLRIGGYWYPRGGIPIDVFWQTGPAPEGLWVPDQGVAPYRGRG

SEQ ID NO: 45189 - protein, 151 aa, Caulobacter vibrioides
  REGION 1..151: note = tr|A0A0V2FFV5|A0A0V2FFV5_CAUVI NADPH-dependent 7-cyano-7-deazaguanine reductase OS=Caulobacter vibrioides; OX = 155892 GN=queF PE=3 SV=1
MTELSVTQLGQTVAAPENPEAAVLEAVPNPQSDVLYLARFVAPEFTSLCPVTGQPDFAHLVIDYAPGDWLIESKSLKLYLTSFRNHGSFHEDCTVKVARKIVEVAKPRWLRIGGYWYPRGGIPIDVFWQTGPAPEGLWVPDQGVAPYRGRG

SEQ ID NO: 45190 - protein, 151 aa, Caulobacter vibrioides
  REGION 1..151: note = sp|Q9A515|QUEF_CAUVC NADPH-dependent 7-cyano-7-deazaguanine reductase OS=Caulobacter vibrioides (strain ATCC 19089 / CB15) OX=190650 GN=queF PE=3 SV=1
MTDLNVTQLGRVVDAPESPEAAVLERVPNPQSDVLYLARFVAPEFTSLCPVTGQPDFAHLVIDYAPGDWLIESKSLKLYLTSFRNHGSFHEDCTVKVARKIVEIAQPRWLRIGGYWYPRGGIPIDVFWQTGPAPEGLWVPDQGVAPYRGRG

SEQ ID NO: 45191 - protein, 151 aa, unidentified; identical to SEQ ID NO: 45183
  source 1..151: note = Caulobacter zeae
  REGION 1..151: note = tr|A0A2N5DQ28|A0A2N5DQ28_9CAUL NADPH-dependent 7-cyano-7-deazaguanine reductase OS=Caulobacter zeae; OX = 2055137 GN=queF PE=3 SV=1

SEQ ID NO: 45192 - protein, 150 aa, unidentified
  source 1..150: note = Caulobacteraceae bacterium
  REGION 1..150: note = tr|A0A1B1ALQ2|A0A1B1ALQ2_9CAUL NADPH-dependent 7-cyano-7-deazaguanine reductase OS=Caulobacteraceae bacterium OTSz_A_272 OX=1759059 GN=queF PE=3 SV=1
MSEGLTQLGQAASIPTSPDQARLERAPNPHPGTLYLARFTAPEFTSICPVTGQPDFGVLVLDYAPQDWIAESKSLKLFLQSFRNHGAFHEDCTLHVAKRVIEAISPTWLRIGGYWNPRGGMPIDVFWQTGAPPEGLWLPDQGVATYRSRG

SEQ ID NO: 45193 - protein, 154 aa, unidentified
  source 1..154: note = Caulobacteraceae bacterium
  REGION 1..154: note = tr|A0A4Q3SG02|A0A4Q3SG02_9CAUL NADPH-dependent 7-cyano-7-deazaguanine reductase OS=Caulobacteraceae bacterium OX=1978230 GN=queF PE=3 SV=1
MTTTDVSGLTQLGSSTASPQNPDEAVLEKVPTANGAMDYVVRFVCPEFTSLCPMTGQPDFAHIVIDYVPDAWLVESKSLKLFMHSFRNHGAFHEDCTMEIAKRLTSLLSPKWFRIGAYWYPRGGIPIDVFWQSGKAPEHVWVPDQGVAPYRGRG

SEQ ID NO: 45194 - protein, 153 aa, unidentified
  source 1..153: note = Caulobacterales bacterium
  REGION 1..153: note = tr|A0A1F8I1R3|A0A1F8I1R3_9PROT NADPH-dependent 7-cyano-7-deazaguanine reductase OS=Caulobacterales bacterium RIFCSPHIGHO2_01_FULL_70_19 OX=1797585 GN=queF; PE = 3 SV=1
MTTDTSGLHQLGQMTPAPTSPETAVLERVPNPHADTLYLARFTAPEFTSLCPVTGQPDFAHLVIDYAPGEWLVESKSLKLFLTSFRNHGAFHEDCTVAIGKRLVDLLHPKWLRIGGYWYPRGGIPIDVFWQTGPAPEGLWLPDQGVPTYRGRG

SEQ ID NO: 45195 - protein, 151 aa, unidentified
  source 1..151: note = Caulobacterales bacterium
  REGION 1..151: note = tr|A0A1Q3JFK4|A0A1Q3JFK4_9PROT NADPH-dependent 7-cyano-7-deazaguanine reductase OS=Caulobacterales bacterium 68-7 OX=1895737 GN=queF PE=3 SV=1
MSELPVTQLGRDVPWPTSPEEAVLERVPNPQADVLYLARFTAPEFTSLCPVTGQPDFAHLVIDYAPGDWLIESKSLKLYLGSFRNHGAFHEDCTVAIGRKVVEIAEPRWLRIGGYWYPRGGIPIDVFWQSGAVPDGLWVPDQGVASYRGRG

SEQ ID NO: 45196 - protein, 279 aa, unidentified
  source 1..279: note = Caviibacterium pharyngocola
  REGION 1..279: note = tr|A0A2M8RUW6|A0A2M8RUW6_9PAST NADPH-dependent 7-cyano-7-deazaguanine reductase OS=Caviibacterium pharyngocola OX=28159 GN=queF PE=3 SV=1
MDYNDSSLQALKLGQQTKYLSNYDRTLLQPVPRRLNRDGLGISEKQPFTFGADIWTAYEISWLNAKGVPQVAIAEVEIDYRSENLIESKSFKLYLNSFNQTKFSSFQQVQTVLQQDLSDCAKGEVKVRLNSLSFYDQMPIATLTGECLDEQDIEIDNYDFNPQLLENCTQDQVADETLVSHLLKSNCLITQQPDWGSIQIHYAGKRIDREKLLRYLVSFRQHNEFHEQCVERIFCDLMRFARPEKLTVYARYTRRGGLDINPFRSNFEQVPSNHRLARQ

SEQ ID NO: 45197 - protein, 280 aa, Cedecea davisae
  REGION 1..280: note = tr|S3IMC6|S3IMC6_9ENTR NADPH-dependent 7-cyano-7-deazaguanine reductase OS=Cedecea davisae DSM 4568 OX=566551 GN=queF PE=3 SV=1
MSYENHQALSGLTLGKPTAYQDQYQPSLLQAVPRSLNRDPVGLHADSLPFTGGDIWTLYELSWLNNNGLPQVAVGHVQLDANSVNLVESKSFKLYLNSFNQTRFADWETVQETLKRDLSACAGGDVSVVLFRLHELEGQEISAFSGECIDQQNITIDSYEFDADYLEGAAKEEVVEETLVSHLLKSNCLITHQPDWGSVQIRYRGPKIDREKLLRYLVSFRHHNEFHEQCVERIFNDLQRYCQPQALSVYARYTRRGGLDINPWRTNTDFHPAFGRLVRQ

SEQ ID NO: 45198 - protein, 280 aa, Cedecea lapagei
  REGION 1..280: note = tr|A0A3S4KS19|A0A3S4KS19_9ENTR NADPH-dependent 7-cyano-7-deazaguanine reductase OS=Cedecea lapagei; OX = 158823 GN=queF PE=3 SV=1
MSYENHQALSGLTLGKPTAYQDQYQPSLLQAVPRSLNRDPLGLHADSLPFSGGDIWTLYELSWLNSKGLPQVAVGHVQLDANSVNLVESKSFKLYLNSFNQTRFADWETVQETLKRDLSACAEGEVSVVLFRLHELEGQEIAAFRGECIDEQDITIDSYEFNADYLQQAAGAEIVEETLVSHLLKSNCLITHQPDWGSVQIHYRGPKIDREKLLRYLVSFRHHNEFHEQCVERIFNDLQRFCQPQTLSVYARYTRRGGLDINPWRTNTDFHPAFGRLTRQ

SEQ ID NO: 45199 - protein, 280 aa, Cedecea lapagei
  REGION 1..280: note = tr|A0A2N0CSC7|A0A2N0CSC7_9ENTR NADPH-dependent 7-cyano-7-deazaguanine reductase OS=Cedecea lapagei; OX = 158823 GN=queF PE=3 SV=1
MSYENHQALSGLTLGKTTDYRDTYDATLLQGVPRSLNRDPLGLSADALPFVGGDIWTLYELSWLNARGLPQVAVGHVELDYASVNLVESKSFKLYLNSFNQTRFDSWEEVQRTLARDLSACAQGDVTVALYRLNELEGQPVAHFHGTCIDDQEIEIESYEFSTDYLQNAAGEKVVEETLVSHLLKSNCLITHQPDWGSVQIQYRGPKIDREKLLRYLVSFRHHNEFHEQCVERIFNDIQRFCQPEKLSVYARYTRRGGLDINPWRTNTDFVPATGRLVRQ

SEQ ID NO: 45200 - protein, 305 aa, Cedecea neteri
  REGION 1..305: note = tr|A0A2X2TJW2|A0A2X2TJW2_9ENTR NADPH-dependent 7-cyano-7-deazaguanine reductase OS=Cedecea neteri; OX = 158822 GN=queF_1 PE=3 SV=1
MSYENHQALSGLTLGKPTAYQDQYQPSLLQAVPRSLNRDPLGLHADSLPFSGGDIWTLYELSWLNGNGLPQVAVGHVQLDANSVNLVESKSFKLYLNSFNQTRFADWETVQETLKRDLSACAEGDVSVVLFRLHELEGQEIAAFAGECIDEQDITIDSYDFSADYLQQAAGDDIVEETLVSHLLKSNCLITHQPDWGSVQIRYRGPKIDREKLLRYLVSFRHHNEFHEQCVERIFNDLQRFCQPQTLSVYARYTRRAAWTLTRGGRIPISIPLLAACPVNKCEIAPSAKSESGLRVVKVNKPGLL

SEQ ID NO: 45201 - protein, 280 aa, Cedecea neteri
  REGION 1..280: note = tr|A0A089RI49|A0A089RI49_9ENTR NADPH-dependent 7-cyano-7-deazaguanine reductase OS=Cedecea neteri; OX = 158822 GN=queF PE=3 SV=1
MSYENHQALSGLTLGKPTAYQDQYQPSLLQAVPRSLNRDPLGLHADSLPFSGGDIWTLYELSWLNNNGLPQVAVGHVQLDANSVNLVESKSFKLYLNSFNQTRFADWETVQETLKRDLSACAEGDVSVVLFRLHELEGQEIAAFGGECIDEQDIAIDSYDFNADYLQQAAGDEIVEETLVSHLLKSNCLITHQPDWGSVQIRYRGPKIDREKLLRYLVSFRHHNEFHEQCVERIFNDLQRFCRPQTLSVYARYTRRGGLDINPWRTNTDFHPAFGRLTRQ

SEQ ID NO: 45202 - protein, 281 aa, Cedecea sp.
  REGION 1..281: note = tr|A0A1X7M732|A0A1X7M732_9ENTR NADPH-dependent 7-cyano-7-deazaguanine reductase OS=Cedecea sp. NFIX57; OX = 1566286 GN=queF PE=3 SV=1
MPDYDEDALSVLGSKIAHPQTYSPSILESLPRSLGRKQAGITGEGNLPFSGFDLWTAYEISWLNEKGKPIVAIGEFEIPATTPGLIESKSLKLYLNSFNQTKIRSHDAVAAILTKDLSQVAGGEVKVRLYPHFIGFNHTIMALPGINIDHEDIDVKDYSFSPEILKNAVTDDAITVSEMLTSNLLKSNCLVTNQPDWGSLIIKYEGKKINPKRLLHYIISFRNHNEFHEQCVERIFMDIKQYCRPQKLSVFARYTRRGGLDINPFRSDFESILPTTRLIRQ

SEQ ID NO: 45203 - protein, 280 aa, Cedecea sp.
  REGION 1..280: note = tr|A0A1X7KGZ7|A0A1X7KGZ7_9ENTR NADPH-dependent 7-cyano-7-deazaguanine reductase OS=Cedecea sp. NFIX57; OX = 1566286 GN=queF PE=3 SV=1
MSYENHQALSGLTLGKPTAYQDQYQPSLLQAVPRSLNRDPLGLHADSLPFSGGDIWTLYELSWLNSKGLPQVAVGHVQLDANSVNLVESKSFKLYLNSFNQTRFADWETVQATLKRDLSACAEGDVSVVLFRLHELEGQEIAAFSGECIDEQDITIDSYDFNADYLQEAAGEEIVEETLVSHLLKSNCLITHQPDWGSVQIRYRGPKIDREKLLRYLVSFRHHNEFHEQCVERIFNDLQRFCQPQSLSVYARYTRRGGLDINPWRTNTGFHPAFGRLTRQ

SEQ ID NO: 45204 - protein, 154 aa, Celeribacter baekdonensis
  REGION 1..154: note = tr|A0A1G7JP46|A0A1G7JP46_9RHOB NADPH-dependent 7-cyano-7-deazaguanine reductase OS=Celeribacter baekdonensis OX=875171 GN=queF PE=3 SV=1
MVTTDTSHLTQLGGATALPASPEEAVLERVPHTHAGERYVVRFTAPEFTSLCPMTGQPDFGHLMIDYIPGNWLVESKSLKLFLGSFRNHGAFHEDCSVYIGKRLADLLDPEWLRIGAYWYPRGGIPIDVFWATGPEPKDVWIPEQGVPPYRGRG

SEQ ID NO: 45205 - protein, 154 aa, Celeribacter baekdonensis
  REGION 1..154: note = tr|K2K195|K2K195_9RHOB NADPH-dependent 7-cyano-7-deazaguanine reductase OS=Celeribacter baekdonensis B30 OX=1208323 GN=queF PE=3 SV=1
MVTTDTSHLTQLGGATALPASPEEAVLERVPHTHAGERYVVRFTAPEFTSLCPMTGQPDFGHLMIDYIPGNWLVESKSLKLFLGSFRNHGAFHEDCSVYIGKRLAELLDPEWLRIGAYWYPRGGIPIDVFWATGPEPKDVWIPEQGVPPYRGRG

SEQ ID NO: 45206 - protein, 154 aa, unidentified
  source 1..154: note = Celeribacter ethanolicus
  REGION 1..154: note = tr|A0A291GGE2|A0A291GGE2_9RHOB NADPH-dependent 7-cyano-7-deazaguanine reductase OS=Celeribacter ethanolicus OX=1758178 GN=queF PE=3 SV=1
MPKTDTSGLTQLGGATALPTSPEEAVLERVPHTHEGERYVARFTAPEFTSLCPMTGQPDFGYLMIDYIPRKWLVESKSLKLFLGSFRNHGAFHEDCSVYIGKRLAELLDPEWLRIGAYWYPRGGIPIDVFWATGPEPRDIWIPEQGVPPYRGRG

SEQ ID NO: 45207 - protein, 154 aa, unidentified
  source 1..154: note = Celeribacter indicus
  REGION 1..154: note = tr|A0A0B5DZ86|A0A0B5DZ86_9RHOB NADPH-dependent 7-cyano-7-deazaguanine reductase OS=Celeribacter indicus; OX = 1208324 GN=queF PE=3 SV=1
MPKTDTSGLTQLGGAAALPASPEEAVLERVPHSHEGERYVARFTAPEFTSLCPMTGQPDFGHLMIDYIPRKWLVESKSLKLFLGSFRNHGAFHEDCSVYIGKRLAELLEPEWLRIGAYWYPRGGIPIDVFWATGPEPTDLWIPDQGVPPYRGRG

SEQ ID NO: 45208 - protein, 154 aa, unidentified
  source 1..154: note = Celeribacter manganoxidans
  REGION 1..154: note = tr|A0A291LXW0|A0A291LXW0_9RHOB NADPH-dependent 7-cyano-7-deazaguanine reductase OS=Celeribacter manganoxidans OX=1411902 GN=queF PE=3 SV=1
MSQDIYQGLTQLGGHTEQPASPEEAVLERVPNPQADVDYAVRFTAPEFTSLCPITGQPDFAHLVIDYVPGAWLVESKSLKLYLTSFRNHGAFHEDCSVSIARRLIDLLEPKWLRLGGYWYPRGGIPIDVFFQTGDIPAGVWVPDAGVPGYRGRG

SEQ ID NO: 45209 - protein, 154 aa, Celeribacter neptunius
  REGION 1..154: note = tr|A0A1I3VF50|A0A1I3VF50_9RHOB NADPH-dependent 7-cyano-7-deazaguanine reductase OS=Celeribacter neptunius; OX = 588602 GN=queF PE=3 SV=1
MVKTDTSGLTQLGGAAALPASPEEAVLERVPHTHEGERYVARFTAPEFTSLCPMTGQPDFGHLMIDYIPNKWLVESKSLKLFLGSFRNHGAFHEDCSVYIGKRLTEFLDPVWLRIGAYWYPRGGIPIDVFWASGPEPKDVWIPDQGVPPYRGRG

SEQ ID NO: 45210 - protein, 154 aa, unidentified
  source 1..154: note = Celeribacter persicus
  REGION 1..154: note = tr|A0A2T5HS76|A0A2T5HS76_9RHOB NADPH-dependent 7-cyano-7-deazaguanine reductase OS=Celeribacter persicus; OX = 1651082 GN=queF PE=3 SV=1
MPKTDTSGLTQLGGTMALPNSPEEAVLERVPHTHEGERYVARFTAPEFTSLCPMTGQPDFGYLMIDYIPRKWLVESKSLKLFLGSFRNHGAFHEDCSVYIGKRLAELLDPEWLRIGAYWYPRGGIPIDVFWATGPEPKDLWIPEQGVPPYRGRG

SEQ ID NO: 45211 - protein, 282 aa, Celerinatantimonas diazotrophica
  REGION 1..282: note = tr|A0A4V2PNJ5|A0A4V2PNJ5_9GAMM NADPH-dependent 7-cyano-7-deazaguanine reductase OS=Celerinatantimonas diazotrophica OX=412034 GN=queF PE=3 SV=1
MTESADYQNAPLLAQLALGHKSRYIEHYQPELLQAVPRSLNRNQLNLSAPLPFHGYDRWNMYELSWLNPKGKPQVAIGEAFINALSVNLVESKSFKLYLNSFNQTSFTDIEQVQQTIENDLKQCVQGPVSVSLYPIDTPVKIAGIAGENLDTLDIEVTDYQFDDSLLAGATEPTQQISETLYSNLLKSNCLVTSQPDWGSICIRYQGAKINREALLRYIISFRRHNEFHEQCVERIFMDIQRYCKPDKLTVEARYTRRGGLDINPFRSNFEAQADHHRLIRQ

SEQ ID NO: 45212 - protein, 165 aa, Cellulosilyticum lentocellum
  REGION 1..165: note = tr|F2JSB2|F2JSB2_CELLD NADPH-dependent 7-cyano-7-deazaguanine reductase OS=Cellulosilyticum lentocellum (strain ATCC 49066 / DSM 5427 / NCIMB 11756 / RHM5) OX=642492GN=queF PE=3 SV=1
MSSRTKEELNGVTHLGNQKVAYRDNYAPEVLETFINKHPDNDYFVKFNCPEFTSLCPITGQPDFATIYISYVPGPRMVESKSLKLYLFSFRNHGDFHEDCINTIMKDLIKLMDPKYIEVWGKFTPRGGISIDPYCNYGKPGTKWEAVAFDRLTHHDLYPEKVDNR

SEQ ID NO: 45213 - protein, 165 aa, Cellulosilyticum sp.
  REGION 1..165: note = tr|A0A5B9YHX6|A0A5B9YHX6_9FIRM NADPH-dependent 7-cyano-7-deazaguanine reductase OS=Cellulosilyticum sp. WCF-2 OX=2497860 GN=queF PE=3 SV=1
MSSRTKEELNGVTHLGNQKVAYRDNYAPEVLETFINKHPDNDYFVKFNCPEFTSLCPITGQPDFATIYISYVPGPRMVESKSLKLYLFSFRNHGDFHEDCMNIIMKDLIKLMDPKYIEVWGKFTPRGGISIDPYCNYGKPGTKWEAVAFDRLTHHDLYPEKVDNR

SEQ ID NO: 45214 - protein, 274 aa, Cellvibrio japonicus
  REGION 1..274: note = tr|B3PE46|B3PE46_CELJU NADPH-dependent 7-cyano-7-deazaguanine reductase OS=Cellvibrio japonicus (strain Ueda107) OX=498211 GN=queF PE=3 SV=1
MSHNPLGRQTDYVSSYAPELLFPIARSDSRQLLSLGSSLPFRGVDLWTGYELSWLDSRGKPQVAVAEFVLPCDSEFMVESKSFKLYLNSFNQTHIADTTQLRAMLARDLSAVIGKPVEVHLYTVGDHLSALGKIHACDGVCLDGLPVAIDTYHPQPDYLGCQVSAGVVDESVYSHLLKTNCPVTGQPDWASVQIRYRGKAISHEGLLRYIVSFREHQDFHEHCVERIFMDIWQRCAPESLTVYARYTRRGGLDINPLRTSEHRWSLESKRLLRQ

SEQ ID NO: 45215 - protein, 280 aa, Cellvibrio mixtus
  REGION 1..280: note = tr|A0A266Q421|A0A266Q421_9GAMM NADPH-dependent 7-cyano-7-deazaguanine reductase OS=Cellvibrio mixtus; OX = 39650 GN=queF PE=3 SV=1
MGFNPLGQQTEYVSVYSPQLLFPIARAESRKLLNTVSSLPFSGVDIWTGYELSWLDPKGKPVVAVAEFFIPCDSEFMIESKSFKLYLNSLNQSHYHSAAEVEELLARDLSAVARAMVRVQLYPLSSTQSSQWRAQPAHLLNTVTLDGVLLDDLPVNIDTYHPDPNLLTTADSIVSETLVSHLLKTNCPVTGQPDWASLVVRYTGKKIEHDSLLRYIVSFREHQDFHEHCVERIFSDIAAICKPTHLTVYARYTRRGGLDINPFRSSHAAEQPELLRLIRQ

SEQ ID NO: 45216 - protein, 280 aa, Cellvibrio sp.
  REGION 1..280: note = tr|A0A1U9N618|A0A1U9N618_9GAMM NADPH-dependent 7-cyano-7-deazaguanine reductase OS=Cellvibrio sp. PSBB023; OX = 1945512 GN=queF PE=3 SV=1
MGFNPLGQQTEYVSVYSPQLLFPIARAESRKLLNTVASLPFSGVDIWTGYELSWLDPKGKPVVAVAEFFIPCDSEFMIESKSFKLYLNSLNQSHYHSAAEVEELLARDLSAVARAMVRVQLYPLSSTQSSQWRAQPAHLLNTVTLDGVLLDDLSVSIDNYHPDPNLLTTADAIVSETLVSHLLKTNCPVTGQPDWASLVVRYTGKKIEHDSLLRYIVSFREHQDFHEHCVERIFSDIAAICKPTHLTVYARYTRRGGLDINPFRSSHAAEQPELLRLIRQ

SEQ ID NO: 45217 - protein, 280 aa, Cellvibrio sp.
  REGION 1..280: note = tr|A0A5J6NX66|A0A5J6NX66_9GAMM NADPH-dependent 7-cyano-7-deazaguanine reductase QueF OS=Cellvibrio sp. KY-YJ-3 OX=454662 GN=queF PE=4 SV=1
MNLNPLGQQTEYVSVYSPQLLFPISRAESRKLLGIGAALPFFGEDIWTGYELSWLDSQGKPVVAVAEFFIPCDSEFMIESKSFKLYLNSLNQTRYQSAAEVEELLVKDLSAVAGTMVRVHLFPLLPSQISHWRAQPAHLLNAATLEGVLLDELSVTVDAYHPKPELLVTTGELVSESLISNLLKTNCPVTGQPDWASIVVRYSGKKIEHENLLRYIISFREHQDFHEHCVERIFNDIATYCKPESLTVYARYTRRGGLDINPFRSSSAEEKPNLLRLVRQ

SEQ ID NO: 45218 - protein, 279 aa, unidentified
  source 1..279: note = Cellvibrionaceae bacterium
  REGION 1..279: note = tr|A0A2E2XE28|A0A2E2XE28_9GAMM NADPH-dependent 7-cyano-7-deazaguanine reductase OS=Cellvibrionaceae bacterium OX=2026723 GN=queF PE=3 SV=1
MATTSEQRHGTVLGKQTEYISVYNPSLLCPIPRQQSRRELGVNPEALPFRGVDIWTAYEVSWLNSDGKPEVAIAEFEVPATSPSIIESKSFKLYLNSFNQTAFANMYDVARTMESDLGACAGAAVMVKLKPLAQFAQQGIGHFAGECIDQEPVKIDCYSPSPDLLTLNKPDKVVSEVLYSDLLKSNCPVTGQPDWASVCVQYRGAQIDRASLLKYIISFREHQDFHEHCVERMFLDIQTRCNPEALTVYARYTRRGGLDINPYRTNGSEGPTDVRLVRQ

SEQ ID NO: 45219 - protein, 276 aa, unidentified
  source 1..276: note = Cellvibrionaceae bacterium
  REGION 1..276: note = tr|A0A545SMW3|A0A545SMW3_9GAMM NADPH-dependent 7-cyano-7-deazaguanine reductase OS=Cellvibrionaceae bacterium R142 OX=2591008 GN=queF PE=3 SV=1
MADDLLSSKLGKQTDYVTQYTPSLLFPITRQESRKLLGIEGDPLPFVGMDIWTAYEMSWLDKKGKPQVAIGEFRIPCQSPSIIESKSFKLYLNSLNQTRFDSVRDVISTLESDLSVAAGAPVIVQVTPLAQALQRGLGHYTGENLDQLDVEVQDYQPNPELLRCDRPDYFVHESLNSDLLKTNCPVTGQPDWASIYIEYQGAAIDREGLLKYIISFRSQQDFHEHCVERIFMDISARCQPQKLTVYARYTRRGGVDINPYRSNESGEPEDFRLVRQ

SEQ ID NO: 45220 - protein, 291 aa, unidentified
  source 1..291: note = Cellvibrionales bacterium
  REGION 1..291: note = tr|A0A350J167|A0A350J167_9GAMM NADPH-dependent 7-cyano-7-deazaguanine reductase OS=Cellvibrionales bacterium OX=2026722 GN=DCW37_01055 PE=3 SV=1
MGNTKDTSVSEAAHSLSNNYASSSSLGEHSQYGNEYNPALLHPILRSEYRSTVEDFVAPIYGHDLWQCFELSWLNACGVPQVACADIIVPMASLAIVESKSLKLYLNSFHHRQFVDQDEVKALIKTDLTALLSAEVEVVLRSVSIVLSAVPQAVEPLLLDDLDISCSEYQRNPKLLLLNADNHQVSHEQFCSHLLRSHCPVTNQPDWGTLTIRYSGRAINPESLLRYIVSFRQHNGFHEQCVEQIYSDIMTECRPELLTVYAQYTRRGGIDINPWRSNDNEPLVLDRVWRQ

SEQ ID NO: 45221 - protein, 249 aa, unidentified
  source 1..249: note = Cellvibrionales bacterium
  REGION 1..249: note = tr|A0A1Z8N1S7|A0A1Z8N1S7_9GAMM QueF_N domain-containing protein OS=Cellvibrionales bacterium TMED21 OX=1986745 GN=CBB81_01720 PE=4 SV=1
  VARIANT 10: note = Xaa can be any naturally occurring amino acid
  VARIANT 15: note = Xaa can be any naturally occurring amino acid
  VARIANT 20: note = Xaa can be any naturally occurring amino acid
  VARIANT 22: note = Xaa can be any naturally occurring amino acid
  VARIANT 171: note = Xaa can be any naturally occurring amino acid
MDRILGNRVXAPEQXAPDIXEXIDRAVGRSAITGASHHISSGWDVWHCYELSWILQGQGLSYFTGTVSIPADSPFTIESKSLKLYFNSLNNMNFISNEAAIETIGRDLSAVARGDVSVSLWSSSDLATNTYSPDVLPRPNGAHANVRYSMGGFRSLCPVTSQPDWATVIIXIDEQASDSKAIEAAVESLRNHQGFHEQCIEDLFTRIERALRPDFLEITGYFQRRGGIDITPRRSSIATKPPIERLYEQ

SEQ ID NO: 45222 - protein, 163 aa, Centipeda periodontii
  REGION 1..163: note = tr|F5RLV9|F5RLV9_9FIRM NADPH-dependent 7-cyano-7-deazaguanine reductase OS=Centipeda periodontii DSM 2778 OX=888060 GN=queF PE=3 SV=1
MAREKKEEGLTLLGEQRTDYGYDYAPEALETFHNKHTDHDYWVRFNCPEFTTLCPITGQPDYGTIYISYMPAERMVESKSLKLYLVSFRNHGDFHEDVVNVIMRDLIRLMEPKYIEVQGKFLPRGGISIDPYANYGMPGTKYETLAWERLSMHDRVPERVDNR

SEQ ID NO: 45223 - protein, 166 aa, Cesiribacter andamanensis
  REGION 1..166: note = tr|M7NIY1|M7NIY1_9BACT NADPH-dependent 7-cyano-7-deazaguanine reductase OS=Cesiribacter andamanensis AMV16 OX=1279009 GN=queF PE=3 SV=1
MTDKELAINERLDALQKQSVEHTRASLEYMEKMGIRPEGKFGLFLPPDYREKEIHRLPYAHAVRQQVVYETEKGEFSALCPFSGLPDYGVLRIEYVPGSYILELKSLKYYIMSWRHIGVAQEDVTAYIYQDVYRQLQDAHYLKITTDYNIRGGINTSCVVDSREQQ

SEQ ID NO: 45224 - protein, 132 aa, unidentified
  source 1..132: note = Cetia pacifica
  REGION 1..132: note = tr|A0A3N1YJD9|A0A3N1YJD9_9PROT NADPH-dependent 7-cyano-7-deazaguanine reductase OS=Cetia pacifica; OX = 1424653 GN=queF PE=3 SV=1
MNELRYGEKEIVEFDPEKMEIWPNKNKKNYKIKITLPEFMCKCPRSGYPDFATVYLEYIPDEWVVELKALKLYINSFMNRYISHEDSANEIFDTLYNKLKPKWMKIVMDFNPRGNVHTVIEIDSDTISKTTE

SEQ ID NO: 45225 - protein, 135 aa, Chamaesiphon minutus
  REGION 1..135: note = tr|K9ULW3|K9ULW3_CHAP6 NADPH-dependent 7-cyano-7-deazaguanine reductase OS=Chamaesiphon minutus (strain ATCC 27169 / PCC 6605) OX=1173020 GN=queF PE=3 SV=1
MTQAHPEAATTPSEMKYGEREIINGELITFPNPRMGRRYNVDISLPEFTCKCPFSGYPDFATIGIIYVPDQKVVELKALKLYINSYRDRYISHEEAANQILDDFVSIADPHQITVRADFSPRGNVHMIVEVKHEK

SEQ ID NO: 45226 - protein, 135 aa, unidentified
  source 1..135: note = Chamaesiphon polymorphus
  REGION 1..135: note = tr|A0A2T1G3W9|A0A2T1G3W9_9CYAN NADPH-dependent 7-cyano-7-deazaguanine reductase OS=Chamaesiphon polymorphus CCALA 037 OX=2107692 GN=queF PE=3 SV=1
MTQAHPESATTPSEMKYGEREIINGQLITFPNPRIGRRYNVDISLPEFTCKCPFSGYPDFATIGIIYVPDQKVVELKALKLYINSYRDRYISHEEAANQILDDFVSIADPHQITVRADFSPRGNVHMIVEVKHEK

SEQ ID NO: 45227 - protein, 278 aa, unidentified
  source 1..278: note = Chania multitudinisentens
  REGION 1..278: note = tr|W0L742|W0L742_9GAMM NADPH-dependent 7-cyano-7-deazaguanine reductase OS=Chania multitudinisentens RB-25 OX=1441930 GN=queF PE=3 SV=1
MRMKVNNEITLLGKTTEYAQHYSPDLLESLPRSRNRDSINIKSDNLPFSGFDLWTGFELSWLNHKGKPVVAIAEFIIPATSSHLIESKSFKLYLNSFNQTKFDTTEQVITLLEKDLSLAADGKVEVKLYPDLNGYPETITSLPGNCIDHLDIEINDYQFNPEILHDSVSNEHVSETLSSNLLKSNCLVTNQPDWGSVVIKYQGNKINQEKLLRYIISFRMHNEFHEQCVERIFNDINRYCQPEKLSVFARYTRRGGLDINPFRSNFEESPVVPRLVRQ

SEQ ID NO: 45228 - protein, 153 aa, Chelativorans sp.
  REGION 1..153: note = sp|Q11L79|QUEF_CHESB NADPH-dependent 7-cyano-7-deazaguanine reductase OS=Chelativorans sp. (strain BNC1) OX=266779 GN=queF PE=3 SV=1
MTDTRNLTQLGSKTQAPASPEAATLETAPFSRGDGPAAIVRFTCPEFTSLCPVTGQPDFAHIVIDYAPDKLLVESKSLKLFLTSFRNHGAFHEDCTVMIGRRIVEATKPLWLRIGGYWYPRGGIPIDVFWQTGTPPKDAWVPETGVPPYRGRG

SEQ ID NO: 45229 - protein, 154 aa, Chelatococcus asaccharovorans
  REGION 1..154: note = tr|A0A2V3UC85|A0A2V3UC85_9RHIZ NADPH-dependent 7-cyano-7-deazaguanine reductase OS=Chelatococcus asaccharovorans OX=28210 GN=queF PE=3 SV=1
MTRDLKSRNLQLGRPSALPASPDEADLDRVPNPQIGTRYVARFTCPEFTSLCPVTGQPDFGILVIDYAPGEWLVESKSLKLYLHAFRNHGAFHEDCTVSIGLRLASLLEPQWLRIGGYWYPRGGIPIDVFWQTGAPPEGLFLPDQGVPPYRARG

SEQ ID NO: 45230 - protein, 152 aa, Chelatococcus sambhunathii
  REGION 1..152: note = tr|A0A0K6H5G2|A0A0K6H5G2_9RHIZ NADPH-dependent 7-cyano-7-deazaguanine reductase OS=Chelatococcus sambhunathii OX=363953 GN=queF PE=3 SV=1
MAQQHESLQLGKPASLPASPEEAVLDRVPNPHPDTDYVARFTCPEFTSICPVTGQPDFGIVVIDYVPGEWLVESKSLKLFMFSFRNHGAFHEDCTVYIGKRLSELLVPRWMRVGGYWFPRGGIPIDVFWQTGAPPAGLFLPDQGVPPYRPRG

SEQ ID NO: 45231 - protein, 152 aa, Chelatococcus sp.
  REGION 1..152: note = tr|A0A0K2DGJ2|A0A0K2DGJ2_9RHIZ NADPH-dependent 7-cyano-7-deazaguanine reductase OS=Chelatococcus sp. CO-6; OX = 1702325 GN=queF PE=3 SV=1
MAQQHESLQLGKPAPLPASPEEAVLDRVPNPHPDTDYVARFTCPEFTSICPVTGQPDFGIVVIDYVPGEWLVESKSLKLFMFSFRNHGAFHEDCTVYIGKRLSELLAPRWMRVGGYWFPRGGIPIDVFWQTGAPPAGLFLPDQGVPPYRPRG

SEQ ID NO: 45232 - protein, 151 aa, Chelatococcus sp.
  REGION 1..151: note = tr|A0A2W6Y314|A0A2W6Y314_9RHIZ NADPH-dependent 7-cyano-7-deazaguanine reductase OS=Chelatococcus sp.; OX = 1953771 GN=queF PE=3 SV=1
MSIDATELQLGRPSALPASPDEARLDRVPNPHAGTNYLARFTCPEFTSICPVTGQPDFGILVIDYLPGQWLVESKSLKLYLGAFRNHGAFHEDCTVGIGKKLVDLLAPEWFRIGGYWYPRGGIPIDVFWQTGEPPKGLWLPDQGVAPYRGR

SEQ ID NO: 45233 - protein, 279 aa, Chelonobacter oris
  REGION 1..279: note = tr|A0A0A3APP9|A0A0A3APP9_9PAST NADPH-dependent 7-cyano-7-deazaguanine reductase OS=Chelonobacter oris; OX = 505317 GN=queF PE=3 SV=1
MSYQDTSLEKLTLGKQTGYKNEYDPTLLQAVPRRLNRDGLGISEQQPFSHGTDIWTAYEISWLNDNGLPQVAIGDIYLDFRSTNLIESKSFKLYLNSFNQSRFTSQRQVENLIRQDLANCADGEVKVRLHSLDEYQNQPIAHFHGDCIDTQDIVIDCYDFQPHLLQDCTNSDVVTESLVSHLLKSNCLITSQPDWGSIQIAYSGRQINREALLRYLVSFRRHNEFHEQCVERIFCDLMHYAKPEKLRVYARYTRRGGLDINPWRSNYPFEPENQRLARQ

SEQ ID NO: 45234 - protein, 274 aa, Chitinimonas sp.
  REGION 1..274: note = tr|A0A2G3K4R4|A0A2G3K4R4_9BURK NADPH-dependent 7-cyano-7-deazaguanine reductase OS=Chitinimonas sp. BJB300 OX=1559339 GN=queF PE=3 SV=1
MQPELSPLGKTSAYIEHYDPSLLFPIPRQTKRDEIGVPAVLPFFGSDIWNAYELSWLNLKGKPLVALVSFSVPADSPNIIESKSFKLYLNSFNQTRLDGIDELKARLVRDLSAAAGRTVNVRIVLPDAFGREQVAELDGYCIDNLDVEVTHYQPAPALLRTVAAQGMVEETLCSNLLKSNCLVTGQPDWGSVQIRYRGEAIERGGLLQYLISFRQHNEFHEQCVERIFMDVMRQCKPQALTVYARYTRRGGLDINPFRTTFSQAAPANLRTARQ

SEQ ID NO: 45235 - protein, 274 aa, Chitinimonas sp.
  REGION 1..274: note = tr|A0A516SIX9|A0A516SIX9_9MICO NADPH-dependent 7-cyano-7-deazaguanine reductase QueF OS=Chitinimonas sp. R3-44 OX=2594795 GN=queF PE=3 SV=1
MQPELSPLGKTSTYIEHYDPSLLFPIPRLAKREEIAVPARLPFFGSDYWNAYELSWLNPRGKPQVALAVFTIPADSPNIIESKSFKLYLNSFNQTRLDSIAELKTRLQADLSQAAGSLVAVRLVLPEAFGAERLGELEGYCIDQLDVEITDYSPQPQLLRSAMAEAPIEETLVSHLLKSNCLVTGQPDWASVQIHYRGPAIDHAGLLQYLISFRRHNEFHEQCVERIFMDISRQCRPEALSVYARYTRRGGLDINPFRTSFTQAAPANQRSARQ

SEQ ID NO: 45236 - protein, 274 aa, Chitinimonas taiwanensis
  REGION 1..274: note = tr|A0A1K2H9I5|A0A1K2H9I5_9BURK NADPH-dependent 7-cyano-7-deazaguanine reductase OS=Chitinimonas taiwanensis DSM 18899 OX=1121279 GN=queF PE=3 SV=1
MHPELSPLGKTSAYIEHYDPSLLFPIPRLAKRVEIGVPASLPFFGSDIWNAYELSWLNPKGKPQVALASFGVPADSPNIIESKSFKLYLNSFNQTRLDSVDELKARLQRDLSAAAGATVSVRIVLPEDFGRERVAELDGYCIDNLDVEITHYQPSPSLLRTVPADGVVEETLCSNLLKSNCLVTGQPDWGSVQIRYRGEAIDRAGLLSYLISFRQHNEFHEQCVERIFMDVLRACRPQALSVYARYTRRGGLDINPFRTSFTQAAPANVRSARQ

SEQ ID NO: 45237 - protein, 275 aa, Chitiniphilus sp.
  REGION 1..275: note = tr|A0A4U0PYB2|A0A4U0PYB2_9NEIS NADPH-dependent 7-cyano-7-deazaguanine reductase OS=Chitiniphilus sp. HX-2-15 OX=2571148 GN=queF PE=3 SV=1
MSDAQHSPLGKAVSYQMQYDPSLLFPIPRQGKRDEIGVKGALPFMGVDIWNGYELSWLNARGKPQVATAVFHIPADSPNIVESKSFKLYLNSFNQTRLDSADALLAMLRDDLSRAAGAPVQVELALPEQFAGLRFAELDGYCIDNLDIEIDTYSPQPGLLHCDEAPSPVDEALVSNLLKSNCLVTGQPDWASVQIRYVGAPINRESLLRYLISFREHNEFHEQCVERIFMDILRACKPMKLAVYARYTRRGGLDINPYRSNFSGPPPGNRRTARQ

SEQ ID NO: 45238 - protein, 150 aa, unidentified
  source 1..150: note = Chitinivibrio alkaliphilus
  REGION 1..150: note = tr|U7D9Y3|U7D9Y3_9BACT NADPH-dependent 7-cyano-7-deazaguanine reductase OS=Chitinivibrio alkaliphilus ACht1 OX=1313304 GN=queF PE=3 SV=1
MFYDNIRLLQEPGTKESLPKLEPIPSPMDNTGVVRIVFPEFTCVCPKTGYPDFGSIELYYQPDTSMVELKSWKLFLNAFRMIGTYHEEVTHFIFTHLCEQLSPTWAMVTGDFFPRGNVDTTVVFETPVQRPHGADTLLLRHTPHTRSYHG

SEQ ID NO: 45239 - protein, 143 aa, unidentified
  source 1..143: note = Chitinophaga flava
  REGION 1..143: note = tr|A0A365XX85|A0A365XX85_9BACT 7-cyano-7-deazaguanine reductase OS=Chitinophaga flava; OX = 2259036 GN=DF182_23995 PE=4 SV=1
MTKKLYQQIDLTILKALPNPSSEKYEMKIKVPEFTFLGVHEQPDFAKLYITFYPKGKIIELKSLKQYVYHLRDIIVSYERLINIMYDHMMEVYQPDRLRVTLICNPRGGISSKLVIDSDWKDRGGEDKYKDYPERDDEWGILM

SEQ ID NO: 45240 - protein, 143 aa, Chitinophaga ginsengisegetis
  REGION 1..143: note = tr|A0A1T5P7Z0|A0A1T5P7Z0_9BACT 7-cyano-7-deazaguanine reductase OS=Chitinophaga ginsengisegetis OX=393003 GN=SAMN05660461_4732 PE=4 SV=1
MSKKLYQHIDKTILKGLPNPSKEKYEMKIKVPEFTFLGVQEQPDFAKLYITFYPKNKIIELKSLKHYVYHLRDIIVSYERLINIIYDHMMEVYEADRLRITLICNPRGGISSKLVIDSDWKDRGGTERFRDYPERDDEWGILM

SEQ ID NO: 45241 - protein, 143 aa, Chitinophaga niastensis
  REGION 1..143: note = tr|A0A2P8HA86|A0A2P8HA86_9BACT 7-cyano-7-deazaguanine reductase OS=Chitinophaga niastensis OX=536980 GN=CLV51_109132 PE=4 SV=1
MTKKLYHHIDKTILKGLPNPSKEKYEMKIKVPEFTFLGMQEQPDFAKLYITFYPKNKIIELKSLKHYVYHLRDIIVSYERLINIVYDHMMETYEADRLRITLICNPRGGISSKLVIDSDWKDRGGTERFKDYPERDDEWGILM

SEQ ID NO: 45242 - protein, 143 aa, Chitinophaga sp.
  REGION 1..143: note = tr|A0A4R7CG11|A0A4R7CG11_9BACT 7-cyano-7-deazaguanine reductase OS=Chitinophaga sp. OK723; OX = 2135605 GN=C7544_106260 PE=4 SV=1
MSKKLYQHIDKTILKGLPNPSKEKYEMKIKVPEFTFLGMQEQPDFAKLYITFYPKGKIIELKSLKLYVYHLRDIIVSYERLINIIYDHMMEVYEADRLRITLICNPRGGISSKLVIDSDWKDRGGNERFKDYPERDDEWGILM

SEQ ID NO: 45243 - protein, 143 aa, Chitinophaga sp.
  REGION 1..143: note = tr|A0A433WNV4|A0A433WNV4_9BACT 7-cyano-7-deazaguanine reductase OS=Chitinophaga sp. Mgbs1; OX = 2485489 GN=ECE50_03030 PE=4 SV=1
MTRKLYQQIDKSLLKGLPNPSNEKYEMKIKVPEFTFLGVHEQPDFARLYITFYPKNKIIELKALKQYVYHLRDIIVSYERLINIMYDHFMETYGPDRLRLTLICNPRGGISSKLVIDSDWKDRGGEEKYKDYPERDDEWGVLM

SEQ ID NO: 45244 - protein, 143 aa, Chitinophaga terrae
  REGION 1..143: note = tr|A0A1H4B8J8|A0A1H4B8J8_9BACT NADPH-dependent 7-cyano-7-deazaguanine reductase OS=Chitinophaga terrae Kim and Jung 2007 OX=408074 GN=SAMN05660909_01963 PE=3 SV=1
MTKKLYQSIDKSILKALPNPSKEKYEMKIKVPEFTFLGVQEQPDFAKLYITFYPKNKIIELKSLKLYVYHLRDIIVSYERLINIIYDHMMEVYEPDRLRITLICNPRGGISSKLVIDSDWKDRGGSERFKDYPERDEEWGILM

SEQ ID NO: 45245 - protein, 55 aa, unidentified
  source 1..55: note = Chitinophagaceae bacterium
  REGION 1..55: note = tr|A0A4Q3SN34|A0A4Q3SN34_9BACT NADPH-dependent 7-cyano-7-deazaguanine reductase QueF (Fragment); OS = Chitinophagaceae bacterium OX=1869212 GN=EOO07_35600; PE = 4 SV=1
HEQCVEQIFADIWQQLNPSRLMVYAAYTRRGGLDINPCRVSDMSWLPRPIRLARQ

SEQ ID NO: 45246 - protein, 97 aa, unidentified
  source 1..97: note = Chitinophagaceae bacterium
  REGION 1..97: note = tr|A0A4Q3SUD9|A0A4Q3SUD9_9BACT NADPH-dependent 7-cyano-7-deazaguanine reductase QueF (Fragment); OS = Chitinophagaceae bacterium OX=1869212 GN=EOO07_32630; PE = 4 SV=1
MSHSVDFSPLGQKTLYVSTYDPKLLFPISRAESRTVLGITTKLPFFGCDVWTGYEISWLNEKGKPEVAVAEFFIPCDSPFIIESKSFKLYLNSFNQT

SEQ ID NO: 45247 - protein, 272 aa, Chlamydia sp.
  REGION 1..272: note = tr|A0A1M3BA88|A0A1M3BA88_9CHLA NADPH-dependent 7-cyano-7-deazaguanine reductase QueF OS=Chlamydia sp. 32-24 OX=1895742 GN=BGO10_02850 PE=3 SV=1
MNTVELSPLGQKTVYIQTYSPEQLYPVPRSLARKKTNIPESLPFHGIDIWNGYELSWLNKKGKPQFALCTFIFSCTSPTIVESKSLKLYLNSFNQSIFVSANEVQTIIKKDLSLATNSDVEVHIFPHTDLINTSLKDFDGQCVDHLDIETSCYSVTPSFLTTQDECVQEKIYTHLLKSNCLATGQPDWGSIFLHYKGPKINQESFLKYIISYRNHSGFAEHCIEQIYCDILHYCKPELLTVYGCYTRRGGLDINPFRSNFEQRPNLFRHVRQ

SEQ ID NO: 45248 - protein, 131 aa, unidentified
  source 1..131: note = Chloracidobacterium sp.
  REGION 1..131: note = tr|A0A257B6C0|A0A257B6C0_9BACT NADPH-dependent 7-cyano-7-deazaguanine reductase OS=Chloracidobacterium sp. CP2_5A OX=2012633 GN=queF PE=3 SV=1
MGAYTDEHAKKGLDAPLPAIECWANQFPSYRITIRIPEFTSVCPLTEQPDFGTVTIAYVPRDRCLELKSLKLYIQAYRQLGIFYENAINRILRDVVAACDPVECAVVGDFTPRGGISSVVEATYRAAQTAA

SEQ ID NO: 45249 - protein, 131 aa, unidentified
  source 1..131: note = Chloracidobacterium thermophilum
  REGION 1..131: note = tr|G2LJQ0|G2LJQ0_CHLTF NADPH-dependent 7-cyano-7-deazaguanine reductase OS=Chloracidobacterium thermophilum (strain B) OX=981222 GN=queF PE=3 SV=1
MGAYTDEHARKGLDAPLPPIECWANQFPNYRITIRIPEFTSVCPLTEQPDFGTVTITYVPRDRCLELKSLKLYIHAYRQLGIFYENAINRILRDVVAACDPVECTVTGDFTPRGGISSLIEATYRATHRPA

SEQ ID NO: 45250 - protein, 117 aa, Chlorobaculum limnaeum
  REGION 1..117: note = tr|A0A1D8CW59|A0A1D8CW59_CHLLM NADPH-dependent 7-cyano-7-deazaguanine reductase OS=Chlorobaculum limnaeum; OX = 274537 GN=queF PE=3 SV=1
MKKEIIEVFDNTFPGRDYTIEIVNPEFTSVCPKTGLPDFGTITVNYVPDKSCIELKSLKYYYLEFRNAGIFYENITNRILDDLVEACQPRRMSVKAEWNARGGITETVTVSYSASQQ

SEQ ID NO: 45251 - protein, 116 aa, Chlorobaculum parvum
  REGION 1..116: note = sp|B3QM19|QUEF_CHLP8 NADPH-dependent 7-cyano-7-deazaguanine reductase OS=Chlorobaculum parvum (strain NCIB 8327) OX=517417 GN=queF PE=3 SV=1
MNKEIIEVFDNTFPNRDYTIEIVNPEFTSVCPKTGLPDFGTITITYVPDKSCIELKSLKYYFLEFRNAGIFYENITNTILDHLVEACQPKSMTVKTDWNARGGITETVTVSYTAEK

SEQ ID NO: 45252 - protein, 117 aa, Chlorobaculum sp.
  REGION 1..117: note = tr|A0A4Q1DHX0|A0A4Q1DHX0_9CHLB NADPH-dependent 7-cyano-7-deazaguanine reductase OS=Chlorobaculum sp. 24CR; OX = 2508878 GN=queF PE=3 SV=1
MNKEIIEVFDNTWPGRDYTIEIVNPEFTSVCPKTGLPDFGTITINYVPDKSCIELKSLKYYFLEFRNAGIFYENITNRILDDLVEACQPKRMTVKTDWNARGGITETVTVSYSKSEE

SEQ ID NO: 45253 - protein, 117 aa, Chlorobaculum tepidum
  REGION 1..117: note = sp|Q9F719|QUEF_CHLTE NADPH-dependent 7-cyano-7-deazaguanine reductase OS=Chlorobaculum tepidum (strain ATCC 49652 / DSM 12025 / NBRC 103806 / TLS); OX = 194439 GN=queFPE=3 SV=1
MNKEIIEVFDNTYPDRDYTIEIINPEFTSVCPKTGLPDFGTITVNYVPDKSCIELKSLKYYFLEFRNAGIFYENITNRILDDLVEACQPRRMTVKTEWNARGGITETVTVSYSKSKE

SEQ ID NO: 45254 - protein, 117 aa, Chlorobaculum thiosulfatiphilum
  REGION 1..117: note = tr|A0A5C4S8S5|A0A5C4S8S5_CHLTI NADPH-dependent 7-cyano-7-deazaguanine reductase OS=Chlorobaculum thiosulfatiphilum OX=115852 GN=queF PE=3 SV=1
MKKEIIEVFDNTYPGRDYTIEIVNPEFTSVCPKTGLPDFGTITVNYVPDKSCIELKSLKYYFLEFRNAGIFYENITNRILDDLVEACQPKKMTVRTDWNARGGITETVTVSYSKSEE

SEQ ID NO: 45255 - protein, 100 aa, unidentified
  source 1..100: note = Chlorobi bacterium
  REGION 1..100: note = tr|A0A136P4J0|A0A136P4J0_9BACT NADPH-dependent 7-cyano-7-deazaguanine reductase OS=Chlorobi bacterium OLB5 OX=1617412 GN=queF PE=3 SV=1
MMIFGKFPENLTAFTKTMKKFNPVKSDPKKTALLEVFDNSFPKRSYLIVHKANEFTSVCPKTGQPDFGVITISYVAAKKCVELKSLKFYLQSFRNEGIFL

SEQ ID NO: 45256 - protein, 113 aa, unidentified
  source 1..113: note = Chlorobi bacterium
  REGION 1..113: note = tr|A0A4V0XA74|A0A4V0XA74_9BACT NADPH-dependent 7-cyano-7-deazaguanine reductase OS=Chlorobi bacterium; OX = 2268192 GN=queF PE=3 SV=1
MDRLETFPNPAVGRQYRIKHILHEFTSVCPLTGLPDFATVTIEYVPDAICLELKALKYYFLEFRNMGIFYEAVTNKILDDLVERCNPIEMTITTDWGIRGGMSSVITAQYRKK

SEQ ID NO: 45257 - protein, 116 aa, unidentified
  source 1..116: note = Chlorobium chlorochromatii
  REGION 1..116: note = sp|Q3APR5|QUEF_CHLCH NADPH-dependent 7-cyano-7-deazaguanine reductase OS=Chlorobium chlorochromatii (strain CaD3) OX=340177 GN=queF PE=3 SV=1
MKLEILESFENKYPNRDYTIEIVNPEFTSVCPITGLPDFGTITIRYVPNQRCVELKSLKYYFFEFRNAGIFYENITNKVLDDMVALLEPRSISVITEWKARGGITETVSVHYTSQS

SEQ ID NO: 45258 - protein, 116 aa, unidentified
  source 1..116: note = Chlorobium ferrooxidans
  REGION 1..116: note = tr|Q0YU32|Q0YU32_9CHLB NADPH-dependent 7-cyano-7-deazaguanine reductase OS=Chlorobium ferrooxidans DSM 13031 OX=377431 GN=queF PE=3 SV=1
MKKEILEIFSNTYPDRDYTIEIVNPEFTSVCPKTGLPDFGTITVRYVPDKSCVELKSLKYYYLEFRNAGIFYENVTNRILDDLVSVMQPRTLSVTTEWKARGGITETVSVSYSAAR

SEQ ID NO: 45259 - protein, 142 aa, Chlorobium limicola
  REGION 1..142: note = tr|B3EH15|B3EH15_CHLL2 NADPH-dependent 7-cyano-7-deazaguanine reductase OS=Chlorobium limicola (strain DSM 245 / NBRC 103803 / 6330) OX=290315 GN=queF; PE = 3 SV=1
MKIIPDFYFAGQRNASIPLNRRQNLMRRELLEVFDNTFPERDYIIEIVNPEFTSVCPKTGLPDFGTITVTYVPDKVCIELKSLKYYFLDFRNAGIFYENVTNTILDDLVAVSQPREMSVKSEWKARGGITETVTVTHSGRKA

SEQ ID NO: 45260 - protein, 117 aa, Chlorobium limicola
  REGION 1..117: note = tr|A0A124GAT4|A0A124GAT4_CHLLI NADPH-dependent 7-cyano-7-deazaguanine reductase OS=Chlorobium limicola; OX = 1092 GN=queF PE=3 SV=1
MRKELLEVFDNTFPERDYIIEIVNPEFTSVCPKTGLPDFGTITVTYVPDKVCIELKSLKYYFLDFRNAGIFYENVTNTILDDLVAVSQPREMTVKSEWKARGGITETVTVTHSGRKA

SEQ ID NO: 45261 - protein, 118 aa, Chlorobium phaeobacteroides
  REGION 1..118: note = sp|B3EMR0|QUEF_CHLPB NADPH-dependent 7-cyano-7-deazaguanine reductase OS=Chlorobium phaeobacteroides (strain BS1) OX=331678 GN=queF PE=3 SV=1
MQKELLEVFDNRFPDRDYTIEIVNPEFTSVCPITGLPDFGTITIRYIPDKVCVELKSLKYYYLEFRNAGIFYENVTNTILDHLVDLLKPRTLTVTTAWKARGGITETVTVSYSAGQDE

SEQ ID NO: 45262 - protein, 116 aa, Chlorobium phaeobacteroides
  REGION 1..116: note = sp|A1BDZ0|QUEF_CHLPD NADPH-dependent 7-cyano-7-deazaguanine reductase OS=Chlorobium phaeobacteroides (strain DSM 266) OX=290317 GN=queF PE=3; SV = 1
MKKEILEVFDNTFPGRDYTIEIVNPEFTSVCPITALPDFGTIIIRYIPDKSCVELKSLKYYFLEFRNAGIFYENITNTILDDLTSVLQPREMTVITQWKARGGITETVSVTWPQKQ

SEQ ID NO: 45263 - protein, 116 aa, Chlorobium phaeovibrioides
  REGION 1..116: note = tr|A0A3S0NBB2|A0A3S0NBB2_CHLPH NADPH-dependent 7-cyano-7-deazaguanine reductase OS=Chlorobium phaeovibrioides OX=1094 GN=queF PE=3 SV=1
MKKEILEVFDNTYPDRNYTIEIVNPEFTSVCPKTGLPDFGTITVHYVPDRTCVELKSLKYYFLEFRNAGIFYENITNRILDDLVAAMQPRSITVTTKWKARGGITETVTASHTAQG

SEQ ID NO: 45264 - protein, 116 aa, Chlorobium phaeovibrioides; identical to SEQ ID NO: 45263
  REGION 1..116: note = sp|A4SG19|QUEF_CHLPM NADPH-dependent 7-cyano-7-deazaguanine reductase OS=Chlorobium phaeovibrioides (strain DSM 265 / 1930) OX=290318 GN=queF; PE = 3 SV=1

SEQ ID NO: 45265 - protein, 116 aa, Chlorobium sp.
  REGION 1..116: note = tr|A0A4R0QVV2|A0A4R0QVV2_9CHLB NADPH-dependent 7-cyano-7-deazaguanine reductase OS=Chlorobium sp. N1; OX = 2491138 GN=queF PE=3 SV=1
MKREILEVFDNTYPERDYTIEIVNPEFTSVCPKTGLPDFGTITVSYIPDRTCIELKSLKYYFLEFRNAGIFYENVTNRILDDLVAACSPRSMTVRTEWKARGGITETVTVSHNASN

SEQ ID NO: 45266 - protein, 116 aa, Chlorobium sp.
  REGION 1..116: note = tr|A0A533U1V1|A0A533U1V1_CHLSQ NADPH-dependent 7-cyano-7-deazaguanine reductase OS=Chlorobium sp. OX=1095; GN = queF PE=3 SV=1
MKKEILELFDNTYPDRDYTIEIVNPEFTSVCPITGLPDFGTIIIRYVPDKSCIELKSLKYYFLEFRNAGIFYENITNRILDDLVALLKPRSLSVITEWKARGGITETVTVNYRANS

SEQ ID NO: 45267 - protein, 133 aa, unidentified
  source 1..133: note = Chloroflexi bacterium
  REGION 1..133: note = tr|A0A1F8NXW1|A0A1F8NXW1_9CHLR NADPH-dependent 7-cyano-7-deazaguanine reductase OS=Chloroflexi bacterium RBG_13_68_17 OX=1797638 GN=queF PE=3 SV=1
MTEPSDLAGLTILGGKAEPSRRLETFPNHDPERAYVVRLETDEFTCLCPATGQPDFATITVEYIPGPRIVESKSFKLYLWSFRNEGVFHEHVTNLILEDLVRALEPRWCRVQAAFKVRGGIAITVEAEHGRRP

SEQ ID NO: 45268 - protein, 144 aa, unidentified
  source 1..144: note = Chloroflexi bacterium
  REGION 1..144: note = tr|A0A432JI23|A0A432JI23_9CHLR NADPH-dependent 7-cyano-7-deazaguanine reductase OS=Chloroflexi bacterium; OX = 2026724 GN=queF PE=3 SV=1
MATIQELKEQYEGLDQELPSKGEEAINPSCLLTFQYEYPDQQSQVEIDTDEFTAVCPWTGLPDYGVLTISYVPSDSCIELKSLKYYLLSYRDVGIVQEHAVNRILNDLVAVCQPRSMKITLDYKVRGGLHTTVSVEHSRDEGGK

SEQ ID NO: 45269 - protein, 118 aa, unidentified
  source 1..118: note = Chloroflexus islandicus
  REGION 1..118: note = tr|A0A178M0D4|A0A178M0D4_9CHLR Uncharacterized protein OS=Chloroflexus islandicus OX=1707952; GN = A6A03_04465 PE=4 SV=1
MLETIPNRYPHLITEISLTYPFAHLCPISGEPQPDSTITIAYQAGSRLLETKALRQYLATFTQMNDVRDLEEAVQVIAQACANTLAVRVTVRAHYQLLSSAVDVAVTATPATGGGHYV

SEQ ID NO: 45270 - protein, 144 aa, Chlorogloea sp.
  REGION 1..144: note = tr|A0A2T1EFR5|A0A2T1EFR5_9CHRO NADPH-dependent 7-cyano-7-deazaguanine reductase OS=Chlorogloea sp. CCALA 695 OX=2107693 GN=queF PE=3 SV=1
MTNDSLAGQQSAENKQPTTVEMKYGEREIAKGELITFPNPRIGRRYDIHVTLPEFTCKCPFSGYPDFATIYITYVPDRLVVELKAIKLYINSYRDRYISHEESINQILDDFVVACDPLEVYIKGDYSPRGNVHTVIEVRHQKAN

SEQ ID NO: 45271 - protein, 140 aa, Chlorogloeopsis fritschii
  REGION 1..140: note = tr|A0A433N9A2|A0A433N9A2_CHLFR NADPH-dependent 7-cyano-7-deazaguanine reductase OS=Chlorogloeopsis fritschii PCC 6912 OX=211165 GN=queF PE=3 SV=1
MSNSSPETVSQLNQEVKYGERNIAEGKLITFPNPRIGRRYNIDITLPEFTCKCPFSGYPDFATIHITYIPDEKVVELKALKLYINSYRDRYISHEESANQILDDFVAACDPLEATVKADFAPRGNVHTVIEVQHLKSKPN

SEQ ID NO: 45272 - protein, 116 aa, Chloroherpeton thalassium
  REGION 1..116: note = sp|B3QYB6|QUEF_CHLT3 NADPH-dependent 7-cyano-7-deazaguanine reductase OS=Chloroherpeton thalassium (strain ATCC 35110 / GB-78) OX=517418 GN=queF; PE = 3 SV=1
MKPELLETFENQYPNRDYTIEIVNPEFTSVCPKTGLPDFGTITLQYIPNKLCVELKSLKYYYLEFRNAGIFYENVTNKILDDLVKAVKPKEMKIISEWKARGGITTTVTASYEAEK

SEQ ID NO: 45273 - protein, 136 aa, Chondrocystis sp.
  REGION 1..136: note = tr|A0A1Z4RUN3|A0A1Z4RUN3_9CHRO NADPH-dependent 7-cyano-7-deazaguanine reductase OS=Chondrocystis sp. NIES-4102 OX=2005460 GN=queF PE=3 SV=1
MTTSPQSTSTDTMKYGERAIAEGELITFPNPRLGRKYNINITLPEFTCKCPFSGYPDFATIYITYSPDQTVVELKGLKLYINSYRDRYIPHEEVVNQILDDFVAACDPLEVTVKGDFTPRGNVHTVIEVNHQKTTS

SEQ ID NO: 45274 - protein, 212 aa, Chondromyces crocatus; identical to SEQ ID NO: 29130
  REGION 1..212: note = tr|A0A0K1EDX3|A0A0K1EDX3_CHOCO 7-carboxy-7-deazaguanine synthase OS=Chondromyces crocatus; OX = 52 GN=queF PE=3 SV=1

SEQ ID NO: 45275 - protein, 129 aa, unidentified
  source 1..129: note = Chromatiaceae bacterium
  REGION 1..129: note = tr|A0A3D4RY49|A0A3D4RY49_9GAMM NADPH-dependent 7-cyano-7-deazaguanine reductase OS=Chromatiaceae bacterium OX=2049432 GN=queF PE=3 SV=1
MSSVASNKLDTFPNPAPERDYTVRIRVPEFTCLCPKTGQPDFAELTLEYVPEALCVELKSLKLYVWSFRDKGAFHEDVTNRILTDLVAVMSPRFLRLSADFNVRGGIYTSVVAEHRALGWNPLQPVQLP

SEQ ID NO: 45276 - protein, 136 aa, unidentified
  source 1..136: note = Chromatiales bacterium
  REGION 1..136: note = tr|A0A257STA7|A0A257STA7_9GAMM NADPH-dependent 7-cyano-7-deazaguanine reductase OS=Chromatiales bacterium 21-64-14 OX=1970504 GN=queF PE=3 SV=1
MPTRPSTDLETFDNPQAERDYFIRVRVPEFTCLCPKTGQPDFATLHIDYVPDRRCIELKSLKLYVWSYRDQGAFHEAVTNRILEDLVSACAPRFLRVTAEFNVRGGLYTTVVAEHRRPDWTPPVAVHLPPGAPAAG

SEQ ID NO: 45277 - protein, 134 aa, unidentified
  source 1..134: note = Chromatiales bacterium
  REGION 1..134: note = tr|A0A524KMU1|A0A524KMU1_9GAMM NADPH-dependent 7-cyano-7-deazaguanine reductase OS=Chromatiales bacterium; OX = 2026725 GN=queF PE=3 SV=1
MPSIPSKILETFKNPETVRAFTVRMRLPEFTCLCPKTGQPDFATMHLEYVPDSLCIELKSLKNYIWSFRDQGAFHEAVTNQILGDLVAVLAPRFMRLTAEFNVRGGIYTTVIAEHRQPGWQPAAPVSPPPGTPA

SEQ ID NO: 45278 - protein, 129 aa, Chromatium okenii
  REGION 1..129: note = tr|A0A2S7XR84|A0A2S7XR84_9GAMM NADPH-dependent 7-cyano-7-deazaguanine reductase OS=Chromatium okenii; OX = 61644 GN=queF PE=3 SV=1
MPSAPSKTLETFPNPQQERDYTIRMRIPEFTCLCPKTGQPDFAELRLEYVPDQLCIELKALKNYIWSYRNDGAFHEAITNRILSDLVVTIAPRFMRLTAEFNVRGGIFTTVIAEHRAVGWEPPTPVQLP

SEQ ID NO: 45279 - protein, 278 aa, Chromatocurvus halotolerans
  REGION 1..278: note = tr|A0A4R2KY61|A0A4R2KY61_9GAMM NADPH-dependent 7-cyano-7-deazaguanine reductase OS=Chromatocurvus halotolerans OX=1132028 GN=EV688_102296 PE=3 SV=1
MSGTPEARGELLLGRQVEYTDVYTPQLLQPIPRQQGRAALGLESGALSFYGEDVWHAYELSWLDPGGRPRVAAARLVIPAFSPNLVESKSLKLYLNSVNNTVFRDETALQRTLADDISAAVGAAVELELLSCDDPNLAGIQAPGECIDGAAFSAPEGEPSASLLLRSTPESIVTQVLHSHLLRSLCPVTAQPDWATLVVKYTGPLLDPASLLQYVVAFRRHQEFHEQCVERIFCDIRAALSPEALSVHALYTRRGGLDICPWRSTEGGAAPRFRLNRQ

SEQ ID NO: 45280 - protein, 271 aa, Chromatocurvus sp.
  REGION 1..271: note = tr|A0A2N5Y4H4|A0A2N5Y4H4_9GAMM NADPH-dependent 7-cyano-7-deazaguanine reductase OS=Chromatocurvus sp. F02; OX = 1905677 GN=queF PE=3 SV=1
MKPSELLLGKQTPVVDHYAPELLFPIPRQEGREQLGLVAPLPFEGADIWHAYELSWLDANDKAQARVGRFSVPAGSPNLVESKSFKLYLNSLNNAVFADDAAACACITGDLSAAAGANVTLALFPVDDPALAGGQLPGICIDGAPGRWPRREPEAAMLQCSSADVVEEKLYSHLLRSLCPVTGQPDWATLWLHYRGPALEHAALLSYILAYREHQDFHEQCVERIFRDLQKCVAPEFLHLQAFYTRRGGLDINPYRSSGGGMPLNLRLGRQ

SEQ ID NO: 45281 - protein, 278 aa, unidentified
  source 1..278: note = Chromobacterium amazonense
  REGION 1..278: note = tr|A0A2S9X181|A0A2S9X181_9NEIS NADPH-dependent 7-cyano-7-deazaguanine reductase OS=Chromobacterium amazonense OX=1382803 GN=queF PE=3 SV=1
MMQNLTPEHSPLGKTVSYQDQYDPSLLFPIARQTKREEIGVDEAALPFAGVDIWTGFELSWLNAKGKPQVGIATFRIPAASPRLIESKSFKLYLNSYNQTRMDSMDALAAQLARDLSEAAGAEVSVSILLPQAFAAEQVRELAGEYLDDLDIAVGNYAPCPEVLKADEAEIVSETLCSNLLKSNCLVTGQPDWGSVSIRYTGPKIDREALLRYLIGFRQHNEFHEQCVERIFVDVLRACAPAQLTVYARYTRRGGLDINPWRSNFETAPQDNVRTARQ

SEQ ID NO: 45282 - protein, 279 aa, Chromobacterium haemolyticum
  REGION 1..279: note = tr|A0A1W0CCL0|A0A1W0CCL0_9NEIS NADPH-dependent 7-cyano-7-deazaguanine reductase OS=Chromobacterium haemolyticum OX=394935 GN=queF PE=3 SV=1
MNTQAMSPEQSPLGKTVSYQDHYAPGLLFPIPRQVKRDEIGVDASALPFAGVDIWTGFELSWLNARGKPQVGIATFRIPADSPKLIESKSFKLYLNSYNQTRMAGLDALRRQLADDLSAAAGKAIGVDIMLPQQFAGETIAELAGDCIDDLDIEVDNYAPCPQILRADAGDVVSETLCSHLLKSNCLVTGQPDWGSVQIRYTGPRLDHEALLRYLIGFRQHNEFHEQCVERIFTDLLRACAPSRLTVYARYTRRGGLDINPFRSNCGEMPVGNTRTARQ

SEQ ID NO: 45283 - protein, 279 aa, Chromobacterium haemolyticum
  REGION 1..279: note = tr|A0A2T5P1J4|A0A2T5P1J4_9NEIS NADPH-dependent 7-cyano-7-deazaguanine reductase OS=Chromobacterium haemolyticum OX=394935 GN=queF PE=3 SV=1
MNTQSMSPEQSPLGKTVSYQDHYAPGLLFPIPRQVKRDEIGVDAAALPFAGVDIWTGFELSWLNARGKPQVGIATFRIPADSPKLIESKSFKLYLNSYNQTRMAGLDALRRQLADDLSAAAGKAIGVDIMLPQQFAGETIAELAGDCIDDLDIEVDNYAPCPQILRADAGNVASETLCSHLLKSNCLVTGQPDWGSVQIRYTGPRLDREALLRYLIGFRQHNEFHEQCVERIFTDLLRACAPSRLTVYARYTRRGGLDINPFRSNCGEMPVGNTRTARQ

SEQ ID NO: 45284 - protein, 277 aa, Chromobacterium sp.
  REGION 1..277: note = tr|A0A2K4MUC8|A0A2K4MUC8_9NEIS NADPH-dependent 7-cyano-7-deazaguanine reductase OS=Chromobacterium sp. MWU13-2610 OX=2077146 GN=queF PE=3 SV=1
MQNLTPEHSPLGKTVSYQDQYDPSLLFPIARQTKREEIGVEEAALPFAGIDIWTGFELSWLNPRGKPQVGIATFRIPAASPRLIESKSFKLYLNSYNQTRMDSVNALAAQLARDLSEAAGAEVDVSIALPPAFAAEQVCELAGECLDDLDIAVDNYAPCPEVLKADATEIVSETLCSNLLKSNCLVTGQPDWGSVSIRYTGPKIDREALLRYLIGFRQHNEFHEQCVERIFVDVLRACAPTQLTVYARYTRRGGLDINPWRSNFEAAPQDNVRTARQ

SEQ ID NO: 45285 - protein, 279 aa, Chromobacterium sp.
  REGION 1..279: note = tr|A0A344UGT1|A0A344UGT1_9NEIS NADPH-dependent 7-cyano-7-deazaguanine reductase OS=Chromobacterium sp. IIBBL 274-1 OX=2202142 GN=queF PE=3 SV=1
MNTHATTPEHSPLGKTVSYQDQYDPSLLFPIARKTKRDEIGVDEAALPFAGVDIWTGFELSWLNARGKPQVGIATFRIPAASPRLIESKSFKLYLNSYNQTRMDGVDALSAQLARDLSAAAGAEVSVSIALPQAFAAEQVRELAGECIDELDIEVDRYAPCPEVLKADAADIVSETLCSNLLKSNCLVTGQPDWGSVSIRYTGPKIDREALLRYLIGFRQHNEFHEQCVERIFVDVLRACAPEKLTVYARYTRRGGLDINPWRSNADAAPTDNVRTARQ

SEQ ID NO: 45286 - protein, 279 aa, unidentified
  source 1..279: note = Chromobacterium sphagni
  REGION 1..279: note = tr|A0A1S1X0R8|A0A1S1X0R8_9NEIS NADPH-dependent 7-cyano-7-deazaguanine reductase OS=Chromobacterium sphagni OX=1903179 GN=queF PE=3 SV=1
MNTHAATPEHSPLGKTVCYQDHYDKSLLFPIARQTKRDEIGVEETALPFAGVDIWTGFELSWLNTRGKPQVAIATFRIPADSPRLIESKSFKLYLNSYNQTRLDSVAALATQLAGDLSEAAGAQVEVGITLPRDFAAEQVRELAGEYIDDLDIAVDNYAPCPHILQADAADIVSETLCSNLLKSNCLVTGQPDWGSVAIRYTGPRIDREALLRYLIGFRQHNEFHEQCVERIFVDVLRACAPEQLTVYARYTRRGGLDINPWRSNFESAPQDNVRAARQ

SEQ ID NO: 45287 - protein, 277 aa, unidentified
  source 1..277: note = Chromobacterium vaccinii
  REGION 1..277: note = tr|A0A2L2B4P2|A0A2L2B4P2_9NEIS NADPH-dependent 7-cyano-7-deazaguanine reductase OS=Chromobacterium vaccinii OX=1108595 GN=queF PE=3 SV=1
MSHLTPEHSPLGKTVSYQDQYDPSLLFPIARQAKRDEIGVDEAALPFAGVDIWTGFELSWLNPRGKPQVGIATFRIPAASPRLIESKSFKLYLNSYNQTRMDGVDALSAQLARDLSAAAGAEVSVSIALPQAFAAEQVRELAGEYIDELDIEVDNYAPCPEVLKADAADIVSETLCSNLLKSNCLVTGQPDWGSVSIRYTGPKINREALLRYLIGFRQHNEFHEQCVERIFVDVLRACAPTQLTVYARYTRRGGLDINPWRSNADTAPASNIRTARQ

SEQ ID NO: 45288 - protein, 277 aa, unidentified
  source 1..277: note = Chromobacterium vaccinii
  REGION 1..277: note = tr|A0A1D9LG50|A0A1D9LG50_9NEIS NADPH-dependent 7-cyano-7-deazaguanine reductase OS=Chromobacterium vaccinii OX=1108595 GN=queF PE=3 SV=1
MSHLTPEHSPLGKTVSYQDQYDPSLLFPIARKTKRDEIGVDEAALPFAGIDIWTGFELSWLNARGKPQVGIATFRIPAASPRLIESKSFKLYLNSYNQTRMDGVDALSAQLARDLSAAAGAEVSVSIALPQAFAAEQVRELAGEYIDELDIEVDHYSPCPEILKADAADIVSETLCSNLLKSNCLVTGQPDWGSVSIRYTGPKIDREALLRYLIGFRRHNEFHEQCVERIFVDVLRACAPEKLTVYARYTRRGGLDINPWRSNADAAPTDNVRAARQ

SEQ ID NO: 45289 - protein, 279 aa, Chromobacterium violaceum
  REGION 1..279: note = sp|Q7NRN0|QUEF_CHRVO NADPH-dependent 7-cyano-7-deazaguanine reductase OS=Chromobacterium violaceum (strain ATCC 12472 / DSM 30191 / JCM 1249 / NBRC 12614 / NCIMB 913 1 / NCTC 9757) OX=243365 GN=queF PE=3; SV = 1
MNIHAATPEHSPLGKTVSYQDQYDPSLLFPIARQTKRDEIGVDEAALPFAGVDIWTGFELSWLNARGKPQIGIATFRIPAGSPRLIESKSFKLYLNSYNQTRMDGIDALAAQLARDLSAAAGAEVAVSIALPQAFAAERIAELAGECIDELDIAVDNYAPCPEILSADSTAIVSETLCSNLLKSNCLVTGQPDWGSVSIRYTGPKIDREALLRYLIGFRRHNEFHEQCVERIFVDVLRACAPTKLTVYARYTRRGGLDINPWRSNCDAAPTDNVRTARQ

SEQ ID NO: 45290 - protein, 277 aa, Chromobacterium violaceum; identical to SEQ ID NO: 45288
  REGION 1..277: note = tr|A0A381FV22|A0A381FV22_CHRVL NADPH-dependent 7-cyano-7-deazaguanine reductase OS=Chromobacterium violaceum OX=536 GN=queF PE=3 SV=1

SEQ ID NO: 45291 - protein, 277 aa, Chromohalobacter canadensis
  REGION 1..277: note = tr|A0A285VJJ5|A0A285VJJ5_9GAMM NADPH-dependent 7-cyano-7-deazaguanine reductase OS=Chromohalobacter canadensis OX=141389 GN=queF PE=3 SV=1
MSERDETLAHAPLGRESAYPEHYDAGLLFPIPRQANRAPLGLDDVALPFEGEDEWHAFELSWLDAKGKPIVAVARFRLPADSPSLIESKSWKLYLNSFNQTHFDSREAVIDTLERDLAQAAGAPVTVELFGVEDEALTPRALPGECLDDLDVSIEHYTPTPELIEVGEEVVDETLHSHLLKSNCPVTGQPDWGSVLIRYRGPRLEREALLKYLISYRQHQDFHEHCVEHLFVDLMARARPERLLVMARYVRRGGLDISPWRGTPGERPPTPLRLARQ

SEQ ID NO: 45292 - protein, 277 aa, Chromohalobacter japonicus
  REGION 1..277: note = tr|A0A1Q8T892|A0A1Q8T892_9GAMM NADPH-dependent 7-cyano-7-deazaguanine reductase OS=Chromohalobacter japonicus OX=223900 GN=queF PE=3 SV=1
MSERDETLAHAPLGRESAYPEHYDAGLLFPIPRQANRAPLGLDDAALPFEGEDEWHAFELSWLDAKGKPIVAVARFRLPADSPSLIESKSWKLYLNSFNQTRFDSREAVAETLERDLAQAAGAPVAVALFGVEDDALTPRALPGECLDDLDVSIEHYTPTPELIEVGEEIVDETLHSHLLKSNCPVTGQPDWGSVLIRYRGPRLEREALLKYLISYRQHQDFHEHCVEHLFVDLMARAKPERLLVMARYVRRGGLDISPWRGTPGERPPTPLRLARQ

SEQ ID NO: 45293 - protein, 277 aa, Chromohalobacter marismortui
  REGION 1..277: note = tr|A0A4R7NV47|A0A4R7NV47_9GAMM NADPH-dependent 7-cyano-7-deazaguanine reductase OS=Chromohalobacter marismortui OX=42055 GN=queF PE=3 SV=1
MSERDETLEHAPLGRESAYPEHYDAGLLFPIPRQANRAPLGLDDAALPFEGEDEWHAFELSWLDAKGKPIVAVARFRLPADSPSLIESKSWKLYLNGFNQTRFDSREAVIGTLERDLAQAAGAPVTVELFGVEDEALTPRALPGECLDDLDVSIEHYTPTPELIEVGEEIVDETLHSHLLKSNCPVTGQPDWGSVLIRYRGPRLAREALLKYLISYRQHQDFHEHCVEHLFVDLMARARPERLLVMARYVRRGGLDISPWRGTPGERPPTPLRLARQ

SEQ ID NO: 45294 - protein, 277 aa, Chromohalobacter salexigens
  REGION 1..277: note = sp|Q1QXV0|QUEF_CHRSD NADPH-dependent 7-cyano-7-deazaguanine reductase OS=Chromohalobacter salexigens (strain DSM 3043 / ATCC BAA-138 / NCIMB 13768); OX = 290398 GN=queFPE=3 SV=1
MSERDKTLEHAPLGRESAYPEHYDAGLLFPIPRQANRAPLGLDDAALPFEGEDEWHAFELSWLDAKGKPIVAVARFRLPADSPSLIESKSWKLYLNSFNQTRFDRREAVIDTLERDLAQAAGASVAVALFGVEDDALMPRALPGECLDDLDVSIEYYTPTPGLLEVGEEIVEETLHSHLLKSNCPVTGQPDWGSVLIRYRGPRLERDALLKYLISYRQHQDFHEHCVEHLFVDLMARARPERLLVMARYVRRGGLDISPWRGTPGERPPTPLRLARQ

SEQ ID NO: 45295 - protein, 277 aa, Chromohalobacter salexigens
  REGION 1..277: note = tr|A0A4Q0HHE3|A0A4Q0HHE3_CHRSL NADPH-dependent 7-cyano-7-deazaguanine reductase OS=Chromohalobacter salexigens OX=158080 GN=queF PE=3 SV=1
MSERDETLEHAPLGRESAYPEHYDAGLLFPIPRQANRTPLGLDDAALPFEGEDEWHAFELSWLDAKGKPIVAVARFRLPADSPSLIESKSWKLYLNSFNQTRFDSREAVIDTLERDLAQAAGAPVAVALFGVEDDALMPRALPGECLDDLDVSIEHYTPTPELLEVGEEIVEETLHSHLLKSNCPVTGQPDWGSVLIRYRGPRLEREALLKYLISYRQHQDFHEHCVEHLFVDLMARARPERLLVMARYVRRGGLDISPWRGTPGERPPTPLRLARQ

SEQ ID NO: 45296 - protein, 131 aa, unidentified
  source 1..131: note = Chroococcales cyanobacterium
  REGION 1..131: note = tr|A0A3N5INK3|A0A3N5INK3_9CHRO NADPH-dependent 7-cyano-7-deazaguanine reductase OS=Chroococcales cyanobacterium metabat2.561 OX=2485785 GN=queF PE=3 SV=1
MVQSSEKIEVKYGEREIAEGTLITFPNPRPGRNYDIQITLPEYTCKCPFSGYPDFATIYLSYVPDQKVMELKAIKLYINSYRDRYISHEEAINQILDDLVAACEPLQMKVKGDFHPRGNVHTVVEVMYKKE

SEQ ID NO: 45297 - protein, 155 aa, unidentified
  source 1..155: note = Chroococcales cyanobacterium
  REGION 1..155: note = tr|A0A2G7GIJ6|A0A2G7GIJ6_9CHRO NADPH-dependent 7-cyano-7-deazaguanine reductase OS=Chroococcales cyanobacterium IPPAS B-1203 OX=2049454 GN=queF PE=3 SV=1
MSHDSSLVQSASDSSLADSNAATEQKYGERQIADGKLITFPNPRIGRWYNIHITLPEFTCKCPFSGYPDFATIYITYVPNERVVELKAIKLYINSYRDRYISHEESINQILDDFVAACDPLEVSIKGDFNPRGNVHTVIEVTHKRESSNTLTVKN

SEQ ID NO: 45298 - protein, 128 aa, unidentified
  source 1..128: note = Chroococcidiopsis cubana
  REGION 1..128: note = tr|A0A433W0X7|A0A433W0X7_9CYAN NADPH-dependent 7-cyano-7-deazaguanine reductase OS=Chroococcidiopsis cubana SAG 39.79 OX=388085 GN=queF PE=3 SV=1
MSVEEIKYGERQIAEGKLITFPNPRIGRRYEIHITLPEFTCKCPFSGYPDFATINITYVPDERVVELKAIKLYINSYRDRYISHEESVNQILDDFVAACDPLEAHIKGDFAPRGNVHTVIEVHHQKSA

SEQ ID NO: 45299 - protein, 128 aa, unidentified; identical to SEQ ID NO: 45298
  source 1..128: note = Chroococcidiopsis sp.
  REGION 1..128: note = tr|A0A2P8QIZ2|A0A2P8QIZ2_9CYAN NADPH-dependent 7-cyano-7-deazaguanine reductase OS=Chroococcidiopsis sp. CCALA 051 OX=869949 GN=queF PE=3 SV=1

SEQ ID NO: 45300 - protein, 163 aa, unidentified
  source 1..163: note = Chroococcidiopsis sp.
  REGION 1..163: note = tr|A0A2S6VGG1|A0A2S6VGG1_9CYAN NADPH-dependent 7-cyano-7-deazaguanine reductase OS=Chroococcidiopsis sp. TS-821 OX=1378066 GN=queF PE=3 SV=1
MSNESSLVQSGTESLADDSETAQQQKYGERHIAEGKLITFPNPRIGRWYNIHITLPEFTCKCPFSGYPDFATIYITYVPNERVVELKSIKLYINSYRDRYISHEESINQILDDFVAACDPLEVQIKGDFNPRGNVHTAIEINYKREQTPIQNNVLARKESSFQ

SEQ ID NO: 45301 - protein, 142 aa, unidentified
  source 1..142: note = Chroococcidiopsis thermalis
  REGION 1..142: note = tr|K9U643|K9U643_CHRTP NADPH-dependent 7-cyano-7-deazaguanine reductase OS=Chroococcidiopsis thermalis (strain PCC 7203) OX=251229 GN=queF PE=3 SV=1
MKPSPDLTSQSAAEMSVEEIKYGERQIAEGKLITFPNPRIGRRYEIHITLPEFTCKCPFSGYPDFATINITYVPDERVVELKAIKLYINSYRDRYISHEESVNQILDDFVAACDPLEAHIKGDFAPRGNVHTVIEVHHQKSA

SEQ ID NO: 45302 - protein, 157 aa, unidentified
  source 1..157: note = Chroogloeocystis siderophila
  REGION 1..157: note = tr|A0A1U7HVA8|A0A1U7HVA8_9CHRO NADPH-dependent 7-cyano-7-deazaguanine reductase OS=Chroogloeocystis siderophila 5.2 s.c.1 OX=247279 GN=queF PE=3 SV=1
MQSGTEASLAADNETVEQQKYGERHINEGKLITFPNPRIGRWYNIYITLPEFTCKCPFSGYPDFATIYINYVPNERVVELKAIKLYINSYRDRYISHEESINQILDDFVAACDPLEVQIKGDFNPRGNVHTVIEVTHKREQTPTQSNTLTRKESDLK

SEQ ID NO: 45303 - protein, 282 aa, Chryseobacterium sp.
  REGION 1..282: note = tr|A0A2G7TAR7|A0A2G7TAR7_9FLAO NADPH-dependent 7-cyano-7-deazaguanine reductase QueF OS=Chryseobacterium sp. B5 OX=2050562 GN=CTI11_08935 PE=3 SV=1
MNTPEQSQLGKSSAYIDQYAPSLLFPLPRAPKREEIGIQGSQMPFFGADLWTAFELSWLNLRGKPQVALVHFTIPCETPNLIESKSFKLYLNSFNNTRLADAAEVQARLRTDLAEALWRGSEQKGSIGVKIIGLDRFDQEMVQELDGLLLDRLDVECTQYQPAPELLRANHEEGPVTETLVSHLLKSNCLVTGQPDWGSVQIRYSGAQIDQEGLLQYLVSFRNHNEFHEQCVERIFMDIWTRCRPLKLSVYARYTRRGGLDINPFRTSHPGALPANVRSARQ

SEQ ID NO: 45304 - protein, 166 aa, unidentified
  source 1..166: note = Chryseomicrobium excrementi
  REGION 1..166: note = tr|A0A2M9F0U4|A0A2M9F0U4_9BACL NADPH-dependent 7-cyano-7-deazaguanine reductase OS=Chryseomicrobium excrementi OX=2041346 GN=queF PE=3 SV=1
MSGRTYEQGLDELTLLGNQGTKYPQDYAPEVLEAVDSLHSNRDYFVKFNAPEFTSLCPITGQPDFATMYISYIPDQKIVESKSLKLYLFSFRNHGDFHEDCVNIIMNDLINLLNPRYIEVWGKFTPRGGISIDPWCNYGKPGTKYEEMAFHRLMNHDLYPEKVDNR

SEQ ID NO: 45305 - protein, 189 aa, unidentified
  source 1..189: note = Chthoniobacter flavus
  REGION 1..189: note = tr|B4D1V6|B4D1V6_9BACT NADPH-dependent 7-cyano-7-deazaguanine reductase OS=Chthoniobacter flavus Ellin428 OX=497964 GN=queF PE=3 SV=1
MHLYGDADCPEPGELPDSAEIIARDSHSTLIPVTTPKKYSRLSLLGHTAKFPEHPKAATLETFKNENAKRDYWITFECGEFTSMCPVTGQPDFAKIRIEYIPGELCIETKSLKFYLASFRNTRSFNEAIVNRILDDIVEACRPRHAMVHGEFAPRGGIGVIVDAEYPDRPENAKAPKRTKPASPRRTRS

SEQ ID NO: 45306 - protein, 122 aa, unidentified
  source 1..122: note = Chthoniobacterales bacterium
  REGION 1..122: note = tr|A0A2W5YKJ3|A0A2W5YKJ3_9BACT NADPH-dependent 7-cyano-7-deazaguanine reductase OS=Chthoniobacterales bacterium OX=2201154 GN=queF PE=3 SV=1
MPASPDQARLETFPNPVRRDYRIRFETADFTSLCPVTGQVDFAQITIEYAPDALCVESKSLKFYLASYRNERAFNEAVTNRILDDFVRACSPREAIVTAEFSARGGIALTVRAEFPDKTRKR

SEQ ID NO: 45307 - protein, 152 aa, unidentified
  source 1..152: note = Chthoniobacterales bacterium
  REGION 1..152: note = tr|A0A2W5YUW8|A0A2W5YUW8_9BACT NADPH-dependent 7-cyano-7-deazaguanine reductase OS=Chthoniobacterales bacterium OX=2201154 GN=queF PE=3 SV=1
MSRKTGLTLLGRNVARLPASPAEATLETFPNPARRDYHIHFETADFTSLCPVTGQADFARIEIEYVPDKLCVESKSLKFYLASYRNERAFNEAVTNRILNDFVRACSPREATVTAAFSARGGIALTVRARFPDGAGAERNGESSNAARHRSA

SEQ ID NO: 45308 - protein, 134 aa, Chthonomonas calidirosea
  REGION 1..134: note = tr|S0EV12|S0EV12_CHTCT NADPH-dependent 7-cyano-7-deazaguanine reductase OS=Chthonomonas calidirosea (strain DSM 23976 / ICMP 18418 / T49); OX = 1303518 GN=queF PE=3 SV= 1
MDLTRLLRGEMSREEQVSLLETFDNPRPERDYLIVHTCPEFTSVCPKTGQPDFATITIEYVPDRKCLELKALKLYFFSYRNQGIYYEAVVNRILDDLVSVCHPRRMTVRGEFNVRGGFSSVVTAEYRQEEAKRT

SEQ ID NO: 45309 - protein, 154 aa, unidentified
  source 1..154: note = Ciceribacter sp.
  REGION 1..154: note = tr|A0A4Q2SZT8|A0A4Q2SZT8_9RHIZ NADPH-dependent 7-cyano-7-deazaguanine reductase OS=Ciceribacter sp. F8825; OX = 2509717 GN=queF PE=3 SV=1
MSKTDVSGLTQLGQSVEAPTAPESAVLERVPNGNAGTDYVVRFTAPEFTSLCPMTGQPDFAHIVIDYIPGDWLVESKSLKLFLFSFRNHGAFHEDCSIYIAGRIIDLLQPKWLRIGAYWYPRGGIPIDVFWQTGEAPAGVWLPDQGVPTYRGRG

SEQ ID NO: 45310 - protein, 154 aa, Citreicella sp.
  REGION 1..154: note = tr|D0DDU3|D0DDU3_9RHOB NADPH-dependent 7-cyano-7-deazaguanine reductase OS=Citreicella sp. SE45; OX = 501479 GN=queF PE=3 SV=1
MTDSIYSNLRQLGGETRIPASPEEAELERVANPQADVTYNVRFTAPEFTSLCPMTGQPDFAHLVIDYAPGKWLVESKSLKLYLTSFRNHGAFHEDCTISIARRLVGFLEPQWLRIGGYWYPRGGIPIDVFWQTGPLPEGLWLPDQGVPPYRGRG

SEQ ID NO: 45311 - protein, 155 aa, Citreimonas salinaria
  REGION 1..155: note = tr|A0A1H3LD81|A0A1H3LD81_9RHOB NADPH-dependent 7-cyano-7-deazaguanine reductase OS=Citreimonas salinaria; OX = 321339 GN=queF PE=3 SV=1
MSSNHIYSGLKQLGQKSEIPESPEAAELERVPNPQDDARYAVRFTAPEFTSLCPMTGQPDFAHIVIDYIPSKWLVESKSLKLYLTSFRNHGAFHEDCTVSIGRRLTEFLEPEWLRIGGYWYPRGGIPIDVFYQTGPAPTGVWIPDQGVPAYRGRG

SEQ ID NO: 45312 - protein, 282 aa, Citrobacter amalonaticus
  REGION 1..282: note = tr|A0A2S4RW32|A0A2S4RW32_CITAM NADPH-dependent 7-cyano-7-deazaguanine reductase OS=Citrobacter amalonaticus OX=35703 GN=queF PE=3 SV=1
MSSYENHQALDGLTLGKSTDYRDNYDASLLQGVPRSLNRDPLGLHADNLPFRGADIWTLYELSWLNAKGLPQVAVGHVELDYTSVNLIESKSFKLYLNSFNQTRFDSWDAVRQTLEKDLRACAQGEVSVALYRIDELEGQPIAHFHGACIDEQDISIDHYQFSTDYLENAASGEKVVEETLVSHLLKSNCLITHQPDWGSIQIQYRGHKIDREKLLRYLVSFRHHNEFHEQCVERIFNDILRFCQPEKLSVYARYTRRGGLDINPWRTNTDFAPATGRLVRQ

SEQ ID NO: 45313 - protein, 282 aa, Citrobacter amalonaticus
  REGION 1..282: note = tr|A0A381GCK9|A0A381GCK9_CITAM NADPH-dependent 7-cyano-7-deazaguanine reductase OS=Citrobacter amalonaticus OX=35703 GN=queF PE=3 SV=1
MSSYENHQALDGLTLGKSTDYRDIYDPSLLQGVPRSLNRDPLGLKADSLPFHGADIWTLYELSWLNARGLPQVAVGHVELDYTSLNLIESKSFKLYLNSFNQTRFDSWEAVQQTLENDLRACAEGKVTVALYRLDELEGQPVAHFHGTCIDDQDIDIDNYQFTTDYLQSATSGEKVVEETLVSHLLKSNCLITHQPDWGSIQIQYRGRKIDREKLLRYLISFRHHNEFHEQCVERIFNDLLRFCQPEKLSVYARYTRRGGLDINPWRSNTDFVPATGRLVRQ

SEQ ID NO: 45314 - protein, 282 aa, Citrobacter braakii
  REGION 1..282: note = tr|A0A4R0LUN1|A0A4R0LUN1_CITBR NADPH-dependent 7-cyano-7-deazaguanine reductase OS=Citrobacter braakii; OX = 57706 GN=queF PE=3 SV=1
MSSYENHQALDDLTLGKSTDYRDNYDASLLQGVPRSLNRDPLDLQADNLPFHGADIWTLYELSWLNANGLPQVAVGHVELDYTSVNLIESKSFKLYLNSFNQTRFDSWDAVRQTLENDLRACAQGDVSVALYRLDELEGQPIAHFNGTCIDNQDIVINNYQFSTEYLENAVGGEKAVEETLVSHLLKSNCLITHQPDWGSIQIQYRGRKIDREKLLRYLVSFRHHNEFHEQCVERIFNDILRFCQPEKLSVYARYTRRGGLDINPWRTNTDFTPATGRLVRQ

SEQ ID NO: 45315 - protein, 282 aa, Citrobacter braakii
  REGION 1..282: note = tr|A0A1R0FYY5|A0A1R0FYY5_CITBR NADPH-dependent 7-cyano-7-deazaguanine reductase OS=Citrobacter braakii; OX = 57706 GN=queF PE=3 SV=1
MSSYENHQALDGLTLGKSTDYRDNYDASLLQGVPRSLNRDPLDLQADNLPFHGADIWTLYELSWLNANGLPQVAVGHVELDYTSVNLIESKSFKLYLNSFNQTRFDSWDAVRQTLENDLRACAQGDVSVALYRLDELEGQPIAHFNGTCIDNQDIVIDNYQFSTEYLENAVGGEKAVEETLVSHLLKSNCLITHQPDWGSIQIQYRGRKIDREKLLRYLVSFRHHNEFHEQCVERIFNDILRFCQPEKLSVYARYTRRGGLDINPWRTNTDFTPATGRLVRQ

SEQ ID NO: 45316 - protein, 282 aa, Citrobacter farmeri
  REGION 1..282: note = tr|A0A223JVX8|A0A223JVX8_9ENTR NADPH-dependent 7-cyano-7-deazaguanine reductase OS=Citrobacter farmeri; OX = 67824 GN=queF PE=3 SV=1
MSSYENHQALDGLTLGKSTDYRDLYDPSLLQGVPRSLNRDPLGLKAGSLPFHGADIWTLYELSWLNARGLPQVAVGHVELDYTSVNLIESKSFKLYLNSFNQTRFDSWEAVQRTLENDLRACAEGNVTVALYRLDELEGQPVAHFHGTCIDFQDIGIDNYQFTTDFLQSAASGEKIVEETLVSHLLKSNCLITHQPDWGSIQIQYRGRKIDREKLLRYLVSFRHHNEFHEQCVERIFNDLLRFCQPEKLSVYARYTRRGGLDINPWRSNTDFVPATGRLVRQ

SEQ ID NO: 45317 - protein, 282 aa, Citrobacter freundii
  REGION 1..282: note = tr|A0A443Y4X9|A0A443Y4X9_CITFR NADPH-dependent 7-cyano-7-deazaguanine reductase OS=Citrobacter freundii; OX = 546 GN=queF PE=3 SV=1
MSSYENHQALNGLTLGKSTDYRDNYDASLLQGVPRSLNRDPLDLKADNLPFHGADIWTLYELSWLNANGLPQVAVGHVELDYTSVNLIESKSFKLYLNSFNQTRFDSWDAVRQTLENDLRACAQGDVSVALYRLDELEGQPIAHFNGTCIDNQDIVIDNYQFSTAYLENAVSSEKAVEETLVSHLLKSNCLITHQPDWGSIQIQYRGRKIDREMLLRYLVSFRHHNEFHEQCVERIFNDILRFCQPEKLSVYARYTRRGGLDINPWRTNTDFTPATGRLVRQ

SEQ ID NO: 45318 - protein, 282 aa, Citrobacter freundii
  REGION 1..282: note = tr|A0A4V1CCM5|A0A4V1CCM5_CITFR NADPH-dependent 7-cyano-7-deazaguanine reductase OS=Citrobacter freundii; OX = 546 GN=queF PE=3 SV=1
MSSYENHQALDGLTLGKSTDYRDNYDASLLQGVPRSLNRDPLDLKADNLPFRGADIWTLYELSWLNANGLPQVAVGHVELDYTSVNLIESKSFKLYLNSFNQTRFDSWDAVRQTLEHDLRACAEGDVHVALYRIDELEGQPIAHFNGTCIDDQDIVIDNYQFTTDYLENATSGEKAVEETLVSHLLKSNCLITHQPDWGSIQIQYRGRKIDREQLLRYLVSFRHHNEFHEQCVERIFNDILRFCQPEKLSVYARYTRRGGLDINPWRTNTDFVPAIGRLVRQ

SEQ ID NO: 45319 - protein, 282 aa, Citrobacter gillenii
  REGION 1..282: note = tr|A0A3E2KNU0|A0A3E2KNU0_9ENTR NADPH-dependent 7-cyano-7-deazaguanine reductase OS=Citrobacter gillenii; OX = 67828 GN=queF PE=3 SV=1
MSSYENHQALDGLTLGKSTDYRDNYDASLLQGVPRSLNRDPLDLKADNLPFHGADIWTLYELSWLNANGLPQVAVGHVELDYTSVNLIESKSFKLYLNSFNQTRFDSWDAVRQTLEHDLRACAEGDVHVALYRIDELEGQPIAHFNGTCIDDQDIVIDNYQFTTDYLENATSGEKAVEETLVSHLLKSNCLITHQPDWGSIQIQYRGRKIDREQLLRYLVSFRHHNEFHEQCVERIFNDILRFCQPEKLSVYARYTRRGGLDINPWRTNTDFVPAIGRLVRQ

SEQ ID NO: 45320 - protein, 282 aa, Citrobacter koseri
  REGION 1..282: note = sp|A8AP02|QUEF_CITK8 NADPH-dependent 7-cyano-7-deazaguanine reductase OS=Citrobacter koseri (strain ATCC BAA-895 / CDC 4225-83 / SGSC4696) OX=290338; GN = queF PE=3 SV= 1
MSSYENHQALDGLTLGKSTDYRDNYDASLLQGVPRSLNRDPLDLKADNLPFHGADIWTLYELSWLNAKGVPQVAVGHVELDYTSVNLIESKSFKLYLNSFNQTRFDSWDAVRQTLENDLRACAQGEVSVALYRLDELEGQPAAHFHGTCIDDQDITIDNYQFSTDYLENAASGEKVVEETLVSHLLKSNCLITHQPDWGSIQICYRGRKIDREKLLRYLVSFRHHNEFHEQCVERIFNDLLRFCQPEKLSVYARYTRRGGLDINPWRSNTDFVPATGRLVRQ

SEQ ID NO: 45321 - protein, 302 aa, Citrobacter koseri
  REGION 1..302: note = tr|A0A484VZ05|A0A484VZ05_CITKO NADPH-dependent 7-cyano-7-deazaguanine reductase OS=Citrobacter koseri; OX = 545 GN=queF PE=3 SV=1
MSSYENHQALDGLTLGKSTDYRDNYDASLLQGVPRSLNRDPLDLKADNLPFHGADIWTLYELSWLNAKGVPQVAVGHVELDYTSVNLIESKSFKLYLNSFNQTRFDSWDAVRQTLENDLRACAQGEVSVALYRLDELEGQPVAHFHGTCIDDQDITIDNYQFSTDYLENAASGEKVVEETLVSHLLKSNCLITHQPDWGSIQIRYRGRKIDREKLLRYLVSFRHHNEFHEQCVERIFNDLLRFCQPEKLSVLRTLYASWRSGYQPVAQQHRFCACDGQTGASVIFFSQFCAPDSARKGCERS

SEQ ID NO: 45322 - protein, 282 aa, Citrobacter murliniae
  REGION 1..282: note = tr|A0A4S3RYT0|A0A4S3RYT0_9ENTR NADPH-dependent 7-cyano-7-deazaguanine reductase OS=Citrobacter murliniae; OX = 67829 GN=queF PE=3 SV=1
MSSYENHQALDGLTLGKSTDYRDNYDVSLLQGVPRSLNRDPLDLKADNLPFHGADIWTLYELSWLNANGLPQVAVGHVELDYTSVNLIESKSFKLYLNSYNQTRFDSWDAVRQTLENDLRACAQGDVSVALYRIDELEGQPIAHFNGTCIDDQDIVIDSYEFSTEYLENAVSGEKAVEETLVSHLLKSNCLITHQPDWGSIQIQYRGRKIDREKLLRYLVSFRHHNEFHEQCVERIFNDILRFCQPEKLSVYARYTRRGGLDINPWRTNTNFVPAIGRLVRQ

SEQ ID NO: 45323 - protein, 282 aa, unidentified
  source 1..282: note = Citrobacter pasteurii
  REGION 1..282: note = tr|A0A0A1RBJ5|A0A0A1RBJ5_9ENTR NADPH-dependent 7-cyano-7-deazaguanine reductase OS=Citrobacter pasteurii; OX = 1563222 GN=queF PE=3 SV=1
MSSYENHRALDSLTLGKSTDYRDIYDASLLQGVPRSLNRDPLDLKADNLPFHGADIWTLYELSWLNANGLPQVAVGHVELDYTSVNLIESKSFKLYLNSFNQTRFDSWEHVRQTLEHDLRACAQGDVSVALYRLDEQEGQPIAHFNGTCIDNQDIVIDNYQFSTDYLENAVSGDKAVEETLVSHLLKSNCLITHQPDWGSIQIQYRGRKIDREKLLRYLVSFRHHNEFHEQCVERIFNDLLRFCQPEKLSVYARYTRRGGLDINPWRTNTDFTPATGRLVRQ

SEQ ID NO: 45324 - protein, 282 aa, unidentified
  source 1..282: note = Citrobacter portucalensis
  REGION 1..282: note = tr|A0A4P7UUA9|A0A4P7UUA9_9ENTR NADPH-dependent 7-cyano-7-deazaguanine reductase OS=Citrobacter portucalensis OX=1639133 GN=queF PE=3 SV=1
MSSYENHQALNGLTLGKSTDYRDNYDASLLQGVPRSLNRDPLDLKADNLPFHGADIWTLYELSWLNANGLPQVAVGHVELDYTSVNLIESKSFKLYLNSFNQTRFDSWDAVRQTLENDLRACAQGDVSVALYRLDELEGQPIAHFNGTCIDNQDIVIDNYQFSTAYLENAVSGEKAVEETLVSHLLKSNCLITHQPDWGSIQIQYRGRKIDREKLLRYLVSFRHHNEFHEQCVERIFNDILRFCQPEKLSVYARYTRRGGLDINPWRTNTDFTPATGRLVRQ

SEQ ID NO: 45325 - protein, 282 aa, unidentified
  source 1..282: note = Citrobacter portucalensis
  REGION 1..282: note = tr|A0A5A9EIQ8|A0A5A9EIQ8_9ENTR NADPH-dependent 7-cyano-7-deazaguanine reductase OS=Citrobacter portucalensis OX=1639133 GN=queF PE=3 SV=1
MSSYENHQALNGLTLGKSTDYRDNYDASLLQGVPRSLNRDPLDLKADNLPFHGADIWTLYELSWLNANGLPQVAVGHVELDCTSVNLIESKSFKLYLNSFNQTRFDSWDAVRQTLENDLRACAQGDVSVALYRLDELEGQPIAHFNGTCIDNQDIVIDNYQFSTAYLENAVSGEKAVEETLVSHLLKSNCLITHQPDWGSIQIQYRGRKIDREKLLRYLVSFRHHNEFHEQCVERIFNDILRFCQPEKLSVYARYTRRGGLDINPWRTNTDFTPATGRLVRQ

SEQ ID NO: 45326 - protein, 282 aa, Citrobacter rodentium
  REGION 1..282: note = tr|A0A482PH63|A0A482PH63_CITRO NADPH-dependent 7-cyano-7-deazaguanine reductase OS=Citrobacter rodentium; OX = 67825 GN=queF PE=3 SV=1
MSSYENHQALEGLTLGKSTDYRDNYDASLLQSVPRSLNRDPLGLHADTLPFHGADIWTLYELSWLNANGLPQVAVGHVELDYASVNLIESKSFKLYLNSFNQTRFADRETVRQTLERDLSACAQGQVKVSLFRLDELEGQPIAHFHGTCIDDQDISIDNYQFTTDYLHDAVSGEKAVEETLVSHLLKSNCLITHQPDWGSIQIQYRGRKIDREKLLRYLVSFRHHNEFHEQCVERIFNDLLRFCQPEKLSVYARYTRRGGLDINPWRSNTEFVPAIGRLVRQ

SEQ ID NO: 45327 - protein, 282 aa, Citrobacter sp.
  REGION 1..282: note = tr|A0A4Y5ZK93|A0A4Y5ZK93_9ENTR NADPH-dependent 7-cyano-7-deazaguanine reductase OS=Citrobacter sp. CF971; OX = 2566012 GN=queF PE=3 SV=1
MSSYENHQALDGLTLGKSTYYRDNYDASLLQGVPRSLNRDPLDLKADTLPFHGADIWTLYELSWLNTNGLPQVAVGHVELDYTSVNLIESKSFKLYLNSFNQTRFDSWDAVRQTLENDLRACAQGDVSVALYRLDELEGQPIAHFNGTCIDNQDIVIDNYQFSTAYLENAVSGEKAVEETLVSHLLKSNCLITHQPDWGSIQIQYRGRKIDREKLLRYLVSFRHHNEFHEQCVERIFNDILRFCQPEKLSVYARYTRRGGLDINPWRTNTDFTPATGRLVRQ

SEQ ID NO: 45328 - protein, 282 aa, Citrobacter sp.
  REGION 1..282: note = tr|A0A0J1L0C6|A0A0J1L0C6_9ENTR NADPH-dependent 7-cyano-7-deazaguanine reductase OS=Citrobacter sp. MGH103; OX = 1686378 GN=queF PE=3 SV=1
MSSYENHQALDGLTLGKSTDYRDNYDASLLQGVPRSLNRDPLDLKADTLPFHGADIWTLYELSWLNTNGLPQVAVGHVELDYTSVNLIESKSFKLYLNSFNQTRFDSWDAVRQTLENDLRACAQGDVSVALYRLDELEGQPIAHFNGTCIDNQDIVIDNYQFSTAYLENAVSGEKAVEETLVSHLLKSNCLITHQPDWGSIQIQYRGRKIDREKLLRYLVSFRHHNEFHEQCVERIFNDILRFCQPEKLSVYARYTRRGGLDINPWRTNTDFTPATGRLVRQ

SEQ ID NO: 45329 - protein, 282 aa, Citrobacter werkmanii
  REGION 1..282: note = tr|A0A090TZJ8|A0A090TZJ8_9ENTR NADPH-dependent 7-cyano-7-deazaguanine reductase OS=Citrobacter werkmanii NBRC 105721 OX=1114921 GN=queF PE=3 SV=1
MSSYENHRALDGLTLGKSTDYRDNYDASLLQGVPRSLNRDPLDLKADNLPFHGADIWTLYELSWLNANGLPQVAVGHVELDYTSVNLIESKSFKLYLNSFNQTRFDSWEAVRQTLENDLRACAQGDVSVALYRLDELEGQPIAHFNGTCIDNQDIVIDNYQFSTDYLENAVSGEKAVEETLVSHLLKSNCLITHQPDWGSIQIQYRGRKIDREKLLRYLVSFRHHNEFHEQCVERIFNDILRFCQPEKLSVYARYTRRGGLDINPWRTNTDFTPATGRLVRQ

SEQ ID NO: 45330 - protein, 282 aa, Citrobacter werkmanii
  REGION 1..282: note = tr|A0A422V9J0|A0A422V9J0_9ENTR NADPH-dependent 7-cyano-7-deazaguanine reductase OS=Citrobacter werkmanii; OX = 67827 GN=queF PE=3 SV=1
MSSYENHRALDGLTLGKSTDYRDNYDASLLQGVPRSLNRDPLDLKADNLPFHGADIWTLYELSWLNANGLPQVAVGHVELDYTSVNLIESKSFKLYLNSFNQTRFDSWEAVRQTLENDLRACAQGDVSVALYRLDELEGQPIAHFNGTCIDNQDIVIDNYQFSTEYLENAVSGEKAVEETLVSHLLKSNCLITHQPDWGSIQIQYRGRKIDREKLLRYLVSFRHHNEFHEQCVERIFNDILRFCQPEKLSVYARYTRRGGLDINPWRTNTDFTPATGRLVRQ

SEQ ID NO: 45331 - protein, 282 aa, Citrobacter youngae
  REGION 1..282: note = tr|D4BGX2|D4BGX2_9ENTR NADPH-dependent 7-cyano-7-deazaguanine reductase OS=Citrobacter youngae ATCC 29220 OX=500640 GN=queF PE=3 SV=1
MSSYENHRALDGLTLGKSTDYRDNYDAGLLQGVPRSLNRDPLDLKADNLPFHGADIWTLYELSWLNANGLPQVAVGHVELDYTSVNLIESKSFKLYLNSFNQTRFDSWDAVRQTLENDLRACAQGDVSVALYRLDELEGQPIAHFNGTCIDNQDIVIDNYQFSTEYLENAVSGEKAVEETLVSHLLKSNCLITHQPDWGSIQIQYRGRKIDREKLLRYLVSFRHHNEFHEQCVERIFNDILRFCQPEKLSVYARYTRRGGLDINPWRTNTDFTPATGRLVRQ

SEQ ID NO: 45332 - protein, 282 aa, Citrobacter youngae
  REGION 1..282: note = tr|A0A549VC03|A0A549VC03_9ENTR NADPH-dependent 7-cyano-7-deazaguanine reductase OS=Citrobacter youngae; OX = 133448 GN=queF PE=3 SV=1
MSSYENHQALDGLTLGKSTDYRDIYDASLLQGVPRSLNRDPLDLKADNLPFHGADIWTLYELSWLNANGLPQVAVGHVELDYTSVNLIESKSFKLYLNSFNQTRFDSWEHVRQTLEHDLRACAQGDVSVALYRLDEQEGQPIAHFNGTCIDNQDIVIDNYQFSTDYLENAVSGEKAVEETLVSHLLKSNCLITHQPDWGSIQIQYRGRKIDREKLLRYLVSFRHHNEFHEQCVERIFNDLLRFCQPEKLSVYARYTRRGGLDINPWRTNTDFTPATGRLVRQ

SEQ ID NO: 45333 - protein, 159 aa, unidentified
  source 1..159: note = Citromicrobium sp.
  REGION 1..159: note = tr|A0A2P0AZU3|A0A2P0AZU3_9SPHN NADPH-dependent 7-cyano-7-deazaguanine reductase OS=Citromicrobium sp. RCC1897 OX=1812182 GN=queF PE=3 SV=1
MSDTSNDPQTGSTPRFLGQSTGLPASPEEAELDYVPNPREGSLYMVRFSAPEFTSLCPVTGQPDFAHLVIDYAPQATIVESKSLKLFLGSFRNHCGFHEDVTVGIGQRLFDEMAPRWLRIGGYWYPRGGIPIDVFWQSGPVPEGLWVPEQGVQNYRGRG

SEQ ID NO: 45334 - protein, 152 aa, unidentified
  source 1..152: note = Citromicrobium sp.
  REGION 1..152: note = tr|A0A326GFL5|A0A326GFL5_9SPHN NADPH-dependent 7-cyano-7-deazaguanine reductase OS=Citromicrobium sp.; OX = 2024827 GN=queF PE=3 SV=1
MSDTQGPRFLGSTTPLPSSPEEAELDYVPNPRGGHLYLVRFAAPEFTSLCPVTGQPDFAHLVLDYAPGETIVESKSLKLFLGSFRNHCGFHEDVTVGIGQRLFEEMEPRWLRIGGYWYPRGGMPIDVFWQSGAPPEDLWVPDQGVASYRGRG

SEQ ID NO: 45335 - protein, 165 aa, Cloacibacillus sp.
  REGION 1..165: note = tr|A0A1Y4GE29|A0A1Y4GE29_9BACT NADPH-dependent 7-cyano-7-deazaguanine reductase OS=Cloacibacillus sp. An23 OX=1965591 GN=queF PE=3 SV=1
MNGRTKEELSGVSLLGGKRVSYPDDYAPGLLETFPNKHTDNDYFVKFNCPEFTSLCPMTGQPDFATIYISYVPGERMVESKSLKLYLFSFRNHGDFHEDCVNIIMKDLIRLMDPKYIEVWGKFTPRGGISIDPYCNYGRKGTRWEQVAFERLARHDMYPEKVDNR

SEQ ID NO: 45336 - protein, 142 aa, unidentified
  source 1..142: note = Clostridia bacterium
  REGION 1..142: note = tr|A0A523BWQ7|A0A523BWQ7_9FIRM NADPH-dependent 7-cyano-7-deazaguanine reductase OS=Clostridia bacterium; OX = 2044939 GN=queF PE=3 SV=1
MPVGVEDRYAARRWDVQGYEAIDKQILETVAYEYPGSETTVECIYPEFTSVCPWTGLPDFATFKIRYVPREKLVELKSLKYYLHSFRNVGILQEHVVNRVRQDLVELLDPVYLQVEAEFNSRGGISTRLVSTHGVGAGPAAP

SEQ ID NO: 45337 - protein, 165 aa, unidentified
  source 1..165: note = Clostridia bacterium
  REGION 1..165: note = tr|A0A4R5JJ84|A0A4R5JJ84_9FIRM NADPH-dependent 7-cyano-7-deazaguanine reductase OS=Clostridia bacterium k32 OX=2528593 GN=queF PE=3 SV=1
MAGRTDQELEGITLLGNQGTKYKYDYDPSVLETFVNKHQDNDYFVKFNCPEFTSLCPKTGQPDFATIYISYVPDKLMVESKSLKLYLLSFRNHGDFHEDCINIIMKDLIKLLDPKYIEVWGKFTPRGGISIDPFCNYGKEGTKWKEVAENRLFYHDMYPEKIDNR

SEQ ID NO: 45338 - protein, 164 aa, unidentified
  source 1..164: note = Clostridiaceae bacterium
  REGION 1..164: note = tr|A0A316N2L0|A0A316N2L0_9CLOT NADPH-dependent 7-cyano-7-deazaguanine reductase OS=Clostridiaceae bacterium OX=1898204 GN=queF PE=3 SV=1
MVSHREEEKSITLLGNQNTKYADDYAPEVLETFINKHPDNDYFVKFNCPEFTSLCPITGQPDFATITISYVPGEKMVESKSLKLYLFSFRNHGDFHEDCVNVIMKDLIRLMDPKYIEVWGKFTPRGGISIDPYCNYGKKGTDWEEVARKRLFEHDMYPEKVDNR

SEQ ID NO: 45339 - protein, 165 aa, unidentified
  source 1..165: note = Clostridiales bacterium
  REGION 1..165: note = tr|A0A354IDB4|A0A354IDB4_9FIRM NADPH-dependent 7-cyano-7-deazaguanine reductase OS=Clostridiales bacterium OX=1898207 GN=queF PE=3 SV=1
MTGRSKEETLGVTLLGNQGTKYRDDYAPEVLETFVNKHPDNDYFVKFNCPEFTSLCPITGQPDFAAITISYVPAERMVESKSLKLYLFSFRNHGDFHEDCVNIIMKDLIRLMDPKYIEVWGKFTPRGGISIDPYCNYGKPGTRWEQVAWNRMANHDLYPEKVDNR

SEQ ID NO: 45340 - protein, 134 aa, unidentified
  source 1..134: note = Clostridiales bacterium
  REGION 1..134: note = tr|A0A0M2U779|A0A0M2U779_9FIRM NADPH-dependent 7-cyano-7-deazaguanine reductase OS=Clostridiales bacterium PH28_bin88 OX=1605376 GN=queF PE=3 SV=1
MSQYEFEILGKDVREPRRKLEVFPKPAGVEKVVMDSDEVTSLCPVTGQPDWETVVIEYAPDKHCIESKSLKLYLWSYRNEGVFCEALASQIAQDVHSACEPFWCKVTVMQKPRGGIKLTATAVAGNPEIQRRIP

SEQ ID NO: 45341 - protein, 165 aa, unidentified
  source 1..165: note = Clostridiales Family
  REGION 1..165: note = tr|A0A2V2G6U2|A0A2V2G6U2_9FIRM NADPH-dependent 7-cyano-7-deazaguanine reductase OS=Clostridiales Family XIII bacterium OX=2137877 GN=queF PE=3 SV=1
MSGRRKEELNGVTLLGSGKNSYKTDYAPEVLETFTNKHQENDYFVKFNCPEFTSLCPMTGQPDFACIYISYVPGAKMVESKSLKLYLFSFRNHGDFHEDCVNIIMKDLIRIMDPKYIEVWGKFTPRGGISIDPYCNYGKKGTVWEKVAFERLAQHDLYPEKIDNR

SEQ ID NO: 45342 - protein, 72 aa, unidentified
  source 1..72: note = Clostridioides difficile
  REGION 1..72: note = tr|A0A069AW54|A0A069AW54_CLODI NADPH-dependent 7-cyano-7-deazaguanine reductase OS=Clostridioides difficile OX=1496 GN=queF PE=3 SV=1
MVESKSLKLYLFSFRNHGDFHEDCMNIIMNDLIELMDPHYIEVWGKFTPRGGISIDPYTNYGRPNSKYEKNG

SEQ ID NO: 45343 - protein, 165 aa, unidentified
  source 1..165: note = [Clostridium] algidixylanolyticum
  REGION 1..165: note = tr|A0A419T821|A0A419T821_9FIRM NADPH-dependent 7-cyano-7-deazaguanine reductase OS=[Clostridium] algidixylanolyticum OX=94868 GN=queF PE=3 SV=1
MSGRNNQETIGITLLGNEGTKYEMNYNPAILESFVNKHLENDYFVKFNCPEFTSLCPITGQPDFATITIAYVPNVNMVESKSLKLYLFSFRNHGDFHEDCINVIMKDLIKLLNPKYIEVWGKFTPRGGISIDPYCNYGQANTKWEEIAFNRLVNHDLYPEKVDNR

SEQ ID NO: 45344 - protein, 167 aa, Clostridium bartlettii
  REGION 1..167: note = tr|R5X7A6|R5X7A6_9CLOT NADPH-dependent 7-cyano-7-deazaguanine reductase OS=Clostridium bartlettii CAG:1329 OX=1263063 GN=queF PE=3 SV=1
MLETGRQNKELEGLSLLGNQGTKYKFGYDPDILEVFDNKHPNNDYFVKFNCPEFTSLCPITGQPDFATIYISYIPGEKMVESKSLKLYLFSFRNHGDFHEDCMNIIMKDLIKLMSPKYIEVWGKFTPRGGISIDPYCNYGIPGTKYEKMAEHRMMNHDLYPEKVDNR

SEQ ID NO: 45345 - protein, 167 aa, Clostridium beijerinckii
  REGION 1..167: note = tr|A6LWG8|A6LWG8_CLOB8 NADPH-dependent 7-cyano-7-deazaguanine reductase OS=Clostridium beijerinckii (strain ATCC 51743 / NCIMB 8052) OX=290402; GN = queF PE=3 SV=1
MSESGRKSKELEGITLLGNQGTKYDYGYTPEVLEVFENKHPDNDYFVKFNCPEFTSLCPITGQPDFATIYISYIPNIKMVESKSLKLYLFSFRNHGDFHEDCMNIIMKDLIKLMDPKYIEVWGKFTPRGGISIDPYCNYGMKGTKFEDMANYRMMNHDMYPEKVDNR

SEQ ID NO: 45346 - protein, 167 aa, Clostridium beijerinckii; identical to SEQ ID NO: 45345
  REGION 1..167: note = tr|A0A0K2MEA1|A0A0K2MEA1_CLOBE NADPH-dependent 7-cyano-7-deazaguanine reductase OS=Clostridium beijerinckii NRRL B-598 OX=1428454 GN=queF PE=3 SV=1

SEQ ID NO: 45347 - protein, 167 aa, unidentified
  source 1..167: note = Clostridium bornimense
  REGION 1..167: note = tr|W6RS72|W6RS72_9CLOT NADPH-dependent 7-cyano-7-deazaguanine reductase OS=Clostridium bornimense; OX = 1216932 GN=queF PE=3 SV=1
MSHSGRQGSELDGITLLGNQGTKYDYGYNPDVLETFDNKHPDNDYFVKFNCPEFTSLCPITGQPDFATIYISYIPSIKMVESKSLKLYLFSFRNHGDFHEDCMNIIMKDLIKLMDPKYIEVWGKFTPRGGISIDPYCNYGKPGTKFEEMANYRMMNHDMYPEKVDNR

SEQ ID NO: 45348 - protein, 167 aa, Clostridium butyricum
  REGION 1..167: note = tr|A0A2S7F9M8|A0A2S7F9M8_CLOBU NADPH-dependent 7-cyano-7-deazaguanine reductase OS=Clostridium butyricum; OX = 1492 GN=queF PE=3 SV=1
MNQSGRKDKELEGLSLLGNQGTKYDYSYNPEVLEVFENKHPDNDYFVKFNCPEFTSLCPITGQPDFATIYISYIPSIKMVESKSLKLYLFSFRNHGDFHEDCMNIIMKDLIKIMDPKYIEVWGKFTPRGGISIDPYCNYGKGGTKFEEMANYRMMNHDLYPEKVDNR

SEQ ID NO: 45349 - protein, 167 aa, Clostridium butyricum
  REGION 1..167: note = tr|A0A3R9KCG0|A0A3R9KCG0_CLOBU NADPH-dependent 7-cyano-7-deazaguanine reductase OS=Clostridium butyricum; OX = 1492 GN=queF PE=3 SV=1
MNQSGRKDKELEGLSLLGNQGTKYDYSYNPEVLEVFENKHPDNDYFVKFNCPEFTSLCPITGQPDFATIYISYIPSIKMVESKSLKLYLFSFRNHGDFHEDCMNIIMKDLIKIMDPKYIEVWGKFTPRGGISIDPYCNYGKRGTKFEEMANYRMMNHDLYPEKVDNR

SEQ ID NO: 45350 - protein, 160 aa, Clostridium carnis
  REGION 1..160: note = tr|A0A3P6KDF8|A0A3P6KDF8_9CLOT NADPH-dependent 7-cyano-7-deazaguanine reductase OS=Clostridium carnis; OX = 1530 GN=queF PE=3 SV=1
MREDLDLNLLGNQNVKYPFSYAPGVLETFDNKHPDNDYFVKFNCPEFTSLCPITSQPDFATIYISYIPDKKMVESKSLKLYLFSFRNHGDFHEDCMNIIMKDLIKLMDPKYIEVWGKFTPRGGISIDPYCNYGKPNTKYEQIAFNRLANHDLYPEKVDNR

SEQ ID NO: 45351 - protein, 160 aa, Clostridium cellulovorans
  REGION 1..160: note = tr|D9SUQ7|D9SUQ7_CLOC7 NADPH-dependent 7-cyano-7-deazaguanine reductase OS=Clostridium cellulovorans (strain ATCC 35296 / DSM 3052 / OCM 3 / 743B) OX=573061 GN=queFPE=3 SV=1
MREDLDLNLLGNQNVNYSFSYDPEVLETFDNKHPENDYFVKFNCPEFTSLCPITSQPDFATIYISYVPNIKMVESKSLKLYLFSFRNHGDFHEDCMNIIMKDLIKLMDPKYIEVWGKFTPRGGISIDPYCNYGKPGTKWEEVAFNRLTNHDLYPEKVDNR

SEQ ID NO: 45352 - protein, 167 aa, Clostridium chromiireducens
  REGION 1..167: note = tr|A0A1V4IC67|A0A1V4IC67_9CLOT NADPH-dependent 7-cyano-7-deazaguanine reductase OS=Clostridium chromiireducens OX=225345 GN=queF PE=3 SV=1
MSEGGRKSSELEGITHLGNQGTKYDFGYNPEVLEVFENKHPDNDYFVKFNCPEFTSLCPITGQPDFATIYISYVPNIKMVESKSLKLYLFSFRNHGDFHEDCMNIIMKDLIKLMDPKYIEVWGKFTPRGGISIDPYCNYGMKGTKFEEMANYRMMNHDMYPEKVDNR

SEQ ID NO: 45353 - protein, 158 aa, unidentified
  source 1..158: note = [Clostridium] cocleatum
  REGION 1..158: note = tr|A0A1I0EYA0|A0A1I0EYA0_9FIRM NADPH-dependent 7-cyano-7-deazaguanine reductase OS=[Clostridium] cocleatum OX=69824 GN=queF PE=3 SV=1
MSENLTLLGNKNTIYKDDYAPEVLETFDNKHLENDYFVKFNCPEFTSLCPITGQPDFATIYISYVPNKKMIESKSLKLYLFSFRNHGDFHEDCMNIIMKDLIKLMDPKYIEVWGKFTPRGGISIDPYCNYGMPNTKWEEIAFNRLANHDLYPEKIDNR

SEQ ID NO: 45354 - protein, 158 aa, Clostridium colicanis
  REGION 1..158: note = tr|A0A151ARJ9|A0A151ARJ9_9CLOT NADPH-dependent 7-cyano-7-deazaguanine reductase OS=Clostridium colicanis DSM 13634 OX=1121305 GN=queF PE=3 SV=1
MNKENQKIAGITLLGQKETKYELDYNPDVLEAFDNKHPEYDYFVKFNCPEFTCICPITGQPDFATITIAYVPNKKLVESKSLKLYLFSFRNHGDFHENCVNVIMKDLIKLLDPKYIEVQGKFTPRGGISIHPYCNHGKADTRWEEIALNRLANHELYK

SEQ ID NO: 45355 - protein, 167 aa, Clostridium cylindrosporum
  REGION 1..167: note = tr|A0A0J8DCP2|A0A0J8DCP2_CLOCY NADPH-dependent 7-cyano-7-deazaguanine reductase OS=Clostridium cylindrosporum DSM 605 OX=1121307 GN=queF PE=3 SV=1
MSHSGRKESELDNITLLGNQGTKYDFGYNPDILEAFDNKHPNNDYFVKFNCPEFTSLCPITGQPDFATIYISYIPSIKMVESKSLKLYLFSFRNHGDFHEDCMNIIMKDLIKLMDPKYIEVWGKFTPRGGISIDPYCNYGKPGTKYEEMANYRLMNHDMYPEKVDNR

SEQ ID NO: 45356 - protein, 167 aa, Clostridium diolis; identical to SEQ ID NO: 45345
  REGION 1..167: note = tr|A0A2P8RM10|A0A2P8RM10_9CLOT NADPH-dependent 7-cyano-7-deazaguanine reductase OS=Clostridium diolis; OX = 223919 GN=queF PE=3 SV=1

SEQ ID NO: 45357 - protein, 160 aa, Clostridium disporicum
  REGION 1..160: note = tr|A0A173ZRF3|A0A173ZRF3_9CLOT NADPH-dependent 7-cyano-7-deazaguanine reductase OS=Clostridium disporicum; OX = 84024 GN=queF PE=3 SV=1
MRNDLELNLLGNQNIKYEFGYNPDILETFDNKHPNNDYFVKFNCPEFTSLCPITAQPDFATIYISYVPNIKMVESKSLKLYLFSFRNHGDFHEDCMNIIMKDLIKLMDPKYIEVWGKFTPRGGISIDPYCNYGKPGTKWEEIAFNRLANHDLYPEKIDNR

SEQ ID NO: 45358 - protein, 165 aa, unidentified
  source 1..165: note = [Clostridium] fimetarium
  REGION 1..165: note = tr|A0A1I0RIZ9|A0A1I0RIZ9_9FIRM NADPH-dependent 7-cyano-7-deazaguanine reductase OS=[Clostridium] fimetarium OX=99656 GN=queF PE=3 SV=1
MSGRNNEETVGITLLGNQGTKYDFNYNPDILETFINKHQDNDYFVKFNCPEFTSLCPITGQPDFATITISYVPNVNMVESKSLKLYLFSFRNHGDFHEDCINIIMKDLIRLMDPKYIEVWGKFTPRGGISIDPYCNYGQAHTKWVDIAFNRMANHDLYPEKVDNR

SEQ ID NO: 45359 - protein, 166 aa, unidentified
  source 1..166: note = [Clostridium] indolis
  REGION 1..166: note = tr|A0A3P6JDP6|A0A3P6JDP6_9FIRM NADPH-dependent 7-cyano-7-deazaguanine reductase OS=[Clostridium] indolis; OX = 69825 GN=queF PE=3 SV=1
MSEGRNQEDLTDITLLGNQNNKYDFDYRPDVLESFDNKHQGRDYFVKFNCPEFTSLCPITGQPDFATIYISYIPNVKMVESKSLKLYLFSFRNHGDFHEDCMNIIMNDLIELMDPHYIEVWGKFTPRGGISIDPYTNYGRPDSKYEKMAEHRLMNHDLYPEKIDNR

SEQ ID NO: 45360 - protein, 164 aa, unidentified
  source 1..164: note = Clostridium luticellarii
  REGION 1..164: note = tr|A0A2T0BMN1|A0A2T0BMN1_9CLOT NADPH-dependent 7-cyano-7-deazaguanine reductase OS=Clostridium luticellarii OX=1691940 GN=queF PE=3 SV=1
MNDRENELKGSTVLGKENVSYKFDYDPSILKTFVNKHRDNDYFVKFNCPEFTSLCPITGQPDFASVYISYVPDKLMVESKSLKLYLFSFRNHGDFHEDCINIIMKDLIKLMSPKYIEVQGKFFPRGGISIDPYTNYGKKSTPWERVAVKRLYYHDLYPEKIDNR

SEQ ID NO: 45361 - protein, 165 aa, Clostridium magnum
  REGION 1..165: note = tr|A0A161WVM2|A0A161WVM2_9CLOT NADPH-dependent 7-cyano-7-deazaguanine reductase OS=Clostridium magnum DSM 2767 OX=1121326 GN=queF PE=3 SV=1
MSGRDEKELKGVTLLGNQDVKYNYDYDPSVLEAFVNKHQENDYFVKFNCPEFTSLCPKTGQPDFATIYISYVPEKMMVESKSLKLYLLSFRNHGDFHEDCVNIIMKDLIKLLDPKYIEVWGKFTPRGGISIDPYCNYGKEGTRWKEVADKRMFYHDMYPEKIDNR

SEQ ID NO: 45362 - protein, 160 aa, unidentified; identical to SEQ ID NO: 45350
  source 1..160: note = Clostridium neonatale
  REGION 1..160: note = tr|A0A2A7MHX7|A0A2A7MHX7_9CLOT NADPH-dependent 7-cyano-7-deazaguanine reductase OS=Clostridium neonatale; OX = 137838 GN=queF PE=3 SV=1

SEQ ID NO: 45363 - protein, 165 aa, unidentified
  source 1..165: note = [Clostridium] polysaccharolyticum
  REGION 1..165: note = tr|A0A1I0BFK8|A0A1I0BFK8_9FIRM NADPH-dependent 7-cyano-7-deazaguanine reductase OS=[Clostridium] polysaccharolyticum OX=29364 GN=queF PE=3 SV=1
MSGREKEEMKDLTLLGNQGTKYAMDYAPEVLETFVNKHPENDYFVKFNCPEFTSLCPITGQPDFATITISYVPGEKMVESKSLKLYLFSFRNHGDFHEDCVNIIMKDLIRLMDPKYIEVWGKFTPRGGISIDPYCNYGKAGTKWEEVAFNRMANHDLYPEKVDNR

SEQ ID NO: 45364 - protein, 165 aa, unidentified
  source 1..165: note = [Clostridium] populeti
  REGION 1..165: note = tr|A0A1I6JLU2|A0A1I6JLU2_9FIRM NADPH-dependent 7-cyano-7-deazaguanine reductase OS=[Clostridium] populeti; OX = 37658 GN=queF PE=3 SV=1
MNNRDKEELKGITFLGNQNIKYSDQYAPEVLETFPNKHPGNDYFVKFNCPEFTSLCPITGQPDFATIYISYVPGERMVESKSLKLYLFSFRNHGDFHEDCVNIIMKDLIKLMQPKYIEVWGKFTPRGGISIDPYCNYGIPGSIWETVAFERLTKHDMYPEKIDNR

SEQ ID NO: 45365 - protein, 167 aa, Clostridium puniceum
  REGION 1..167: note = tr|A0A1S8THW7|A0A1S8THW7_9CLOT NADPH-dependent 7-cyano-7-deazaguanine reductase OS=Clostridium puniceum; OX = 29367 GN=queF PE=3 SV=1
MSESGRKSKELEGISLLGNQGTKYDYGYNPEILEVFENKHPDNDYFVKFNCPEFTSLCPITGQPDFATIYISYIPNIKMVESKSLKLYLFSFRNHGDFHEDCINIIMKDLIKLMGPKYIEVWGKFTPRGGISIDPYCNYGMKGTKFEEMANYRMMNHDMYPEKVDNR

SEQ ID NO: 45366 - protein, 167 aa, Clostridium saccharobutylicum
  REGION 1..167: note = tr|A0A1S8NBT1|A0A1S8NBT1_CLOSA NADPH-dependent 7-cyano-7-deazaguanine reductase OS=Clostridium saccharobutylicum OX=169679 GN=queF PE=3 SV=1
MSESGRKSKELEGLSLLGNQGTKYDYGYNPEVLEVFDNKHPENDYFVKFNCPEFTSLCPITGQPDFATIYISYMPGKKMVESKALKLYLFSFRNHGDFHEDCMNIIMKDLIKLMNPKYIEVWGKFTPRGGISIDPYCNYGIPGTKYEEMANYRMMNHDMYPEKVDNR

SEQ ID NO: 45367 - protein, 167 aa, Clostridium saccharobutylicum
  REGION 1..167: note = tr|U5MSZ3|U5MSZ3_CLOSA NADPH-dependent 7-cyano-7-deazaguanine reductase OS=Clostridium saccharobutylicum DSM 13864 OX=1345695 GN=queF PE=3 SV=1
MSESGRKSKELEGLSLLGNQGTKYDYGYNPEVLEVFDNKHPGNDYFVKFNCPEFTSLCPITGQPDFATIYISYMPGKKMVESKSLKLYLFSFRNHGDFHEDCMNIIMKDLIKLMDPKYIEVWGKFTPRGGISIDPYCNYGIPGTKYEEMANYRMMNHDMYPEKVDNR

SEQ ID NO: 45368 - protein, 167 aa, Clostridium saccharoperbutylacetonicum
  REGION 1..167: note = tr|M1MQN2|M1MQN2_9CLOT NADPH-dependent 7-cyano-7-deazaguanine reductase OS=Clostridium saccharoperbutylacetonicum N1-4(HMT) OX=931276 GN=queF; PE = 3 SV=1
MSESGRKSKELEGISLLGNQGVKYDYGYNPEVLEVFDNKHPDNDYFAKFNCPEFTSLCPITGQPDFATIYISYIPNIKMVESKSLKLYLFSFRNHGDFHEDCMNIIMKDLIKLMDPKYIEVWGKFTPRGGISIDPYCNYGMKGTKFEEMANYRMMNHDMYPEKIDNR

SEQ ID NO: 45369 - protein, 157 aa, Clostridium sp.
  REGION 1..157: note = tr|R6FXS0|R6FXS0_9CLOT NADPH-dependent 7-cyano-7-deazaguanine reductase OS=Clostridium sp. CAG:221 OX=1262780 GN=queF PE=3 SV=1
MKEITLLGNQNTKYEYDYNPKILERFENKHPDNDYFVKFNCPEFTSLCPITGQPDFATIYISYVPDKYMVESKSLKLYLFTFRNHGDFHEDCMNIIMKDLIKLMEPKYIEVWGKFTPRGGISIDPYCNYGKSGTRWEEVAFNRLANHDLYPEKIDNR

SEQ ID NO: 45370 - protein, 164 aa, Clostridium sp.
  REGION 1..164: note = tr|R5KD92|R5KD92_9CLOT NADPH-dependent 7-cyano-7-deazaguanine reductase OS=Clostridium sp. CAG:632 OX=1262830 GN=queF PE=3 SV=1
MSREKQEMGNVSLLGDQGVKYPDDYAPEMLQTFINKHPDHDYFVKFNCPEFTSLCPITGQPDFATITISYVPDIKMVESKSLKLYLFSFRNHGDFHEDCVNIIMEDLIRLMDPKYIEVWGKFTPRGGISIDPYCNYGKPGTRWEAVAANRLEQHDLYPEKVDNR

SEQ ID NO: 45371 - protein, 158 aa, unidentified
  source 1..158: note = [Clostridium] spiroforme
  REGION 1..158: note = tr|A0A1Y4ET77|A0A1Y4ET77_9FIRM NADPH-dependent 7-cyano-7-deazaguanine reductase OS=[Clostridium] spiroforme OX=29348 GN=queF PE=3 SV=1
MSNNLTLLGNQDVKYRDDYAPDVLETFDNKHPENDYFVKFNCPEFTSLCPITGQPDFATIYISYVPDRKMVESKSLKLYLFSFRNHGDFHEDCINIIMKDLIKLMDPKYIEVWGKFTPRGGISIDPYCNYGKPETKWQEIAFNRLANHDLYPEKIDNR

SEQ ID NO: 45372 - protein, 166 aa, Clostridium thermobutyricum
  REGION 1..166: note = tr|N9WAD9|N9WAD9_9CLOT NADPH-dependent 7-cyano-7-deazaguanine reductase OS=Clostridium thermobutyricum OX=29372 GN=queF PE=3 SV=1
MSNGRSKEELKDITLLGNKGTKYEYSYDPDVLEAFDNKHPDNDYFVKFNFPEFTSLCPITGQPDFATIHISYVPNIKMVESKSLKLYLFSFRNHGDFHEDCMNIIMKDLIKLMDPKYIEVWGKFTPRGGISIDPYCNYGKKGTMWEKVAFDRLVNHDLYPEKIDNR

SEQ ID NO: 45373 - protein, 166 aa, Clostridium thermobutyricum; identical to SEQ ID NO: 45372
  REGION 1..166: note = tr|A0A1V4SYY1|A0A1V4SYY1_9CLOT NADPH-dependent 7-cyano-7-deazaguanine reductase OS=Clostridium thermobutyricum DSM 4928 OX=1121339 GN=queF PE=3 SV=1

SEQ ID NO: 45374 - protein, 158 aa, Clostridium thermopalmarium; identical to SEQ ID NO: 45354
  REGION 1..158: note = tr|A0A2T0AQH0|A0A2T0AQH0_9CLOT NADPH-dependent 7-cyano-7-deazaguanine reductase OS=Clostridium thermopalmarium DSM 5974 OX=1121340 GN=queF PE=3 SV=1

SEQ ID NO: 45375 - protein, 166 aa, unidentified
  source 1..166: note = Clostridium ventriculi
  REGION 1..166: note = tr|A0A173WUB8|A0A173WUB8_CLOVE NADPH-dependent 7-cyano-7-deazaguanine reductase OS=Clostridium ventriculi; OX = 1267 GN=queF PE=3 SV=1
MASGRQGKELEGLSLLGNQGTKYDYAYKPEILERFVNKHQGNDYFVKFNCPEFTSLCPITGQPDFATIYISYVPDTYMVESKSLKLYLFSFRNQGDFHEDCMNIIMKDLIKLMDPKYIEVWGKFTPRGGISIDPYCNYGKKGTKWEEVAFNRLVNHDLYPEKVDNR

SEQ ID NO: 45376 - protein, 169 aa, Clostridium vincentii
  REGION 1..169: note = tr|A0A2T0BE16|A0A2T0BE16_9CLOT NADPH-dependent 7-cyano-7-deazaguanine reductase OS=Clostridium vincentii; OX = 52704 GN=queF PE=3 SV=1
MENHFEGRSKDELKGVSLLGNQEVKYKTQYDPSILEVFDNKHIENDYFVKFNCPEFTSLCPMTGQPDFATIYISYIPSVKMVESKSLKLYLFSFRNHGDFHEDCVNKIMKDLIKLMDPKYIEVWGKFTPRGGISIDPYCNYGKTDTMFEGMAKDRLFQHDMYPETVDNR

SEQ ID NO: 45377 - protein, 292 aa, Cobetia crustatorum
  REGION 1..292: note = tr|A0A558HJK4|A0A558HJK4_9GAMM NADPH-dependent 7-cyano-7-deazaguanine reductase OS=Cobetia crustatorum; OX = 553385 GN=queF PE=3 SV=1
MAHPTAVNVPDEVRPETLKDAPLGRESAYPEQYDASLLFPIARAANRGPIGISDTALPFVGEDEWHAFEVSWLDESGKPWVRVARFRLPAASPNLIESKSWKLYLNSLNQSRFADQAAVQATLERDLAAAAGAPVEVRLLELNDAELNVGRLPGECLDDLPVTVEHYTPSPELLAADEDDIVSEDLHSHLLKSNCPVTGQPDWGSVWIRYRGPRIDRERLLAYLISYRQHQDFHEHCVEHLFVDLMARVKPESLLVMARYVRRGGLDISPWRATADLEGEARASLPLRLSRQ

SEQ ID NO: 45378 - protein, 292 aa, Cobetia marina
  REGION 1..292: note = tr|A0A4Y4GR90|A0A4Y4GR90_COBMA NADPH-dependent 7-cyano-7-deazaguanine reductase OS=Cobetia marina; OX = 28258 GN=queF PE=3 SV=1
MAHPTAVNVPDEARPETLKDAPLGRESAYPEHYDASLLFPIARAANRGPIGIDDAALPFVGEDEWHAFEVSWLDESGKPWVRVARFRLPAASPNLIESKSWKLYLNSLNQSRFADQAAVQTTLERDLAAAAGAPVEVRLLGLDDDELDVGRLPGECLDDLPITVEHYTPSPELLSADDADIVSEDLHSHLLKSNCPVTGQPDWGSVWIRYRGPRIDRERLLAYLISYRQHQDFHEHCVEHLFVDLMARVKPESLLVMARYVRRGGLDISPWRATPDLEAEARASLPLRLSRQ

SEQ ID NO: 45379 - protein, 292 aa, Cobetia marina
  REGION 1..292: note = tr|A0A4U1LYR2|A0A4U1LYR2_COBMA NADPH-dependent 7-cyano-7-deazaguanine reductase OS=Cobetia marina; OX = 28258 GN=queF PE=3 SV=1
MAHPTAVNVPDEARPETLKDAPLGRESAYPEHYDANLLFPIARAANRGPIGIDDAALPFVGEDEWHAFEVSWLDESGKPWVRVARFRLPAASPNLIESKSWKLYLNSLNQSRFADQAAVQATLERDLAAAAGAPVEVRLLGLDDDELDVGRLPGECLDDLPIAVEHYTPSPELLNADDADIVSEDLHSHLLKSNCPVTGQPDWGSVWIRYRGPRIDRERLLAYLISYRQHQDFHEHCVEHLFVDLMARVKPESLLVMARYVRRGGLDISPWRATPDLEAEARASLPLRLSRQ

SEQ ID NO: 45380 - protein, 292 aa, Cobetia sp.
  REGION 1..292: note = tr|A0A2S4K706|A0A2S4K706_9GAMM NADPH-dependent 7-cyano-7-deazaguanine reductase OS=Cobetia sp. MM1IDA2H-1; OX = 1268241 GN=queF PE=3 SV=1
MAHPTAVNVPDEARPETLKDAPLGRESAYPEHYDASLLFPIARAANRGPIGIDDAALPFVGEDEWHAFEVSWLDESGKPWVRVARFRLPAASPNLIESKSWKLYLNSLNQSRFADQAAVQATLERDLAAAAGAPVEVRLLGLDDDELDVGRLPGECLDDLPITVEHYTPSPELLNADDADIVSEDLHSHLLKSNCPVTGQPDWGSVWIRYRGPRIDRERLLAYLISYRQHQDFHEHCVEHLFVDLMARVKPESLLVMARYVRRGGLDISPWRATPDLEAEARASLPLRLSRQ

SEQ ID NO: 45381 - protein, 292 aa, Cobetia sp.
  REGION 1..292: note = tr|A0A0P7DK88|A0A0P7DK88_9GAMM NADPH-dependent 7-cyano-7-deazaguanine reductase OS=Cobetia sp. UCD-24C; OX = 1716176 GN=queF PE=3 SV=1
MAHPTAVNVPDEARPETLKDAPLGRESAYPEHYDASLLFPIARAANRGPIGIDDAALPFVGEDEWHAFEVSWLDEAGKPWVRVARFRLPAASPNLIESKSWKLYLNSLNQSRFSDQAAVKATLERDLAAAAGAPVEVRLLGLDDSELDVGRLPGECLDDLPISVEHYTPSPELLSADDADIVSEDLHSHLLKSNCPVTGQPDWGSVWIRYRGPRIDRERLLAYLISYRQHQDFHEHCVEHLFVDLMARVKPESLLVMARYVRRGGLDISPWRATADLEAEARASLPLRLSRQ

SEQ ID NO: 45382 - protein, 155 aa, Cocleimonas flava
  REGION 1..155: note = tr|A0A4R1F877|A0A4R1F877_9GAMM NADPH-dependent 7-cyano-7-deazaguanine reductase OS=Cocleimonas flava; OX = 634765 GN=queF PE=3 SV=1
MSDKNIYENLQQLGGDTKLPDSPETAILESVENPQSDVDYVVRFTAPEFTSLCPMTAQPDFAHLMIDYIPDQKLVESKSLKLFLGAFRNHGAFHEDCTVSIARRIIDEIAPKWLRIGGYWYPRGGIPIDVFFAQGEIPKGVWVPEQGVPPYRGRG

SEQ ID NO: 45383 - protein, 155 aa, unidentified
  source 1..155: note = Cognatishimia maritima
  REGION 1..155: note = tr|A0A1M5L561|A0A1M5L561_9RHOB NADPH-dependent 7-cyano-7-deazaguanine reductase OS=Cognatishimia maritima; OX = 870908 GN=queF PE=3 SV=1
MADESIYAGLTQLGGQTELPATPEEAVMERVPNPQKGNDYAVRFTAPEFTSLCPLTAQPDFAHIVIDYVPGDWLVESKSLKLFLGSFRNHGAFHEDCSVTIGKRLEELLDPKWLRVGAYWYPRGGIPIDVFYQTGPELAHVWIPDQGVPTYRGRG

SEQ ID NO: 45384 - protein, 155 aa, Cohaesibacter gelatinilyticus
  REGION 1..155: note = tr|A0A285NBU0|A0A285NBU0_9RHIZ NADPH-dependent 7-cyano-7-deazaguanine reductase OS=Cohaesibacter gelatinilyticus OX=372072 GN=queF PE=3 SV=1
MSNQDIYKNLTQLGSETKLPDNPEDAILEKVPNPQSDIDYAVRFTAPEFTSLCPLTSQPDFAHLVIDYIPGDWLVESKSLKLFLGSFRNHGAFHEDCTVSIGRRLEELLDPKWLRIGGYWYPRGGIPIDVFYQTADAPDHVWIPPQDVPTYRGRG

SEQ ID NO: 45385 - protein, 163 aa, Cohnella luojiensis
  REGION 1..163: note = tr|A0A4Y8M4A2|A0A4Y8M4A2_9BACL NADPH-dependent 7-cyano-7-deazaguanine reductase OS=Cohnella luojiensis; OX = 652876 GN=queF PE=3 SV=1
MRSKEEMQDITLLGNQGTRYVFEYDPGVLEAFDNKHPGRDYFVKFNCPEFTSLCPMTGQPDFATLYISYIPDARMVESKSLKLYLFSFRNHGDFHEDCMNIIMNDLIALMNPRYIEVWGKFTPRGGISIDPYCNWGQPGTKYEKMAEHRLMNHDLYPEKIDNR

SEQ ID NO: 45386 - protein, 163 aa, unidentified
  source 1..163: note = Cohnella lupini
  REGION 1..163: note = tr|A0A3D9IT68|A0A3D9IT68_9BACL NADPH-dependent 7-cyano-7-deazaguanine reductase OS=Cohnella lupini; OX = 1294267 GN=queF PE=3 SV=1
MRSKENMEDVTLLGNQGTKYVFEYDPGVLETFDNLHPGRDYFVKFNCPEFTSLCPMTGQPDFATLYISYIPDARMVESKSLKLYLFSFRNHGDFHEDCMNIIMNDLIALMNPRYIEVWGKFTPRGGISIDPYCNWGQPGTKFEQMADHRLMNHDLYPEKVDNR

SEQ ID NO: 45387 - protein, 165 aa, Cohnella sp.
  REGION 1..165: note = tr|A0A1I0ZN17|A0A1I0ZN17_9BACL NADPH-dependent 7-cyano-7-deazaguanine reductase OS=Cohnella sp. OV330; OX = 1855288 GN=queF PE=3 SV=1
MAGRSKEELAGVSLLGNQGTAYPSNYAPEVLESFDNKHPGRDYFVKFNCPEFTSLCPMTGQPDFATIYISYIPDAKMVESKSLKLYLFSFRNHGDFHEDCMNIIMNDLIELMAPRYIEVWGKFTPRGGISIDPYCNWGKPGTKYEAMAEHRLLNHDLYPEKVDNR

SEQ ID NO: 45388 - protein, 163 aa, Cohnella sp.
  REGION 1..163: note = tr|A0A231RRJ1|A0A231RRJ1_9BACL NADPH-dependent 7-cyano-7-deazaguanine reductase OS=Cohnella sp. CIP 111063 OX=1955714 GN=queF PE=3 SV=1
MRKPEEMQDLTLLGNQGTKYAFEYDPGILESFDNKHPGRDYFVKFNCPEFTSLCPITGQPDFATLYISYIPDRKMVESKSLKLYLFSFRNHGDFHEDCMNIIMNDLIALMNPRYIEVWGKFTPRGGISIDPYCNWGQPGAKYERMAEHRLLNHDLYPEKVDNR

SEQ ID NO: 45389 - protein, 153 aa, unidentified
  source 1..153: note = Coleofasciculus chthonoplastes
  REGION 1..153: note = tr|B4VPX3|B4VPX3_9CYAN NADPH-dependent 7-cyano-7-deazaguanine reductase OS=Coleofasciculus chthonoplastes PCC 7420 OX=118168 GN=queF PE=3 SV=1
MTHLPTQNSAVSDVPTMKYGERAIAEGQLITFPNPRIGRRYHIDITLPEFTCKCPFSGYPDFATIHIRYIPNERVVELKAIKLYINSFRDRYISHEESVNQILDDFVEACDPLEVTIKGDFAPRGNVHTVIEVQHQKEEKQEKQKKQKKKGKN

SEQ ID NO: 45390 - protein, 279 aa, Collimonas arenae
  REGION 1..279: note = tr|A0A127QFK7|A0A127QFK7_9BURK NADPH-dependent 7-cyano-7-deazaguanine reductase OS=Collimonas arenae; OX = 279058 GN=queF PE=3 SV=1
MSTPTTPEASPLGKPSTYQTQYQPSLLFPIARLGKREEIGISGTLPFFGVDIWNAYEVSWLNLRGKPQVAIATFTVPADSPNIVESKSFKLYLNSFNQTKLADADALLQLLRQDLSAGFGAPVHVTLTTAEGFSGLKLQEPQGLLLDRLDIEVDQYQPNPALLKADPNQVVIEETLVSHLLKSNCLVTGQPDWGSVQIHYVGAAIDQESLLKYLISFRDHNEFHEQCVERIFMDIMRNCAPQKLSVYARYTRRGGLDINPWRSNFSTAQPPSNCRQARQ

SEQ ID NO: 45391 - protein, 279 aa, Collimonas arenae
  REGION 1..279: note = tr|A0A561FZW7|A0A561FZW7_9BURK NADPH-dependent 7-cyano-7-deazaguanine reductase OS=Collimonas arenae; OX = 279058 GN=queF PE=3 SV=1
MTIPNTPDASPLGKPAAYQAQYQPSLLFPIARLGKREEIGVSGTLPFFGVDIWNAYEVSWLNLRGKPQVAIATFTVPADSPNIIESKSFKLYLNSFNQTRLADKDALLQLLRTDISAGFGAPVHVALTTAEAFSGLKLQEPQGLLLDRLDIEVGEYQPNPSLLKSDPNQVVVEETLVSHLLKSNCLVTGQPDWGSVQIHYVGAAIDQESLLKYLISFREHNEFHEQCVERIFMDLMRNCRPQKLSVYARYTRRGGLDINPWRSNFSTSQPPLNWRQARQ

SEQ ID NO: 45392 - protein, 279 aa, Collimonas fungivorans
  REGION 1..279: note = tr|A0A127P712|A0A127P712_9BURK NADPH-dependent 7-cyano-7-deazaguanine reductase OS=Collimonas fungivorans; OX = 158899 GN=queF PE=3 SV=1
MTIPNTPDASPLGKPAAYQTQYQPSLLFPIARLGKREEIGISGTLPFFGVDIWNAYEVSWLNLRGKPQVAIATFTVPADSPNIIESKSFKLYLNSFNQTRLADKDALLQLLRTDISAGFGAPVHVALATAEAFAELKLQELQGLLLDRLDIEVDEYQPNPALLKSDPDQVVVEETLVSHLLKSNCLVTGQPDWGSVQIHYVGAAIDQESLLKYLISFRDHNEFHEQCVERIFMDLMRNCRPQKLSVYARYTRRGGLDINPWRSNFSTSQPPLNWRQARQ

SEQ ID NO: 45393 - protein, 279 aa, Collimonas fungivorans
  REGION 1..279: note = tr|A0A419U325|A0A419U325_9BURK NADPH-dependent 7-cyano-7-deazaguanine reductase OS=Collimonas fungivorans; OX = 158899 GN=queF PE=3 SV=1
MTIPNTPDASPLGKPAAYQTQYQPSLLFPIARLGKREEIGISGTLPFFGVDIWNAYEVSWLNLRGKPQVAIATFTVPADSPNIIESKSFKLYLNSFNQTRLADKDALLQLLRTDISAGFGAPVHVALTTAEAFAGLKLQEPQGLLLDRLDIEVDEYQPNPGLLKSDPDQVVVEETLVSHLLKSNCLVTGQPDWGSVQIHYVGAAIDQESLLKYLISFRDHNEFHEQCVERIFMDLMRNCRPQKLSVYARYTRRGGLDINPWRSNFSTSQPPLNWRQARQ

SEQ ID NO: 45394 - protein, 279 aa, Collimonas pratensis
  REGION 1..279: note = tr|A0A127PZA6|A0A127PZA6_9BURK NADPH-dependent 7-cyano-7-deazaguanine reductase OS=Collimonas pratensis; OX = 279113 GN=queF PE=3 SV=1
MTIPNTPDASPLGKPAAYQTQYQPSLLFPIARQGKRDEIGVSGTLPFFGVDIWNAYEVSWLNARGKPQVAIATFTVPADSPNIVESKSFKLYLNSFNQTKLADTDALLQLLRKDLSAGFGATVHVTLATADAFAEQKIQEPQGLLLDRLDIEVDEYQPNPSLLKADPNQVIIEETLVSHLLKSNCLVTGQPDWGSVQIHYVGPAIDQESLLRYLISFRDHNEFHEQCVERIFMDIMRNCAPQKLSVYARYTRRGGLDINPWRSNFSTAQPPLNWRQARQ

SEQ ID NO: 45395 - protein, 279 aa, Collimonas pratensis
  REGION 1..279: note = tr|A0A127QS11|A0A127QS11_9BURK NADPH-dependent 7-cyano-7-deazaguanine reductase OS=Collimonas pratensis; OX = 279113 GN=queF PE=3 SV=1
MTIPNTPDASPLGKPAAYQTQYQPSLLFPIARQGKRDEIGVSGTLPFFGVDIWNAYEVSWLNARGKPQVAIATFTVPADSPNIVESKSFKLYLNSFNQTKLADTDALLQLLRKDLSAGFGATVHVTLATADAFAEQKIQEPQGLLLDRLDIEVDEYQPNPSLLKADPNQVVIEETLVSHLLKSNCLVTGQPDWGSVQIHYVGPAIDQESLLRYLISFRDHNEFHEQCVERIFMDIMRNCAPQKLSVYARYTRRGGLDINPWRSNFSTAQPPLNWRQARQ

SEQ ID NO: 45396 - protein, 279 aa, Collimonas sp.
  REGION 1..279: note = tr|A0A2A9K8P3|A0A2A9K8P3_9BURK NADPH-dependent 7-cyano-7-deazaguanine reductase OS=Collimonas sp. PA-H2; OX = 1881062 GN=queF PE=3 SV=1
MTTPNTPDASPLGKPAAYQTQYQPSLLFPIARQGKRDEIGVSGTLPFFGVDIWNAYEVSWLNARGKPQVAIATFTVPADSPNIVESKSFKLYLNSFNQTKLADTDALLQLLRNDLSAGFGAPVHVTLTTADAFASQRIQEPQGLLLDRLDIEVDEYQPNPSLLKTDPNKVVIEETLVSHLLKSNCLVTGQPDWGSVQIHYVGAAIDQESLLRYLISFRDHNEFHEQCVERIFMDIMRNCAPQKLSVYARYTRRGGLDINPWRSNFSTGQPPSNWRQARQ

SEQ ID NO: 45397 - protein, 279 aa, Collimonas sp.
  REGION 1..279: note = tr|A0A1I1GC80|A0A1I1GC80_9BURK NADPH-dependent 7-cyano-7-deazaguanine reductase OS=Collimonas sp. OK412; OX = 1801619 GN=queF PE=3 SV=1
MTIPNTPDASPLGKPAAYQTQYQPSLLFPIARLGKREEIGVSGTLPFFGVDIWNAYEVSWLNLRGKPQVAIATFTVPADSPNIIESKSFKLYLNSFNQTRLADKDALLQLLRTDISAGFGAPVHVALATAEAFSGLKLQEPQGLLLDRLDIEVDEYQPNPSLLKSDPDQVVVEETLVSHLLKSNCLVTGQPDWGSVQIHYVGAAIDQESLLKYLISFREHNEFHEQCVERIFMDLMRNCRPQKLSVYARYTRRGGLDINPWRSNFSTSQPPLNWRQARQ

SEQ ID NO: 45398 - protein, 283 aa, unidentified
  source 1..283: note = Colwellia beringensis
  REGION 1..283: note = tr|A0A222GB96|A0A222GB96_9GAMM NADPH-dependent 7-cyano-7-deazaguanine reductase OS=Colwellia beringensis; OX = 1967665 GN=queF PE=3 SV=1
MSTYTNANALSNLTLGKATNYCSQYNPELLQAVPRSLNRDSLGLTANNLPFTGEDVWYGYELSWLNDKGKPVVAVAEFSFPCTSPSIVESKSFKLYLNSFNQTQFPSWQSVESALRKDLSATAGASAEVKLFPVDNCPALSLSTDTALCIDDLDIEINQYQLAPDILKNAGEQEGNNVAEYLVCHLLKSNCLITNQPDWASVYIKYQGKQICHETLLKYLISFRQHNEFHEQCVERIFCDIKRFCHMESLTVFARYTRRGGLDINPFRSTTEIKAPKLRTLRQ

SEQ ID NO: 45399 - protein, 283 aa, Colwellia chukchiensis
  REGION 1..283: note = tr|A0A1H7K9R3|A0A1H7K9R3_9GAMM NADPH-dependent 7-cyano-7-deazaguanine reductase OS=Colwellia chukchiensis; OX = 641665 GN=queF PE=3 SV=1
MSSYLNAKALANLTLGKATSYCSQYNPELLQAVPRSLNRDSLGLSANTLPFIGEDVWYGYELSWLNSKGKPVVAVAEFRFPCTSPNIVESKSFKLYLNSFNQTQFASWQQVEEALTTDLSATAGAAAIVSLFPVNQCPALEISDDQAVCIDELDIEIDCYQLNPALLANASHTPIKQVQESLVCHLLKSNCLITNQPDWASIYITYSGNKICHHALLKYLISFRQHNEFHEQCVERIFCDLLRYCEIEQLSVLARYTRRGGLDINPFRSTETAQAPSKRTLRQ

SEQ ID NO: 45400 - protein, 286 aa, Colwellia demingiae
  REGION 1..286: note = tr|A0A5C6QH87|A0A5C6QH87_9GAMM NADPH-dependent 7-cyano-7-deazaguanine reductase OS=Colwellia demingiae; OX = 89401 GN=queF PE=3 SV=1
MANYQNATELSKLTLGKSTQYCSEYTADLLQGVPRSLNRDDLALNQSNLPFVGEDVWYGYELSWLNEKGKPVVAVAEFRFACTSANIVESKSFKLYLNSFNQTRFASVKDVEQVLTKDLSKIAGSEANVNLFGVDHCPALDIAKKADKCICIDGEDISIDNYQYDAQLLATAQDETTGTQIEEHLVSHLLKSNCLITNQPDWASIYIHYRGKAIDHSALLKYLISFRQHNEFHEQCVERIYCDLQQFCQLDELTIFARYTRRGGLDINPFRSSHTDQAPFARTLRQ

SEQ ID NO: 45401 - protein, 287 aa, Colwellia hornerae
  REGION 1..287: note = tr|A0A5C6QNQ9|A0A5C6QNQ9_9GAMM NADPH-dependent 7-cyano-7-deazaguanine reductase OS=Colwellia hornerae; OX = 89402 GN=queF PE=3 SV=1
MKNYKNAKVLSQLTLGKTTSYCSEYNPELLQAVPRTLNRDSLAITAESLPFIGEDVWYAYELSWLNSTGKPVVAVAEFRFPCTSTNIVESKSFKLYLNSFNQSRFSSWQEVENCLVKDLSNTAKSTAGVKLFPVDNCPALEINHQIFSEKTTCIDDVELDIDNYQLDPTLLVNANISGETVKNESLVSHLLKSNCLITNQPDWASIYLQYSGPKISPSALLAYLISFRQHNEFHEQCVERIYCDLKKYCQVTELTVFARYTRRGGLDINPFRSTSTLHAPTGRTLRQ

SEQ ID NO: 45402 - protein, 286 aa, unidentified
  source 1..286: note = Colwellia marinimaniae
  REGION 1..286: note = tr|A0A1Z5I397|A0A1Z5I397_9GAMM NADPH-dependent 7-cyano-7-deazaguanine reductase OS=Colwellia marinimaniae; OX = 1513592 GN=queF PE=3 SV=1
MANYQNATELSKLTLGKSTEYCSEYTAELLQGVPRSLNRDDLALDPNNLPFIGEDVWYGYELSWLNEKGKPVVAVAEFRFACTSDNIVESKSFKLYLNSFNQTRFASIKDVEQILIKDLSNIAGSPAKVRLFAVDHCPALAIAKKPDNCICIDGADISIDNYQYDAQLLAQAQKKDKSAKVEEHLVSHLLKSNCLITNQPDWASIYIHYRGKAIDHATLLKYLISFRQHNEFHEQCIERIYCDLQKFCQLDELTVFARYTRRGGLDINPFRSSHTEQAPFARTLRQ

SEQ ID NO: 45403 - protein, 286 aa, Colwellia psychrerythraea
  REGION 1..286: note = sp|Q47YB3|QUEF_COLP3 NADPH-dependent 7-cyano-7-deazaguanine reductase OS=Colwellia psychrerythraea (strain 34H / ATCC BAA-681) OX=167879; GN = queF PE=3 SV=1
MANYQNATELSKLTLGKSTQYCSEYTADLLQGVPRSLNRDDLALNQSNLPFVGEDVWYGYELSWLNGKGKPVVAVAEFRFACTSDNIVESKSFKLYLNSFNQTRFSSIKDVEKVLTKDLSKIAGSEASVNLFGVDHCPALDIAKKSDKCICIDGEDISIDNYQYDPQLLATAQDERSGSQIEEYLVSHLLKSNCLITNQPDWASIYIHYRGKAIDHSSLLKYLISFRQHNEFHEQCVERIYCDLQQFCQLDELTIFARYTRRGGLDINPFRSSHIEQAPFARTLRQ

SEQ ID NO: 45404 - protein, 286 aa, Colwellia psychrerythraea
  REGION 1..286: note = tr|A0A099KTG4|A0A099KTG4_COLPS NADPH-dependent 7-cyano-7-deazaguanine reductase OS=Colwellia psychrerythraea OX=28229 GN=queF PE=3 SV=1
MANYQNATELSKLTLGKSTQYCSEYTADLLQGVPRSLNRDDLSLNQSNLPFVGEDVWYGYELSWLNNKGKPIVAVAEFRFACTSENIVESKSFKLYLNSFNQTRFASVKEVEQRLTNDLSKIAGAKATVNLFGVDHCPALAIATNKDTYFCIDGEDITIDNYQYDATLLATAQNKTEDSQVEEHLVSHLLKSNCLITNQPDWASVYIHYRGKAINHSALLKYLISFRQHNEFHEQCVERIYCDLQQFCQLDELTIFARYTRRGGLDINPFRSSCTESAPAARTLRQ

SEQ ID NO: 45405 - protein, 287 aa, Colwellia sp.
  REGION 1..287: note = tr|A0A1D8RYS2|A0A1D8RYS2_9GAMM NADPH-dependent 7-cyano-7-deazaguanine reductase OS=Colwellia sp. PAMC 20917 OX=1816218 GN=queF PE=3 SV=1
MTNYKNAKVLSQLTLGKATNYCSEYNPELLQAVPRTLNRDSLAIHAESLPFIGEDVWYAYELSWLNSTGKPVVAVAEFRFPCTSTNIVESKSFKLYLNSFNQSRFSSWQAVEDCLIKDLSNTAEGKAGVKLFPVDNCPALEINHQIFSENTLCIDDVELDIDNYQLDPTLLNNANIAGETVKNESLVSHLLKSNCLITNQPDWASIYIHYSGQKISPSALLAYLISFRQHNEFHEQCVERIYCDLKKYCQVTELTVFARYTRRGGLDINPFRSTSTLHAPTGRTLRQ

SEQ ID NO: 45406 - protein, 281 aa, Colwellia sp.; identical to SEQ ID NO: 43946
  REGION 1..281: note = tr|A0A2G2DWK1|A0A2G2DWK1_COLSX NADPH-dependent 7-cyano-7-deazaguanine reductase OS=Colwellia sp. OX=56799; GN = queF PE=3 SV=1

SEQ ID NO: 45407 - protein, 287 aa, unidentified
  source 1..287: note = Colwelliaceae bacterium
  REGION 1..287: note = tr|A0A2D6RE87|A0A2D6RE87_9GAMM NADPH-dependent 7-cyano-7-deazaguanine reductase OS=Colwelliaceae bacterium OX=2026726 GN=queF PE=3 SV=1
MAKYQNSDVLHGLTLGKATDYANQYDASLLQGVPRSLNRDDLAIDQEDLPFFGEDVWYGYELSWLNPKGKPQVAVAEFTFPCTSKNLIESKSFKLYLNSFNQTIFPSKDDVEKVLSKDLSEVAGAPASVVLSPVDDCPALAIVSDDATCIDELDVEIDTYDYQPSLLASDDSESLNQKDEQVSEYLVSHLLKSNCLITNQPDWASVYIRYSGKKINQEKLLKYFISFREHNEFHEQCVERIYTDIQQYCQPTSLTVFARYTRRGGLDINPYRSSEPSSAPKLRTIRQ

SEQ ID NO: 45408 - protein, 281 aa, unidentified
  source 1..281: note = Comamonadaceae bacterium
  REGION 1..281: note = tr|A0A2H0JC58|A0A2H0JC58_9BURK NADPH-dependent 7-cyano-7-deazaguanine reductase OS=Comamonadaceae bacterium CG12_big_fil_rev_8_21_14_0_65_59_15 OX=1973952; GN = queF PE =3 SV=1
MNLPEHSGLGQPTTYPSQLDAAQLYPIARALSRADLGLGASLPFMGADLWTAFELSWLNARGKPQVALAHITVPCESTNLIESKSLKLYLGSFANTRFAGAAQVQQRLRTDLTEAAWRGGVVRSSVGVRLIGQDQFDREPIYELDGLNLDRLDLDCDRYTPAPDLLCSATDEEPVTEVLTSNLLRSNCPVTGQPDWASVQISYAGPQIDQAGLLRYIVSFRQHTGFHEQCVERMFADIWQRCKPHKLTVYARYTRRGGLDINPFRTSHPQTLPANVRNARQ

SEQ ID NO: 45409 - protein, 281 aa, unidentified
  source 1..281: note = Comamonadaceae bacterium
  REGION 1..281: note = tr|A0A2M8E201|A0A2M8E201_9BURK NADPH-dependent 7-cyano-7-deazaguanine reductase OS=Comamonadaceae bacterium CG_4_9_14_0_8_um_filter_60_18 OX=1973950 GN=queF; PE = 3 SV= 1
MKQPDSSLLGKPTRYPDRYDASLLFPIARMKQREPLGLGEKLPFLGADLWTAFELSWLGARGKPQVSLAHITVPCESMNIIESKSLKLYLNSFNNTRFADAAEVSATLRADLSEAVWRGGPVQSSVGVKLVLPDVFDREPIYELDGLGLDRMELDCDRYTPAPEFLCSAAQEEPVSEVLTSNLLRSNCPVTGQPDWGSVQISYFGPQIDQAGLLRYIVSFRNHQGFHEDCVERMFMDIMQRCQPHKLSVYARYTRRGGLDINPFRTSFPQALPANVRHARQ

SEQ ID NO: 45410 - protein, 282 aa, Comamonas aquatica
  REGION 1..282: note = tr|A0A1B2D618|A0A1B2D618_9BURK NADPH-dependent 7-cyano-7-deazaguanine reductase OS=Comamonas aquatica; OX = 225991 GN=queF PE=3 SV=1
MNTPEQSQLGKASAYADQYDPSLLFPIPRSGKREEIGITEALPFFGADLWTAFELSWLNARGKPQVALAHFTIPCETPHIIESKSFKLYLNSFNNSRFDSLEAVQERLREDVNEALWRGAAVRQSSASVRVIAQDAFELQKVQELQGLNLDRLDIECSDYTPRPDLLKADHDNPPVTETLVSHLLKSNCLVTGQPDWGSVQISYTGAAIDQESLLRYIVSFRNHNEFHEQCVERIFMDLTRQCRPLKLSVYARYTRRGGLDINPLRTSHPMALPQNVRTARQ

SEQ ID NO: 45411 - protein, 282 aa, Comamonas aquatica
  REGION 1..282: note = tr|A0A014MT62|A0A014MT62_9BURK NADPH-dependent 7-cyano-7-deazaguanine reductase OS=Comamonas aquatica DA1877 OX=1457173 GN=queF PE=3 SV=1
MNTPEQSQLGKASAYADQYDPSLLFPIPRSGKREEIGISGALPFFGADLWTAFELSWLNARGKPQVALAHFTIPCETPHIIESKSFKLYLNSFNNSRFDSLEAVQERLREDVNEALWRSAAVRQSSASVRVIAQDAFELQKVQELQGLNLDRLDIECSDYTPRPDLLKADHDNPPVTETLVSHLLKSNCLVTGQPDWGCVQISYTGAAIDQESLLRYIVSFRNHNEFHEQCVERIFMDLTRQCRPLKLSVYARYTRRGGLDINPLRTSHPMALPPNVRTARQ

SEQ ID NO: 45412 - protein, 282 aa, Comamonas kerstersii
  REGION 1..282: note = tr|A0A0W7YXU8|A0A0W7YXU8_9BURK NADPH-dependent 7-cyano-7-deazaguanine reductase OS=Comamonas kerstersii; OX = 225992 GN=queF PE=3 SV=1
MHTPEQSQLGKTSAYADQYDPSLLFPLPRQPKRDEIGIQDKLPFFGADLWTAFELSWLNQRGKPQVALAHFTIPCETPNIIESKSFKLYLNSFNNTRFDSLEAVQERLREDINEALWRGAPARLSSASVRVMAPEHFETQRVQELEGLSLDRLDVECTDYSPRPDLLKADHDNPPVTETLVSHLLKSNCLVTGQPDWGSVQISYTGAAIDQEGLLRYIVSFRNHNEFHEQCVERIFMDIMRLCRPLKLSVYARYTRRGGLDINPLRTSAPMAIPQNVRTARQ

SEQ ID NO: 45413 - protein, 281 aa, unidentified
  source 1..281: note = Comamonas serinivorans
  REGION 1..281: note = tr|A0A1Y0ENW3|A0A1Y0ENW3_9BURK NADPH-dependent 7-cyano-7-deazaguanine reductase OS=Comamonas serinivorans; OX = 1082851 GN=queF PE=3 SV=1
MSDTSQSPLGKVSAYVDQYTPALLCPIARQANREAIGVGARPLFFGADLWTAYELSWLGPRGKPEVAMAQFLVPAESTHLIESKSLKLYLNSFNQTRFDSAATVRDCLVRDLSQAAWGGGAVRASVSVTLIDPDAFDAQHIHELDGVLLDRLDAECSDYHPAPERLSAALDEAPVEETLISRLLKSNCLVTGQPDWGSVQVRYTGPQIDQLGLLQYIVSFRQHTEFHEQCVERMFMDIWQRCKPQRLTVYARYTRRGGLDINPFRTSHPGPVPVNVRTARQ

SEQ ID NO: 45414 - protein, 285 aa, Comamonas sp.
  REGION 1..285: note = tr|A0A363RE29|A0A363RE29_9BURK NADPH-dependent 7-cyano-7-deazaguanine reductase OS=Comamonas sp. JNW; OX = 2170731 GN=queF PE=3 SV=1
MTVSPSPEQSPLGQRSAYIDQYDPTLLFPLPRQAKRDEIGLQADKLPFFGADLWTAYEVSWLNLRGKPQVALVSFTIPCETPNIVESKSFKLYLNSFNNSRFGSVDEVRAKLLADISEAVWRGAPYQASVGVQMIDPELFDTLPLQELDGLNLDRLDIDCEHYQPQPQLLRAAFDEAPVTETLSSRLLKSNCLVTGQPDWGSVRISYTGPAIDQERLLQYIVSFRNHNEFHEQCVERMFVDIWKHCKPIRLTVYARYTRRGGLDINPLRTSQPMALPANIRTARQ

SEQ ID NO: 45415 - protein, 281 aa, Comamonas sp.
  REGION 1..281: note = tr|A0A1D2U2I6|A0A1D2U2I6_9BURK NADPH-dependent 7-cyano-7-deazaguanine reductase OS=Comamonas sp. SCN 67-35 OX=1660096 GN=queF PE=3 SV=1
MNLPEHSPLGRVSPYPDQYDPALLFPIARAQGRGAIGIEGAIPFFGADLWTAYEVSWLDPHGKPHVAIARFTIPCETPNLIESKSLKLYLNSYNGTRLAGMDAVLERIRADLSEAAWRGAGHAGTVGVQLLAPEQFEQERIAEMDGLLLDRLQVECTHDQPAPELLTAAFDEAPVEETLTSHLLKSNCPVTGQPDWGSLQIRYSGPQIEQAGLLRYLVSFRNHQGFHEQCVERIFMDLSARCRPIKLTVLARYTRRGGIDINPLRTSHPMPLPHGGRTARQ

SEQ ID NO: 45416 - protein, 281 aa, Comamonas terrigena
  REGION 1..281: note = tr|A0A2A7UZI6|A0A2A7UZI6_COMTR NADPH-dependent 7-cyano-7-deazaguanine reductase OS=Comamonas terrigena; OX = 32013 GN=queF PE=3 SV=1
MSTPEQSQLGKPSAYADQYDASLLFPLPRATKRTEIGIGSQLPFFGADLWTGYELSWLNLRGKPQVALVHFTIPCETPHIIESKSFKLYLNSFNNSRFASADEVLARLRADVSEAVWRGAAHSATVGVRLVLPEAFATQKVQELQGLELDRLDVECTDYQPRPELLRADTETPPISETLVSHLLKSNCLVTGQPDWGSVQIAYTGPAIDQERLLQYIVSFRNHNEFHEQCVERMFTDIWRQCQPVKLSVYARYTRRGGLDINPFRTSHPSAMPAALRTARQ

SEQ ID NO: 45417 - protein, 281 aa, Comamonas testosteroni
  REGION 1..281: note = tr|A0A076PNF2|A0A076PNF2_COMTE NADPH-dependent 7-cyano-7-deazaguanine reductase OS=Comamonas testosteroni TK102 OX=1392005 GN=queF PE=3 SV=1
MHTPEQSQLGKSSAYVDQYDASLLFPLPRLTKREEIGAAINPPFFGADLWTSFEVSWLNLRGKPQVALAHFTIPCETPNLIESKSFKLYLNSFNNTRFADASEVLARLRTDLSEATWRGSEAQGSVGVRLLQAEQFDAQQVHELDGLLLDRLDVECTRYTPAPELLRANHDEAPVSETLVSNLLKSNCLVTGQPDWGSVQIQYSGAQIEQEGLLQYLVSFRNHNEFHEQCVERIFMDIWTRCQPIKLAVYARYTRRGGLDINPLRTSHPGALPANVRTARQ

SEQ ID NO: 45418 - protein, 281 aa, Comamonas testosteroni
  REGION 1..281: note = tr|A0A1Y1J7G2|A0A1Y1J7G2_COMTE NADPH-dependent 7-cyano-7-deazaguanine reductase OS=Comamonas testosteroni; OX = 285 GN=queF PE=3 SV=1
MHTPEQSQLGKSSAYVDQYDASLLFPLPRLTKREEIGAAINPPFFGADLWTSFEVSWLNLRGKPQVALAHFTIPCETPNLIESKSFKLYLNSFNNTRFADASEVLARLRTDLSEATWRGSEAKGSVGVRLLQADQFDAQQVHELDGLLLDRLDVECTQYTPAPELLRANHDEAPVNETLVSNLLKSNCLVTGQPDWGSVQIQYSGAQIDQEGLLQYLVSFRNHNEFHEQCVERIFMDIWTRCKPIKLAVYARYTRRGGLDINPFRTSHPGALPANVRTARQ

SEQ ID NO: 45419 - protein, 281 aa, Comamonas thiooxydans
  REGION 1..281: note = tr|A0A096CXQ8|A0A096CXQ8_9BURK NADPH-dependent 7-cyano-7-deazaguanine reductase OS=Comamonas thiooxydans; OX = 363952 GN=queF PE=3 SV=1
MHTPEQSQLGKSSAYVDQYDASLLFPLPRLTKREEIGAAINPPFFGADLWTSFEVSWLNLRGKPQVALAHFTIPCETPNLIESKSFKLYLNSFNNTRFADASEVLARLRTDLSEATWRGSDAQGSVGVRLLEAEQFDAQQVHELDGLLLDRLDVECTRYTPAPELLRANHDEAPVSETLVSNLLKSNCLVTGQPDWGSVQIQYSGAQIEQEGLLQYLVSFRNHNEFHEQCVERIFMDIWTRCKPIKLAVYARYTRRGGLDINPFRTSHPGALPANVRTARQ

SEQ ID NO: 45420 - protein, 281 aa, Comamonas thiooxydans
  REGION 1..281: note = tr|A0A0E3C3V7|A0A0E3C3V7_9BURK NADPH-dependent 7-cyano-7-deazaguanine reductase OS=Comamonas thiooxydans; OX = 363952 GN=queF PE=3 SV=1
MHTPEQSQLGKSSAYVDQYDASLLFPLPRLTKREEIGAAINPPFFGADLWTSFEVSWLNLRGKPQVALAHFTIPCETPNLIESKSFKLYLNSFNNTRFADASEVLARLRTDLSEATWRGSETQGSVGVRLLQADQFDAQQVHELDGLLLDRLDVECTRYTPAPELLRANHDEAPVNETLVSNLLKSNCLVTGQPDWGSVQIQYSGAQIEQEGLLQYLVSFRNHNEFHEQCVERIFMDIWTRCKPIKLAVYARYTRRGGLDINPFRTSHPGALPANVRTARQ

SEQ ID NO: 45421 - protein, 155 aa, unidentified
  source 1..155: note = Commensalibacter intestini
  REGION 1..155: note = tr|G6EXC0|G6EXC0_9PROT NADPH-dependent 7-cyano-7-deazaguanine reductase OS=Commensalibacter intestini A911 OX=1088868 GN=queF PE=3 SV=1
MSEPSDLKKHLTQLGQNSPLPQSPEEAKLERVPAPYQEYDYTIRFTAPEFTSLCPITGQPDFAHLVIDYIPGKWIVESKSLKLYLSSFRNHGSFHEACTIEIASTIVKLLKPKWLRIGGYWYPRGGMPIDVFWQTDTPPKKVWIPEQEVPSYRGR

SEQ ID NO: 45422 - protein, 155 aa, unidentified; identical to SEQ ID NO: 45421
  source 1..155: note = Commensalibacter intestini
  REGION 1..155: note = tr|A0A251ZTH5|A0A251ZTH5_9PROT NADPH-dependent 7-cyano-7-deazaguanine reductase OS=Commensalibacter intestini OX=479936 GN=queF PE=3 SV=1

SEQ ID NO: 45423 - protein, 168 aa, unidentified
  source 1..168: note = Commensalibacter sp.
  REGION 1..168: note = tr|W7DYF1|W7DYF1_9PROT NADPH-dependent 7-cyano-7-deazaguanine reductase OS=Commensalibacter sp. MX01 OX=1208583 GN=queF PE=3 SV=1
MNYEITFNIEYKIMPEPTDLKKHLTQLGQNSPLPQSPQEAKLERVPAPYQEYDYTIRFTAPEFTSLCPITGQPDFAHLVIDYIPGKWIVESKSLKLYLSSFRNHGSFHEACTIEIASTIVKLLKPKWLRIGGYWYPRGGMPIDVFWQTDTPPKKVWIPDQEVPSYRGR

SEQ ID NO: 45424 - protein, 155 aa, unidentified
  source 1..155: note = Commensalibacter sp.
  REGION 1..155: note = tr|A0A318MZ67|A0A318MZ67_9PROT NADPH-dependent 7-cyano-7-deazaguanine reductase OS=Commensalibacter sp. ESL0284 OX=2070537 GN=queF PE=3 SV=1
MNDTKELKNYLTQLGANTSLPQSPSEAKLEKVPAPYPEYDYTIRFTAPEFTSLCPITGQPDFAHLVIDYIPDKWIVESKSLKLYLASFRNHGAFHEACTVEIATTLTKLLDPIWLRIGGYWYPRGGMPIDVFWQTSTPPENVWIPSQDVPAYRGR

SEQ ID NO: 45425 - protein, 156 aa, Conchiformibius steedae
  REGION 1..156: note = tr|A0A3P2A2J3|A0A3P2A2J3_9NEIS NADPH-dependent 7-cyano-7-deazaguanine reductase OS=Conchiformibius steedae OX=153493 GN=queF PE=3 SV=1
MRNETELQGITLLGNQRTQYRADYAPEVLEAFDNKHQDNDYFVKFICPEFTSLCPMTGQPDFATIIIRYIPDVKMVESKSLKLYLFSFRNHGDFHEDCVNIIMKDLIALMNPKYIEVFGEFTPRGGIAIHPYANYGRPHTPFADMARERLLRHDMR

SEQ ID NO: 45426 - protein, 155 aa, unidentified
  source 1..155: note = Confluentimicrobium lipolyticum
  REGION 1..155: note = tr|A0A238KSW4|A0A238KSW4_9RHOB NADPH-dependent 7-cyano-7-deazaguanine reductase OS=Confluentimicrobium lipolyticum OX=1524263 GN=queF PE=3 SV=1
MANEDIYKNLTMLGGKTELPNAPEEAVLERVPNPQAGTDYAVRFTAPEFTSLCPMTGQPDFAHIVIDYVPGDWLVESKSLKLFLGSFRNHGAFHEDCTVTIGKRLVEKLEPKWLRVGGYWYPRGGIPIDIFYQTGPELPGVWIPDQGVPTYRGRG

SEQ ID NO: 45427 - protein, 154 aa, unidentified
  source 1..154: note = Confluentimicrobium sp.
  REGION 1..154: note = tr|A0A2E3UEX9|A0A2E3UEX9_9RHOB NADPH-dependent 7-cyano-7-deazaguanine reductase OS=Confluentimicrobium sp. OX=1931204 GN=queF PE=3 SV=1
MAKTDVSGLSQLGQAVAQPASPEEATLEKVPASHAGTKYVVRFTAPEFTSLCPMTGQPDFAHIVIDYIPRDWLVESKSLKLFLTSFRNHGAFHEDCTIDIAKRLVALLDPEWLRIGAYWYPRGGIPIDVFWQTGPAPDGVWIPDQGVAPYRGRG

SEQ ID NO: 45428 - protein, 154 aa, unidentified
  source 1..154: note = Confluentimicrobium sp.
  REGION 1..154: note = tr|A0A0N9NF55|A0A0N9NF55_9RHOB NADPH-dependent 7-cyano-7-deazaguanine reductase OS=Confluentimicrobium sp. EMB200-NS6 OX=1609966 GN=queF PE=3 SV=1
MAKTDVSGLSQLGQAVAQPASPEEAALEKVPASHAGTKYVVRFTAPEFTSLCPMTGQPDFAHIVIDYIPRDWLVESKSLKLFLTSFRNHGAFHEDCTIDIAKRLVALLDPEWLRIGAYWYPRGGIPIDVFWQTGPAPDGVWIPDQGVAPYRGRG

SEQ ID NO: 45429 - protein, 272 aa, Congregibacter litoralis
  REGION 1..272: note = tr|A4A3I6|A4A3I6_9GAMM NADPH-dependent 7-cyano-7-deazaguanine reductase OS=Congregibacter litoralis KT71 OX=314285 GN=KT71_16356 PE=3 SV=1
MSGDALTHDKGPLLGQQVVGSEQYDPSLLFPVPRSNARASLPEQRFQGFGEDIWHAYELSWLSAAGMPQAFVGTFAIPATSANLIESKSLKLYLNSLNNHRFTSAEAARQTIVRDLSEVAGAPVSLTLGSPEDPAFRGEDLPGSCLDDLEVTVPDAADPVLLTGVAGDGLLYTHLMRSLCPVTAQPDWATVVVETRGVAPESPGLLRYLLAYRNHQEFHEQCVERIYTDILDRLQPDYLSVHALYTRRGGLDISPWRCSEHQPAPRYRLNRQ

SEQ ID NO: 45430 - protein, 279 aa, unidentified
  source 1..279: note = Conservatibacter flavescens
  REGION 1..279: note = tr|A0A2M8S5A7|A0A2M8S5A7_9PAST NADPH-dependent 7-cyano-7-deazaguanine reductase OS=Conservatibacter flavescens OX=28161 GN=queF PE=3 SV=1
MNYHSQSLSYLTLGQQTTYTEFYDATLLQAVPRALNREQLDIIQIQPFTIGADIWTAYEISWLNPKGLPQVAIADVEIDHQSENLIESKSFKLYLNSFNQTPFADMATVERTIAQDLAQCAKGKVKVRLHSLDFFDQHPIHRLQGECIDQQDIQIQDYNFNPELLTNCTFDDRTEEWLVSHLLKSNCLITSQPDWGSLQIHYVGQRIDREKLLRYIVAFRQHNEFHEQCVERIFCDLMRFAKPDKLTVYARYTRRGGLDINPYRSNFEPIPVNLRLARQ

SEQ ID NO: 45431 - protein, 154 aa, unidentified
  source 1..154: note = Consotaella salsifontis
  REGION 1..154: note = tr|A0A1T4MN47|A0A1T4MN47_9RHIZ NADPH-dependent 7-cyano-7-deazaguanine reductase OS=Consotaella salsifontis OX=1365950 GN=queF PE=3 SV=1
MSENLGALSQLGRPAHPAASPQEATLETVPYSRGEGPAAIVRFTCPEFTSLCPVTGQPDFAHIVIDYAPDSRLVESKSLKLFLTSFRNHGAFHENCTLMIARRIVDATAPLWLRIAGFWYPRGGIPIDVFWQTGAPPAGAYVPEPGVPPYRGRG

SEQ ID NO: 45432 - protein, 158 aa, Coprobacillus sp.
  REGION 1..158: note = tr|G9QXV4|G9QXV4_9FIRM NADPH-dependent 7-cyano-7-deazaguanine reductase OS=Coprobacillus sp. 3_3_56FAA OX=665941 GN=queF PE=3 SV=1
MTKNLTLLGNQNTVYKDDYAPEVLETFDNKHPENDYFVKFNCPEFTSLCPITGQPDFATIYISYVPNQKMVESKSLKLYLFSFRNHGDFHEDCMNIIMKDLIKLMNPKYIEVWGKFTPRGGISIDPYCNYGKPETKWETIAFNRLANHDLYPEKIDNR

SEQ ID NO: 45433 - protein, 158 aa, Coprobacillus sp.
  REGION 1..158: note = tr|H1AM50|H1AM50_9FIRM NADPH-dependent 7-cyano-7-deazaguanine reductase OS=Coprobacillus sp. 8_2_54BFAA OX=469597 GN=queF PE=3 SV=1
MTKNLTLLGNQNTVYKDDYAPEVLETFDNKHPENDYFVKFNCPEFTSLCPITGQPDFATIYISYVPNQKMVESKSLKLYLFSFRNHGDFHEDCMNIIMKDLIKLMDPKYIEVWGKFTPRGGISIDPYCNYGKPETKWETIAFNRLANHDLYPEKIDNR

SEQ ID NO: 45434 - protein, 149 aa, unidentified
  source 1..149: note = Coprobacter fastidiosus
  REGION 1..149: note = tr|A0A495VQ33|A0A495VQ33_9BACT NADPH-dependent 7-cyano-7-deazaguanine reductase OS=Coprobacter fastidiosus NSB1 OX=1349822 GN=queF PE=3 SV=1
MEETTLSLLGKKTEYPQDYAPEVLEAFNNKHPEMDYWVRFNCPEFTSLCPITGQPDFATIQIDYIPDIKMVESKSLKLYLFSFRNHGGFHEDCVNLIMKDLIKLMNPKYIEVTGFFTPRGGISIYPYCNYGRPGTEYAEMAKDRMRTHR

SEQ ID NO: 45435 - protein, 44 aa, unidentified
  source 1..44: note = Coprobacter fastidiosus
  REGION 1..44: note = tr|A0A354M4K3|A0A354M4K3_9BACT NADPH-dependent 7-cyano-7-deazaguanine reductase QueF (Fragment); OS = Coprobacter fastidiosus OX=1099853 GN=DDY73_10615 PE=4; SV = 1
MEETTLSLLGKKTEYPQDYAPEVLEAFNNKHPEMDYWVRFNCPE

SEQ ID NO: 45436 - protein, 148 aa, unidentified
  source 1..148: note = Coprobacter secundus
  REGION 1..148: note = tr|A0A0B2JLG1|A0A0B2JLG1_9BACT NADPH-dependent 7-cyano-7-deazaguanine reductase OS=Coprobacter secundus; OX = 1501392 GN=queF PE=3 SV=1
MKQNELTLLGGKTEYKQEYSPEVLESFNNKHPENDYWVRFNCPEFTSLCPITGQPDFATIQIDYIPNIKMVESKSLKLYLFSFRNHGAFHEDCVNIIMKDLIKLMAPKYIEITGFFTPRGGISIHPYCNYGQPGTEYEDLAKQRLFNH

SEQ ID NO: 45437 - protein, 148 aa, unidentified
  source 1..148: note = Coprobacter sp.
  REGION 1..148: note = tr|A0A316T6T8|A0A316T6T8_9BACT NADPH-dependent 7-cyano-7-deazaguanine reductase OS=Coprobacter sp.; OX = 1941478 GN=queF PE=3 SV=1
MEKELSLLGKKTEYKQDYAPEVLETFINKHPEMDYWVRFNCPEFTSLCPITGQPDFATIQIDYIPGIRMVESKSLKLYLFSFRNHGGFHEDCVNLIMKDLIKLMDPKYIEVTGFFTPRGGISIYPYCNYGRPDTPFAEMAKQRLINRH

SEQ ID NO: 45438 - protein, 165 aa, Coprococcus catus
  REGION 1..165: note = tr|A0A3E2XL93|A0A3E2XL93_9FIRM NADPH-dependent 7-cyano-7-deazaguanine reductase OS=Coprococcus catus; OX = 116085 GN=queF PE=3 SV=1
MSGRTKEETAGITHLGSQGTKYDFNYCPEVLETFINKHPDHDYFVKFNCPEFTSLCPMTGQPDFGNVIISYVPSERMVESKSLKLYLFSFRNHGDFHEDCMNIIMEDLIKLMDPKYIEVWGKFLPRGGISIDPYCNYGKPGTKWEEIAAMRLANHDMYPERVDNR

SEQ ID NO: 45439 - protein, 165 aa, Coprococcus catus; identical to SEQ ID NO: 45438
  REGION 1..165: note = tr|D4J8R3|D4J8R3_9FIRM NADPH-dependent 7-cyano-7-deazaguanine reductase OS=Coprococcus catus GD/7; OX = 717962 GN=queF PE=3 SV=1

SEQ ID NO: 45440 - protein, 160 aa, Coprococcus comes
  REGION 1..160: note = tr|A0A3R6DHU3|A0A3R6DHU3_9FIRM NADPH-dependent 7-cyano-7-deazaguanine reductase OS=Coprococcus comes; OX = 410072 GN=queF PE=3 SV=1
MREKEDLTLLGNQNTAYRMDYDPSVLESFQNKHPENDYFVKFNCPEFTSLCPITGQPDFATVTISYVPDERLVESKSLKLYLFSFRNHGDFHEDVINIIMKDLIKLLSPKYIEVWGKFLPRGGLSIDPYCNYGKSGTSWEQVAWNRMSNHDMFPEKIDNR

SEQ ID NO: 45441 - protein, 165 aa, Coprococcus comes; identical to SEQ ID NO: 44648
  REGION 1..165: note = tr|A0A3R5X3F9|A0A3R5X3F9_9FIRM NADPH-dependent 7-cyano-7-deazaguanine reductase OS=Coprococcus comes; OX = 410072 GN=queF PE=3 SV=1

SEQ ID NO: 45442 - protein, 164 aa, Coprococcus eutactus
  REGION 1..164: note = tr|R5WN68|R5WN68_9FIRM NADPH-dependent 7-cyano-7-deazaguanine reductase OS=Coprococcus eutactus CAG:665 OX=1263071 GN=queF PE=3 SV=1
MGRSKEEMEGVTLLGNKDVKYSMDYAPEMLQTFDNKHPDNDYFVKFNCPEFTSLCPITGQPDFATVYISYVPGKKMVESKSLKLYLFSFRNHGDFHEDCMNIIMKDLVKLMDPKYIEVWGKFTPRGGISIDPYCNYGRPGTKWEEVAWNRLANHDLYPEKVDNR

SEQ ID NO: 45443 - protein, 164 aa, Coprococcus eutactus
  REGION 1..164: note = tr|A8SYS3|A8SYS3_9FIRM NADPH-dependent 7-cyano-7-deazaguanine reductase OS=Coprococcus eutactus ATCC 27759 OX=411474 GN=queF PE=3 SV=1
MGRSKEEMEGVTLLGNKDVKYSMNYAPEMLQTFDNKHPDNDYFVKFNCPEFTSLCPITGQPDFATVYISYVPGKKMVESKSLKLYLFSFRNHGDFHEDCMNIIMKDLVKLMDPKYIEVWGKFTPRGGISIDPYCNYGRPGTKWEEVAWNRLANHDLYPEKVDNR

SEQ ID NO: 45444 - protein, 164 aa, Coprococcus sp.
  REGION 1..164: note = tr|A0A374K3M5|A0A374K3M5_9FIRM NADPH-dependent 7-cyano-7-deazaguanine reductase OS=Coprococcus sp. OM06-34AC OX=2293095 GN=queF PE=3 SV=1
MGRSKEEMEGVTLLGNKDVKYSMDYAPEMLQTFDNKHPDNDYFVKFNCPEFTSLCPITGQPDFATVYISYVPGEKMVESKSLKLYLFSFRNHGDFHEDCMNIIMKDLIKLMDPKYIEVWGKFTPRGGISIDPYCNYGRPGTKWEEVAWNRLANHDLYPEKVDNR

SEQ ID NO: 45445 - protein, 164 aa, Coprococcus sp.; identical to SEQ ID NO: 45444
  REGION 1..164: note = tr|A0A1Q6MH18|A0A1Q6MH18_9FIRM NADPH-dependent 7-cyano-7-deazaguanine reductase OS=Coprococcus sp. CAG:131_42_139 OX=1896997 GN=queF PE=3 SV=1

SEQ ID NO: 45446 - protein, 193 aa, Coraliomargarita akajimensis
  REGION 1..193: note = tr|D5EK19|D5EK19_CORAD NADPH-dependent 7-cyano-7-deazaguanine reductase OS=Coraliomargarita akajimensis (strain DSM 45221 / IAM 15411 / JCM 23193 / KCTC 12865 / 04OK A010-24) OX=583355 GN=queF PE=3 SV=1
MDTFGVHASVRSKQSEYKSTAFGYRIIWTLSLVLRGNLSLLDLQSMGLIGLKKLGRMIEFSCELGQFVGMDIETFPNPNAERDYTIQHIQEEFTSTCPMTGHPDYATIVFSYAPDELCIELKAMKLYLHSYRNKGIFFEAATNKIFEDLYEVTKPRWARLETIWRGRGGIRSNVVVEGQQDGYEGPKTVPFQS

SEQ ID NO: 45447 - protein, 145 aa, Coraliomargarita sp.
  REGION 1..145: note = tr|R7L4B1|R7L4B1_9BACT NADPH-dependent 7-cyano-7-deazaguanine reductase OS=Coraliomargarita sp. CAG:312 OX=1262865 GN=queF PE=3 SV=1
MKKTEKKDLAGLTQLGAAYKGKKAKPVRKLETFPNKSRGRNYVVRLETDEFTCLCPATGQPDFAKIRISYIPRDKIVESKSLKLYLWSFRNEGCFHEHLTNIILDDLVKALNPVWCKVEGDFNIRGGIGIKVEAQEGSPDPNIGE

SEQ ID NO: 45448 - protein, 124 aa, Coraliomargarita sp.
  REGION 1..124: note = tr|A0A3R7UBR5|A0A3R7UBR5_9BACT NADPH-dependent 7-cyano-7-deazaguanine reductase OS=Coraliomargarita sp. TMED73 OX=1986604 GN=queF PE=3 SV=1
MEIETFPNPNTDRDYTIQHIQEEFTSTCPMTGHPDYATVVFSYAPDKICVELKAMKLYLHSFRNKGIFFEAATNKIFEDLHAAVRPKWARLETIWRGRGGIRSNVIVENVQEGYQGPKTKFFEA

SEQ ID NO: 45449 - protein, 281 aa, unidentified
  source 1..281: note = Corallincola sp.
  REGION 1..281: note = tr|A0A368NGU4|A0A368NGU4_9GAMM NADPH-dependent 7-cyano-7-deazaguanine reductase OS=Corallincola sp. C4; OX = 2282215 GN=queF PE=3 SV=1
MTSAYDNHPDLSNLALGEKTEYRQHYAPELLQPVPRRLNREQIGVTSDLPFHGGDIWTGYELSWLNEKGLPQVAIATFAIPCTSTNLVESKSFKLYLNSFNQHTFSDWATVKMVLKQDLSKCAEAEVDVSLATLDSFEKQKITGFDAELIDNQDIDITDYDYQPALLKAGSDKKIVSEKLQSHLLKSNCLITNQPDWGSVMISYTGQQINHASLLRYIVSFRNHNEFHEQCVERIFTDLQSRFALDKLTVYARYTRRGGLDINPFRSNFEPMPTNIRMARQ

SEQ ID NO: 45450 - protein, 121 aa, Corallococcus coralloides
  REGION 1..121: note = tr|A0A410S1Z5|A0A410S1Z5_CORCK NADPH-dependent 7-cyano-7-deazaguanine reductase OS=Corallococcus coralloides OX=184914 GN=queF PE=3 SV=1
MPSQPSKEIQTFPNPAADRDYEIAFDVPEFTCLCPLTGQPDFARFTIKYVPDQLCVELKSLKMYMWSYRNEGAFHEKVTNTIADDIIKAIQPRKLTVVGDFFVRGGIGTIVTVTHDKKQQA

SEQ ID NO: 45451 - protein, 169 aa, Corallococcus coralloides
  REGION 1..169: note = tr|H8N2D5|H8N2D5_CORCM NADPH-dependent 7-cyano-7-deazaguanine reductase OS=Corallococcus coralloides (strain ATCC 25202 / DSM 2259 / NBRC 100086 / M2) OX=1144275 GN= queF PE=3 SV=1
MIANHPRTFSCPRGSRHVGTRTEPGPGSQGGDIVEGGDTRRTCATRQRMPSQPSKEIQTFPNPAADRDYEIAFDVPEFTCLCPLTGQPDFARFTIKYVPDQLCVELKSLKMYMWSYRNEGAFHEKVTNTIADDIIKAIQPRKLTVVGDFFVRGGIGTIVTVTHDKKKQA

SEQ ID NO: 45452 - protein, 121 aa, Corallococcus exiguus
  REGION 1..121: note = tr|A0A5C5DWF8|A0A5C5DWF8_9DELT NADPH-dependent 7-cyano-7-deazaguanine reductase OS=Corallococcus exiguus; OX = 83462 GN=queF PE=3 SV=1
MSSKPSKEIQTFPNPAADRDYEIAFDVPEFTCLCPLTGQPDFARFTIKYVPDQLCVELKSLKLYMWSYRNEGAFHEKVTNTIADDIIKAIQPRKLTVVGDFFVRGGIGTIVTVTHDKKQQA

SEQ ID NO: 45453 - protein, 119 aa, Corallococcus sp.
  REGION 1..119: note = tr|A0A3A8K5M1|A0A3A8K5M1_9DELT NADPH-dependent 7-cyano-7-deazaguanine reductase OS=Corallococcus sp. CA053C OX=2316732 GN=queF PE=3 SV=1
MSSKPSKEVQTFPNPAPERDYEIAFDVPEFTCLCPLTGQPDFARFTIKYVPDQLCVELKSLKLYMWSYRNEGAFHEKVTNTIADDIVKAIQPRKLTVVGDFFVRGGIGTIVTVTHEKKK

SEQ ID NO: 45454 - protein, 119 aa, Corallococcus sp.
  REGION 1..119: note = tr|A0A3A8NEL9|A0A3A8NEL9_9DELT NADPH-dependent 7-cyano-7-deazaguanine reductase OS=Corallococcus sp. CA051B OX=2316731 GN=queF PE=3 SV=1
MSSMPSKEVQTFPNPAPERDYEIAFDVPEFTCLCPLTGQPDFARFTIKYVPDQLCVELKSLKLYMWSYRNEGAFHEKVTNTIADDIVKAIQPRKLTVVGDFFVRGGIGTIVTVTHDKKK

SEQ ID NO: 45455 - protein, 165 aa, unidentified
  source 1..165: note = Coriobacteriaceae bacterium
  REGION 1..165: note = tr|A0A0A8B534|A0A0A8B534_9ACTN NADPH-dependent 7-cyano-7-deazaguanine reductase OS=Coriobacteriaceae bacterium 68-1-3 OX=1531429 GN=queF PE=3 SV=1
MASENRESEGLTLLGNQGTVYSSDYDPTVLETFENKHAERDYMVTFRCPEFTTLCPITGQPDFATLYINYIPHIKMVESKSLKLYLFSFRNHGDFHEDVTNVILNDLVKLMEPKYIEVRGMFYPRGGISIYPFANWANPDFGYEGMAKGRMFEQLSDLDTGDGAR

SEQ ID NO: 45456 - protein, 164 aa, unidentified
  source 1..164: note = Coriobacteriaceae bacterium
  REGION 1..164: note = tr|A0A425WLE4|A0A425WLE4_9ACTN NADPH-dependent 7-cyano-7-deazaguanine reductase OS=Coriobacteriaceae bacterium OX=2011094 GN=queF PE=3 SV=1
MAEAGRSPEELKGVTLLGNKGVKYPHDYDPTLLETFVNKHQNRDYMVTFKCPEFTTLCPKTGQPDFGCIYINYIPDVRMVESKSLKLYLFSFREHGDFHEDVVNVILEDLAHLMEPKYIEVFGRFNPRGGISIYPFANWAKPDAGYEDMVTRRQFEQLSMHEQD

SEQ ID NO: 45457 - protein, 164 aa, unidentified
  source 1..164: note = Coriobacteriales bacterium
  REGION 1..164: note = tr|A0A133Z0Z3|A0A133Z0Z3_9ACTN NADPH-dependent 7-cyano-7-deazaguanine reductase OS=Coriobacteriales bacterium DNF00809 OX=1588753 GN=queF PE=3 SV=1
MSQRERDSLTLLGNKQVEYPTTYDPSLLETFQNQHPTRDYMVTFRCPEFTTLCPITHQPDFGTLFINYIPDQRMVESKSLKLYLFSFRNHGDFHEDVTNIIMNDLIALMQPRYIEVRGLFYPRGGISIYPFANWANPQFSYESMAQQRLFSQLSDIETPASSHV

SEQ ID NO: 45458 - protein, 166 aa, unidentified
  source 1..166: note = Coriobacteriia bacterium
  REGION 1..166: note = tr|A0A316NX82|A0A316NX82_9ACTN NADPH-dependent 7-cyano-7-deazaguanine reductase OS=Coriobacteriia bacterium OX=2052159 GN=queF PE=3 SV=1
MSQATREAEGLTLLGNQHTQYAQDYDPSLLETFENKHPGHDYMVTFRCPEFTTLCPITGQPDFATLYINYVPDERMVESKSLKLYLFSFRNHGDFHEDVVNVIMHDLVELMSPKYIEVRGMFYPRGGISIYPFANWARPGAGYEQIAAERMFSQLSDLDSGDGARG

SEQ ID NO: 45459 - protein, 172 aa, unidentified
  source 1..172: note = Coriobacteriia bacterium
  REGION 1..172: note = tr|A0A2V2E9K3|A0A2V2E9K3_9ACTN NADPH-dependent 7-cyano-7-deazaguanine reductase OS=Coriobacteriia bacterium OX=2052159 GN=queF PE=3 SV=1
MDATNAANEKPQREGTDDLSLLGNQGVRYPQTYDPSVLETFENKHPGNDYFVKFNCPEFTSLCPITGQPDFATIYIAYVPGERMVESKSLKLYLFSFRNHGDFHEDCVNIIMKDLIKLMDPKYIEVWGKFLPRGGISIDPYCNYGKPGTRWEDVAWERLSHHDLYPEKVDNR

SEQ ID NO: 45460 - protein, 290 aa, unidentified
  source 1..290: note = Corticibacter populi
  REGION 1..290: note = tr|A0A3M6QX44|A0A3M6QX44_9BURK NADPH-dependent 7-cyano-7-deazaguanine reductase OS=Corticibacter populi; OX = 1550736 GN=queF PE=3 SV=1
MNSSQPDQPIPADLPLGREVAYPGAYDPGLLFPIARAAQRAELGLDAARLPFVGADVWTAFELSWLNPHGKPQVGVAHFTFPAETPNIIESKSFKLYLNSLNNAVFADTQALRERLRADLSEAAWRGSESGLRSIGVRIVEAAGFDAEPMAELDGLDLDRLDVECTHYLPAPELLGSRRSEALVTETLTSRLLKSNCPVTGQPDWASVQIHYSGHPIDQAGLLRYIVSFRNHTGFHENCVERMFIDIWQRCQPLQLAIWARYTRRGGLDINPFRSSHPQAIPANVRTARQ

SEQ ID NO: 45461 - protein, 166 aa, Corynebacterium striatum
  REGION 1..166: note = tr|A0A2H1ADK6|A0A2H1ADK6_CORST NADPH-dependent 7-cyano-7-deazaguanine reductase OS=Corynebacterium striatum OX=43770 GN=queF PE=3 SV=1
MSEGRKHEDLKDITLLGNQNNKYDFDYRPDVLESFDNKHPGRDYFVKFNCPEFTSLCPITGQPDFATIYISYIPNIKMVESKSLKLYLFSFRNHGDFHEDCMNIIMNDLIDLMDPHYIEVWGKFTPRGGISIDPYTNYGRPDSKYEKMAEHRLMNHDLYPEKIDNR

SEQ ID NO: 45462 - protein, 281 aa, Cosenzaea myxofaciens
  REGION 1..281: note = tr|A0A198GC98|A0A198GC98_9GAMM NADPH-dependent 7-cyano-7-deazaguanine reductase OS=Cosenzaea myxofaciens ATCC 19692 OX=1354337 GN=queF PE=3 SV=1
MSLYQGDKSLEALSLGKKTEYHSEYDATLLQGVPRLLNRQTLALTNENLPFHGGDIWTMYELSWLNSKGLPQVAIGYIELDATTENLIESKSFKLYLNSFNQTRFESWEQVEKTLLNDLTACAKGKVNLSLYPLSHFTSQPIVDFEGECIDEQDINIDNYQFDAQWLNESTTDTQVEETLVSHLLKSNCLITHQPDWGSVMIKYKGKKINREKLLRYLVSFRQHNEFHEQCIERIFHDIMQFCSPETLTVYARYTRRGGLDINPWRSNCEFAPETRRLARQ

SEQ ID NO: 45463 - protein, 278 aa, Coxiella burnetii
  REGION 1..278: note = sp|Q83F02|QUEF_COXBU NADPH-dependent 7-cyano-7-deazaguanine reductase OS=Coxiella burnetii (strain RSA 493 / Nine Mile phase I) OX=227377 GN=queF; PE = 3 SV=1
MSTLRVLHEKSELGKTTVYPKEYAPHLLLPIPRDLNRKTLNVNVSEPPPFYGYDLWNAYELSWLNEKGKPFAARGEFIIPATSSHLIESKSFKLYLNSFNNERFADAAAVSQTMKRDLSKRVNESVTVNFILHETEIPVAYSPKGSLLDVLDIAIDTYSPDPNLLSTSQETVTETLYSHLLKSNCPVTGQPDWGSIEIHYTGPKIDHVQLLKYIISYRNHEEFHEACVERFFMDILRHCRPQELTVQARYTRRGGLDINPYRSTNPTFSVQNHRSFRQ

SEQ ID NO: 45464 - protein, 278 aa, Coxiella burnetii; identical to SEQ ID NO: 45463
  REGION 1..278: note = sp|A9NAF9|QUEF_COXBR NADPH-dependent 7-cyano-7-deazaguanine reductase OS=Coxiella burnetii (strain RSA 331 / Henzerling II) OX=360115 GN=queF PE=3; SV = 1

SEQ ID NO: 45465 - protein, 280 aa, Coxiella sp.
  REGION 1..280: note = tr|A0A2G2A0N1|A0A2G2A0N1_9COXI NADPH-dependent 7-cyano-7-deazaguanine reductase OS=Coxiella sp. (in: Bacteria) OX=59288 GN=queF PE=3 SV=1
MKIHKEQNIILNSALGKTSAYVDHYSPELLLPIPRHLKRAEIGITGALPFYGFDTWNDYETSWLDSRGKPIVAITQFHIPCTSPNIVESKSIKLYLNSLSNTQFSSPDDVKNVIQKDLSKNAGSDVIVTIHTLDALAGLSVGKPPGHCIDGLNTTIEKYEAYPRYLQCTSDTITTETLHSNLLKSNCPVTAQPDWATLIVEYTGKQLSREGLLKYIVSLRNQQEFHEQCIERIFVNIMEYCQPQALTVIGRYTRRGGKDINPCRSTNPDIGILNQRLIRQ

SEQ ID NO: 45466 - protein, 282 aa, Coxiella sp.
  REGION 1..282: note = tr|A0A0S7XYR0|A0A0S7XYR0_9COXI NADPH-dependent 7-cyano-7-deazaguanine reductase OS=Coxiella sp. DG_40; OX = 1703354 GN=queF PE=3 SV=1
MSLYHKNTSVALEDIPLGKKSTYVSQYSPDLLFSIPRELKRELIGVSSPLPFKGCDIWNAFELSWLNARGRPIVALGEFLFPCESPNIIESKSLKLYLNSFNNTKFDSLNKVQETIKRDLSVALNYPVKIKIISTTDFRVREKSVFSGICIDDFDVACNVYTVEPKFLHISNKKIVSEILYSELLKSNCPVTGQPDWGSVQISYTGQQIDHQGLLKYIISFRNHDEFHEQCVERMFVDIMQKCSPEKLTIYARYVRRGGLDINPYRSTEGGGVPKNVCLVRQ

SEQ ID NO: 45467 - protein, 279 aa, unidentified
  source 1..279: note = Coxiellaceae bacterium
  REGION 1..279: note = tr|A0A2E9Z762|A0A2E9Z762_9COXI NADPH-dependent 7-cyano-7-deazaguanine reductase OS=Coxiellaceae bacterium; OX = 2026727 GN=queF PE=3 SV=1
MTEELKQAVEASPLGQTVNYRDQYAPELLVSIPRTANRSALGLSGSLPFQGFDRWVGYELSWLNPQGKPQAALLMFDVSCDSAALVESKSLKLYLNSFNQTRFDDLDAVTASLQRDLSQAACGEVRVTLQSLKACEGRVWCSFTGQCLDDLEVSCDTYSVRPDYLSTRKGEYVQETLYTHLFKSNCLVTGQPDWASVAVHYKGQPIDLNGLFKYWVSYRLHNEFHEMCVERMFTDILRRCQPEALCVEACFTRRGGLDISPWRATPGFQPDLTRHTIRQ

SEQ ID NO: 45468 - protein, 279 aa, unidentified
  source 1..279: note = Coxiellaceae bacterium
  REGION 1..279: note = tr|A0A3B9W6Q0|A0A3B9W6Q0_9COXI NADPH-dependent 7-cyano-7-deazaguanine reductase OS=Coxiellaceae bacterium; OX = 2026727 GN=queF PE=3 SV=1
MTDDLQQAVEASPLGQTVHYRDQYAPELLVSIPRTANRSALGLSGPLPFQGFDRWVGYELSWLNLQGKPQAALLTFDVSCDSAALVESKSLKLYLNSFNQTQFDNQDAVIACLQRDLSEAARGEVCVTLQSLIACEGRAWRSFLGRCLDDLEVSCDTYSVCPDYLTTTEGESVQETLYTHLFKSNCLVTGQPDWASVAVHYKGQPIDYDGLFKYWVSYRQHNEFHEMCVERMFTDILRCCQPDALCVEACFTRRGGLDISPWRATPGFQPELTHHALRQ

SEQ ID NO: 45469 - protein, 278 aa, unidentified
  source 1..278: note = Crenobacter cavernae
  REGION 1..278: note = tr|A0A4Q2J7E6|A0A4Q2J7E6_9NEIS NADPH-dependent 7-cyano-7-deazaguanine reductase OS=Crenobacter cavernae; OX = 2290923 GN=queF PE=3 SV=1
MTRPTTPELSPLGKTVSYQDTYDASLLFPIARHGKREEIGVDEAALPFEGVDVWTGYELSWLNAKGKPQVAIVTFHIPATSANLVESKSFKLYLNSFNQTRLDSAEALEELLEKDLSAATGAPVTAHIALPDEFAAQRMQELEGESIDELDIEVDAYTPDPSRLKADPARIVSETLRSELLKSNCLVTGQPDWGGVQIAYTGPKIDRESLLRYLIGFRRHNEFHEQCVERIFMDISRECGATELTVFARYTRRGGLDINPFRTNSGAAVPENVRTARQ

SEQ ID NO: 45470 - protein, 278 aa, unidentified
  source 1..278: note = Crenobacter cavernae
  REGION 1..278: note = tr|A0A345Y2Z9|A0A345Y2Z9_9NEIS NADPH-dependent 7-cyano-7-deazaguanine reductase OS=Crenobacter cavernae; OX = 2290923 GN=queF PE=3 SV=1
MTRPTTPELSPLGKTVSYQDTYDASLLFPIARHGKREEIGVDEAALPFSGVDVWTGYELSWLNPKGKPQVAIVTFLIPATSANLVESKSFKLYLNSFNQTKLDSAEALEELLEKDLSAATGAPVTARIALPSEFSAQRMQELEGESIDELDIEVDAYTPDPSRLKADPANVVTETLRSELLKSNCLVTGQPDWGGVQIAYTGPKIDRESLLRYLIGFRRHNEFHEQCVERIFMDISRECGATELTVFARYTRRGGLDINPFRTNSGAAVPDNVRTARQ

SEQ ID NO: 45471 - protein, 278 aa, unidentified
  source 1..278: note = Crenobacter luteus
  REGION 1..278: note = tr|A0A165FC69|A0A165FC69_9NEIS NADPH-dependent 7-cyano-7-deazaguanine reductase OS=Crenobacter luteus; OX = 1452487 GN=queF PE=3 SV=1
MTRPTTPDLSPLGKTVTYRDRYAPELLFPIARHGKRAEIGVDEAALPFSGVDVWTGYELSWLNAKGKPQVAIVTFHIPATSANLVESKSFKLYLNSFNQTRVESVAALTAMLEKDLSAATGAPVSARVVLPDAFGAERIAALPGESIDELDIEVNDYTPDPARLKADPAHIVTETLRSELLKSNCLVTGQPDWGGVTIAYTGPKIDRESLLRYLIGFRQHNEFHEQCVERIFMDVARQCGATELTVYARYTRRGGLDINPFRTNCGAAVPDNVRTARQ

SEQ ID NO: 45472 - protein, 144 aa, unidentified
  source 1..144: note = Crenobacter sp.
  REGION 1..144: note = tr|A0A4T0V5N6|A0A4T0V5N6_9NEIS NADPH-dependent 7-cyano-7-deazaguanine reductase OS=Crenobacter sp. GY 70310 OX=2563443 GN=queF PE=3 SV=1
MQLHQNLHALGNGQTRYRYDCPDASLLERFPNPFARGELNPAGVSGSLNISCPEFTSLCPMTGQPDFATIVIDMVPDAWCVESKSLKLYLGSFRQHGEFHEACICRICNDLVALLEPREIVVEGRFTPRGGIPLWPRASWRKGA

SEQ ID NO: 45473 - protein, 129 aa, Crenothrix polyspora
  REGION 1..129: note = tr|A0A1R4H6H5|A0A1R4H6H5_9GAMM NADPH-dependent 7-cyano-7-deazaguanine reductase OS=Crenothrix polyspora; OX = 360316 GN=queF PE=3 SV=1
MTTTPSKVLETFPNPQPGRDYTIRMTLPEFTCLCPKTGQPDFATFIIEYVPSALCVELKSLKLYMWAFREQGAFHEAVTNEILNDIIAAINPNFMRIRAEFNVRGGVYTTVIVEHKNPDWQVPQLVNLP

SEQ ID NO: 45474 - protein, 129 aa, Crenothrix polyspora
  REGION 1..129: note = tr|A0A1R4H7Z4|A0A1R4H7Z4_9GAMM NADPH-dependent 7-cyano-7-deazaguanine reductase OS=Crenothrix polyspora; OX = 360316 GN=queF PE=3 SV=1
MTTTPSKALETFPNPQPGRDYTIRMTLPEFTCLCPKTGQPDFATFIIEYVPGALCVELKSLKLYMWAFREQGAFHEAVTNEILNDIVAAISPNFMRIRAEFNVRGGVYTTVIVEHKNPDWQAPQLVNLP

SEQ ID NO: 45475 - protein, 129 aa, Crenothrix sp.
  REGION 1..129: note = tr|A0A1Y3A0G4|A0A1Y3A0G4_9GAMM NADPH-dependent 7-cyano-7-deazaguanine reductase OS=Crenothrix sp. D3; OX = 1880899 GN=queF PE=3 SV=1
MTTQPSKDLETFVNPRPDRDYTIHISTPEFTCLCPKTGQPDFATIEIDYVPAELCVELKSLKLYMWSFRDRGAFHEAVTNEILDDIVNAIQPYFMRVRAVFNVRGGVYTTVVAEHKNPDWHAPELVNLP

SEQ ID NO: 45476 - protein, 269 aa, unidentified
  source 1..269: note = Criblamydia sequanensis
  REGION 1..269: note = tr|A0A090D2H0|A0A090D2H0_9BACT NADPH-dependent 7-cyano-7-deazaguanine reductase OS=Criblamydia sequanensis CRIB-18 OX=1437425 GN=queF PE=3 SV=1
MLDLAPLGKKTVYIETYSPELLFPVSRNLARDKLKLDSIPFKGWDKWNGYEISFLNRKGKPLIALAEFTFPCTTENIVESKSLKLYLNSFNASAFDSLEEVQEIMEKDISSAIKGEVSVKLFPLTSLKEKELRELPGTCIDDLDIEVNEYSVNPKLLKTSSAEVEETLYSNLLKSNCLATGQPDWGSLWIHYAGPRIDHESLLKYIISFRNHSGFAEHCVESIFMDLFKECRPKNLSVYARYTRRGGLDINPFRSNFEDLFINERNIRQ

SEQ ID NO: 45477 - protein, 279 aa, unidentified
  source 1..279: note = Cricetibacter osteomyelitidis
  REGION 1..279: note = tr|A0A4V2T148|A0A4V2T148_9PAST NADPH-dependent 7-cyano-7-deazaguanine reductase OS=Cricetibacter osteomyelitidis OX=1521931 GN=queF PE=3 SV=1
MNYNDNSLKTLKLGQVTNYTDQYDATLLQPVARRLNRDQLGITKQQPFTKGADIWTAYEISWLNPKGLPQVAIADVEIDYRSENLIESKSFKLYLNSFNQTKFSNFDEVQRTIQQDLSDCAKGDVKVRLNSLKNYRTSRISELPGECIDEQDIEIAHYNFSAALLENCTTNEMVDENLVSHLLKSNCLITSQPDWGSVQIHYVGNKIDREKLLRYLISFRQHNEFHEQCVERIFCDLMQHAKPQKLTVYARYTRRGGLDINPFRSNFENVPENCRLARQ

SEQ ID NO: 45478 - protein, 140 aa, unidentified
  source 1..140: note = Crinalium epipsammum
  REGION 1..140: note = tr|K9VXX1|K9VXX1_9CYAN NADPH-dependent 7-cyano-7-deazaguanine reductase OS=Crinalium epipsammum PCC 9333 OX=1173022 GN=queF PE=3 SV=1
MTQSPTQEQSSPAENLEMKYGERNIAEGQLITFPNPRIGRRYNISITLPEFTCKCPFSGYPDFASIYINYVPNERVVELKAIKLYINSYRDRYISHEESVNQILDDFVAACDPLEVTIKGDFSPRGNVHTVVEVHHQKSN

SEQ ID NO: 45479 - protein, 153 aa, Croceicoccus marinus
  REGION 1..153: note = tr|A0A1Z1FC00|A0A1Z1FC00_9SPHN NADPH-dependent 7-cyano-7-deazaguanine reductase OS=Croceicoccus marinus; OX = 450378 GN=queF PE=3 SV=1
MADDHTQPLYLGQNSSLPASPEEAVLDYVPNPRAGSLYMVRFAAPEFTSLCPVTGQPDFAHLVIDYAPGETIVESKSLKLFLGAFRNHCGFHEDVTVGIGQRLFAEMAPRWLRIGGYWYPRGGIPIDVFWQSGAIPEGLWVPDQGVSSYRGRG

SEQ ID NO: 45480 - protein, 158 aa, unidentified
  source 1..158: note = Croceicoccus naphthovorans
  REGION 1..158: note = tr|A0A0G3XJZ1|A0A0G3XJZ1_9SPHN NADPH-dependent 7-cyano-7-deazaguanine reductase OS=Croceicoccus naphthovorans OX=1348774 GN=queF PE=3 SV=1
MTDEPISPLHPQPIHLGQTSALPASPDEAVLDYVPNPRTGSLYTVRFAAPEFTSLCPVTGQPDFAHIVIDYAPGETIVESKSLKLFLGSFRNHCGFHEDVTVGIGQRLADEMKPQWLRIGGYWYPRGGIPIDVFWQTGAPPVGLWVPDQGVAPYRGRG

SEQ ID NO: 45481 - protein, 158 aa, unidentified
  source 1..158: note = Croceicoccus ponticola
  REGION 1..158: note = tr|A0A437GVS1|A0A437GVS1_9SPHN NADPH-dependent 7-cyano-7-deazaguanine reductase OS=Croceicoccus ponticola; OX = 2217664 GN=queF PE=3 SV=1
MTDNLLDAGNNAPLHLGQTSALPTSPEDAVLDYVPNPRVGSLYMVRFAAPEFTSLCPVTGQPDFAHLVIDYAPGETIVESKSLKLFLGSFRNHCGFHEDVTVGIGQRLVAEMKPLWLRIGGYWYPRGGIPIDVFWQTGAPPSGLWVPDQGVASYRGRG

SEQ ID NO: 45482 - protein, 158 aa, Croceicoccus sp.
  REGION 1..158: note = tr|A0A2D8D9H5|A0A2D8D9H5_9SPHN NADPH-dependent 7-cyano-7-deazaguanine reductase OS=Croceicoccus sp.; OX = 1927144 GN=queF PE=3 SV=1
MADDNAQSTPTAPKYLGQNSALPASPEEAVLDYVPNPRAGSLYMVRFAAPEFTSLCPVTGQPDFAHLVIDYAPGEMIVESKSLKLFLGSFRNHCGFHEDVTVGIGQRLFEEMAPRWLRIGGYWYPRGGIPIDVFWQSGTVPEGLWVPEQGVSSYRGRG

SEQ ID NO: 45483 - protein, 144 aa, unidentified
  source 1..144: note = Crocinitomicaceae bacterium
  REGION 1..144: note = tr|A0A2E4ECP5|A0A2E4ECP5_9FLAO 7-cyano-7-deazaguanine reductase OS=Crocinitomicaceae bacterium OX=2026728 GN=CL840_03025 PE=4 SV=1
MAKLYKDIDKSILEAIPNPTKEAYEIKVKIPEFTFLGVKEQPDFATVYLTMYPSDKIIELRSLKMYSFHLRDIVVSYERLINIMYDHLMEVYEPDRLRISMVCNPRGGISAKLAIDSDWEVRGGNEKFKDWVGGNNIDDWTVLM

SEQ ID NO: 45484 - protein, 144 aa, unidentified
  source 1..144: note = Crocinitomicaceae bacterium
  REGION 1..144: note = tr|A0A2E2TBZ9|A0A2E2TBZ9_9FLAO 7-cyano-7-deazaguanine reductase OS=Crocinitomicaceae bacterium OX=2026728 GN=CL842_04060 PE=4 SV=1
MAKLYKEIDKGILKAIPNPSKEAYEIKVKIPEFTFLGVSEQPDFATVFITMYPSDKIIELKSLKMYSFHLRDIVVSYERLINIMYDHLMEVYSPERLRLSMICNPRGGISAKLAIDSDWEVRGGKEAFKDWTGSSNIDDWSVIM

SEQ ID NO: 45485 - protein, 144 aa, Crocinitomix sp.
  REGION 1..144: note = tr|A0A2W1NUT4|A0A2W1NUT4_9FLAO 7-cyano-7-deazaguanine reductase OS=Crocinitomix sp. SM1701 OX=2219161 GN=DNU06_01460 PE=4 SV=1
MPKLYQEIDKTILKAIPNPSKEAYEIKIKIPEFTFLGVKEQPDFATVFITMYPSNKIVELKSLKQYSFHLRDIVVSYERLINIFYDHLIEVYEPQRLRISMICNPRGGISAKLAIDSDWEARGGKEQFKDWMGRPDNDDWSVLM

SEQ ID NO: 45486 - protein, 138 aa, unidentified
  source 1..138: note = Crocosphaera chwakensis
  REGION 1..138: note = tr|A3IIN9|A3IIN9_9CHRO NADPH-dependent 7-cyano-7-deazaguanine reductase OS=Crocosphaera chwakensis CCY0110 OX=391612 GN=queF PE=3 SV=1
MKDIAMTQVSKADTSKMKYGEREIEEGKLITFPNPRTGRYYTINITLPEFTCKCPFSGYPDFATLHLTYVPNETVVELKAIKLYINSYRDRYISHEESINQILDDFVAACDPLEATLKGDFYPRGNVHTVVEVNHKKR

SEQ ID NO: 45487 - protein, 134 aa, unidentified
  source 1..134: note = Crocosphaera subtropica
  REGION 1..134: note = tr|B1WY90|B1WY90_CROS5 NADPH-dependent 7-cyano-7-deazaguanine reductase OS=Crocosphaera subtropica (strain ATCC 51142 / BH68) OX=43989 GN=queF; PE = 3 SV=1
MTQVSNADTSTMKYGEREIEEGKLITFPNPRIGRYYTINITLPEFTCKCPFSGYPDFATLHLTYVPNEKVVELKAIKLYINSYRDRYISHEESVNQILDDFVAACDPLEATLKGDFNPRGNVHTVVEVHHKKDK

SEQ ID NO: 45488 - protein, 135 aa, unidentified
  source 1..135: note = Crocosphaera watsonii
  REGION 1..135: note = tr|T2IHD5|T2IHD5_CROWT NADPH-dependent 7-cyano-7-deazaguanine reductase OS=Crocosphaera watsonii WH 8502 OX=423474 GN=queF PE=3 SV=1
MTKAKNSENSSMKYGEREIEAGKLITFPNPRMGRYYTINVTLPEFTCKCPFSGYPDFATLHLTYVPDEKVVELKAIKLYINSYRDRYISHEESVNQILDDFVAACDPLEATLKGDFNPRGNVHTVIEVTHKKNRS

SEQ ID NO: 45489 - protein, 135 aa, unidentified; identical to SEQ ID NO: 45488
  source 1..135: note = Crocosphaera watsonii
  REGION 1..135: note = tr|T2ING7|T2ING7_CROWT NADPH-dependent 7-cyano-7-deazaguanine reductase OS=Crocosphaera watsonii WH 0005 OX=423472 GN=queF PE=3 SV=1

SEQ ID NO: 45490 - protein, 281 aa, Cronobacter condimenti
  REGION 1..281: note = tr|K7ZXX5|K7ZXX5_9ENTR NADPH-dependent 7-cyano-7-deazaguanine reductase OS=Cronobacter condimenti 1330 OX=1073999 GN=queF PE=3 SV=1
MTSYENHQALHGLTLGKTTDYRDIYDASLLQPVPRSLNRDPLGLRADALPFHGADIWTMYELSWLNQNGLPQVAIGQVDINATSVNLVESKSFKLYLNSFNQTRFATLEDVRETLERDLSVCAQGEVSVTLRRLSDVEGEPIARLDGDCIDHQDIVITDYDFDANLLSGATGNEQVEETLVSHLLKSNCLITHQPDWGSVQIRYRGPQINRENLLRYLVSFRHHNEFHEQCVERIFNDIQCFCQPESLSVYARYTRRGGLDINPWRSSTDFQPANGRLARQ

SEQ ID NO: 45491 - protein, 281 aa, Cronobacter dublinensis
  REGION 1..281: note = tr|K8ASD8|K8ASD8_9ENTR NADPH-dependent 7-cyano-7-deazaguanine reductase OS=Cronobacter dublinensis 1210 OX=1208656 GN=queF PE=3 SV=1
MNSYENHQALDGLTLGKSTDYRDIYDASLLQPVPRSLNRDPLGLRADALPFHGADIWTMYELSWLNQNGLPQVAIGQVEINAASVNLVESKSFKLYLNSFNQTRFASLEAVRETLERDLRACAQGEVSVTLRRLDEVEGEPVARFDGECIDNQDLVISSYDFDAALLSGAAGDEHVEETLVSHLLKSNCLITHQPDWGSVQIHYRGPKICREKLLRYLVSFRHHNEFHEQCVERIFNDIQRFCQPEALSVYARYTRRGGLDINPWRSNGSFQPATGRLARQ

SEQ ID NO: 45492 - protein, 281 aa, Cronobacter dublinensis
  REGION 1..281: note = tr|K8AZB7|K8AZB7_9ENTR NADPH-dependent 7-cyano-7-deazaguanine reductase OS=Cronobacter dublinensis 582 OX=1208661 GN=queF PE=3 SV=1
MNSYENHQALDGLTLGKSTDYRDIYDASLLQPVPRSLNRDPLELRADALPFHGADIWTMYELSWLNQNGLPQVAIGQVEINAASVNLVESKSFKLYLNSFNQTRFASLEAVRETLERDLRACAQGEVSVTLRRLDEVEGEPVARFDGECIDNQDLVISSYDFDAALLSGAAGDEHVEETLVSHLLKSNCLITHQPDWGSVQIHYRGPKICREKLLRYLVSFRHHNEFHEQCVERIFNDIQRFCQPEALSVYARYTRRGGLDINPWRSNGSFQPATGRLARQ

SEQ ID NO: 45493 - protein, 281 aa, Cronobacter malonaticus
  REGION 1..281: note = tr|V5TW94|V5TW94_9ENTR NADPH-dependent 7-cyano-7-deazaguanine reductase OS=Cronobacter malonaticus OX=413503 GN=queF PE=3 SV=1
MTSYENHQALHGLTLGKSTDYRDVYDASLLQPVPRSLNRDPLGLRADALPFHGADIWTMYELSWLNRNGLPQVAIGQVEINATSVNLVESKSFKLYLNSFNQTRFDSLDAVRETLERDLRACAQGDVSVTLRRLEDVEGEPVARFSGDCIDNQDIEITDYEFDAALLSGAAGEETVEETLVSHLLKSNCLITHQPDWGSVQIRYRGPKICREKLLRYLVSFRHHNEFHEQCVERIFNDITRFCQPEQLSVYARYTRRGGLDINPWRSNCDFTPATGRLARQ

SEQ ID NO: 45494 - protein, 281 aa, Cronobacter malonaticus
  REGION 1..281: note = tr|A0A423XYX8|A0A423XYX8_9ENTR NADPH-dependent 7-cyano-7-deazaguanine reductase OS=Cronobacter malonaticus OX=413503 GN=queF PE=3 SV=1
MTSYENHQALHGLTLGKSTDYRDVYDASLLQPVPRSLNRDPLGLRADALPFHGADIWTMYELSWLNRNGLPQVAIGQVEINATSVNLVESKSFKLYLNSFNQTRFDSLDAVRETLERDLRACAQGDVSVTLRRLEDVEGEPVARFSGDCIDNQDIEITDYEFDAALLSGAAGEETVEETLVSHLLKSNCLITHQPDWGSVQIRYRGPKICREKLLRYLVSFRHHNEFHEQCVERIFNDIMRFCQPEQLSVYARYTRRGGLDINPWRSNGDFTPATGRLARQ

SEQ ID NO: 45495 - protein, 281 aa, Cronobacter muytjensii
  REGION 1..281: note = tr|A0A2T7ARY7|A0A2T7ARY7_9ENTR NADPH-dependent 7-cyano-7-deazaguanine reductase OS=Cronobacter muytjensii; OX = 413501 GN=queF PE=3 SV=1
MTSYENHQALDGLTLGKSTDYRDIYDASLLQPVPRSLNRDPLGLRADALPFHGADIWTMYELSWLNQNGLPQVAIGQVEINAASVNLVESKSFKLYLNSFNQTRFASIDDVRETLERDLRACAQGDVSVTLRRLDEVEGELVARFEGECIDNQDLIITDYEFDAALLTDAAGEARVEETLVSHLLKSNCLITHQPDWGSVQIRYRGPKICREKLLRYLVSFRHHNEFHEQCVERIFNDIQRFCQPEALSVYARYTRRGGLDINPWRSNDSFTPATGRLARQ

SEQ ID NO: 45496 - protein, 281 aa, Cronobacter sakazakii
  REGION 1..281: note = sp|A7MR08|QUEF_CROS8 NADPH-dependent 7-cyano-7-deazaguanine reductase OS=Cronobacter sakazakii (strain ATCC BAA-894) OX=290339 GN=queF PE=3 SV=1
MTSYENHQALHGLTLGKSTDYRDVYDASLLQPVPRSLNRDPLGLRADALPFHGADIWTMYELSWLNRNGLPQVAIGQVEINATSVNLVESKSFKLYLNSFNQTQFESLEAVRETLERDLRACAQGDVSVTLRRLEDVEGEPVARFSGDCIDNQDINITDYEFDAALLSGAAGEETVEETLVSHLLKSNCLITHQPDWGSVQIHYRGPKICREKLLRYLVSFRHHNEFHEQCVERIFNDITRFCQPEQLSVYARYTRRGGLDINPWRSNGDFTPATGRLARQ

SEQ ID NO: 45497 - protein, 142 aa, Cronobacter sakazakii
  REGION 1..142: note = tr|K8CTX6|K8CTX6_CROSK NADPH dependent preQ0 reductase OS=Cronobacter sakazakii 696 OX=1208664; GN = BN128_2297 PE=4 SV=1
MKAWRRYAKQGDVTVTLRRLDEVEGEPVARLSGDCIDNQDINITDYEFDAALLSGAAGEETVEETLVSHLLKSNCLITHQPDWGSVQIHYRGPKICREKLLRYLVSFRHHNEFHEQCVERIFNDITRFCQPEQLSVYARYTR

SEQ ID NO: 45498 - protein, 281 aa, Cronobacter sp.
  REGION 1..281: note = tr|A0A5J6X6R8|A0A5J6X6R8_9ENTR NADPH-dependent 7-cyano-7-deazaguanine reductase QueF OS=Cronobacter sp. JZ38 OX=1906275 GN=BJP61_05260 PE=4 SV=1
MTSYENHQALDGLTLGKSTDYRDIYDASLLQPVPRSLNRDPLGLRADALPFHGADIWTMYELSWLNQNGLPQVAIGQAEINAASVNLVESKSFKLYLNSFNQTRFASIDDVRETLERDLRACAQGDVSVTLRRLDEVEGEPVARFEGECIDNQDLIITDYEFDAALLTDAAGEARVEETLVSHLLKSNCLITHQPDWGSVQIRYRGPKICREKLLRYLVSFRHHNEFHEQCVERIFNDIQRFCQPEALSVYARYTRRGGLDINPWRSNDSFTPATGRLARQ

SEQ ID NO: 45499 - protein, 281 aa, Cronobacter turicensis
  REGION 1..281: note = tr|C9XZ51|C9XZ51_CROTZ NADPH-dependent 7-cyano-7-deazaguanine reductase OS=Cronobacter turicensis (strain DSM 18703 / LMG 23827 / z3032) OX=693216 GN=queF; PE = 3 SV=1
MTSYENHQALHGLTLGKSTDYRDVYDASLLQPVPRSLNRDPLGLRADALPFHGADIWTMYELSWLNRNGLPQVAIGQVEINATSVNLVESKSFKLYLNSFNQTRFDSLDAVRETLERDLRACAQGDVSVTLRRLEDVEGEPVARLNGDCIDNQDIVITDYEFDAALLSGAAGEARVEETLVSHLLKSNCLITHQPDWGSVQIRYCGPKICREKLLRYLVSFRHHNEFHEQCVERIFNDITRFCQPEQLSVYARYTRRGGLDINPWRSNGDFMPAIGRLARQ

SEQ ID NO: 45500 - protein, 281 aa, Cronobacter turicensis
  REGION 1..281: note = tr|A0A2T7B6R0|A0A2T7B6R0_9ENTR NADPH-dependent 7-cyano-7-deazaguanine reductase OS=Cronobacter turicensis; OX = 413502 GN=queF PE=3 SV=1
MTSYENHQALHGLTLGKSTDYRDVYDASLLQPVPRSLNRDPLGLRADALPFHGADIWTMYELSWLNRNGLPQVAIGQVEINATSVNLVESKSFKLYLNSFNQTRFDSLDAVRETLERDLRACAQGDVSVTLRRLEDVEGEPVARLNGDCIDNQDIVITDYEFDAALLSGAAGEETVEETLVSHLLKSNCLITHQPDWGSVQIRYRGPKICREKLLRYLVSFRHHNEFHEQCVERIFNDITRFCQPEQLSVYARYTRRGGLDINPWRSNGDFMPATGRLARQ

SEQ ID NO: 45501 - protein, 281 aa, Cronobacter universalis
  REGION 1..281: note = tr|A0A376ETH3|A0A376ETH3_9ENTR NADPH-dependent 7-cyano-7-deazaguanine reductase OS=Cronobacter universalis NCTC 9529 OX=1074000 GN=queF PE=3 SV=1
MTSYENHQALHGLTLGKSTDYRDVYDASLLQPVPRSLNRDPLGLRVDDLPFHGADIWTMYELSWLNRNGLPQVAIGQVEINATSVNLVESKSFKLYLNSFNQTRFDSLDAVRETLERDLLACAQGDVSVTLRRLEEVEGEPVARLDGDCIDNQDIVITDYEFDAALLSGAAGEERVEETLVSHLLKSNCLITHQPDWGSVQIRYRGPKICREKLLRYLVSFRHHNEFHEQCVERIFNDITRFCQPEQLSVYARYTRRGGLDINPWRSNGDFTPATGRLARQ

SEQ ID NO: 45502 - protein, 180 aa, Cryptobacterium curtum
  REGION 1..180: note = tr|C7ML01|C7ML01_CRYCD NADPH-dependent 7-cyano-7-deazaguanine reductase OS=Cryptobacterium curtum (strain ATCC 700683 / DSM 15641 / 12-3) OX=469378 GN=queF; PE = 3 SV=1
MPSQAAASSLVDSFQTEGRDAKAEGITLLGNAGTQYASDYDPSLLETFENKHADHDYMVTFRCPEFTTLCPITGQPDFATLYINYIPQVRMVESKSLKLYLCSFRNHGDFHEDVVNVIKDDLVELMEPKYLEVRGMFYPRGGISIYPFANWAHPRFGYQDIAQRRLFKQLSDLDRGDGAR

SEQ ID NO: 45503 - protein, 173 aa, Cryptobacterium sp.
  REGION 1..173: note = tr|R7CFS9|R7CFS9_9ACTN NADPH-dependent 7-cyano-7-deazaguanine reductase OS=Cryptobacterium sp. CAG:338 OX=1262868 GN=queF PE=3 SV=1
MVNISHSSSTSRNDQEVSDLTLLGSRNNSYPDDYAPEVLETFVNKHQENDYFVKFNCPEFTSLCPITGQPDFATIYISYVPDVRMVESKSLKLYLFSFRNHGDFHEDCINIIMKDLIKIMDPRYIEVWGKFTPRGGISIDPYCNYGRPGTKWEQVAWERLSHHDLYPEVVDNR

SEQ ID NO: 45504 - protein, 292 aa, unidentified
  source 1..292: note = Culturomica sp.
  REGION 1..292: note = tr|A0A356DEZ8|A0A356DEZ8_9BACT NADPH-dependent 7-cyano-7-deazaguanine reductase QueF OS=Culturomica sp.; OX = 1926652 GN=DD657_03770 PE=4 SV=1
MQEESKLLGKEIAYPETYCPEILVAVPRRLNREIYGIDRPDSLFCGYDSWHCYEASFLTKQGLPVAGILKLVYASTSEFLVESKSLKLYLGSFNMICLGDSVAEGIAVFKATVARDLSALLHTSVETAFFQTLPDSRPFDFPEYTLLETLPRIAAASFSAYQENPAYLSENVTKYGGEMLVCSHLLKSNCKITHQPDWGSIYIRIKAAHLPDELSLLKYIVSLRDENHFHEEICEMTFKRLTDIFNPEILTVCCLYTRRGGIDICPVRANKAEFIPACLPRADILTASAFRQ

SEQ ID NO: 45505 - protein, 277 aa, unidentified
  source 1..277: note = Cupriavidus alkaliphilus
  REGION 1..277: note = tr|A0A329B0Q1|A0A329B0Q1_9BURK NADPH-dependent 7-cyano-7-deazaguanine reductase OS=Cupriavidus alkaliphilus OX=942866 GN=queF PE=3 SV=1
MSLPEHSPLGKPSAYKTEYDATLLFPIPRQPKRTEIGLPQGRPVPFFGVDIWNAYELSWLNLKGKPQVALATFIIPSDTPNIIESKSFKLYLNSFNQTRIASPEALQQLLHHDLSEATGGTVQVRLVTEAELGTQKMGELDGLLLDRLDIEVDRYEPAPELLSADQEETPVEETLVSHLLKSNCLVTGQPDWGSVQIRYVGAPINQEGLLKYLISFRNHNEFHEQCVERIFMDVMRQCKPVKLAVYARYTRRGGLDINPFRTNFNTAWPDNKRNARQ

SEQ ID NO: 45506 - protein, 277 aa, unidentified
  source 1..277: note = Cupriavidus alkaliphilus
  REGION 1..277: note = tr|A0A2W7PP05|A0A2W7PP05_9BURK NADPH-dependent 7-cyano-7-deazaguanine reductase OS=Cupriavidus alkaliphilus OX=942866 GN=queF PE=3 SV=1
MSLPEHSPLGKPSAYKTEYDATLLFPIPRQPKRTEIGLPEGRPVPFFGVDIWNAYELSWLNLKGKPQVALATFIIPSDTPNIIESKSFKLYLNSFNQTRIASPEALQQLLHHDLSEATGGTVQVRLVTEADLGTQKMGELDGLLLDRLDIEVDRYEPAPELLSADQEETPVEETLVSHLLKSNCLVTGQPDWGSVQIRYVGAPINQEGLLKYLISFRNHNEFHEQCVERIFMDVMRQCKPVKLAVYARYTRRGGLDINPFRTNFNTAWPDNKRNARQ

SEQ ID NO: 45507 - protein, 277 aa, Cupriavidus basilensis
  REGION 1..277: note = tr|A0A0C4Y4U8|A0A0C4Y4U8_9BURK NADPH-dependent 7-cyano-7-deazaguanine reductase OS=Cupriavidus basilensis; OX = 68895 GN=queF PE=3 SV=1
MSLPEQSPLGKPSAYKTEYDPTLLFPIPRQPKRTEIGLAQGRALPFFGVDIWNAYELSWLNMKGKPQVALASFIIPADTPNIVESKSFKLYLNSFNQSKIASPEALQQLLHHDLSEATGGTVQVRLVTEADLGTQKMAELDGVQLDRLDIETDIYEPAPHLLHAAQDESPVEETLVSHLLKSNCLVTGQPDWGSVQIRYVGAPINQEGLLKYLISFRNHNEFHEQCVERIFTDVMRQCKPVKLAVYARYTRRGGLDINPFRTNFNTPWPDNRRNARQ

SEQ ID NO: 45508 - protein, 277 aa, Cupriavidus basilensis
  REGION 1..277: note = tr|H1S7I3|H1S7I3_9BURK NADPH-dependent 7-cyano-7-deazaguanine reductase OS=Cupriavidus basilensis OR16 OX=1127483 GN=queF PE=3 SV=1
MSLPEHSPLGKPSAYKTEYDPTLLFPIPRQPKRTEIGLAEGRALPFFGVDIWNAYELSWLNMKGKPQVALASFIIPADTPNIVESKSFKLYLNAFNQSKIASPEALQQLLHHDLSEATGGTVQVRLVTEADLGTQKMAELDGVQLDRLDIETDIYEPAPHLLHAAQDESPVEETLVSHLLKSNCLVTGQPDWGSVQIRYVGAPINQEGLLKYLISFRNHNEFHEQCVERIFTDVMRQCKPVKLAVYARYTRRGGLDINPFRTNFNTPWPDNRRNARQ

SEQ ID NO: 45509 - protein, 277 aa, Cupriavidus campinensis
  REGION 1..277: note = tr|A0A556UH43|A0A556UH43_9BURK NADPH-dependent 7-cyano-7-deazaguanine reductase OS=Cupriavidus campinensis OX=151783 GN=queF PE=3 SV=1
MTLPEHSPLGKPSAYKTEYDPTLLFPIPRQPKRTEIGLAEGRALPFFGVDIWNAYEVSWLNLKGKPQVALATFIIPADTPNIVESKSFKLYLNSFNQSRIASAEALQQLLHHDLSEATGGTVQVRLVTEADLGTQKMGELDGLLLDRLDIETNIYEPDPTLLSADQDETPVEESLISHLLKSNCLVTGQPDWGSVQIRYVGAPIDQEGLLKYLISFRNHNEFHEQCVERIFTDVLRMCKPVKLAVYARYTRRGGLDINPFRTNFNTPWPDNRRNARQ

SEQ ID NO: 45510 - protein, 277 aa, Cupriavidus gilardii
  REGION 1..277: note = tr|A0A0M4LBX6|A0A0M4LBX6_9BURK NADPH-dependent 7-cyano-7-deazaguanine reductase OS=Cupriavidus gilardii CR3 OX=1267562 GN=queF PE=3 SV=1
MTVPEHSPLGKVSAYKTEYDASLLFPIPRAPKRAEIGLPEGRAVPFFGVDIWNAYELSWLNPKGKPQVALASFIIPADTPNIIESKSFKLYLNSFNQTRLESPEALQQLLRQDLSEATGGAVQVRLTAEPDFARQQMGELDGLLLDRLDIETDIYEPAPQLLRADQEETPVEETLVSHLLKSNCLVTGQPDWGSVQIRYVGAPIDQEGLLKYLISFRNHNEFHEQCVERIFMDVLRQCKPVKLAVYARYTRRGGLDINPFRTNFNTPWPDNRRNARQ

SEQ ID NO: 45511 - protein, 277 aa, Cupriavidus gilardii
  REGION 1..277: note = tr|A0A5A8EMC2|A0A5A8EMC2_9BURK NADPH-dependent 7-cyano-7-deazaguanine reductase OS=Cupriavidus gilardii; OX = 82541 GN=queF PE=3 SV=1
MTVPEHSPLGKVSAYKTEYDASLLFPIPRAPKRAEIGLPDGRAVPFFGVDIWNAYELSWLNPKGKPQVALASFIIPADTPNIIESKSFKLYLNSFNQTRLESPEALQQLLRNDLSEATGGAVQVRLTAEPDFGRQQMGELDGLLLDRLDIETDIYEPAPQLLRADQEETPVEETLVSHLLKSNCLVTGQPDWGSVQIRYVGAPIDQEGLLKYLISFRNHNEFHEQCVERIFMDVLRQCKPVKLAVYARYTRRGGLDINPFRTNFNTPWPDNRRNARQ

SEQ ID NO: 45512 - protein, 277 aa, Cupriavidus metallidurans
  REGION 1..277: note = sp|Q1LRI7|QUEF_CUPMC NADPH-dependent 7-cyano-7-deazaguanine reductase OS=Cupriavidus metallidurans (strain ATCC 43123 / DSM 2839 / NBRC 102507 / CH34) OX=266264 GN=q ueF PE=3 SV=1
MTLPEHSPLGKPSAYKTEYDASLLFPIPRQPKRAEIGLPEGRALPFFGVDIWNAYEVSWLNLKGKPQVALATFIIPADTPNIVESKSFKLYLNSFNQTKIASPEALQQLLHHDLSEATGGTVQVRLVTEADLGTQKMGELDGLLLDRLDIETDIYEPDPTLLSAEQEESPVEETLVSHLLKSNCLVTGQPDWGSVQIRYVGAPIDQEGLLKYLISFRNHNEFHEQCVERIFTDVMRMCKPVKLAVYARYTRRGGLDINPFRTNYNTPWPDNRRNARQ

SEQ ID NO: 45513 - protein, 277 aa, Cupriavidus metallidurans; identical to SEQ ID NO: 45512
  REGION 1..277: note = tr|A0A132HGY7|A0A132HGY7_9BURK NADPH-dependent 7-cyano-7-deazaguanine reductase OS=Cupriavidus metallidurans OX=119219 GN=queF PE=3 SV=1

SEQ ID NO: 45514 - protein, 277 aa, unidentified
  source 1..277: note = Cupriavidus nantongensis
  REGION 1..277: note = tr|A0A142JFH3|A0A142JFH3_9BURK NADPH-dependent 7-cyano-7-deazaguanine reductase OS=Cupriavidus nantongensis OX=1796606 GN=queF PE=3 SV=1
MSLPEHSPLGKPSAYKAEYDATLLFPIPRQPKRTEIGLPEGRPVPFFGVDIWNAYELSWLNLKGKPQVALATFIIPSDTPNIIESKSFKLYLNSFNQTRIASPEALQQLLHHDLSEATGGTVQVRLVTEADLGTQKMGELDGLLLDRLDIEVDRYEPAPELLSADQQETPVEETLVSHLLKSNCLVTGQPDWGSVQIRYVGAPINQEGLLKYLISFRNHNEFHEQCVERIFMDVMRQCKPVKLAVYARYTRRGGLDINPFRTNFNTAWPDNKRNARQ

SEQ ID NO: 45515 - protein, 277 aa, Cupriavidus necator
  REGION 1..277: note = sp|Q0KEJ5|QUEF_CUPNH NADPH-dependent 7-cyano-7-deazaguanine reductase OS=Cupriavidus necator (strain ATCC 17699 / H16 / DSM 428 / Stanier 337); OX = 381666 GN=queF PE=3SV=1
MSLPEHSPLGKPSAYKTEYDASLLFPIPRQPKRTEIGLPEGKPVPFFGVDIWNAYELSWLNLKGKPQVALASFIIPSDTPNIIESKSFKLYLNSFNQTRIASPEALQQLLHHDLSEATGGTVQVRLVTEADLGKQKMGELDGLLLDRLDIEVDRYEPAPELLSADQQESPVEETLVSHLLKSNCLVTGQPDWGSVQIRYVGAPINQEGLLKYLISFRNHNEFHEQCVERIFMDVMRECKPVKLAVYARYTRRGGLDINPFRTNFNTAWPDNKRNARQ

SEQ ID NO: 45516 - protein, 277 aa, Cupriavidus necator
  REGION 1..277: note = tr|A0A1K0IQ25|A0A1K0IQ25_CUPNE NADPH-dependent 7-cyano-7-deazaguanine reductase OS=Cupriavidus necator; OX = 106590 GN=queF PE=3 SV=1
MSLPEHSPLGKPSAYKTEYDASLLFPIPRQPKRTEIGLPEGKPVPFFGVDIWNAYELSWLNLKGKPQVALASFIIPSDTPNIIESKSFKLYLNSFNQTRIASPEALQQLLHHDLSEATGGTVQVRLVTEADLGTQKMGELDGLLLDRLDIEVDRYEPAPELLSADQEETPVEETLVSHLLKSNCLVTGQPDWGSVQIRYVGAPINQEGLLKYLISFRNHNEFHEQCVERIFMDVMRECKPVKLAVYARYTRRGGLDINPFRTNFNTAWPDNKRNARQ

SEQ ID NO: 45517 - protein, 277 aa, Cupriavidus oxalaticus
  REGION 1..277: note = tr|A0A375G3F9|A0A375G3F9_9BURK NADPH-dependent 7-cyano-7-deazaguanine reductase OS=Cupriavidus oxalaticus; OX = 96344 GN=queF PE=3 SV=1
MSLPEHSPLGKPSAYKTEYDASLLFPIPRQPKRTEIGLPEGKPVPFFGVDIWNAYELSWLNLKGKPQVALATFIIPSDTPNIVESKSFKLYLNSFNQTKIASPEALQQLLHHDLSEATGGTVQVRLVTEADLGKQQMGELDGLLLDRLDIEVDRYEPAPELLFADQGETPVEETLVSHLLKSNCLVTGQPDWGSVQIRYVGAPINQEALLKYLISFRNHNEFHEQCVERIFMDVLRQCKPVKLAVYARYTRRGGLDINPFRTNFNTAWPDNKRNARQ

SEQ ID NO: 45518 - protein, 277 aa, Cupriavidus oxalaticus
  REGION 1..277: note = tr|A0A4P7L8T7|A0A4P7L8T7_9BURK NADPH-dependent 7-cyano-7-deazaguanine reductase OS=Cupriavidus oxalaticus; OX = 96344 GN=queF PE=3 SV=1
MSLPEHSPLGKPSAYKTEYDASLLFPIPRQPKRTEIGLPEGKPVPFFGVDIWNAYELSWLNLKGKPQVALATFIIPSDTPNIVESKSFKLYLNSFNQTRIASPEALQQLLHHDLSEATGGTVQVRLVTEADLGKQQMGELDGLLLDRLDIEVDRYEPAPELLFANQEETPVEETLVSHLLKSNCLVTGQPDWGSVQIRYVGAPINQEALLKYLISFRNHNEFHEQCVERIFMDVLRQCKPVKLAVYARYTRRGGLDINPFRTNFNTAWPDNKRNARQ

SEQ ID NO: 45519 - protein, 277 aa, Cupriavidus pauculus
  REGION 1..277: note = tr|A0A2N5CJ92|A0A2N5CJ92_9BURK NADPH-dependent 7-cyano-7-deazaguanine reductase OS=Cupriavidus pauculus; OX = 82633 GN=queF PE=3 SV=1
MTLPEHSPLGKPSAYKTEYDPTLLFPIPRQPKRTEIGLPEGKALPFFGVDIWNAYEVSWLNLKGKPQVALATFIIPADTPNIVESKSFKLYLNSFNQSKIASAEALQQLLHHDLSEATGGTVQVRLVTESDLGTQKMGELDGLLLDRLDIETDVYEPDPTLLKADQDESPVEESLVSHLLKSNCLVTGQPDWGSVQIRYVGAPIDQEGLLKYLISFRNHNEFHEQCVERIFTDVMRMCKPVKLAVYARYTRRGGLDINPFRTNFNTPWPDNRRNARQ

SEQ ID NO: 45520 - protein, 277 aa, Cupriavidus pauculus
  REGION 1..277: note = tr|A0A3G8GWJ6|A0A3G8GWJ6_9BURK NADPH-dependent 7-cyano-7-deazaguanine reductase OS=Cupriavidus pauculus; OX = 82633 GN=queF PE=3 SV=1
MTLPEHSPLGKPSAYKTEYDPTLLFPIPRQPKRTEIGLAEGRALPFFGVDIWNAYEVSWLNLKGKPQVALATFIIPSDTPNIVESKSFKLYLNSFNQSRIASAEALQQLLHHDLSQATGGTVQVRLVTEADLGTQKMGELDGLLLDRLDIETDIYEPDASLLKADQEASPVEETLVSHLLKSNCLVTGQPDWGSVQIRYVGAPIDQEGLLKYLISFRNHNEFHEQCVERIFTDVLRMCKPVKLAVYARYTRRGGLDINPFRTNFNTPWPDNRRNARQ

SEQ ID NO: 45521 - protein, 277 aa, Cupriavidus pinatubonensis
  REGION 1..277: note = sp|Q475Y9|QUEF_CUPPJ NADPH-dependent 7-cyano-7-deazaguanine reductase OS=Cupriavidus pinatubonensis (strain JMP 134 / LMG 1197) OX=264198; GN = queF PE=3 SV=1
MSLPEHSPLGKPSAYKTEYDATLLFPIARQPKRTEIGLPAGKPVPFFGVDIWNAYEVSWLNMRGKPQVALATFIIPSDTPNIIESKSFKLYLNSFNQTKIASPEALQQLLHHDLSEATGGTVQVRLVTEADLGKQKMGELEGLLLDRLDIEVDRYEPAPDLLKADQQESPVEETLVSHLLKSNCLVTGQPDWGSVQIRYVGAPINQEGLLKYLISFRNHNEFHEQCVERIFMDVMRECKPVKLAVYARYTRRGGLDINPFRTNFNTPWPDNLRNARQ

SEQ ID NO: 45522 - protein, 281 aa, unidentified
  source 1..281: note = Cupriavidus plantarum
  REGION 1..281: note = tr|A0A316F2S0|A0A316F2S0_9BURK NADPH-dependent 7-cyano-7-deazaguanine reductase OS=Cupriavidus plantarum; OX = 942865 GN=queF PE=3 SV=1
MSEPSNQPEHSPLGKPSAYKTEYDPSLLFPISRQPKRTEIGLPEGRPLPFFGVDLWNAYELSWLNLKGKPQVALASFIIPSDTPNIVESKSFKLYLNSFNQSKIASPEAVQQLLHHDLSEATGGTVQVRLVTESDLGKQKMGELDGLLLDRLDIETDVYEPDPSLLSAAQDESPVEETLVSHLLKSNCLVTGQPDWGSVQIRYVGAPIDQEGLLKYLISFRNHNEFHEQCVERIFTDIQRQCKPVKLAVYARYTRRGGLDINPFRTNFNTPWPDNRRNARQ

SEQ ID NO: 45523 - protein, 277 aa, Cupriavidus sp.; identical to SEQ ID NO: 45515
  REGION 1..277: note = tr|R7XC19|R7XC19_9BURK NADPH-dependent 7-cyano-7-deazaguanine reductase OS=Cupriavidus sp. GA3-3; OX = 1229514 GN=queF PE=3 SV=1

SEQ ID NO: 45524 - protein, 277 aa, Cupriavidus sp.
  REGION 1..277: note = tr|A0A1D9GW60|A0A1D9GW60_9BURK NADPH-dependent 7-cyano-7-deazaguanine reductase OS=Cupriavidus sp. USMAA2-4 OX=876364 GN=queF PE=3 SV=1
MSLPEHSPLGKPSAYKTEYDPTLLFPIPRQPKRTEIGLPEGKRPPFFGVDIWNAYELSWLNMKGKPQVALASFIIPAESPNIVESKSFKLYLNSFNQSKIASPEALQQLLHHDLSEAAGATVQVRLAAEGDFARQQMGELDGLLLDRLDIETDVYEPAPHLLRADQEAPPVEETLVSHLLKSNCLVTGQPDWGSVQIRYVGAPIDQEGLLKYLISFRNHNEFHEQCVERIFMDVLRQCKPVKLAVYARYTRRGGLDINPFRTNYNTPWPDNRRNARQ

SEQ ID NO: 45525 - protein, 277 aa, Cupriavidus taiwanensis
  REGION 1..277: note = sp|B2AGY8|QUEF_CUPTR NADPH-dependent 7-cyano-7-deazaguanine reductase OS=Cupriavidus taiwanensis (strain DSM 17343 / BCRC 17206 / CIP 107171 / LMG 19424 / R1) OX=977 880 GN=queF PE=3 SV=1
MSLPEHSPLGKPSAYKTEYDASLLFPIPRQPKRTEIGLPEGKPVPFFGVDIWNAYELSWLNLKGKPQVALATFIIPSDTPNIVESKSFKLYLNSFNQTRIASPEALQQLLHHDLSEATGGTVQVRLVTEADLGKQQMGELDGLLLDRLDIEVDRYEPAPELLFADQDETPVEETLVSHLLKSNCLVTGQPDWGSVQIRYVGAPINQEALLKYLISFRNHNEFHEQCVERIFMDVMRQCKPVKLAVYARYTRRGGLDINPFRTNFNTAWPDNKRNARQ

SEQ ID NO: 45526 - protein, 277 aa, Cupriavidus taiwanensis; identical to SEQ ID NO: 45506
  REGION 1..277: note = tr|A0A375EPR1|A0A375EPR1_9BURK NADPH-dependent 7-cyano-7-deazaguanine reductase OS=Cupriavidus taiwanensis OX=164546 GN=queF PE=3 SV=1

SEQ ID NO: 45527 - protein, 281 aa, unidentified
  source 1..281: note = [Curtobacterium] plantarum
  REGION 1..281: note = tr|A0A3M7UE95|A0A3M7UE95_9GAMM NADPH-dependent 7-cyano-7-deazaguanine reductase OS=[Curtobacterium] plantarum OX=221276 GN=queF PE=3 SV=1
MTTHEQDQALSNLTLGKPTAYHDHYDNSLLQAVPRSLNREPLGLFPDSLPFTGSDIWTLYELSWLNSKGLPQVAVGEVVLDAQSRNLIESKSFKLYLNSFNQTRFADWGEVRQTLERDLSACAEGEARVALFRLNEVEGQPIGHFEGVCIDEQDIAIEDYRFNADYLADAAGSEIVEETLVSHLLKSNCLITNQPDWGSVMIRYKGPRIDREALLRYLVSFRQHNEFHEQCVERIFNDVMRFCHPEALTVYARYTRRGGLDINPWRTNVPFSPGFSRLVRQ

SEQ ID NO: 45528 - protein, 281 aa, unidentified
  source 1..281: note = Curvibacter putative
  REGION 1..281: note = tr|C9Y9D5|C9Y9D5_9BURK NADPH-dependent 7-cyano-7-deazaguanine reductase OS=Curvibacter putative symbiont of Hydra magnipapillata OX=667019 GN=queF PE=3; SV = 1
MNTPEQSQLGKSSAYVDRYDASLLFPIPRSGKRTEIGITGAAPFFGADMWTAFELSWLNTRGKPQVALVHFTIPAESPNIIESKSFKLYLNSFNNTQFADASDVLQRLRTDIAEAAWRGGPVQSVGVRLIAADQFDREPVYELDGLNLDRLDVECTRYQPAPELLSTAPAEEGVVSEVLVSNLLKSNCLVTGQPDWGSVQISYTGAQINQEGLLQYLISYRNHNEFHEQCVERIFMDIWSRCHPTKLTVYARYTRRGGLDINPFRTSHPQALPANTRTARQ

SEQ ID NO: 45529 - protein, 285 aa, Curvibacter sp.
  REGION 1..285: note = tr|A0A1F8VVU3|A0A1F8VVU3_9BURK NADPH-dependent 7-cyano-7-deazaguanine reductase OS=Curvibacter sp. GWA2_64_110 OX=1797747 GN=queF PE=3 SV=1
MTTPENSLLGKAVPYVDQYDAALLYPIARIAKREEIGLNINEGATLPFLGADLWTAYELSWLNARGKPQVALAHITVPCETPNIVESKSFKLYLNSFNNTKFADAAEVQARIRADISEAVWRGSDKTGTVGVKLIGPELFDREPIHELDGLNLDRLEVECTQYTPAPELLTAAFDEQPVSEVLTSNLLKSNCLVTGQPDWASVQISYSGPQIEQEGLLQYIVSFRNHNEFHEQCVERIFMDVWTRCKPAKLTVYARYTRRGGLDINPWRTSHPQALPANVRTARQ

SEQ ID NO: 45530 - protein, 285 aa, Curvibacter sp.
  REGION 1..285: note = tr|A0A0R0MKJ8|A0A0R0MKJ8_9BURK NADPH-dependent 7-cyano-7-deazaguanine reductase OS=Curvibacter sp. PAE-UM; OX = 1714344 GN=queF PE=3 SV=1
MSQPEDSLLGKAAPYVDQYDAALLYPIPRLPKRQEIGLGIKEGATLPFMGADLWTAYELSWLNARGKPQVAIAQITVPCETPNIVESKSFKLYLNSYNNTKFADAAEVQTRIRADISEAVWRGSDKTGTVGVKIIAPELFDQQPIHELDGLSLDRLDVECTHYTPAPELLTAAFDEQPVSEVLTSSLLKSNCLVTGQPDWASVQIAYSGPQIEQAGLLQYLVSFRNHNEFHEQCVERIYMDLWTRCKPTKLTVYARYTRRGGLDINPWRTSHPQALPANVRTARQ

SEQ ID NO: 45531 - protein, 138 aa, unidentified
  source 1..138: note = Cuspidothrix issatschenkoi
  REGION 1..138: note = tr|A0A2S6CZ34|A0A2S6CZ34_9CYAN NADPH-dependent 7-cyano-7-deazaguanine reductase OS=Cuspidothrix issatschenkoi CHARLIE-1 OX=2052836 GN=queF PE=3 SV=1
MNNFASETASPTSPEMKYGEREIAEGQLITFPNPRIGRRYDISITLPEFTCKCPFSGYPDFATIYITYIPDQRVVELKALKLYINSYRDRYISHEETANEILDDVVAACDPLEITVKADFTPRGNVHTVVEVKHQKAV

SEQ ID NO: 45532 - protein, 139 aa, unidentified
  source 1..139: note = Cyanobacteria bacterium
  REGION 1..139: note = tr|A0A350XAL3|A0A350XAL3_9CYAN NADPH-dependent 7-cyano-7-deazaguanine reductase OS=Cyanobacteria bacterium UBA11372 OX=2055768 GN=queF PE=3 SV=1
MSDDFSPESETEPVTAEMKYGERNIAEGKLITFPNPRLGRRYQINITLPEFTCKCPFSGYPDFATIHITYFPDQTVVELKALKLYINSYRDRYISHEESVNQILDDFVAACDPLEVEIKGDFSPRGNVHTTIEVNHKKS

SEQ ID NO: 45533 - protein, 136 aa, unidentified
  source 1..136: note = Cyanobacteria bacterium
  REGION 1..136: note = tr|A0A1Z9Q1A8|A0A1Z9Q1A8_9CYAN NADPH-dependent 7-cyano-7-deazaguanine reductase OS=Cyanobacteria bacterium TMED229 OX=1986679 GN=queF PE=3 SV=1
MAIETEASTQTPHYGERAIADAELVCFDNPRPGRPYEVSIELPEFTCKCPFSGYPDFAVLRLTYQPGPRVVELKAIKLYVNSYRDRSISHEEVSNRILDDLVEACAPVWMQLEADFNPRGNVHTVVRVSHGTRLPC

SEQ ID NO: 45534 - protein, 129 aa, unidentified
  source 1..129: note = Cyanobacterium aponinum
  REGION 1..129: note = tr|K9Z363|K9Z363_CYAAP NADPH-dependent 7-cyano-7-deazaguanine reductase OS=Cyanobacterium aponinum (strain PCC 10605) OX=755178 GN=queF PE=3 SV=1
MTENQATEVKYGERAIEEGKLITFPNPRPGRVYNISVTLPEFTCKCPFSGYPDFATIYINYCPDEKVVELKAIKLYINSYRDRYISHEESINQILDDFVAAADPLSITIKGDFNPRGNVHTVVEVSHKK

SEQ ID NO: 45535 - protein, 129 aa, unidentified; identical to SEQ ID NO: 45534
  source 1..129: note = Cyanobacterium aponinum
  REGION 1..129: note = tr|A0A2G3P7P1|A0A2G3P7P1_9CHRO NADPH-dependent 7-cyano-7-deazaguanine reductase OS=Cyanobacterium aponinum IPPAS B-1201 OX=2047986 GN=queF PE=3 SV=1

SEQ ID NO: 45536 - protein, 141 aa, unidentified
  source 1..141: note = Unknown
  REGION 1..141: note = tr|A0A0R2U657|A0A0R2U657_9CYAN NADPH-dependent 7-cyano-7-deazaguanine reductase OS=cyanobacterium BACL30 MAG-120619-bin27 OX=1655601 GN=queF PE=3 SV=1
MSSSPASASASSLTQTPMYGERAIAEAELICFDNPRPGRAYEISIELPEFTCKCPFSGYPDFAVLRLIYQPGPRVVELKAIKLYVNSYRDRSISHEEVTNRILDDLVAATDPQWMQLEADFHPRGNVHTVVRASHGTRLAC

SEQ ID NO: 45537 - protein, 142 aa, Epithemia turgida
  REGION 1..142: note = tr|A0A077JF07|A0A077JF07_9CYAN NADPH-dependent 7-cyano-7-deazaguanine reductase OS=cyanobacterium endosymbiont of Epithemia turgida isolate EtSB Lake Yunoko; OX = 12289 87 GN=queF PE=3 SV=1
MNQVTNSQASNFKFDSSAIRYGEQFIEEGKLITFPNPRTGRRYDINITLPEFTCKCPFSGYPDFANLYLTYIPDEKVVELKALKLYINGYRDLYISHEESINQILDDFVVACDPLEIVLKGDFNPRGNVHTVIQVCHHKQKG

SEQ ID NO: 45538 - protein, 142 aa, Rhopalodia gibberula
  REGION 1..142: note = tr|A0A2Z5T2D3|A0A2Z5T2D3_9CYAN NADPH-dependent 7-cyano-7-deazaguanine reductase OS=cyanobacterium endosymbiont of Rhopalodia gibberula OX=1763363 GN=queF; PE = 3 SV=1
MNQVANSQSSKSKSDSSTIRYGERFIEEGKLITFPNPRIGRRYDINITLPEFTCKCPFSGYPDFANLYLTYVPDKKVVELKALKLYINRYRDLYVSHEESINQILDDFVMACDPLEVTLKGDFNPRGNIHTVIKVRHHKQKS

SEQ ID NO: 45539 - protein, 125 aa, unidentified
  source 1..125: note = Unknown
  REGION 1..125: note = tr|A0A2T4D2R1|A0A2T4D2R1_9CYAN NADPH-dependent 7-cyano-7-deazaguanine reductase OS=cyanobacterium G8-9; OX = 2137193 GN=queF PE=3 SV=1
MKYGEKEIQEFDINAEENFWPNEHKKNYTINIELPEFMCLCPRSGYPDFATLKLAYEPDEKVIELKALKLYINSFMYRHISHENSANEIYDALYSKLKPKSMKLIADFNPRGNVHTVIEIDSCNN

SEQ ID NO: 45540 - protein, 131 aa, unidentified
  source 1..131: note = Cyanobacterium sp.
  REGION 1..131: note = tr|A0A1E5QVH3|A0A1E5QVH3_9CHRO NADPH-dependent 7-cyano-7-deazaguanine reductase OS=Cyanobacterium sp. IPPAS B-1200 OX=1562720 GN=queF PE=3 SV=1
MAEDKKEMMYGERAIAEGSLITFPNPRPGRVYNVSVTLPEFTCKCPFSGYPDFATIYINYSPDQKVVELKAIKLYINNYRDRYISHEECINQILDDFVEACEPLYMSVKGDFYPRGNVHTVIEVEHKKNPQ

SEQ ID NO: 45541 - protein, 131 aa, unidentified
  source 1..131: note = Cyanobacterium sp.
  REGION 1..131: note = tr|A0A2K8WP03|A0A2K8WP03_9CHRO NADPH-dependent 7-cyano-7-deazaguanine reductase OS=Cyanobacterium sp. HL-69 OX=2054282 GN=queF2 PE=3 SV=1
MAEDKKEMMYGERAIAEGSLITFPNPRPGRVYNVSVTLPEFTCKCPFSGYPDFATIYINYSPDQKVVELKAIKLYINNYRDRYISHEECINQILDDFVEACDPLYMSVKGDFYPRGNVHTVIEVEHKKNPQ

SEQ ID NO: 45542 - protein, 131 aa, unidentified
  source 1..131: note = Cyanobacterium stanieri
  REGION 1..131: note = tr|K9YRR8|K9YRR8_CYASC NADPH-dependent 7-cyano-7-deazaguanine reductase OS=Cyanobacterium stanieri (strain ATCC 29140 / PCC 7202) OX=292563 GN=queF; PE = 3 SV=1
MAEDKKEMMYGERAIAEGSLITFPNPRPGRVYNISVTLPEFTCKCPFSGYPDFATIYINYSPDQKVVELKAIKLYINNYRDRYISHEESINQILDDFVEACDPLYISVKGDFYPRGNVHTVIEVEHRKNPQ

SEQ ID NO: 45543 - protein, 155 aa, Ornithocercus magnificus
  REGION 1..155: note = tr|A0A4Y3FQT8|A0A4Y3FQT8_9CYAN NADPH-dependent 7-cyano-7-deazaguanine reductase OS=cyanobiont of Ornithocercus magnificus OX=2496102 GN=queF PE=3 SV=1
MPVAVTATVDYNVTKPLYHSLTTSIDHNRTQLYGEQSIAEAKIICFNNPYLGRSYEIAIELPEFTCLCPFSGYPDFAVLRLLYQPGPKVIELKSIKLYINSYRDRTISHEAVTNEIFDDLITACDPKWMQLEADFNPRGNVHTVLRVSHGSRQPC

SEQ ID NO: 45544 - protein, 138 aa, unidentified; identical to SEQ ID NO: 44045
  source 1..138: note = Cyanobium gracile
  REGION 1..138: note = tr|K9PAJ3|K9PAJ3_CYAGP NADPH-dependent 7-cyano-7-deazaguanine reductase OS=Cyanobium gracile (strain ATCC 27147 / PCC 6307) OX=292564 GN=queF PE=3 SV=1

SEQ ID NO: 45545 - protein, 136 aa, unidentified
  source 1..136: note = Cyanobium sp.
  REGION 1..136: note = tr|A0A081GPE7|A0A081GPE7_9CYAN NADPH-dependent 7-cyano-7-deazaguanine reductase OS=Cyanobium sp. CACIAM 14 OX=1496688 GN=queF PE=3 SV=1
MASGVADQTVTPLYGQRAIAEAQLICFTNPRQGRAYEVSIELPEFTCTCPFSGYPDFAVLRLLYQPGPRVLELKALKLYVNGYRDRAISHEEAANRILDDLVSACDPVWMQLEADFNPRGNVHTVVRVSHGSRQPC

SEQ ID NO: 45546 - protein, 138 aa, unidentified
  source 1..138: note = Cyanobium sp.
  REGION 1..138: note = tr|A0A182ATL1|A0A182ATL1_9CYAN NADPH-dependent 7-cyano-7-deazaguanine reductase OS=Cyanobium sp. NIES-981; OX = 1851505 GN=queF PE=3 SV=1
MASPSGHDGQTRTPLYGERAIAEATLLCFDNPRPGRAYEVAITLPEFTCLCPFSGYPDFATLRLLYQPGPRVMELKAIKLYVNGYRDRAISHEEVANRLLDDFVAACEPVWMRLEADFNPRGNVHTVVRVSHGVRQSC

SEQ ID NO: 45547 - protein, 141 aa, unidentified
  source 1..141: note = Cyanobium usitatum
  REGION 1..141: note = tr|A0A2P7MYK1|A0A2P7MYK1_9CYAN NADPH-dependent 7-cyano-7-deazaguanine reductase OS=Cyanobium usitatum str. Tous OX=2116684 GN=queF PE=3 SV=1
MSSSPASASESSLTQTPMYGERAIAEAELICFDNPRLGRAYEISIELPEFTCKCPFSGYPDFAVLRLIYQPGPRVVELKAIKLYVNSYRDRSISHEEVTNRILDDLVAATDPQWMQLEADFHPRGNVHTVVRVSHGTRLAC

SEQ ID NO: 45548 - protein, 128 aa, unidentified; identical to SEQ ID NO: 45298
  source 1..128: note = Cyanosarcina cf.
  REGION 1..128: note = tr|A0A2T1FEP7|A0A2T1FEP7_9CHRO NADPH-dependent 7-cyano-7-deazaguanine reductase OS=Cyanosarcina cf. burmensis CCALA 770 OX=2107697 GN=queF PE=3 SV=1

SEQ ID NO: 45549 - protein, 142 aa, unidentified
  source 1..142: note = Cyanothece sp.
  REGION 1..142: note = tr|B8HRW7|B8HRW7_CYAP4 NADPH-dependent 7-cyano-7-deazaguanine reductase OS=Cyanothece sp. (strain PCC 7425 / ATCC 29141) OX=395961 GN=queF PE=3 SV=1
MANLVESGQQHDGTIAISTELKYGERQIQEGQLITFPNPRPGRRYTIQITLPEFTCKCPFSGYPDFATIHVSYIPDQRVVELKAIKLYINSYRDRYISHEESVNQILDDLVTACDPLQISVKGDFAPRGNVHTVIEVEHQKA

SEQ ID NO: 45550 - protein, 142 aa, unidentified
  source 1..142: note = Cyanothece sp.
  REGION 1..142: note = tr|A0A3B8Y3T5|A0A3B8Y3T5_9CYAN NADPH-dependent 7-cyano-7-deazaguanine reductase OS=Cyanothece sp. UBA12306 OX=2055757 GN=queF PE=3 SV=1
MSQAANLYPSNIEPEQSGVKYGERLIETGQLITFPNPRIGRKYDISISLPEFTCKCPFSGYPDFATLYLTYVPDEKVVELKSLKLYINNYRDRYISHEESINQILDDFVAACSPLEANLKGDFNPRGNVHTVIEVSHRKEDN

SEQ ID NO: 45551 - protein, 129 aa, Cycloclasticus sp.
  REGION 1..129: note = tr|A0A1M6FNQ2|A0A1M6FNQ2_9GAMM NADPH-dependent 7-cyano-7-deazaguanine reductase OS=Cycloclasticus sp. DSM 27168 OX=1884353 GN=queF PE=3 SV=1
MSTQPNTDLETFPNPNTERDYTIRIDTPEFTCLCPKTGQPDFATLTLEYVPNESCIELKSFKLYIWSYRDKGAFHEAVTNSILADLVKACEPRFMRLSAEFNVRGGVYTTVVAEHKDSNWEPSTPVQLP

SEQ ID NO: 45552 - protein, 129 aa, Cycloclasticus sp.
  REGION 1..129: note = tr|A0A1X1QLC1|A0A1X1QLC1_9GAMM NADPH-dependent 7-cyano-7-deazaguanine reductase OS=Cycloclasticus sp. symbiont of Bathymodiolus heckerae OX=1284675 GN=queF PE=3; SV = 1
MSTQPNTDLETFPNPNAERDYTIRIDTPEFTCLCPKTGQPDFATLTLEYVPNESCIELKSFKLYVWSYRDKGAFHEAVTNSILDDLVKACAPRFMRLSAEFNVRGGVYTTVVAEHKADDWEPSSPVQLP

SEQ ID NO: 45553 - protein, 129 aa, unidentified; identical to SEQ ID NO: 45551
  source 1..129: note = Cycloclasticus zancles
  REGION 1..129: note = tr|S5T9F7|S5T9F7_9GAMM NADPH-dependent 7-cyano-7-deazaguanine reductase OS=Cycloclasticus zancles 78-ME OX=1198232 GN=queF PE=3 SV=1

SEQ ID NO: 45554 - protein, 142 aa, Cylindrospermopsis raciborskii
  REGION 1..142: note = tr|A0A1S2A0T7|A0A1S2A0T7_9CYAN NADPH-dependent 7-cyano-7-deazaguanine reductase OS=Cylindrospermopsis raciborskii MVCC14 OX=940191 GN=queF PE=3 SV=1
MSHSVSNILPSENPVKEVKYGEREIEEGKLITFPNPRVGREYTIDITLPEFTCKCPFSGYPDFATIHITYIPDQRVVELKALKLYINSYRDKYISHEEVTNQILDDMVIACAPLEMTIKADFSPRGNVHMVVEVKYKKGAVS

SEQ ID NO: 45555 - protein, 142 aa, Cylindrospermopsis raciborskii
  REGION 1..142: note = tr|A0A1X4G3S3|A0A1X4G3S3_9CYAN NADPH-dependent 7-cyano-7-deazaguanine reductase OS=Cylindrospermopsis raciborskii CENA303 OX=1170769 GN=queF PE=3 SV=1
MSHSVSNILPSENPVKEVKYGEREIEEGKLITFPNPRVGREYTIDITLPEFTCKCPFSGYPDFATIHIIYIPDQRVVELKALKLYINSYRDKYISHEEVANQVLDDMVVACAPLEMTVKADFSPRGNVHMVVEVKHKKGVAL

SEQ ID NO: 45556 - protein, 142 aa, Cylindrospermopsis sp.
  REGION 1..142: note = tr|A0A0R0M2R0|A0A0R0M2R0_9CYAN NADPH-dependent 7-cyano-7-deazaguanine reductase OS=Cylindrospermopsis sp. CR12 OX=1747196 GN=queF PE=3 SV=1
MSHSVSNILPSEDPVKEVKYGEREIEEGKLITFPNPRVGREYTIDITLPEFTCKCPFSGYPDFATIHIAYIPDQRVVELKALKLYINSYRDKYISHEEVTNQILDDLVIACAPLEMTVKADFSPRGNVHMVVEVKHKKGAAS

SEQ ID NO: 45557 - protein, 136 aa, Cylindrospermum sp.
  REGION 1..136: note = tr|A0A1Z4QL00|A0A1Z4QL00_9NOST NADPH-dependent 7-cyano-7-deazaguanine reductase OS=Cylindrospermum sp. NIES-4074 OX=2005457 GN=queF PE=3 SV=1
MSNLSPETLSQPSPEIKYGEREIAEGKLITFPNPRVGRRYDINITLPEFTCKCPFSGYPDFATIYITYVPDERVVELKALKLYINSYRDRYISHEESANQILDDFVAACDPLEVTVKTDFTPRGNVHTVVEVKHQK

SEQ ID NO: 45558 - protein, 136 aa, Cylindrospermum stagnale
  REGION 1..136: note = tr|K9WVP1|K9WVP1_9NOST NADPH-dependent 7-cyano-7-deazaguanine reductase OS=Cylindrospermum stagnale PCC 7417 OX=56107 GN=queF PE=3 SV=1
MSNSSPETLSQPSQEMKYGEREIAEGQLITFPNPRVGRRYDVNITLPEFTCKCPFSGYPDFATIYISYVPDERVVELKALKLYINSYRDRYISHEETANQILDDFVAACDPLAVTVKTDFTPRGNVHTVVEVKHQK

SEQ ID NO: 45559 - protein, 139 aa, Cystobacter ferrugineus
  REGION 1..139: note = tr|A0A1L9BAI1|A0A1L9BAI1_9DELT NADPH-dependent 7-cyano-7-deazaguanine reductase OS=Cystobacter ferrugineus OX=83449 GN=queF PE=3 SV=1
MASQRAPSQPTQPTKELQTFPNPAPDRDYEIAFDVPEFTCLCPLTGQPDFARFRIRYVPDTLCVELKSLKLYMWSYRNEGAFHEKVTNTIADDIVRAIQPRKLTVEGDFFVRGGIGTVITVTHEKPARGAKKSAPARRK

SEQ ID NO: 45560 - protein, 138 aa, Cystobacter fuscus
  REGION 1..138: note = tr|A0A250JIN0|A0A250JIN0_9DELT NADPH-dependent 7-cyano-7-deazaguanine reductase OS=Cystobacter fuscus; OX = 43 GN=queF PE=3 SV=1
MASQRAPSQPTQPTKELQTFPNPAPDRDYEIAFDVPEFTCLCPLTGQPDFARFRIRYVPDTLCVELKSLKLYMWSYRNEGAFHEKVTNTIADDIVRAIQPRKLTVEGDFFVRGGIGTVITVTHEKPARGAKKSPARRK

SEQ ID NO: 45561 - protein, 139 aa, Cystobacter fuscus
  REGION 1..139: note = tr|S9QIE5|S9QIE5_9DELT NADPH-dependent 7-cyano-7-deazaguanine reductase OS=Cystobacter fuscus DSM 2262 OX=1242864 GN=queF PE=3 SV=1
MASQRAPSQPTQPTKELQTFPNPAPDRDYEIAFDVPEFTCLCPLTGQPDFARFRIRYVPDTLCVELKSLKLYMWSYRDEGAFHEKVTNTIADDIVRAIQPRKLTVEGDFFVRGGIGTVITVTHEKPARSAKKAAPARRK

SEQ ID NO: 45562 - protein, 296 aa, Cytophaga xylanolytica
  REGION 1..296: note = tr|A0A2W7NHZ7|A0A2W7NHZ7_9BACT 7-cyano-7-deazaguanine reductase OS=Cytophaga xylanolytica; OX = 990 GN=LX69_00507 PE=4 SV=1
MTPTVPIEATLLGKHVEYPATYAPQVLVAVPRQLNRTQYAIDDKNLPFTGYDVWHAWEAGFLTRRGLPVAGVLKIIYPANNPVIVESKSLKLYLNSFNMERLGNTPEDGIREFKLTVQRDLATLLQTDDVRVELFTTQPGHLPFDFHGFKILETLHGADQVDFAHYTDTPALLRTDYDRPCELRLATHLLRSNCKITHQPDWGSAYIHIKANVTPNFMSILQYIVSLRNENHFHEEICEMLFTRLHEAFNPEQLMVVCIYTRRGGIDICPVRASHAFLIPPSLTSHHTLSHKLLRQ

SEQ ID NO: 45563 - protein, 113 aa, unidentified
  source 1..113: note = Cytophagaceae bacterium
  REGION 1..113: note = tr|A0A4Q3NYW2|A0A4Q3NYW2_9BACT NADPH-dependent 7-cyano-7-deazaguanine reductase OS=Cytophagaceae bacterium OX=2026729 GN=queF PE=3 SV=1
MPQLETFPNPAPGRDYTITHICPEFTSVCPKTGQPDFATIELEYIPEATCIELKALKLYYYSFRNEGIYYEAVTNRLLDELVEACAPRWMRITARFAVRGGISSVIVAETAPR

SEQ ID NO: 45564 - protein, 129 aa, unidentified
  source 1..129: note = Cytophagales bacterium
  REGION 1..129: note = tr|A0A2M6GIX2|A0A2M6GIX2_9BACT 7-cyano-7-deazaguanine reductase (Fragment); OS = Cytophagales bacterium CG18_big_fil_WC_8_21_14_2_50_42_9 OX=1973956; GN = COW65_09185 PE=4SV=1
METLEKIDIKEQLELSYKQALEHTQSALDYMAEYGIKPDGKFGLFLPPATRQKEIHRLPYQHTAKQVVTYETETGEFSALCPFSGLPDFGILRVEYIPGSFIMELKSLKYYILSWRNIGAAQEDITAYI

SEQ ID NO: 45565 - protein, 42 aa, unidentified
  source 1..42: note = Cytophagales bacterium
  REGION 1..42: note = tr|A0A2M6GH60|A0A2M6GH60_9BACT Uncharacterized protein OS=Cytophagales bacterium CG18_big_fil_WC_8_21_14_2_50_42_9 OX=1973956; GN = COW65_12760 PE=4 SV=1
MTAYIYEDLKKALQDPHYLKITTVYNVRGGINTTCSVDSHNQ

SEQ ID NO: 45566 - protein, 99 aa, unidentified
  source 1..99: note = Cytophagia bacterium
  REGION 1..99: note = tr|A0A2E5GV34|A0A2E5GV34_9BACT NADPH-dependent 7-cyano-7-deazaguanine reductase OS=Cytophagia bacterium; OX = 2026730 GN=queF PE=3 SV=1
  VARIANT 37: note = Xaa can be any naturally occurring amino acid
  VARIANT 47: note = Xaa can be any naturally occurring amino acid
  VARIANT 77: note = Xaa can be any naturally occurring amino acid
MEQYIKIYTKEFIAVCPFSGLPDIAKIKIEYYPEGKXALELKSLKYXLISFKNVGIYQEEVTKRIFNDLKEVLKTKXIRITSKYNVRGGLYTTCIEGKL

SEQ ID NO: 45567 - protein, 136 aa, unidentified
  source 1..136: note = Cytophagia bacterium
  REGION 1..136: note = tr|A0A2E5GW14|A0A2E5GW14_9BACT NADPH-dependent 7-cyano-7-deazaguanine reductase OS=Cytophagia bacterium; OX = 2026730 GN=queF PE=3 SV=1
  VARIANT 8: note = Xaa can be any naturally occurring amino acid
  VARIANT 128: note = Xaa can be any naturally occurring amino acid
MKKTYKDXDKKLLKAIPNPDKKTYEIKIKQPELTFLGVYEQPDFASLYVLFYPDKTIIELKSLKMYLQQYRDLIISYERLINVLYDDLIKVYKPKRLRIVLDCNPRGGISSRLTQDSDWKSLGGKEEXKNYNEDVW

SEQ ID NO: 45568 - protein, 134 aa, unidentified
  source 1..134: note = Dactylococcopsis salina
  REGION 1..134: note = tr|K9YY47|K9YY47_DACSA NADPH-dependent 7-cyano-7-deazaguanine reductase OS=Dactylococcopsis salina PCC 8305 OX=13035 GN=queF PE=3 SV=1
MAENTTSTQNLKYGEREIVEGELTTFPNPRPGRRYNVDISLPEFTCKCPFSGYPDFATIKIRYMPDQRIVELKAIKLYINSYRDRYISHEEAVNQILDDFVSACNPLEVTVTGDFSPRGNVHTVVEVHHQQPRV

SEQ ID NO: 45569 - protein, 156 aa, unidentified
  source 1..156: note = Dankookia rubra
  REGION 1..156: note = tr|A0A4R5QA21|A0A4R5QA21_9PROT NADPH-dependent 7-cyano-7-deazaguanine reductase OS=Dankookia rubra; OX = 1442381 GN=queF PE=3 SV=1
MTEATTDISGLTLLGHHAQAPASPEAAVLERVPNPHPGVQYLVRFAAPEFTSLCPMTGQPDFAHLVIDYIPQDWLVESKSLKLYLGAFRNHGAFHEACTVSIARRLVETLSPHWLRIGGYWYPRGGIPIDVFYQTGQAPAGVWVPDQGVQPYRGRG

SEQ ID NO: 45570 - protein, 283 aa, unidentified
  source 1..283: note = Dechloromonas aromatica
  REGION 1..283: note = sp|Q47DJ9|QUEF_DECAR NADPH-dependent 7-cyano-7-deazaguanine reductase OS=Dechloromonas aromatica (strain RCB) OX=159087 GN=queF PE=3 SV=1
MTLTTTHIADPSHASPLGKATEYQSHYAPELLYPIPRQLKRSELGITDANLPFVGEDLWNAYELSWLNSKGKPVVAVGTFRVPANSPNLIESKSFKLYLNSFNQSSFDNIAAVSATMSRDLSAAAGSPIIVTLEPLSASPLASIGTPDGILLDELDITCDRYQPEPALLATLPGENVEETLYSHLLKSNCLVTGQPDWAMVVIRYRGKPIDRAGLLRYIVSFRNHNEFHEQCVERIFSDIRVRCQPEVLAVHARYTRRGGLDINPFRSTGDYAAPDNTREIRQ

SEQ ID NO: 45571 - protein, 279 aa, Dechloromonas denitrificans
  REGION 1..279: note = tr|A0A133XK69|A0A133XK69_9RHOO NADPH-dependent 7-cyano-7-deazaguanine reductase OS=Dechloromonas denitrificans OX=281362 GN=queF PE=3 SV=1
MSPANDPSILSPLGKPTEYRADYAPELLYPIPRQLKRDELGISGAALPFVGEDLWNAYEVSWLNPKGKPVVALATFRVPADSPNLVESKSFKLYLNSFNQSVFADEDAVETTLARDLSAAAGAEIGVKVAVLGSRPQVSVAYPAGELLDDLDIACDSYQPAPELLHATDGPLVEETLYSHLLKSNCLVTGQPDWAMVVIRYRGRPIDRAGLLRYIVSFRGHNEFHEQCVERIYCDLTEHCAPEALAVYARYTRRGGLDINPFRSSGEFAAPDNTREVRQ

SEQ ID NO: 45572 - protein, 277 aa, Dechloromonas sp.
  REGION 1..277: note = tr|A0A5C7ZJK6|A0A5C7ZJK6_9RHOO NADPH-dependent 7-cyano-7-deazaguanine reductase OS=Dechloromonas sp.; OX = 1917218 GN=queF PE=3 SV=1
MSHDPSLLSPLGKATEYRADYAPELLFPIPRQIKRDELGIAGDALPFVGEDLWNAYELSWLTPSGKPAVALASFRFPADSPMLVESKSFKLYLNSFNQTVFDDKAAVLATLVADLSAAAGAPVSAEIALLSEQPPVVVGYPQGILLDDLDLACDRYQPAPELLGVSDWAEVEETLYSHLLKSNCLVTGQPDWAMVVIRYRGRPIDRAGLLRYIVSFRNHNEFHEQCVERIYCDIRRHCQPSALAVHARYTRRGGLDINPFRSSGGFPAPDNTREARQ

SEQ ID NO: 45573 - protein, 282 aa, Dechloromonas sp.
  REGION 1..282: note = tr|A0A3B7A763|A0A3B7A763_9RHOO NADPH-dependent 7-cyano-7-deazaguanine reductase OS=Dechloromonas sp. HYN0024 OX=2231055 GN=queF PE=3 SV=1
MNSPNDTTDPSHASPLGKTTEYQSHYAPTLLYPIPRQLKRSELGIADNALPFVGEDLWNAYELSWLNPRGKPVVAVGTFRVPADSPNLIESKSFKLYLNSLNQTCFADADTVTATLARDLSAAAGKPVDVQLEPLSQTPRAVIGIPQGVCLDDLDIVCDRYQPAPDLLTTQAGDIVDETLYSHLLKSNCLVTGQPDWAMVVIRYRGQPIDRAGLLRYIVSFRDHNEFHEQCVERIFTDIQKHCAPEKLAVHARYTRRGGLDINPFRSTGDYAAPDNTREIRQ

SEQ ID NO: 45574 - protein, 154 aa, unidentified
  source 1..154: note = Defluviimonas sp.
  REGION 1..154: note = tr|A0A059ING2|A0A059ING2_9RHOB NADPH-dependent 7-cyano-7-deazaguanine reductase OS=Defluviimonas sp. 20V17 OX=1417296 GN=queF PE=3 SV=1
MSGTDVSGLTQLGTSVEQPASPEEAVLERVPSGHSGQDYVVRFTAPEFTSLCPMTGQPDFAHIVIDYVPGDWLVESKSLKLFLTSFRNHGSFHEDCTMKVATRLVDLLEPRWLRIGAYWYPRGGIPIDVFWQTGAPPEGVWIPDQGVAPYRGRG

SEQ ID NO: 45575 - protein, 154 aa, Dehalobacter sp.
  REGION 1..154: note = tr|T0I3N7|T0I3N7_9FIRM NADPH-dependent 7-cyano-7-deazaguanine reductase OS=Dehalobacter sp. UNSWDHB OX=1339256 GN=queF PE=3 SV=1
MKNKETEGLSLLGSGQTRYVFDYDSDILESFANKYPDNNYFVRLNCPEFTSLCPITGQPDFGTMIINYIPDQKLVESKSLKLYLFSFRNHGGFHEDVVNIIMKDLIRLLEPRYIEVIGEFSPRGGISIHPYSNYGQPDSKWVEFAVKRLLKYGK

SEQ ID NO: 45576 - protein, 154 aa, Dehalobacter sp.
  REGION 1..154: note = tr|A0A4V6P5T9|A0A4V6P5T9_9FIRM NADPH-dependent 7-cyano-7-deazaguanine reductase OS=Dehalobacter sp. 12DCB1 OX=2070364 GN=queF PE=3 SV=1
MKNKETEGLSLLGSGQTYYVFDYDPAILESFANKHPDNDYFVRLNCPEFTSLCPITGQPDFGTMIINYIPDQKLVESKSLKLYLFSFRNHGDFHEDVVNIIMKDLIRLLEPRYIEVIGEFSPRGGIAIHPYSNYGQPDSKWIEFATKRLLKYGK

SEQ ID NO: 45577 - protein, 139 aa, unidentified
  source 1..139: note = Dehalococcoidales bacterium
  REGION 1..139: note = tr|A0A2D6WKM1|A0A2D6WKM1_9CHLR NADPH-dependent 7-cyano-7-deazaguanine reductase OS=Dehalococcoidales bacterium OX=2026733 GN=queF PE=3 SV=1
MSADKYAGRRFDSQIKEAIDVDVLEAIPFDYPGSATEVLYETEEFTCVCPWSGLPDFARLIIRYTPAHSLVELKSLKYYLTSYRNVGILQEHAVNRILQDLVELVKPPSMVVEAEYKERGSLKSKVIAKYSRDTSHPSK

SEQ ID NO: 45578 - protein, 133 aa, unidentified
  source 1..133: note = Dehalococcoidales bacterium
  REGION 1..133: note = tr|A0A2D6J295|A0A2D6J295_9CHLR NADPH-dependent 7-cyano-7-deazaguanine reductase OS=Dehalococcoidales bacterium OX=2026733 GN=queF PE=3 SV=1
MDKYASRSFDVQKEDAIDLAVLETVSFDYPGSATEVVYDTEEFTSVCPWTGLPDFARLVIRYIPGRFLVELKSLKYYLTSYRNVGILQEHAVNRILQDLVQLLDPVSMVVEAEYRERGGMKAKAVASYQKEHS

SEQ ID NO: 45579 - protein, 142 aa, unidentified
  source 1..142: note = Dehalococcoidia bacterium
  REGION 1..142: note = tr|A0A523V267|A0A523V267_9CHLR NADPH-dependent 7-cyano-7-deazaguanine reductase OS=Dehalococcoidia bacterium OX=2026734 GN=queF PE=3 SV=1
MTVDKYATRRYDIQGEEAIDVEVLEAIPFQYPESGTEIVYETDEFTFVCPWTGLPDFARLAIRYVPDNLLVELKSLKYYLTSYRNVGILQEHAVNRVLENLVQLLKPVSMVIEAEYRERGGLKTRATARYDSTKGKEAADES

SEQ ID NO: 45580 - protein, 132 aa, unidentified
  source 1..132: note = Dehalococcoidia bacterium
  REGION 1..132: note = tr|A0A2E5IKL9|A0A2E5IKL9_9CHLR NADPH-dependent 7-cyano-7-deazaguanine reductase OS=Dehalococcoidia bacterium OX=2026734 GN=queF PE=3 SV=1
MRKWSETSILKKIDNPTSEAYEIKIHAPEITFIGAEAQPDFAVANITFYPDQSVIELKSLKQYFYQFRDTRISYERIINTIYDDLMDIYSPKRIRMVMEFNVRGGISSKLTIDSDWKVRGGKEEFNDWAKAE

SEQ ID NO: 45581 - protein, 157 aa, unidentified
  source 1..157: note = Deinococcus actinosclerus
  REGION 1..157: note = tr|A0A0U4C3B5|A0A0U4C3B5_9DEIO NADPH-dependent 7-cyano-7-deazaguanine reductase OS=Deinococcus actinosclerus OX=1768108 GN=queF PE=3 SV=1
MTNVTAGADCGPQNPGFDRRYDVQGLDAIDVAVLGTFPHVREDDPVRYPGEPMQIEIVTDEFSPVCPWSGLPDFGRLEIRYLPREACVELKSLKYYLTSYRFVGIYHEHATRRVLADLVNLLKPLSMEIRCDYGMRGGLNTICTVKYVAPDHQPQGA

SEQ ID NO: 45582 - protein, 136 aa, Deinococcus cellulosilyticus
  REGION 1..136: note = tr|A0A511N5U7|A0A511N5U7_9DEIO NADPH-dependent 7-cyano-7-deazaguanine reductase OS=Deinococcus cellulosilyticus NBRC 106333 = KACC 11606 OX=1223518; GN = queF PE=3 SV=1
MSEEHNNPQLVENLTMLGRKVTDGEGKLEVFPSPKSKNLKEVTLYTEEIYAHCPVTGQPDFYSCKLTYWPDEACVESKSVKLYFQGLRDAGIFCEHLSDKIARDFFEALNPHAVRVELIQRPRGGISITAVSELKR

SEQ ID NO: 45583 - protein, 155 aa, Deinococcus deserti
  REGION 1..155: note = tr|C1CXM3|C1CXM3_DEIDV NADPH-dependent 7-cyano-7-deazaguanine reductase OS=Deinococcus deserti (strain VCD115 / DSM 17065 / LMG 22923) OX=546414 GN=queF; PE = 3 SV=1
MTTTPPCQPGFDRRYDVQGLDAIDVAVLDTFAYVRQDDPAAYPGEPMDIEIITDEFSPVCPWSGLPDFGRLEIRYQPREKCVELKSLKYYLTSYRFVGIYHEHATRRLLADLTQLLDPLSMTIRCDYGMRGGLNTVCTVRYVAPERREDALDPQD

SEQ ID NO: 45584 - protein, 152 aa, Deinococcus deserti
  REGION 1..152: note = tr|C1CXH5|C1CXH5_DEIDV NADPH-dependent 7-cyano-7-deazaguanine reductase OS=Deinococcus deserti (strain VCD115 / DSM 17065 / LMG 22923) OX=546414 GN=queF; PE = 3 SV=1
MTTTPPCQPGFDRRYDVQGLDAIDVAVLDTFAYVRQDDPAAYPGEPMDIEIITDEFSPVCPWSGLPDFGRLEIRYQPREKCVELKSLKYYLTSYRFVGIYHEHATRRLLADLTRLLDPLSMTIRCDYGMRGGLNTVCTVRYVAPDQAGGTAK

SEQ ID NO: 45585 - protein, 151 aa, Deinococcus ficus
  REGION 1..151: note = tr|A0A221SYB7|A0A221SYB7_9DEIO NADPH-dependent 7-cyano-7-deazaguanine reductase OS=Deinococcus ficus; OX = 317577 GN=queF PE=3 SV=1
MTASPPAPAGFDRRYDVQGLDAIDVAILDTFPLTREDDLQRYPGQPMEIEIVTDEFSPVCPWSGLPDFGRLEIRYLPRDRCVELKSLKYYLTSYRFVGVYHEHATRRLLADLTKLLDPLSLTIRCDYGMRGGLNTVCTVKYVAADHPQAGQ

SEQ ID NO: 45586 - protein, 134 aa, Deinococcus gobiensis
  REGION 1..134: note = tr|H8GTZ0|H8GTZ0_DEIGI NADPH-dependent 7-cyano-7-deazaguanine reductase OS=Deinococcus gobiensis (strain DSM 21396 / JCM 16679 / CGMCC 1.7299 / I-0); OX = 745776 GN=que F PE=3 SV=1
MQGLDAIDVAVLGTFPNVRDDDPVRYPGEPMQVEIVTDEFSPVCPWSGLPDFGRLEIKYLPRASCVELKSLKYYLTSYRFVGIYHEHATRRVLADLVALLDPLSMEIRCDYGMRGGLNTICTVRYVAPDHTPAR

SEQ ID NO: 45587 - protein, 155 aa, Deinococcus grandis
  REGION 1..155: note = tr|A0A117DMK2|A0A117DMK2_9DEIO NADPH-dependent 7-cyano-7-deazaguanine reductase OS=Deinococcus grandis; OX = 57498 GN=queF PE=3 SV=1
MTNVTAGADCGPQNPGFDRRYDVQGLDAIDVAVLGTFPHVREDDPVRYPGEPMQIEIVTDEFSPVCPWSGLPDFGRLEIRYLPREACVELKSLKYYLTSYRFVGIYHEHATRRVLADLVNLLKPLSMEIRCDYGMRGGLNTICTVKYVAPDHQGA

SEQ ID NO: 45588 - protein, 154 aa, Deinococcus hopiensis
  REGION 1..154: note = tr|A0A1W1V7L7|A0A1W1V7L7_9DEIO NADPH-dependent 7-cyano-7-deazaguanine reductase OS=Deinococcus hopiensis KR-140 OX=695939 GN=queF PE=3 SV=1
MKTTAEKPAQQGFDRRYDVQGLDAIDVAVLDTFAYVREDDLAAYPGEPMEIEITTDEFSPVCPWSGLPDFGQLHIRYLPRDRCVELKSLKYYLTSYRFVGIYHEHATRRLLADLVKLLDPLKMEVRCDYGMRGGLNTVCTVRYAAPAPDAVQEG

SEQ ID NO: 45589 - protein, 135 aa, Deinococcus indicus
  REGION 1..135: note = tr|A0A246BEX3|A0A246BEX3_9DEIO NADPH-dependent 7-cyano-7-deazaguanine reductase OS=Deinococcus indicus; OX = 223556 GN=queF PE=3 SV=1
MQGLDAIDVAVLGTFPHVREDDPVRYPGEPMQIEIVTDEFSPVCPWSGLPDFGRLEIRYLPREACVELKSLKYYLTSYRFVGIYHEHATRRVLADLVNLLNPLSMEIRCDYGMRGGLNTICTVKYVAPDHQPQGA

SEQ ID NO: 45590 - protein, 147 aa, Deinococcus maricopensis
  REGION 1..147: note = tr|E8U3S2|E8U3S2_DEIML NADPH-dependent 7-cyano-7-deazaguanine reductase OS=Deinococcus maricopensis (strain DSM 21211 / LMG 22137 / NRRL B-23946 / LB-34) OX=709986 G N=queF PE=3 SV=1
MTTTTDAPARGFDRRYDVQGLDAIDVAVLDTFPAIREDDTSHYPGEPIEIVISTDEFSPVCPWSGLPDFGKLEIRYVPRDTCVELKSLKYYLTSYRFVGIYHEHATRRVLADLVRLLDPHRMTITADYGVRGGINTICTAQYTAPAR

SEQ ID NO: 45591 - protein, 160 aa, Deinococcus peraridilitoris
  REGION 1..160: note = tr|L0A2Z1|L0A2Z1_DEIPD NADPH-dependent 7-cyano-7-deazaguanine reductase OS=Deinococcus peraridilitoris (strain DSM 19664 / LMG 22246 / CIP 109416 / KR-200) OX=937777GN=queF PE=3 SV=1
MTIQEPQNQENRTAAPQQQGFERRYDVRGLDAIDTQVLGTFAHVREDDRSVYPGEPIEIVIATDEFSPVCPWSGLPDFGKLEIRYVPRAECVELKSLKYYLTSYRFVGIYHEHATRRVLADLVKLLDPLSMTITCDYGVRGGINTVVTARYTADDAARRK

SEQ ID NO: 45592 - protein, 155 aa, Deinococcus proteolyticus
  REGION 1..155: note = tr|F0RP00|F0RP00_DEIPM NADPH-dependent 7-cyano-7-deazaguanine reductase OS=Deinococcus proteolyticus (strain ATCC 35074 / DSM 20540 / JCM 6276 / NBRC 101906 / NCIMB13154 / VKM Ac-1939 / CCM 2703 / MRP); OX = 693977
MTGQMQKDCNGFDRRYDVQGLDAIDVAVLDTFPAVREDDPVDYPGEPSEIVITTDEFSPVCPWSGLPDFGRLEIRYVPREKCVELKSLKYYLTSYRFVGIYHEHATRRVLADLVKLLDPLRLSIDCDYGLRGGIRTVVKANYVAEDQKTAEQKAQ

SEQ ID NO: 45593 - protein, 155 aa, Deinococcus radiophilus
  REGION 1..155: note = tr|A0A431W5X8|A0A431W5X8_9DEIO NADPH-dependent 7-cyano-7-deazaguanine reductase OS=Deinococcus radiophilus OX=32062 GN=queF PE=3 SV=1
MTQTEPTPAATSAKDCGGFDRRYDVQGLDAIDVAVLDTFAAIREDDPVRYPGEPSEIVISTDEFSPVCPWSGLPDFGRLEIRYVPREKCVELKSLKYYLTSYRFVGIYHEHATRRVLADLVALLDPLRLSIDCDYGLRGGIRTAVKANYVAEDQK

SEQ ID NO: 45594 - protein, 157 aa, unidentified; identical to SEQ ID NO: 45581
  source 1..157: note = Deinococcus soli
  REGION 1..157: note = tr|A0A0F7JLH9|A0A0F7JLH9_9DEIO NADPH-dependent 7-cyano-7-deazaguanine reductase OS=Deinococcus soli Cha et al. 2016 OX=1309411 GN=queF PE=3 SV=1

SEQ ID NO: 45595 - protein, 157 aa, Deinococcus sp.
  REGION 1..157: note = tr|A0A418RED6|A0A418RED6_9DEIO NADPH-dependent 7-cyano-7-deazaguanine reductase OS=Deinococcus sp. RM; OX = 2316359 GN=queF PE=3 SV=1
MTNVTAGAHCGPQNPGFDRRYDVQGLDAIDVAVLGTFPHVREDDPVRYPGEPMQIEIVTDEFSPVCPWSGLPDFGRLEIRYLPRESCVELKSLKYYLTSYRFVGIYHEHATRRVLADLVNLLNPLSMEIRCDYGMRGGLNTICTVKYVAPDHQPKGA

SEQ ID NO: 45596 - protein, 156 aa, Deinococcus sp.
  REGION 1..156: note = tr|A0A1T1BHM4|A0A1T1BHM4_9DEIO NADPH-dependent 7-cyano-7-deazaguanine reductase OS=Deinococcus sp. LM3; OX = 1938608 GN=queF PE=3 SV=1
MNTPATAGTDCGPQNPGFDRRYDVQGLDAIDTAVLGTFEHVRVDDPVRYPGEPMQIEIVTDEFSPVCPWSGLPDFGRLEIRYLPRETCVELKSLKYYLTSYRFVGIYHEHATRRVLADLVNLLNPLSMEIRCDYGMRGGLNTICTVRYVAPDHQGA

SEQ ID NO: 45597 - protein, 151 aa, Deinococcus wulumuqiensis
  REGION 1..151: note = tr|A0A345IJ67|A0A345IJ67_9DEIO NADPH-dependent 7-cyano-7-deazaguanine reductase OS=Deinococcus wulumuqiensis OX=980427 GN=queF PE=3 SV=1
MTTPPPNQAGFDRRYDVQGLDAIDVAVLDTFPYVREDDAAPYVGSPMDIEIVTDEFSPVCPWSGLPDFGRLEIRYQPREKCVELKSLKYYLTSYRFVGIYHEHATRRLLSDLVGLLDPLRLDIRCDYGMRGGLNTVCTVRYVAEDQQAGQP

SEQ ID NO: 45598 - protein, 146 aa, Deinococcus yavapaiensis
  REGION 1..146: note = tr|A0A318S8Q4|A0A318S8Q4_9DEIO NADPH-dependent 7-cyano-7-deazaguanine reductase OS=Deinococcus yavapaiensis KR-236 OX=694435 GN=queF PE=3 SV=1
MTTQEAPAQGFARRYDVQGLDAIDTQVLDTFEHVREDDLSPYPGEPIEIVIATDEFSPVCPWSGLPDFGKLEIRYVPRDKCVELKSLKYYLTSYRFVGIYHEHATRRVLADLVKLLDPLSMTVTADYGVRGGINTVVTAKYTAPGK

SEQ ID NO: 45599 - protein, 282 aa, Delftia acidovorans
  REGION 1..282: note = sp|A9BNL9|QUEF_DELAS NADPH-dependent 7-cyano-7-deazaguanine reductase OS=Delftia acidovorans (strain DSM 14801 / SPH-1) OX=398578 GN=queF PE=3 SV=1
MNTPEQSQLGKSSAYIDQYAPSLLFPLPRAPKREEIGVQGSQMPFFGADLWTAFELSWLNLRGKPQVALVHFTIPCETPNLIESKSFKLYLNSFNNTRLADAAEVQARLRTDLAEALWRGSEQKGSIGVKIIGLDRFDQEMVQELDGLLLDRLDVECTQYQPAPELLHANHEEAPVTETLVSHLLKSNCLVTGQPDWGSVQIRYSGAQIDQEGLLQYLVSFRNHNEFHEQCVERIFMDIWTRCRPLKLSVYARYTRRGGLDINPFRTSHPGALPANVRSARQ

SEQ ID NO: 45600 - protein, 282 aa, Delftia acidovorans
  REGION 1..282: note = tr|A0A2W5HWX7|A0A2W5HWX7_DELAC NADPH-dependent 7-cyano-7-deazaguanine reductase OS=Delftia acidovorans; OX = 80866 GN=queF PE=3 SV=1
MNTPEQSQLGKSSAYIDQYAPSLLFPLPRAPKREEIGIQGSQMPFFGADLWTAFELSWLNLRGKPQVALVHFTIPCETPNLIESKSFKLYLNSFNNTRLADAAEVQARLRTDLAEALWRGSEQKGSIGVKIIGLDRFDQEMVQELDGLLLDRLDVECTQYQPAPELLHANHEEAPVTETLVSHLLKSNCLVTGQPDWGSVQIRYSGAQIDQEGLLQYLVSFRNHNEFHEQCVERIFMDIWTRCRPIKLSVYARYTRRGGLDINPFRTSHPGALPANVRSARQ

SEQ ID NO: 45601 - protein, 282 aa, Delftia lacustris; identical to SEQ ID NO: 45600
  REGION 1..282: note = tr|A0A1H3GS16|A0A1H3GS16_9BURK NADPH-dependent 7-cyano-7-deazaguanine reductase OS=Delftia lacustris; OX = 558537 GN=queF PE=3 SV=1

SEQ ID NO: 45602 - protein, 282 aa, Delftia sp.
  REGION 1..282: note = tr|A0A1C7LH90|A0A1C7LH90_9BURK NADPH-dependent 7-cyano-7-deazaguanine reductase OS=Delftia sp. JD2; OX = 469553 GN=queF PE=3 SV=1
MNTPEQSQLGKSSAYIDQYAPSLLFPLPRAPKREEIGIQGSQMPFFGADLWTAFELSWLNLRGKPQVALVHFTIPCETPNLIESKSFKLYLNSFNNTRLPDATEVQARLRTDLAEALWRGSEQKGSIGVKIIGLDRFDQEMVQELDGLLLDRLDVECTQYQPAPELLRANHEEGPVTETLVSHLLKSNCLVTGQPDWGSVQIRYSGAQIDQEGLLQYLVSFRNHNEFHEQCVERIFMDIWTRCRPLKLSVYARYTRRGGLDINPFRTSHPGALPANVRSARQ

SEQ ID NO: 45603 - protein, 282 aa, Delftia sp.
  REGION 1..282: note = tr|A0A210W473|A0A210W473_9BURK NADPH-dependent 7-cyano-7-deazaguanine reductase OS=Delftia sp. K82; OX = 1472718 GN=queF PE=3 SV=1
MNTPEQSQLGKSSAYIDQYAPSLLFPLPRAPKREEIGIQGSQMPFFGADLWTAFELSWLNLRGKPQVALVHFTIPCETPNLIESKSFKLYLNSFNNTRLADAAEVQARLRTDLAEALWRGSEQKGSIGVKIIGLDRFDQEMVQELDGLLLDRLDVECTQYQPAPELLRANHEEGPVTETLVSHLLKSNCLVTGQPDWGSVQIRYSGAQIDQEGLLQYLVSFRNHNEFHEQCVERIFMDIWTRCRPLKLSVYARYTRRGGLDINPFRTSHPGSLPANVRSARQ

SEQ ID NO: 45604 - protein, 282 aa, Delftia tsuruhatensis
  REGION 1..282: note = tr|A0A072T4A6|A0A072T4A6_9BURK NADPH-dependent 7-cyano-7-deazaguanine reductase OS=Delftia tsuruhatensis; OX = 180282 GN=queF PE=3 SV=1
MNTPEQSQLGKSSAYIDQYAPSLLFPLPRAPKREEIGIQGSQMPFFGADLWTAFELSWLNLRGKPQVALVHFTIPCETPNLIESKSFKLYLNSFNNTRLSDAAEVQARLRTDLAEALWRGSEQKGSIGVKIIGLDRFDQEMVQELDGLLLDRLDVECTQYQPAPELLHANHEEAPVTETLVSHLLKSNCLVTGQPDWGSVQIRYSGAQIDQEGLLQYLVSFRNHNEFHEQCVERIFMDIWTRCRPIKLSVYARYTRRGGLDINPFRTSHPGALPANVRSARQ

SEQ ID NO: 45605 - protein, 282 aa, Delftia tsuruhatensis; identical to SEQ ID NO: 45600
  REGION 1..282: note = tr|A0A1D8J8K4|A0A1D8J8K4_9BURK NADPH-dependent 7-cyano-7-deazaguanine reductase OS=Delftia tsuruhatensis; OX = 180282 GN=queF PE=3 SV=1

SEQ ID NO: 45606 - protein, 108 aa, unidentified
  source 1..108: note = Unknown
  REGION 1..108: note = tr|A0A1V4MEA8|A0A1V4MEA8_9DELT NADPH-dependent 7-cyano-7-deazaguanine reductase OS=delta proteobacterium MLS_D OX=1775673 GN=queF PE=3 SV=1
METIENKFRERDYTVTMRFPEFTCLCPMTSQPDFAEIIIEYIPDELLVELKSLKLYLNGYRDRGIFHEEAVNSIMRDFVAAVQPKQAVVTGHFNVRGGIYTTVTVRHP

SEQ ID NO: 45607 - protein, 124 aa, unidentified
  source 1..124: note = Unknown
  REGION 1..124: note = tr|A0A1V4MRL4|A0A1V4MRL4_9DELT NADPH-dependent 7-cyano-7-deazaguanine reductase OS=delta proteobacterium ML8_D OX=1775672 GN=queF PE=3 SV=1
MKYGEKKIQGAELESWPNPYPERDYTIEISFPEFTCLCPRSGYPDFATIKIIYVPDQFIVELKSLKLYLNDYRDRYISHEEATNRIFSDLMKILSPRTIKLEGDFHPRGNVHTVIRVEGGSNAG

SEQ ID NO: 45608 - protein, 133 aa, unidentified
  source 1..133: note = Deltaproteobacteria bacterium
  REGION 1..133: note = tr|A0A509LKU2|A0A509LKU2_9DELT NADPH-dependent 7-cyano-7-deazaguanine reductase OS=Deltaproteobacteria bacterium OX=2026735 GN=queF PE=3 SV=1
MENKSYVTNYKIEDPSIVKTDLLEPIEYAYKSKRSIDITIKQPEYTSVCPMTGLPDNGCITINYRPDETIVELKSLKYYLLQYRNVGMFYEHVVNKILDDLVHILNPLRMEVTGEFTPRGGVSSIATAVYEKK

SEQ ID NO: 45609 - protein, 118 aa, unidentified
  source 1..118: note = Deltaproteobacteria bacterium
  REGION 1..118: note = tr|A0A1F9LJF0|A0A1F9LJF0_9DELT NADPH-dependent 7-cyano-7-deazaguanine reductase OS=Deltaproteobacteria bacterium RIFOXYA2_FULL_55_11 OX=1797898 GN=queF PE=3 SV=1
MATAAGKKLETFPNPRPGRDYEISMECPEFTCVCPRTGQPDFATIRIRYVPDALCIELKSLKLYLWSFRGEGAFHEDVINRILDDLVQACRPRSMTVVGDFNVRGGIHTVVTADYKAK

SEQ ID NO: 45610 - protein, 166 aa, Dendrosporobacter quercicolus
  REGION 1..166: note = tr|A0A1G9QSH1|A0A1G9QSH1_9FIRM NADPH-dependent 7-cyano-7-deazaguanine reductase OS=Dendrosporobacter quercicolus OX=146817 GN=queF PE=3 SV=1
MTQAKQEKLAGLTLLGNQGVGYSYEYSPGILEAFNNRHPENDYWVKFNCPEFTSLCPITGQPDFAAIYINYLPDVKMVESKSLKLYLVSFRNHGGFHEDVVNIIMKDLVALLQPRFLEVWGKFLPRGGISIDPYCNYGRPGTKYQELAWFRMQHHDLLAMEKVDNR

SEQ ID NO: 45611 - protein, 138 aa, Denitratisoma sp.
  REGION 1..138: note = tr|A0A518U7Y8|A0A518U7Y8_9PROT NADPH-dependent 7-cyano-7-deazaguanine reductase OS=Denitratisoma sp. DHT3; OX = 1981880 GN=queF PE=3 SV=1
MSTQPGKTLETFPNPAPHRDYQIHMEIPEFTCLCPKTGQPDFAVLTLDYIADKLCVELKSLKLYTWSFRDEGHFHEDVTNRILDDLAKTLKPRFMRLTARFYVRGGIFTNVVAEHRKKGWKPAPRVELAEFDGQSNTR

SEQ ID NO: 45612 - protein, 163 aa, Denitrobacterium detoxificans
  REGION 1..163: note = tr|A0A172RZ90|A0A172RZ90_9ACTN NADPH-dependent 7-cyano-7-deazaguanine reductase OS=Denitrobacterium detoxificans OX=79604 GN=queF PE=3 SV=1
MREKEIEGITLLGNQGTKYATDYDPSVLETFENKHPDRDYMVTFRCPEFTTLCPITGQPDFATLYINYVPNVRMVESKALKLYLFSFRNHGDFHEDVCNIIVNDLVKLMEPKYIEVRGMFYPRGGISIYPFANWAHPDFGYQEIARERMFAQLSDLDKGDGAR

SEQ ID NO: 45613 - protein, 280 aa, unidentified
  source 1..280: note = Denitromonas halophilus
  REGION 1..280: note = tr|A0A557SDU7|A0A557SDU7_9RHOO NADPH-dependent 7-cyano-7-deazaguanine reductase OS=Denitromonas halophilus OX=1629404 GN=queF PE=3 SV=1
MTDTPTPHGAEASPLGRSTAYRNTYAPELLFPVDRAPKRAEIGVGETLPFYGEDLWNAYELSWLNARGKPVVAMGEFRVPAVSPRLIESKSLKLYLNSFNASAFDDMAEVEAVIARDLSAAAGAPVSVQLQSLHVAARQVSSLPGTLIDDHEVDITDYHPAPTLLSVEAGAAPVSETLVSHLLKSNCLVTGQPDWATVYVNYTGAPIDRAGLLRYIVSFREHNEFHEQCVERMFCDLMARCAPSRLEVWARYTRRGGLDINPWRSSVAGAPPLNQGDPRQ

SEQ ID NO: 45614 - protein, 280 aa, unidentified
  source 1..280: note = Denitromonas halophilus
  REGION 1..280: note = tr|A0A557QPG9|A0A557QPG9_9RHOO NADPH-dependent 7-cyano-7-deazaguanine reductase OS=Denitromonas halophilus OX=1629404 GN=queF PE=3 SV=1
MTDTPTPHGAEASPLGRSTAYRNTYAPELLFPVDRAPKRAEIGVGETLPFHGEDLWNAYELSWLNARGKPVVAMGEFRVPAVSPCLIESKSLKLYLNSFNASRFDDMAEVEAVIARDLSAAAGAPVSVALQSLHVASRQVTSLPGTLIDDLEVDIVDYHPAPSLLGADAGAAPVSETLVSHLLKSNCLVTGQPDWATVYVNYTGAPIDRAGLLRYIVSFREHNEFHEQCVERMFCDLMARCGPSRLEVWARYTRRGGLDINPWRSSVAGAPPLNQGDPRQ

SEQ ID NO: 45615 - protein, 138 aa, unidentified
  source 1..138: note = Desertifilum sp.
  REGION 1..138: note = tr|A0A1E5QL99|A0A1E5QL99_9CYAN NADPH-dependent 7-cyano-7-deazaguanine reductase OS=Desertifilum sp. IPPAS B-1220 OX=1781255 GN=queF PE=3 SV=1
MVEKYGDRAINAAANSPLEIWPNPAPKHDYLIHIEHPEFTALCPRSGYPDFGTMVFDYYPGEWVVELKAFKLYINSFRQESISHEAVVNCIADKLEAELQPKAMRVIGDFMRRGNIKTTITVYRGEGMHFPEYRANLL

SEQ ID NO: 45616 - protein, 138 aa, Desmospora activa
  REGION 1..138: note = tr|A0A2T4ZBX6|A0A2T4ZBX6_9BACL NADPH-dependent 7-cyano-7-deazaguanine reductase OS=Desmospora activa DSM 45169 OX=1121389 GN=queF PE=3 SV=1
MAEINVDHSKYQNIRFDIQDESAIMTDILETIPYEYPGKDIEVEIPTSEFTSVCPWSGLPDFAEITISFVPGRHLIEMKSLKYYLTSYRNVGIYQEHATRRILEELVAVSKPKWMKVEALWNARGGLGTRVVAEWTGE

SEQ ID NO: 45617 - protein, 139 aa, Desmospora sp.
  REGION 1..139: note = tr|F5SDT1|F5SDT1_9BACL NADPH-dependent 7-cyano-7-deazaguanine reductase OS=Desmospora sp. 8437; OX = 997346 GN=folE2 PE=3 SV=1
MGNVKVDHSKYQNIRFDTQDESVILTEILETIPYEYPGKEVEVEIPTAEFTSVCPWSGLPDFAEIKITFVPDRHLIEMKSLKYYLTSYRNVGIYQEHATRRILEELAAVAKPKRMRVEALWNPRGGLGTRVVAEFPEKS

SEQ ID NO: 45618 - protein, 155 aa, Desulfacinum hydrothermale
  REGION 1..155: note = tr|A0A1W1XH83|A0A1W1XH83_9DELT NADPH-dependent 7-cyano-7-deazaguanine reductase OS=Desulfacinum hydrothermale DSM 13146 OX=1121390 GN=queF PE=3 SV=1
MTHQIHEELSLLGKKVETPKRPEDAVLETFPNPHPDTDYVVRLTAPEFTTICPVTGQPDFAVLLVDYVPGPRLVESKAFKLFLGSFRNHGTFHEACTVTIHKRLQEVLDPKYLRVVGLWYARGGITIDVVVETGSLPPNCTPLPLGKTSYRGGRE

SEQ ID NO: 45619 - protein, 155 aa, Desulfacinum infernum
  REGION 1..155: note = tr|A0A1M4Z1D4|A0A1M4Z1D4_9DELT NADPH-dependent 7-cyano-7-deazaguanine reductase OS=Desulfacinum infernum DSM 9756 OX=1121391 GN=queF PE=3 SV=1
MTEKIYEQLSLLGKKVETPERPEDAVLETFPNPHPDTDYVVRLTAPEFTTICPITGQPDFAVIVVDYVPGPRLVESKAFKLFLGSFRNHGTFHEACTVYIHKRLQEAMDPKYLRVVGLWYARGGITIDVVVETGTLPPNCTPLPIGRTSYRGGRE

SEQ ID NO: 45620 - protein, 139 aa, unidentified
  source 1..139: note = Desulfallas gibsoniae
  REGION 1..139: note = tr|R4KLI7|R4KLI7_9FIRM NADPH-dependent 7-cyano-7-deazaguanine reductase OS=Desulfallas gibsoniae DSM 7213 OX=767817 GN=queF PE=3 SV=1
MSQFEFEILGKSVREPCRKLEVFPKPVGVQKVILESDEVTSLCPVTGQPDWETVMIEYLPNKFCIESKSLKLYLWSYRNEGVFCEALAAQIAEDVDAACKPFGCKVTVTQKPRGGITITAKAVVGKFHPIEHEENLILG

SEQ ID NO: 45621 - protein, 325 aa, unidentified
  source 1..325: note = Desulfamplus magnetovallimortis
  REGION 1..325: note = tr|A0A1W1H825|A0A1W1H825_9DELT NADPH-dependent 7-cyano-7-deazaguanine reductase OS=Desulfamplus magnetovallimortis OX=1246637 GN=queF PE=3 SV=1
MKQEITKKNIPLGDKVTHSRTYNPDHLFPVRRSLAREEIGIHEDTKLPFGGWDIWNAYEISWLDMKGKPVVAIGEITFPCTTKNIVESKSLKLYLNSFNQSRFESPEQVLTIMEKDLSACVTGRSEGEEDYPGEGRSEGEEDYLGNGTMYINGVRRKEKGTMDLNNAVSVTLRLPSLFHDMKIEAPCGESIDDLDVEITHYKVEPSFLRVMEGGRVVEQTIHSNLLRTNCPVTEQPDWGSVIIDYKGKEIDRKGLLAYIVSFREHTGFHENCVERMFMDIMEMCCPEKLSVYARFTRRGGIDINPFRSNCGNDSLRYENGRLARQ

SEQ ID NO: 45622 - protein, 129 aa, Desulfatibacillum aliphaticivorans
  REGION 1..129: note = tr|B8FGI2|B8FGI2_DESAL NADPH-dependent 7-cyano-7-deazaguanine reductase OS=Desulfatibacillum aliphaticivorans OX=218208 GN=queF PE=3 SV=1
MSEKVKLRADGPETVDASVLETIDYQYQTSRDIDIRIDQPEFTSVCPMTGLPDFGTIIINYCPDKKIVELKSLKYYFLQYRNVGIFYEHVVNRILEDLVKALEPKRLEVVGDFTPRGGISTQVSAKYVK

SEQ ID NO: 45623 - protein, 129 aa, Desulfatibacillum alkenivorans
  REGION 1..129: note = tr|A0A1M6WR12|A0A1M6WR12_9DELT NADPH-dependent 7-cyano-7-deazaguanine reductase OS=Desulfatibacillum alkenivorans DSM 16219 OX=1121393 GN=queF PE=3 SV=1
MSEKVKLRADGPETIDASVLETIDYQYQTSRDIDIRIDQPEFTSVCPMTGLPDFGTITVNYCPDKKIVELKSLKYYFLQYRNVGIFYEHVVNRILEDLVKALEPKRLEVAGDFTPRGGISTQVSAKYVK

SEQ ID NO: 45624 - protein, 134 aa, unidentified
  source 1..134: note = Desulfatitalea sp.
  REGION 1..134: note = tr|A0A0F2R2X6|A0A0F2R2X6_9DELT NADPH-dependent 7-cyano-7-deazaguanine reductase OS=Desulfatitalea sp. BRH_c12 OX=1629708 GN=queF PE=3 SV=1
MATQKNHDVPYTIGTIESVRPDMLEPIEYAYKGRRDIVITIHQPEFTSVCPMTGLPDFGTITVRYRPNASIIELKSLKFYLLQYRNVGIFYEHVVNRILDDLVTVLAPQWMEVQGGFTARGGLTTEVVAQFNME

SEQ ID NO: 45625 - protein, 162 aa, Desulfitobacterium metallireducens
  REGION 1..162: note = tr|W0E885|W0E885_9FIRM NADPH-dependent 7-cyano-7-deazaguanine reductase OS=Desulfitobacterium metallireducens DSM 15288 OX=871968 GN=queF PE=3 SV=1
MSRQKNELETVTLLGNHVDLSFNYNPDILQYFVNKHQENDYWVKFNCPEFTSLCPMTGQPDFATIYISYIPDIKMVESKSLKLYLLSFRNNGDFHEDVVNIIMKDLIKLLDPRYIEVCGKFLPRGGISIDPYCNYGKSEKWEKFAAQRLLYHDIQLEHVDNR

SEQ ID NO: 45626 - protein, 133 aa, Desulfobacter hydrogenophilus
  REGION 1..133: note = tr|A0A328FLV2|A0A328FLV2_9DELT NADPH-dependent 7-cyano-7-deazaguanine reductase OS=Desulfobacter hydrogenophilus OX=2291 GN=queF PE=3 SV=1
MENKHYDRPFTVDTADVITSDLLEPIEYAYKSKRSIDIKITQPEYTSVCPMTGLPDNGTIIIEYRPDAHLVELKSLKYYLMQYRNVGMFYEHVVNKILDDMVSVINPLYMKVTGEFTPRGGISSVGSAEYIKP

SEQ ID NO: 45627 - protein, 133 aa, Desulfobacter postgatei
  REGION 1..133: note = tr|I5AZN0|I5AZN0_9DELT NADPH-dependent 7-cyano-7-deazaguanine reductase OS=Desulfobacter postgatei 2ac9 OX=879212 GN=queF PE=3 SV=1
MKNKHYEPPFTVDTADVITPDLLEPIEYAYKSKRSIDIKITQPEYTSVCPMTGLPDNGTIIIEYRPDAHLVELKSLKYYLMQYRNVGMFYEHVVNKILDDLVLVIKPLYMKVTGEFTPRGGISSVGSAEYIKP

SEQ ID NO: 45628 - protein, 133 aa, Desulfobacter sp.
  REGION 1..133: note = tr|A0A357YXW5|A0A357YXW5_9DELT NADPH-dependent 7-cyano-7-deazaguanine reductase OS=Desulfobacter sp.; OX = 2294 GN=queF PE=3 SV=1
MKNKHYEPPFTVDTPNVITPDLLEPIEYAYKSKRSIDIKITQPEYTSVCPMTGLPDNGTIIIEYRPDAHLVELKSLKYYLMQYRNVGMFYEHVVNKILDDLVLVIKPLYMKVTGEFTPRGGISSVGSAEYIKP

SEQ ID NO: 45629 - protein, 133 aa, Desulfobacter sp.
  REGION 1..133: note = tr|A0A348UXY4|A0A348UXY4_9DELT NADPH-dependent 7-cyano-7-deazaguanine reductase OS=Desulfobacter sp.; OX = 2294 GN=queF PE=3 SV=1
MKNKHYEPPFTVDTPDVITPDLLEPIEYAYKSKRSIDIKITQPEYTSVCPMTGLPDNGTIIIEYRPDAHLVELKSLKYYLMQYRNVGMFYEHVVNKILDDLVLVIKPLYMKVTGEFTPRGGISSVGSAEYIKP

SEQ ID NO: 45630 - protein, 133 aa, unidentified
  source 1..133: note = Desulfobacteraceae bacterium
  REGION 1..133: note = tr|A0A1W9WTC4|A0A1W9WTC4_9DELT NADPH-dependent 7-cyano-7-deazaguanine reductase OS=Desulfobacteraceae bacterium 4572_89 OX=1972445 GN=queF PE=3 SV=1
MENKQYKTPFTVETPDVIKIDLLDPIEYAYRSKRSIDIRIEHPEYTSVCPMTGLPDNGCIIIDYRPDNFIVELKSLKYYLMQYRNVGMFYEHVINKILDDLVEVLQPLTMKVTGKFTPRGGISSLATAEYVKN

SEQ ID NO: 45631 - protein, 132 aa, unidentified
  source 1..132: note = Desulfobacteraceae bacterium
  REGION 1..132: note = tr|A0A1W9LKI8|A0A1W9LKI8_9DELT NADPH-dependent 7-cyano-7-deazaguanine reductase OS=Desulfobacteraceae bacterium A6 OX=1934249 GN=queF PE=3 SV=1
MKSKKMKPSYKSETPDTIKTSILSPMDYKYRQKRDIDIEIEQPEFTSVCPMTGLPDFGCIIIRYVPDKKIIELKSLKYYLLQYRNVGIFYEHVVNRILDDLAAVLKPKRMEITGEFTARGGITTTVTATLVS

SEQ ID NO: 45632 - protein, 137 aa, unidentified
  source 1..137: note = Desulfobacterales bacterium
  REGION 1..137: note = tr|A0A1F9P9Z6|A0A1F9P9Z6_9DELT NADPH-dependent 7-cyano-7-deazaguanine reductase OS=Desulfobacterales bacterium RIFOXYA12_FULL_46_15 OX=1797914 GN=queF PE=3 SV=1
MVENKIYKTSYQIEDPGIVKAEILEPIPYVYKSKRSIDITIRQPEYTSVCPMTGLPDNGCITIKYRPDQTIVELKSLKYYLLQYRNVGMFYEHVVNKILDDLVQVLKPLRMEVTGEFTPRGGISSLATAVYEKEEKS

SEQ ID NO: 45633 - protein, 135 aa, unidentified
  source 1..135: note = Desulfobacterales bacterium
  REGION 1..135: note = tr|A0A2G9ZSP8|A0A2G9ZSP8_9DELT NADPH-dependent 7-cyano-7-deazaguanine reductase OS=Desulfobacterales bacterium CG23_combo_of_CG06-09_8_20_14_all_52_9; OX = 1973984 GN=q ueF PE=3 SV=1
MVRKHPKLNYRAKGPETVRSELLDVIDYQYAGKDIEITIEQPEYTSVCPMTGLPDFGKITINYIPDQKLVELKSLKFYLLQYRDVGIFYEHVVNLILNHLVERLHPKELAVSGEFTARGGITTRVKAAYEKQHNH

SEQ ID NO: 45634 - protein, 152 aa, Desulfobacterium sp.
  REGION 1..152: note = tr|A0A1W9U8N0|A0A1W9U8N0_9DELT Uncharacterized protein OS=Desulfobacterium sp. 4572_20 OX=1971621; GN = B6I32_00175 PE=4 SV=1
MNFSKYSGTSPLIIISYDGEKFRVTDYSTSSNAKVESPEGVTLITFPARNHSPLIEWEYPEFQSLCPVSERHDQGVVTIKYRPKEKILESKSVRDYLMMWRNKRNWQEYITEEIANLLFSACEPDWLIVTINWSSRGGIIAKTTSKRGDAPS

SEQ ID NO: 45635 - protein, 281 aa, Desulfobacterium vacuolatum
  REGION 1..281: note = tr|A0A1W2A6X4|A0A1W2A6X4_9DELT NADPH-dependent 7-cyano-7-deazaguanine reductase OS=Desulfobacterium vacuolatum DSM 3385 OX=1121400 GN=queF PE=3 SV=1
MINDPIQENSPSGIPLGRQIAHSETYDPSQLFCVARKDARKTLGINTELPFFGVDIWNAYELSWLDQKGKPCVAMGEIMFSSTGENIIESKSLKLYLNSFNFTRFESTDKVKETIIRDLSGATVGDVAVNIFVPRDFAMLDIKAPRGICIDLIEIKDDIDQYTLDPSYLKTDSAGVEETLFSNLLRTNCPVTGQPDWATVKIDYKGNAMDHEGLLRYIISLRQHQGFHENCVELIFMDILHQCAPDFLSVQARFTRRGGLDINPCRSSHEIPFSNIRLARQ

SEQ ID NO: 45636 - protein, 172 aa, Desulfobacula phenolica
  REGION 1..172: note = tr|A0A1H2DT31|A0A1H2DT31_9DELT NADPH-dependent 7-cyano-7-deazaguanine reductase OS=Desulfobacula phenolica OX=90732 GN=queF PE=3 SV=1
MNTRQILFATTKIKNLIITVCWAEFYIKIFMDSKDKINMTENKAYVTRYKIEDPSIVKADLLEPIPYAYKSKRSIDIIIKQPEYTSVCPMTGLPDNGCITIKYRPDQTIVELKSLKYYLLQFRNVGMFYEHVVNKILDDLVQVLTPLRMEVTGEFTPRGGISSIATAVYEKE

SEQ ID NO: 45637 - protein, 139 aa, Desulfobacula sp.
  REGION 1..139: note = tr|A0A1F9RX11|A0A1F9RX11_9DELT NADPH-dependent 7-cyano-7-deazaguanine reductase OS=Desulfobacula sp. RIFOXYB2_FULL_45_6 OX=1797912 GN=queF PE=3 SV=1
MVENKTYKPSYRIEDPGIVKADILEPIPYAYKSKRSIDITIEQPEYTSVCPMTGLPDNGCITIRYRPDQTIVELKSLKYYLLQYRNVGMFYEHVVNKILDDLVRVLSPLRMEVTGEFTPRGGISSLATAVYEKGQSANL

SEQ ID NO: 45638 - protein, 139 aa, Desulfobacula sp.; identical to SEQ ID NO: 45637
  REGION 1..139: note = tr|A0A1F9NUE7|A0A1F9NUE7_9DELT NADPH-dependent 7-cyano-7-deazaguanine reductase OS=Desulfobacula sp. RIFOXYA12_FULL_46_16 OX=1797911 GN=queF PE=3 SV=1

SEQ ID NO: 45639 - protein, 134 aa, Desulfobacula toluolica
  REGION 1..134: note = tr|K0NBN6|K0NBN6_DESTT NADPH-dependent 7-cyano-7-deazaguanine reductase OS=Desulfobacula toluolica (strain DSM 7467 / Tol2) OX=651182 GN=queF PE=3; SV = 1
MTENKAYVTRYKIEDPSIVKADLLEPIPYAYKSKRSIDIIIKQPEYTSVCPMTGLPDNGCITIKYRPDQTIVELKSLKYYLLQFRNVGMFYEHVVNKILDDLVQVLTPLKMEVTGEFTPRGGISSIATAVYEKE

SEQ ID NO: 45640 - protein, 274 aa, Desulfobotulus alkaliphilus
  REGION 1..274: note = tr|A0A562RXK9|A0A562RXK9_9DELT NADPH-dependent 7-cyano-7-deazaguanine reductase OS=Desulfobotulus alkaliphilus OX=622671 GN=LZ24_01477 PE=3 SV=1
MEDKYLSALPLGRTVAFSPLYDPSQLCPVPRSLARQALGISAEKGLPFYGEDIWNCWELSWLDENGKPLLAVAEIRIPADSPFLVESKSLKLYLNSFNMTRISGTEELKSTLIRDITAIVQAKIDLTLHMPEDFFHLRPGEPEGLCIDTLPFNAEKPAFPETGDSKGIISEKLFSRLLRSHCPVTGQPDWATVHIAYRGQPICHESLLRYIVSLREHTGFHESCAETIFCCILERCRPENLMVSARFTRRGGIDINPFRSTHSCTMPNERDFRQ

SEQ ID NO: 45641 - protein, 155 aa, unidentified
  source 1..155: note = Desulfobulbaceae bacterium
  REGION 1..155: note = tr|A0A353NK38|A0A353NK38_9DELT NADPH-dependent 7-cyano-7-deazaguanine reductase OS=Desulfobulbaceae bacterium OX=2053307 GN=queF PE=3 SV=1
MTAESIYNNLTQLGGRTTLPESPEQAVLERVPNPQKGIAYAVRFAAPEFTSLCPITGQPDFAHLVIDYLPGDWLVESKSLKLFLGSFRNHGSFHEDCTISIARRLIACIEPQWLRIGGYWYPRGGMPIDVFYQTGEPPQGLWIPDQGVANYRGRG

SEQ ID NO: 45642 - protein, 155 aa, unidentified
  source 1..155: note = Desulfobulbaceae bacterium
  REGION 1..155: note = tr|A0A0F2N936|A0A0F2N936_9DELT NADPH-dependent 7-cyano-7-deazaguanine reductase OS=Desulfobulbaceae bacterium BRH_c16a OX=1629713 GN=queF PE=3 SV=1
MTGESIYSNLTQLGGKVEQPDSPDQAVLERVPNPQQGISYIVRFTAPEFTSLCPITGQPDFAHLVIDYLPGNWLVESKSLKLFLGSFRNHGSFHEDCTISIARRIIACTEPQWLRIGGYWYPRGGIPIDVFYQTGEPPKGVWIPDQGVANYRGRG

SEQ ID NO: 45643 - protein, 278 aa, Desulfobulbus propionicus
  REGION 1..278: note = tr|A0A2G6MDN6|A0A2G6MDN6_9DELT NADPH-dependent 7-cyano-7-deazaguanine reductase OS=Desulfobulbus propionicus OX=894 GN=queF PE=3 SV=1
MRQKKKEKSILHYSPLGKKQEYADRYDAALLYAVSRDMGREPLGLTGGLPFVGQDIWNIYELSWLNPSGRPVVALAELRVPVTSPFLIESKSMKLYFNSLNMTSFADAAQVQEVLTQDLSRCAGAAVDVCIREAADGAVLLTAPQGICIDQAPVEVFHYQVQPEALRCSPASCSETLFTHLFRSRCPVTGQPDWATVMVRYTGPAMDQGGLLEYLVSYRTHQSFHEACVERMFVDIQRQCRPEFLEVTARYTRRGGIDINPVRASHPGVWRNERTFFQ

SEQ ID NO: 45644 - protein, 131 aa, Desulfococcus multivorans
  REGION 1..131: note = tr|S7TGJ0|S7TGJ0_DESML NADPH-dependent 7-cyano-7-deazaguanine reductase OS=Desulfococcus multivorans DSM 2059 OX=1121405 GN=queF PE=3 SV=1
MTDVVLQNIEKPDTIRRDLLDPVDYQYTGHRDVHIEIRQPEFTSVCPMTGLPDFGTITIRYRPDKKIVELKSLKFYLLQYRNVGIFYEHVVNRILDDLVAVVSPKRMEIIGDFTPRGGISTSVSALYEGLA

SEQ ID NO: 45645 - protein, 134 aa, unidentified
  source 1..134: note = Desulfococcus oleovorans
  REGION 1..134: note = tr|A8ZUH0|A8ZUH0_DESOH NADPH-dependent 7-cyano-7-deazaguanine reductase OS=Desulfococcus oleovorans (strain DSM 6200 / Hxd3) OX=96561 GN=queF PE=3; SV = 1
MSDNPQPPLPYTALSADTVGTKMLTVIEYAYRETRPIDVVIRQPEFTSLCPMTGLPDYGCITIRYRPRHHIVELKSLKYYLLQYRNVGIFYEHVINRILNDLSGAVAPVWMEVSGEFTARGGITTTVTAATGDQ

SEQ ID NO: 45646 - protein, 128 aa, Desulfococcus sp.
  REGION 1..128: note = tr|A0A1W9Q1Y8|A0A1W9Q1Y8_9DELT NADPH-dependent 7-cyano-7-deazaguanine reductase OS=Desulfococcus sp. 4484_242 OX=1968523 GN=B5M55_05880 PE=3 SV=1
MAKAEGRIFGYESPEKIRTDFLETFNFDSPGQYIKTETSEFIAACPFSGLPDVGRLIIEYYPEGGKCIELKSLKYYVVSFRTVGLFQEGVTKRIYSDLKEALGTNRLKVTTIYNTRGGFATTCIEGAL

SEQ ID NO: 45647 - protein, 128 aa, Desulfofaba hansenii
  REGION 1..128: note = tr|A0A2M9DPR5|A0A2M9DPR5_9DELT NADPH-dependent 7-cyano-7-deazaguanine reductase OS=Desulfofaba hansenii; OX = 157842 GN=queF PE=3 SV=1
MAVAEGKSFSFDGPEKIRADFLETFDFDSREQYIKTETKEFVAVCPFSGLPDIAHLIIEYHPDGGRCIELKSLKYYITSFRNVGIFQEGATRRIYDDMKGALKTKRIKITTIYNIRGGFLTTCVEGNL

SEQ ID NO: 45648 - protein, 155 aa, Desulfoglaeba alkanexedens
  REGION 1..155: note = tr|A0A4P8L2J9|A0A4P8L2J9_9DELT NADPH-dependent 7-cyano-7-deazaguanine reductase OS=Desulfoglaeba alkanexedens ALDC OX=980445 GN=queF PE=3 SV=1
MTERGPQNLTQLGRPSPLPENPQAAVLETIENPHPDRDYVVRLTAPEFTTLCPITGQPDFAVMIVDYVPGTKLVESKSFKLFLGSFRNYGSFHEACTVTVHKRLEAALEPKYLRVVGLWYARGGIPIDVVVETGACPPNCTPLPLGKTTYRGGRE

SEQ ID NO: 45649 - protein, 272 aa, Desulfoluna butyratoxydans
  REGION 1..272: note = tr|A0A4U8YSP5|A0A4U8YSP5_9DELT NADPH-dependent 7-cyano-7-deazaguanine reductase OS=Desulfoluna butyratoxydans OX=231438 GN=MSL71_42040 PE=3 SV=1
MRTENPLGKKIGYTFTYDPSQLFPVERSLGRGALGLDGKALPFCGEDIWTAWELSWLDGKGKPVSSVAEIRVPATSRCIVESKSLKLYLNSFNMSRFESPEAVRKAMAGDLSRVAEGEVTVSLFGCDDTEALGTHRAGGRCIDHHEADSYVYEVDASLLAHGDGDVTDETLCSHILRTNCPVTGQPDWATVEITYSGKKIDETALFAYLVSFRTHTGYHENCVETLYTDIMARLAPTALTVVGRFTRRGGLDINPCRSSSPTAFPNRRLVRQ

SEQ ID NO: 45650 - protein, 272 aa, Desulfoluna spongiiphila
  REGION 1..272: note = tr|A0A1G5FYJ3|A0A1G5FYJ3_9DELT NADPH-dependent 7-cyano-7-deazaguanine reductase OS=Desulfoluna spongiiphila OX=419481 GN=SAMN05216233_10946 PE=3 SV=1
MRTENPLGKKIGYTFAYDPSQLFPVERSLGRGALGLDGKALPFCGEDIWTAWELSWLDGKGKPASAVAEIRFPATSRCIVESKSLKLYLNSFNMSRFESPEKVKEAMVADLSRVAEAEVAVLLFGCDDTEAFKAHRATGRCIDHHEADSYVYEVDASLLAHGDGDVTDETLCSHILRTNCPVTGQPDWATVEITYSGKKIDEAALFAYLVSFRTHTGYHENCVETLYTDIMDRLAPAALTVVGRFTRRGGLDINPCRSSAPTAFSNRRLVRQ

SEQ ID NO: 45651 - protein, 272 aa, Desulfoluna spongiiphila
  REGION 1..272: note = tr|A0A5E7XF83|A0A5E7XF83_9DELT NADPH-dependent 7-cyano-7-deazaguanine reductase OS=Desulfoluna spongiiphila OX=419481 PE=3 SV=1
MRTENPLGKKIGYTFAYDPSQLFPVERSLGRGALGLDGKALPFCGEDIWTAWELSWLDGKGKPASAVAEIRFPATSRCIVESKSLKLYLNSFNMSRFESPEKVKEAMVADLSRVAEAEVAVLLFGCDDTEALKAHRATGRCIDHHEADSYVYEVDASLLAHGDGDVTDETLCSHILRTNCPVTGQPDWATVEITYSGKKIDEAALFAYLVSFRTHTGYHENCVETLYTDIMDRLAPAALTVVGRFTRRGGLDINPCRSSAPTAFSNRRLVRQ

SEQ ID NO: 45652 - protein, 273 aa, Desulfomicrobium apsheronum
  REGION 1..273: note = tr|A0A1I3UQU3|A0A1I3UQU3_9DELT NADPH-dependent 7-cyano-7-deazaguanine reductase OS=Desulfomicrobium apsheronum OX=52560 GN=SAMN04488082_10850 PE=3 SV=1
MPHSSRMVLGRQVDYNRRYDPDQLCPIPRSLGREAAGIEGAETFGHGVDIWNIFELSWLNASGKPLVAMAEVRVPWNSPCLIESKSLKLYCNSFNMTALESADELRLTMTRDLSRAAGADVTVRIIAAEEFSQCTLAEPEGTCIDGLDITDFTYEPDAALLGTASDSARETLFTRLFRSCCPVTGQPDWATLRITYAGPRILHDGLLRYLVSYREHQGFHEACVEKIHADIHRHCGAQELEVSARFTRRGGLDISPVRSTRPGPWPNPRDPRQ

SEQ ID NO: 45653 - protein, 273 aa, Desulfomicrobium norvegicum
  REGION 1..273: note = tr|A0A1I4KZ58|A0A1I4KZ58_DESNO NADPH-dependent 7-cyano-7-deazaguanine reductase OS=Desulfomicrobium norvegicum (strain DSM 1741 / NCIMB 8310) OX=52561 GN=queF; PE = 3 S V=1
MPHSSRMVLGRQVDYSRHYDPDQLCPIPRSLGRGAAGIEGAETFGHGEDIWNIFELSWLNASGKPLVAMAEVRVPWNSPCLIESKSLKLYCNSFNMTALESADELRRTMTRDLSRAAGADVTVRIIAAEEFSQCTLAEPEGTCIDGLDITGFTYEPDAALLGTASDPARETLFTRLFRSCCPVTGQPDWATLRITYAGPRILHDGLLRYLVSYREHQGFHEACVEKIHTDIHRRCGAQELEVSARFTRRGGLDINPVRSTHPGPWPNPRDPRQ

SEQ ID NO: 45654 - protein, 146 aa, Desulfomonile tiedjei
  REGION 1..146: note = tr|I4C6G6|I4C6G6_DESTA NADPH-dependent 7-cyano-7-deazaguanine reductase OS=Desulfomonile tiedjei (strain ATCC 49306 / DSM 6799 / DCB-1) OX=706587 GN=queF; PE = 3 SV=1
MSDKTIEGLTLLQKSCTTVYRDSPEDAILETFPNKYPHRNYVIEFDCPEFTSLCPITGQPDFAKIKITYIPDLKCVESKSLKIYLFSFRNCGMFHEEITNRILDDLIAACDPRWISVRGMMNPRGGIGIDVTAEYCRPGFEGPTSK

SEQ ID NO: 45655 - protein, 140 aa, Desulfonatronospira thiodismutans
  REGION 1..140: note = tr|D6SKY3|D6SKY3_9DELT NADPH-dependent 7-cyano-7-deazaguanine reductase OS=Desulfonatronospira thiodismutans ASO3-1 OX=555779 GN=queF PE=3 SV=1
MRDDTSGLTLLGKTRPEYPSRVDPGVLETFANKFAERDYEVVMVTDEFTSLCPVTGQPDYGTIELRYVPGKECIESKSLKYYLFSYRQEPTFMETVVNRILDDLVQACSPRQMKVVGRFKARGGIAIDVSAQYRREDQPS

SEQ ID NO: 45656 - protein, 135 aa, Desulfonatronovibrio sp.
  REGION 1..135: note = tr|A0A424XZV2|A0A424XZV2_9DELT NADPH-dependent 7-cyano-7-deazaguanine reductase OS=Desulfonatronovibrio sp. MSAO_Bac4 OX=2293858 GN=queF PE=3 SV=1
MRDDTSSLSLLGKNGSDYPSRVEPGIIETFPNKFPGRDYEVVMITDEFTSLCPVTGQPDYGTIELRYVPDQVCVESKSLKFYLFSYRQEPTFMETVVNRILDDLVVRCAPRKMTVVGRFRARGGIAIDVTAQYVK

SEQ ID NO: 45657 - protein, 135 aa, Desulfonauticus sp.
  REGION 1..135: note = tr|A0A101DGF8|A0A101DGF8_9DELT NADPH-dependent 7-cyano-7-deazaguanine reductase OS=Desulfonauticus sp. 38_4375 OX=1635258 GN=queF PE=3 SV=1
MFDDVSGLKLLGKSKTEYPSKVSPDILETFPNRFPDRDYWVTMISDEFTSLCPMTGQPDYGTILIRYIPDKKCIESKSLKFYLFSYRQEPTFMETVVNRILDDLVKVCSPKEMQVIGKFKPRGGVIIEVEASYKK

SEQ ID NO: 45658 - protein, 135 aa, Desulfonauticus submarinus
  REGION 1..135: note = tr|A0A1H0CPD3|A0A1H0CPD3_9DELT NADPH-dependent 7-cyano-7-deazaguanine reductase OS=Desulfonauticus submarinus OX=206665 GN=queF PE=3 SV=1
MFDDVSDLKLLGKSKTEYPSKVSPDLLESFPNRFPNRDYWVTLISDEFTSLCPMTGQPDYGTIVIKYRPDKRCIESKSLKFYLFSYRQEPTFMETVVNRILDDLVNACSPKEMIVVGKFKPRGGVVIEVEAHYKK

SEQ ID NO: 45659 - protein, 130 aa, Desulfonema ishimotonii
  REGION 1..130: note = tr|A0A401G0N8|A0A401G0N8_9DELT NADPH-dependent 7-cyano-7-deazaguanine reductase OS=Desulfonema ishimotonii OX=45657 GN=queF PE=3 SV=1
MTQLPYTVEKPEIIKTDLLDPIDYHYKGHRDVDIVISQPEFTSVCPMTGLPDVGTITIRYRPDEKIVELKSLKFYFLQYRNVGIFYEHVVNRILDDLAGVLAPKQMEVTGDFTPRGGITTRVTARYEGKK

SEQ ID NO: 45660 - protein, 271 aa, Desulfopila aestuarii
  REGION 1..271: note = tr|A0A1M7Y8R5|A0A1M7Y8R5_9DELT NADPH-dependent 7-cyano-7-deazaguanine reductase OS=Desulfopila aestuarii DSM 18488 OX=1121416 GN=queF PE=3 SV=1
MANELPLGKHVAYSFTYDPSLLCPIPRQLGREAAGIAKQVASWLGEDIWNIYELSWLSESGRPEVAMAELRVPSSSPNLIESKSFKLYCNSFNMSRFVSGDTVRKTMEKDLSATAGARVEVVLIEPRDFAKVTINEPEGICLDEQTIDQVSFIPDPSILATGDDTTQQTFFSRLFRSCCPVTGQPDWATVTVSYEGKRIVPESLLRYLISYREHAGFHEACVENIFSDIMKQCRPAELTVTARFTRRGGIDINPIRSTGTGPWPNLRDPRQ

SEQ ID NO: 45661 - protein, 279 aa, Desulfopila sp.
  REGION 1..279: note = tr|A0A4V5NWC3|A0A4V5NWC3_9DELT NADPH-dependent 7-cyano-7-deazaguanine reductase OS=Desulfopila sp. IMCC35004 OX=2569540 GN=queF PE=3 SV=1
MKIETLLGKDVQYSSHYDPKLLQPIPRNLGRGTAQLPGANGQYPYHGEDIWNVYEVSWLSANGKPEVAIAEIRVPATSEFLIESKSLKLYFNSFNMTRIENAASLTAILEGDLGQAAGGKVNVTLTLANQFDGVQVAEPTGICLDELECNDFSYKVDPLLLTADPESASASETLFSRLFRSCCPVTGQPDWATVQVSYEGRKIERAGLLRYLVSYREHTGFHEACVEQIFHHLMEQCRPDYLEVSARFTRRGGIDINPVRSISASNSARQWPNIRDPRQ

SEQ ID NO: 45662 - protein, 272 aa, Desulfopila sp.
  REGION 1..272: note = tr|A0A4U1AFX9|A0A4U1AFX9_9DELT NADPH-dependent 7-cyano-7-deazaguanine reductase OS=Desulfopila sp. IMCC35006 OX=2569542 GN=queF PE=3 SV=1
MDKNIPLGKEVTYISTYNPELLFPVARRLNREKIGIKDRLPFTGVDIWNAYEISWLETGGKPRVAMAEIRFSLDSLNIIESKSLKLYCNSFNLTHFTSPDKVVEVMQQDLEKVSRGAVTVSLLLPDDFRRQRFVEPEGFCIDDLDLNTDSYTRNPDFLFHGSHRVEEQLYSNLLRTNCPVTGQPDWATLIINYTGRQIQRSGLLRYVISLREHTGFHENCVEEIFVDLMERCMPEKLSVYARFTRRGGIDINPFRSTPNDCAAGNNIRCARQ

SEQ ID NO: 45663 - protein, 277 aa, Desulforhopalus singaporensis
  REGION 1..277: note = tr|A0A1H0J030|A0A1H0J030_9DELT NADPH-dependent 7-cyano-7-deazaguanine reductase OS=Desulforhopalus singaporensis OX=91360 GN=SAMN05660330_00085 PE=3 SV=1
MKPDSNRTNPLGQQVEYTFTYNPELLFPVPRTVGRETLGLGGNRPLPFFGEDIWNCWELSWLNDRGKPISAVMELRIPCTSQCIIESKSLKLYLNSFNMSRFKDQQEVAQIIGADLSSTAGTEVQVRIFDCNDRKTLMTTVPRGRCIDDLEAGDYVYRVDPALLRCSDKKAENETLCSNILRTNCPVTGQPDWATVEITYSGNKIDESSLLAYLVSFRTHTGYHENCVETIYVHLMEHLLLDSLTISGRFTRRGGVDINPCRSSAQTPFANHRLVRQ

SEQ ID NO: 45664 - protein, 155 aa, Desulfosoma caldarium
  REGION 1..155: note = tr|A0A3N1UL97|A0A3N1UL97_9DELT NADPH-dependent 7-cyano-7-deazaguanine reductase OS=Desulfosoma caldarium; OX = 610254 GN=queF PE=3 SV=1
MPHQDSDQLTLLGRPSPLPSHPDEAVLETFANPHPDVDYVVRLTAPEFTTLCPITGQPDFAVIIVDYVPRARLVESKSYKLFLGSFRNHGTFHEACTVAILKRLQQAMDPKYLRVVGLWYARGGIPIDVVVETGQLPPGCHPLPLEKTSYRGGRE

SEQ ID NO: 45665 - protein, 276 aa, Desulfotalea psychrophila
  REGION 1..276: note = sp|Q6ARX8|QUEF_DESPS NADPH-dependent 7-cyano-7-deazaguanine reductase OS=Desulfotalea psychrophila (strain LSv54 / DSM 12343) OX=177439 GN=queF; PE = 3 SV=1
MTENINAGIPLGKQVGHSETYDPSHLFPVARREARKSLGLADDLPFSGPDIWNAYELSWLDSKGKPCVALGEITFPCTSENIIESKSLKLYLNSFNLTRFTSTARVKEIIREDLSRVAGAEVEVKILTPEEFTEVTISAPEGSCIDDLELEEEINAYRPTANYLSTGPEETEEELYTNLLRTNCPVTGQPDWATVIINYRGKAIDQRGLLRYIISFRQHEGFHENCVERIFMDILNRCAPARLTVYARFTRRGGLDINPYRTTHAEHFVNLRLARQ

SEQ ID NO: 45666 - protein, 276 aa, Desulfotignum phosphitoxidans
  REGION 1..276: note = tr|S0FQT8|S0FQT8_9DELT NADPH-dependent 7-cyano-7-deazaguanine reductase OS=Desulfotignum phosphitoxidans DSM 13687 OX=1286635 GN=queF PE=3 SV=1
MNRPADQGIPLGRQARYKDTYDPFLLFAIPRAEARKALGIQGALPFSGVDIWNAYELSWLDAFGKPCVAAARITFPCDSGNMIESKSLKLYLNSFNFTRFKSVEKVRAVITTDLSQNALADVTVDLVMPGSFAMMTICDPPGTCIDDLDLENEVNTCEYRPDYLKTLPGTAEETLFSNLLRTRCPVTGQPDWATVMIRYKGPAMDHAGLLQYLISLRRHSGFHENCVEIMFMDILHRCRPDHLSVYAGFTRRGGLDINPGRATGEQNFPNIRLARQ

SEQ ID NO: 45667 - protein, 143 aa, Desulfovibrio carbinolicus
  REGION 1..143: note = tr|A0A4P6HJR3|A0A4P6HJR3_9DELT NADPH-dependent 7-cyano-7-deazaguanine reductase OS=Desulfovibrio carbinolicus OX=296842 GN=queF PE=3 SV=1
MPHRVPRDDISTLKTLGQGATVYPRNVTPGLLETFPNAFPDRRYDITFASDEFTSLCPKTGQPDFGTITIRYVPDKLCIESKSLKLYLFSYRDEGAFMETLTNRILDDLVEVCQPHHMEVTGDFAARGGITISVTATFVKEKK

SEQ ID NO: 45668 - protein, 145 aa, Desulfovibrio carbinoliphilus
  REGION 1..145: note = tr|G7QC32|G7QC32_9DELT NADPH-dependent 7-cyano-7-deazaguanine reductase OS=Desulfovibrio carbinoliphilus subsp. oakridgensis OX=694327 GN=queF PE=3; SV = 1
MSAPKAPSAPKDDVSTLTTLGQGATAYPRTVTPGLLETFPNAFPGRRYTVTFASEEFTSLCPKTGQPDFGMITIRYVPDERCIESKSLKLYLFSYRDEGTFMETLTNRILDDLVAACQPLEMEVTGDFAARGGITISVTAGYVKE

SEQ ID NO: 45669 - protein, 165 aa, Desulfovibrio desulfuricans
  REGION 1..165: note = tr|A0A4Y3TJP9|A0A4Y3TJP9_DESDE NADPH-dependent 7-cyano-7-deazaguanine reductase OS=Desulfovibrio desulfuricans OX=876 GN=queF PE=3 SV=1
MTTRSTDQTEHLRALGQKTPYPAAGPSTDLLEAFPNRFPDRPYIVSIAFPEFTSLCPVTGQPDFATIVVEYIPDQFCVESKSFKVYMFAFRDHQSFMETITNTILDDMTTKLQPLWCRVKGLFTPRGGTQLHVFAERFKEVEPARAQALRDMVSEWKRENNRHGA

SEQ ID NO: 45670 - protein, 167 aa, Desulfovibrio desulfuricans
  REGION 1..167: note = sp|B8IYG6|QUEF_DESDA NADPH-dependent 7-cyano-7-deazaguanine reductase OS=Desulfovibrio desulfuricans (strain ATCC 27774 / DSM 6949) OX=525146; GN = queF PE=3 SV=1
MTTRSQDQTRDLKVLGTGRLTSPEGGPSVALLEAFPNCFPQRPYVISISFPEFTSLCPVTGQPDCGTITVEYIPDELCVESKSFKLYMFAFRNHQSFMETITNNVLEDLRALLNPCWCRVKGLFAPRGGTRIHVFAEAFKDGMPEEQSALVRETVRSWKSEPDPHRP

SEQ ID NO: 45671 - protein, 166 aa, unidentified
  source 1..166: note = Desulfovibrio fairfieldensis
  REGION 1..166: note = tr|A0A0X8JKH6|A0A0X8JKH6_9DELT NADPH-dependent 7-cyano-7-deazaguanine reductase OS=Desulfovibrio fairfieldensis OX=44742 GN=queF PE=3 SV=1
MPTRSQDQTQNLHILGTGRLPAFEDGPGVGLLESFPNCYPQRPYVISISFPEFTSLCPVTGQPDCGTISVEYVPDKLCVESKSFKLYMFAFRNHQSFMETITNTVLEDLRELLAPCWCRVKGLFVPRGGTRIHVFAEEFKEMPEEQDRRVREAVRAWRSEIDPHRS

SEQ ID NO: 45672 - protein, 167 aa, Desulfovibrio ferrireducens
  REGION 1..167: note = tr|A0A1G9KNV2|A0A1G9KNV2_9DELT NADPH-dependent 7-cyano-7-deazaguanine reductase OS=Desulfovibrio ferrireducens OX=246191 GN=queF PE=3 SV=1
MKTTKSQDKTDALKTLGKGGATSYNYDSPSPEILEIFPNNFPGRPYIISIEFPEYTSLCPVTGQPDFANIIVEYIPDEVCVESKSFKLYMGAYRNHQSFMETITNNILDDFVSRLSPLWMRVKGIFSPRGGTCLHVFAEHYNEDSTQFAKVCDIVHEWKIESGRHRS

SEQ ID NO: 45673 - protein, 167 aa, unidentified
  source 1..167: note = Desulfovibrio ferrophilus
  REGION 1..167: note = tr|A0A2Z6AZP3|A0A2Z6AZP3_9DELT NADPH-dependent 7-cyano-7-deazaguanine reductase OS=Desulfovibrio ferrophilus OX=241368 GN=queF PE=3 SV=1
MGTTKSQDKTNHLKTLGQGGQTEYQLEGPHSGILETFPNNFPGRPYIVNVEFPEYTSLCPMTGQPDFGTIIMEYVPDQRIVESKSFKLYMFAYRNHQSFMETIANTMLDDFVKALDPLWCRVKGLFSPRGATTLHVFAEHFKVDAPNIAEVRSVVSEWKRENNRHGA

SEQ ID NO: 45674 - protein, 139 aa, Desulfovibrio fructosivorans
  REGION 1..139: note = tr|E1JX65|E1JX65_DESFR NADPH-dependent 7-cyano-7-deazaguanine reductase OS=Desulfovibrio fructosivorans JJ OX=596151 GN=queF PE=3 SV=1
MPTPKDDVSQLKTLGQGATRYPRTVTPSLLETFPNAYPDRRYEVTFSSEEFTSLCPKTGQPDFGRISIRYVPGARCIESKSLKLYLFSYRDEGTFMETLTNRILDDLVAACDPVEMEVTGEFAARGGITITVAAHHVRK

SEQ ID NO: 45675 - protein, 167 aa, unidentified
  source 1..167: note = Desulfovibrio gilichinskyi
  REGION 1..167: note = tr|A0A1X7DF51|A0A1X7DF51_9DELT NADPH-dependent 7-cyano-7-deazaguanine reductase OS=Desulfovibrio gilichinskyi OX=1519643 GN=queF PE=3 SV=1
MKTTKSQDKTGALKTLGQGGTTKYNYDSPSPEILEVFPNNFPGRPYIVSIEFPEYTSLCPVTGQPDFANIIVEYIPDEVCVESKSFKLYMGSYRNHQSFMETITNNILDDFVSRLSPLWMRVKGIFSPRGGTGLHVFAEYFKEDSTQFVKICDVVHEWKIESGRHRS

SEQ ID NO: 45676 - protein, 167 aa, Desulfovibrio hydrothermalis
  REGION 1..167: note = tr|L0RB75|L0RB75_9DELT NADPH-dependent 7-cyano-7-deazaguanine reductase OS=Desulfovibrio hydrothermalis AM13 = DSM 14728 OX=1121451 GN=queF PE=3; SV = 1
MKTTKSQDRTESLKSLGQAGATKYNYDTPSPEILETFPNNFPGRPYIISIEFPEYTSLCPVTGQPDFATIIVEYIPDELCVESKSFKLYMGSYRNHQSFMETITNNILDHFVESLSPLWMRVKGIFSPRGGTGLHVFAEHYKKDSAEYEQVRDVVKEWKSEANRHGA

SEQ ID NO: 45677 - protein, 166 aa, unidentified
  source 1..166: note = Desulfovibrio legallii
  REGION 1..166: note = tr|A0A1G7PZJ5|A0A1G7PZJ5_9DELT NADPH-dependent 7-cyano-7-deazaguanine reductase OS=Desulfovibrio legallii; OX = 571438 GN=queF PE=3 SV=1
MTSRSQDRTGELKILGSGRLHAPEGGPSVALLESFPNCFPQRPYVVSFTFPEFTSLCPVTGQPDSGTITVEYIPDQRCVESKSFKLYMFAFRNHQSFMETITNTVLDDLRALMDPCWCRVKGLFAPRGGTRIHVFAEDFKALPEERDRLVRAAVAAWKMEPDPHRP

SEQ ID NO: 45678 - protein, 156 aa, Desulfovibrio litoralis
  REGION 1..156: note = tr|A0A1M7TIP3|A0A1M7TIP3_9DELT NADPH-dependent 7-cyano-7-deazaguanine reductase OS=Desulfovibrio litoralis DSM 11393 OX=1121455 GN=queF PE=3 SV=1
MSKNISESVETAGLTKLGNSGHINFDSPSLSILEAFPNQYPQRDYVIEFDYPEFTSLCPKTGQPDFGTIIVRYVPNLCCVESKSFKLYMGSYRNQGAFMERLTNQIADDLIALLAPRRMTVEGLFNARGGTGIKVRVEHFDNTLATDELERLKSLW

SEQ ID NO: 45679 - protein, 143 aa, Desulfovibrio magneticus
  REGION 1..143: note = tr|K6HA45|K6HA45_9DELT NADPH-dependent 7-cyano-7-deazaguanine reductase OS=Desulfovibrio magneticus str. Maddingley MBC34 OX=1206767 GN=queF PE=3; SV = 1
MPHRVPRDDVSTLKTLGQGATVYPRNVTPGLLETFPNAFPDRRYDITFASDEFTSLCPKTGQPDFGTITIRYVPDKLCIESKSLKLYLFSYRDEGAFMETLTNRILDDLVEICQPHHMEVTGDFAARGGITISVTATYVKEKK

SEQ ID NO: 45680 - protein, 143 aa, Desulfovibrio magneticus
  REGION 1..143: note = tr|C4XPJ6|C4XPJ6_DESMR NADPH-dependent 7-cyano-7-deazaguanine reductase OS=Desulfovibrio magneticus (strain ATCC 700980 / DSM 13731 / RS-1); OX = 573370 GN=queF PE=3 SV =1
MPHRVPRDDVSTLKTLGQGATVYPRNVTPGLLETFPNAFPDRRYDITFASDEFTSLCPKTGQPDFGTITIRYVPDKLCIESKSLKLYLFSYRDEGAFMETLTNRILDDLVEVCQPHHMEVTGDFAARGGITISVTATFVKEKK

SEQ ID NO: 45681 - protein, 148 aa, Desulfovibrio mexicanus
  REGION 1..148: note = tr|A0A238Z3U0|A0A238Z3U0_9DELT NADPH-dependent 7-cyano-7-deazaguanine reductase OS=Desulfovibrio mexicanus OX=147047 GN=queF PE=3 SV=1
MSTIDDTSGLKHLGSGKTSYAFHEPTADILEAFPNKYPNRDYQIRFEHPEFTSLCPKTGQPDFATIEITYIPDALCIETKSLKLYFTAFRNHGSFMETITNKILDDLVSVCQPRMMQVVALFNPRGGTSLTVTAEYFKDNSAPIETQF

SEQ ID NO: 45682 - protein, 199 aa, Desulfovibrio piger
  REGION 1..199: note = tr|A0A1K1LI32|A0A1K1LI32_9DELT NADPH-dependent 7-cyano-7-deazaguanine reductase OS=Desulfovibrio piger; OX = 901 GN=queF PE=3 SV=1
MTAAIVAASTISYKDGSRGPFPVPGKISKGVSMSTTRSQDQTQHLHVLGTGKMPELQGGPSTALLESFPNRYPRRPYVISITFPEFTSLCPVTGQPDMGTITVEYIPDQLCVESKSFKLYMFAFRNHQSFMETITNTVLEDLWTVLAPCWCRVKGLFVPRGGTRIHVFAEQFKDMPEEKDAAVRAAVQAWRTESDPHRP

SEQ ID NO: 45683 - protein, 167 aa, Desulfovibrio piger
  REGION 1..167: note = tr|B6WX13|B6WX13_9DELT NADPH-dependent 7-cyano-7-deazaguanine reductase OS=Desulfovibrio piger ATCC 29098 OX=411464 GN=queF PE=3 SV=1
MSTTRSQDQTQHLHVLGTGKMPELQGGPSTALLESFPNRYPQRPYVISIAFPEFTSLCPVTGQPDMGTITVEYIPDQLCVESKSFKLYMFAFRNHQSFMETITNTVLEDLWTVLEPCWCRVKGLFVPRGGTRIHVFAEQFKDMPEEKDAAVRAAVQAWRTESDPHRP

SEQ ID NO: 45684 - protein, 167 aa, Desulfovibrio salexigens
  REGION 1..167: note = tr|C6BRW4|C6BRW4_DESAD NADPH-dependent 7-cyano-7-deazaguanine reductase OS=Desulfovibrio salexigens (strain ATCC 14822 / DSM 2638 / NCIB 8403 / VKM B-1763) OX=526222GN=queF PE=3 SV=1
MKTTKSQDKTESLVSLGQAGATEYNYNTPGPEILETFPNNFPGRPYIVSIEFPEYTSLCPVTGQPDFATIIVEYIPDELCVESKSFKLYMGAYRNHQSFMETITNNILDHFVGRLSPLWMRVKGIFSPRGGTALHVFAEHYKKDSAQYEDVREMVREWKMESSRHSA

SEQ ID NO: 45685 - protein, 145 aa, Desulfovibrio sp.
  REGION 1..145: note = tr|I2Q3K7|I2Q3K7_9DELT NADPH-dependent 7-cyano-7-deazaguanine reductase OS=Desulfovibrio sp. U5L; OX = 596152 GN=queF PE=3 SV=1
MSAPKAPSAPKDDVSTLTTLGQGATAYPRTVTPGLLETFPNAFPGRRYTVTFASEEFTSLCPKTGQPDFGLITIRYVPDALCIESKSLKLYLFSYRDEGTFMETLTNRILDDLVAACRPLEMEVTGDFAARGGITISVTAGYVKE

SEQ ID NO: 45686 - protein, 166 aa, Desulfovibrio sp.
  REGION 1..166: note = tr|A0A396CD23|A0A396CD23_9DELT NADPH-dependent 7-cyano-7-deazaguanine reductase OS=Desulfovibrio sp. AM18-2 OX=2292040 GN=queF PE=3 SV=1
MTSRSQDQTGNLKVLGSGRLHAPEGGPSVALLESFPNCFPQRPYVISFTFPEFTSLCPVTGQPDSGIITVEYIPDQRCVESKSFKLYMFAFRNHQSFMETITNTVLEDLRALMDPCWCRVKGLFAPRGGTRIHVFAEDFKELPEERERLVRAAVAAWKSEPDPHRP

SEQ ID NO: 45687 - protein, 165 aa, Desulfovibrio vulgaris; identical to SEQ ID NO: 45669
  REGION 1..165: note = tr|A0A0E0T0L0|A0A0E0T0L0_DESVR NADPH-dependent 7-cyano-7-deazaguanine reductase OS=Desulfovibrio vulgaris (strain RCH1) OX=573059 GN=queF PE=3 SV=1

SEQ ID NO: 45688 - protein, 165 aa, Desulfovibrio vulgaris; identical to SEQ ID NO: 45669
  REGION 1..165: note = sp|Q72DG6|QUEF_DESVH NADPH-dependent 7-cyano-7-deazaguanine reductase OS=Desulfovibrio vulgaris (strain Hildenborough / ATCC 29579 / DSM 644 / NCIMB 8303); OX = 882 GN= queF PE=3 SV=1

SEQ ID NO: 45689 - protein, 166 aa, unidentified
  source 1..166: note = Desulfovibrionaceae bacterium
  REGION 1..166: note = tr|A0A2V2GCB1|A0A2V2GCB1_9DELT NADPH-dependent 7-cyano-7-deazaguanine reductase OS=Desulfovibrionaceae bacterium OX=2049043 GN=queF PE=3 SV=1
MKTKEGGQGTARIDEGLSLLGGETCYRVDYAPEVLESFANKHPDNDYWVRFRCPEFTSLCPITGQPDFAEIRIAYLPDRRMVESKSLKLYLFSFRNHGDFHEDCVNIIMKDLIRLMDPKYIEVEGIFTPRGGIAIWPYANYGRAGTRYEELASFRLREHGLNRADA

SEQ ID NO: 45690 - protein, 170 aa, unidentified
  source 1..170: note = Desulfovibrionaceae bacterium
  REGION 1..170: note = tr|A0A316MCZ0|A0A316MCZ0_9DELT NADPH-dependent 7-cyano-7-deazaguanine reductase OS=Desulfovibrionaceae bacterium OX=2049043 GN=queF PE=3 SV=1
MSFSSGAVRSGHGEGAFSDSRSGEGLSLLGRTAEYCRDYAPEVLETFTNKHPDNDYWVRFNCPEFTSLCPITGQPDFAEIRISYLPDRKMVESKSLKLYLFSFRNHGDFHEDCVNVIMKDLIRLMEPKYIEVTGIFTPRGGISIWPYANYGRPGTEYEELARYRMRHHDL

SEQ ID NO: 45691 - protein, 147 aa, unidentified
  source 1..147: note = Desulfovibrionales bacterium
  REGION 1..147: note = tr|A0A1F9PYD5|A0A1F9PYD5_9DELT NADPH-dependent 7-cyano-7-deazaguanine reductase OS=Desulfovibrionales bacterium GWA2_65_9 OX=1797915 GN=queF PE=3 SV=1
MTTDDTTGLKHLGSGKTSYAFEEPTAAILEAFPNKYPNRDYQICFEHPEFTSLCPKTGQPDFATIEITYVPDLLCIETKSLKLYFTAYRNHGSFMETITNKILDDLVSVCQPRQMQVVALFNPRGGTSLTVTAEYVKDDAAPMGTRF

SEQ ID NO: 45692 - protein, 131 aa, Desulfurella acetivorans
  REGION 1..131: note = tr|W0JHF1|W0JHF1_DESAE NADPH-dependent 7-cyano-7-deazaguanine reductase OS=Desulfurella acetivorans A63 OX=694431 GN=queF PE=3 SV=1
MRYGEEAILNNKLEKWENKNEFKFEIHIEFGEFTCLCPRSGYPDFATIRIKYVPDKYVVELKSLKLFLNSFRNKYISHEDSINLIYSTLFNFLEPIYLEIIGDFNPRGNVKTIIKIDSNMQGEYFEKNNKR

SEQ ID NO: 45693 - protein, 134 aa, unidentified
  source 1..134: note = Desulfurella amilsii
  REGION 1..134: note = tr|A0A1X4XUB1|A0A1X4XUB1_9DELT NADPH-dependent 7-cyano-7-deazaguanine reductase OS=Desulfurella amilsii; OX = 1562698 GN=queF PE=3 SV=1
MTMRYGEEAILNNQLERWENKNPFTFEIDIEFSEFTCLCPRSGYPDFATIRIKYIPDKYVIELKSFKLFLNSFRNKYISHEDSINEIYAALSNCLQPKFLEVIGDFNPRGNVKTIIKIDSKIQEAGFEKNNKRQ

SEQ ID NO: 45694 - protein, 131 aa, Desulfurella multipotens; identical to SEQ ID NO: 45692
  REGION 1..131: note = tr|A0A1G6NY90|A0A1G6NY90_9DELT NADPH-dependent 7-cyano-7-deazaguanine reductase OS=Desulfurella multipotens OX=79269 GN=queF PE=3 SV=1

SEQ ID NO: 45695 - protein, 131 aa, Desulfurella sp.; identical to SEQ ID NO: 45692
  REGION 1..131: note = tr|A0A2N7Q205|A0A2N7Q205_9DELT NADPH-dependent 7-cyano-7-deazaguanine reductase OS=Desulfurella sp.; OX = 1962857 GN=queF PE=3 SV=1

SEQ ID NO: 45696 - protein, 140 aa, Desulfurispirillum indicum
  REGION 1..140: note = tr|E6W555|E6W555_DESIS NADPH-dependent 7-cyano-7-deazaguanine reductase OS=Desulfurispirillum indicum (strain ATCC BAA-1389 / S5) OX=653733 GN=queF PE=3; SV = 1
MAQAEGRSYDFLDTSHIDTGCLETFGYEGYRQFIQYKSAEFSAVCPFSGLPDIGTVILEYIPEKSIVELKSYKYYLVSFRNVGVYQEQATSRIFGDLWTALQPAYLKVATIYNTRGGIDTTCVVEQGDRSPYTADPIPGY

SEQ ID NO: 45697 - protein, 163 aa, Desulfurobacterium atlanticum
  REGION 1..163: note = tr|A0A239A8P4|A0A239A8P4_9BACT NADPH-dependent 7-cyano-7-deazaguanine reductase OS=Desulfurobacterium atlanticum OX=240169 GN=queF PE=3 SV=1
MERDDFGTVKSLGKETNYVFTYKPELLEKFPNRFPGNRYWVSFNCPEFTALCPITGQPDFATIYIQYIPDKWLVESKSLKLYLFSFRNARDFHEDTVNRIAEDLFKLLEPFYIEVYGEFNPRGGISIDPFVQKFKDYDWVKELAKERFKLHRITPPDIKRNRG

SEQ ID NO: 45698 - protein, 162 aa, unidentified
  source 1..162: note = Desulfurobacterium indicum
  REGION 1..162: note = tr|A0A1R1MMD9|A0A1R1MMD9_9BACT NADPH-dependent 7-cyano-7-deazaguanine reductase OS=Desulfurobacterium indicum OX=1914305 GN=queF PE=3 SV=1
MREDFGNVKSLGKKTGYVFEYKPEVLEKFPNKFPQNIYWVSFNCPEFTTLCPITGQPDFATIYIQYIPDKWLVESKSLKLYLFSYRNARDFHEDTVNRIAEDLFNLLEPYYIEVYGEFNPRGGISIDPFVQKFKRLDWVKELAKERFKLHRINPPRILRNRG

SEQ ID NO: 45699 - protein, 163 aa, Desulfurobacterium sp.
  REGION 1..163: note = tr|A0A432R4C6|A0A432R4C6_9BACT NADPH-dependent 7-cyano-7-deazaguanine reductase OS=Desulfurobacterium sp.; OX = 2004706 GN=queF PE=3 SV=1
MERKDFGTVTKLGKKTDYTFEYSPDLLEKFPNKFPGKVYWVSFNCPEFTTLCPITGQPDFATIYIQYIPDKWLVESKSLKLYLFSFRNARGFHEDTVNTIADDLFKLLNPFYIEVYGEFNPRGGISIDPFVQRFQEVDWVVELARERFKLHRIVPPEIRRNRG

SEQ ID NO: 45700 - protein, 163 aa, Desulfurobacterium thermolithotrophum
  REGION 1..163: note = tr|F0S1N6|F0S1N6_DESTD NADPH-dependent 7-cyano-7-deazaguanine reductase OS=Desulfurobacterium thermolithotrophum (strain DSM 11699 / BSA) OX=868864; GN = queF PE=3 SV=1
MERKDFGTVSKLGKKTDYTFEYTPEVLEKFPNRFPGKIYWVSFNCPEFTTLCPITGQPDFATIYIQYIPDKWLVESKSLKLYLFSFRNARDFHEDTVNRIADDIFNLLNPLYIEVYGEFNPRGGISIDPYVQRYQELDWVIELARERFKLHRITPPDIRRNRG

SEQ ID NO: 45701 - protein, 144 aa, unidentified
  source 1..144: note = Desulfuromonadaceae bacterium
  REGION 1..144: note = tr|A0A1G2WAD5|A0A1G2WAD5_9DELT NADPH-dependent 7-cyano-7-deazaguanine reductase OS=Desulfuromonadaceae bacterium GWB2_53_15 OX=1801895 GN=queF PE=3 SV=1
MKLHEQLKTLGEGSKTTYTYDQPDAALLEAFPSPFAQPDMNPAGAVGTLHIECPEFTCLCPMTGQPDFAKIVIDYQPDKLCVESKSLKLYLGSFRMHGEFHESGVNRICNDLVALIDPAWLTVRGEFTPRGGIPFWPTAEYRKR

SEQ ID NO: 45702 - protein, 134 aa, unidentified
  source 1..134: note = Desulfuromonadales bacterium
  REGION 1..134: note = tr|A0A1F9PPN8|A0A1F9PPN8_9DELT NADPH-dependent 7-cyano-7-deazaguanine reductase (Fragment); OS = Desulfuromonadales bacterium GWC2_61_20 OX=1797916; GN = A2005_13185 PE=3SV=1
MPKAAKTSTRKPGLKALGLTTAYPDQYDPRLLEIFANRHPKRDSWTLLECSEFTSLCPITGQPDWATILIRYVADAQMVESKSLKLYLHGFRNRGDFHEDVVNVILDDLRAAMVPRYIEVLGIFHPRGGIAIHP

SEQ ID NO: 45703 - protein, 176 aa, unidentified
  source 1..176: note = Desulfuromonadales bacterium
  REGION 1..176: note = tr|A0A1F9PZ96|A0A1F9PZ96_9DELT NADPH-dependent 7-cyano-7-deazaguanine reductase OS=Desulfuromonadales bacterium GWD2_61_12 OX=1797918 GN=queF PE=3 SV=1
MPKAAKTSTRKPGLKALGLTTAYPDQYDPRLLEIFANRHPKRDSWTLLECSEFTSLCPITGQPDWATILIRYVADAQMVESKSLKLYLHGFRNRGDFHEDVVNVILDDLRAAMVPRYIEVLGIFHPRGGIAIHPFVNWGSPTERRDAPGQSWADYARVRRDTMPLTETLELGKHLR

SEQ ID NO: 45704 - protein, 274 aa, Desulfuromonas acetexigens
  REGION 1..274: note = tr|A0A550JDE0|A0A550JDE0_9DELT NADPH-dependent 7-cyano-7-deazaguanine reductase OS=Desulfuromonas acetexigens OX=38815 GN=queF PE=3 SV=1
MTPLDQLPLGQPTQYTDRYDNRLLCPVPRSLKRQELGLGEPLPFVGEDQWNGYELSWLNPKGKPVVALLQLRIPCHSPNLIESKSLKLYLNSYNQTPFATEVAVAEQLRADLSAVAGAEVAVALSRPDDLELWQIVPLPGQSLDDLDITVDRYQVDSDLLYCLPDAPEVEERLYSHLLKSNCLITSQPDWASLWLHYRGPAIDHAALLRYLISFRRHNEFHEQCVERIFSDVLRRCRPVQLSVYARYTRRGGLDINPWRSTHTPQAPNWRLARQ

SEQ ID NO: 45705 - protein, 275 aa, Desulfuromonas acetoxidans
  REGION 1..275: note = tr|Q1K442|Q1K442_DESA6 NADPH-dependent 7-cyano-7-deazaguanine reductase OS=Desulfuromonas acetoxidans (strain DSM 684 / 11070) OX=281689 GN=queF; PE = 3 SV=1
MSDLTEIPLGKTTEYPSQYDAGLLYPVPRHLKRDELGISEPLPFYGEDVWNSYELSWLNRKGKPVVALAVFRFSCQSPNLVESKSFKLYLNSLNQTRFDDQQAVIDCLQRDLSQASGSSVTVELSSLDDQSLWQVQTLPGECLDSVDLDVEHYQLNADLLRDAADSADPVEETLYSHLLKSNCLITSQPDWASVWISYRGGRLERRALLAYLISFRQHNEFHEQCVERIFADLMRYCHPQSLTVYARYTRRGGLDINPWRSTEPGTAPQWRLSRQ

SEQ ID NO: 45706 - protein, 276 aa, unidentified
  source 1..276: note = Desulfuromonas soudanensis
  REGION 1..276: note = tr|A0A0M4DG65|A0A0M4DG65_9DELT NADPH-dependent 7-cyano-7-deazaguanine reductase OS=Desulfuromonas soudanensis OX=1603606 GN=queF PE=3 SV=1
MTDLESSLPLGRRSVYKDQYDPTLLCPVPRTLKREEIGVASPLPFGGYDIWNAYELSWLTPKGKPVVAMGEFHVPCISKNLIESKSFKLYLNSFNQTRFATSAEVQKLLAEDLGRVAGAPVTVRLIGSGEFAGESLRTLPGRCIDDLDIAIDRYALDPSLLDGAADPGRIVEETLHSHLLKSNCLITSQPDWGSVLVRYRGPRIDPAAFLRYLISFRQHNEFHEQCVERIFVDLMRRCHPQHLTVYARYTRRGGLDINPFRSNFENEVANLRLARQ

SEQ ID NO: 45707 - protein, 276 aa, Desulfuromonas sp.
  REGION 1..276: note = tr|A0A2N6EGL1|A0A2N6EGL1_9DELT NADPH-dependent 7-cyano-7-deazaguanine reductase OS=Desulfuromonas sp.; OX = 892 GN=queF PE=3 SV=1
MNDLERQLPLGKPTDYPADYDPSLLCPIPRRIKREELGLVEPLPFQGFDLWNAYELSWLTPRGKPVVAMGEFRIPCSSDYMIESKSLKLYLNSFNQTRFDDMESVCTLLRQDLTNATGAPVDVHLTGAAEVGAWQVRSLPGRCIDDLDLEITQYELQPELLALAVDPGQSVSETLYSHLLKSNCLVTRQPDWASVMVRYRGGRIDAEQLLRYLVSFRRHNEFHEQCVERIFFDLLRYCQPEQLTVYARYTRRGGLDINPFRSNFESQVDNLRLPRQ

SEQ ID NO: 45708 - protein, 176 aa, Desulfuromonas sp.; identical to SEQ ID NO: 45703
  REGION 1..176: note = tr|A0A357YGL0|A0A357YGL0_9DELT NADPH-dependent 7-cyano-7-deazaguanine reductase OS=Desulfuromonas sp.; OX = 892 GN=queF PE=3 SV=1

SEQ ID NO: 45709 - protein, 274 aa, Desulfuromonas thiophila
  REGION 1..274: note = tr|A0A1G6ZV32|A0A1G6ZV32_9DELT NADPH-dependent 7-cyano-7-deazaguanine reductase OS=Desulfuromonas thiophila OX=57664 GN=queF PE=3 SV=1
MNPLEHLPLGQPTRYTDRYDSGLLCPVPRQLKRAELGIDTPLPFVGEDLWNGYELSWLNPKGKPVVALLQLRVPCHSPNLIESKSLKLYLNSYNQTAFATMGAVADQLRRDLSAVAGTAVTLSLSHPDDVATWQVGQLTGQCLDDLDIAIDRYQVDSGLLSCAPAAPEVEEQLYSHLLKSNCLITSQPDWASLWLQYRGPAIDHAGLLRYLISFRQHNEFHEQCVERIFTDVLRCCRPTQLSVYARYTRRGGLDINPWRSTDTAVAPNWRLARQ

SEQ ID NO: 45710 - protein, 276 aa, Desulfuromusa kysingii
  REGION 1..276: note = tr|A0A1H3VVW1|A0A1H3VVW1_9DELT NADPH-dependent 7-cyano-7-deazaguanine reductase OS=Desulfuromusa kysingii; OX = 37625 GN=queF PE=3 SV=1
MVDHKLNLPLGEKTAYKAEYDPALLCPFPRQIKRDEIGVAEDLPFSGYDIWNAFELSWLNLKGKPVVAMGEFHIPCESPNLVESKSFKLYLNSFNQTCFSGFEQVEALLVKDLCDVCGAPILVRLFDSRQFDTAKLQSFPGTCIDGLDIEVKGYSLNPALLKNATDSECRVEEELYSHLLKSNCLVTNQPDWGSVLIRYCGRKIDQESLLRYLISFRQHNEFHEQCVERIFMDLMRHCQPERLTVYARYTRRGGLDINPFRSNYEDKIENLRLARQ

SEQ ID NO: 45711 - protein, 130 aa, Dethiobacter alkaliphilus
  REGION 1..130: note = tr|C0GIY6|C0GIY6_9FIRM NADPH-dependent 7-cyano-7-deazaguanine reductase OS=Dethiobacter alkaliphilus AHT 1 OX=555088 GN=queF PE=3 SV=1
MHNEFEVLGKNVPEPRRKLEVFEKPAGVDRVVLESDEVTSLCPVTGQPDWETVIIEYEPDRYCIESKSLKLYFWSFRQEGVFCEGLAAQIANDVHAACKPFFCKVTVIQKPRGGITITASATAGGEKNNE

SEQ ID NO: 45712 - protein, 153 aa, unidentified
  source 1..153: note = Devosia elaeis
  REGION 1..153: note = tr|A0A178HS10|A0A178HS10_9RHIZ NADPH-dependent 7-cyano-7-deazaguanine reductase OS=Devosia elaeis; OX = 1770058 GN=queF PE=3 SV=1
MTDFSLQVTQLGRETKAADSPELAILERVPNPQADTDYVARFTVPEFTSLCPVTGQPDFAHLVIDYVPGDWLVESKSLKLYLTSFRNHGAFHEDCTVSIGRRLTSLLEPRWLRIGGYWYPRGGIPIDVFWQTGIVPQHVWLPETGVPTYRGRG

SEQ ID NO: 45713 - protein, 151 aa, Devosia geojensis
  REGION 1..151: note = tr|A0A0F5FVT1|A0A0F5FVT1_9RHIZ NADPH-dependent 7-cyano-7-deazaguanine reductase OS=Devosia geojensis; OX = 443610 GN=queF PE=3 SV=1
MIEAQNLQLGRDVGAPERPEDAVLDPVPNPHPDTLYVARFVAPEFTSLCPVTGQPDFAHLVIDYVPDRHLVESKSLKLYLTSFRNHGAFHEGCTIDIGRKIVEAVKPRWLRIGGYWYPRGGIPIDVFWQTGAPPEGLWLPDQGVPPYRGRG

SEQ ID NO: 45714 - protein, 148 aa, Devosia insulae
  REGION 1..148: note = tr|A0A1E5XSW3|A0A1E5XSW3_9RHIZ NADPH-dependent 7-cyano-7-deazaguanine reductase OS=Devosia insulae DS-56; OX = 1116389 GN=queF PE=3 SV=1
MDTSVLGRPAEMPLDPASAVLDRVPNPHPDIDYLIRFTVPEFTALCPSTGQPDFAHLVIDYVADQWMIESKSLKLFMFSYRNHGAFHEATTVEIAKRLVEALAPRWLRIGGYWYPRGGIPIDVFWQTGAAPATLWLPEQGVPGYRGRG

SEQ ID NO: 45715 - protein, 152 aa, Devosia psychrophila
  REGION 1..152: note = tr|A0A1I1RGW8|A0A1I1RGW8_9RHIZ NADPH-dependent 7-cyano-7-deazaguanine reductase OS=Devosia psychrophila; OX = 728005 GN=queF PE=3 SV=1
MINLPDNLQLGTSSTIPATPEVARLDRVPNPQADTQYLTRFTAPEFTSLCPVTGQPDFAHIVIDIVPNQWLVESKSLKLYLTSFRNHGAFHEDCTVAIGRRVAELIEPHWLRIGGYWYPRGGMPIDVFWQYGALPPNVWVPEQGVPTYRGRG

SEQ ID NO: 45716 - protein, 152 aa, Devosia riboflavina
  REGION 1..152: note = tr|A0A087LYL1|A0A087LYL1_9RHIZ NADPH-dependent 7-cyano-7-deazaguanine reductase OS=Devosia riboflavina; OX = 46914 GN=queF PE=3 SV=1
MINLPDDLQLGTSSTIPATPEAARLDRVPNPQADTQYLTRFTAPEFTSLCPVTGQPDFAHIVIDFVPNQWLVESKSLKLYLTSFRNHGAFHEDCTVAIGRRVAELIEPHWLRIGGYWYPRGGMPIDVFWQYGTLPPNVWVPEQGVPTYRGRG

SEQ ID NO: 45717 - protein, 150 aa, Devosia sp.
  REGION 1..150: note = tr|A0A0Q4NLN1|A0A0Q4NLN1_9RHIZ NADPH-dependent 7-cyano-7-deazaguanine reductase OS=Devosia sp. Leaf64; OX = 1736229 GN=queF PE=3 SV=1
MNSETLQLGKDVEVPQHPDEAVLDPVPNPHPDVNYVARYVAPEFTSLCPVTGQPDFAHLVIDYVPDQFLVESKSLKLFLTSFRNHGAFHEGCTIDVAMRIVAAIKPRWLRIGGYWYPRGGIPIDVFWQTGPVPDGVWLPDQGVPPYRGRG

SEQ ID NO: 45718 - protein, 153 aa, Devosia sp.; identical to SEQ ID NO: 45712
  REGION 1..153: note = tr|A0A2L1S776|A0A2L1S776_9RHIZ NADPH-dependent 7-cyano-7-deazaguanine reductase OS=Devosia sp. I507; OX = 2083786 GN=queF PE=3 SV=1

SEQ ID NO: 45719 - protein, 164 aa, Dialister invisus
  REGION 1..164: note = tr|R5SND2|R5SND2_9FIRM NADPH-dependent 7-cyano-7-deazaguanine reductase OS=Dialister invisus CAG:218 OX=1263072 GN=queF PE=3 SV=1
MGNRREGVDELKALGNQYTKYVFDYNPDVLEKIPNKHDDRDYFVKFNCPEFTSLCPKTGQPDFATIYISYIPDKYIVESKSLKLYLFGFRNHGDFHEDCVNIIMTDLIKLLHPRFIEVWGKFLPRGGLSIDPYCNYGISNTEWRDFARFRLLRHDLDPEKIDNR

SEQ ID NO: 45720 - protein, 164 aa, Dialister invisus
  REGION 1..164: note = tr|C9LM42|C9LM42_9FIRM NADPH-dependent 7-cyano-7-deazaguanine reductase OS=Dialister invisus DSM 15470 OX=592028 GN=queF PE=3 SV=1
MGNIREGVDELKALGNQHTKYVFDYNPDVLEKIPNKHDDRDYFVKFNCPEFTSLCPKTGQPDFATIYISYIPDKYIVESKSLKLYLFGFRNHGDFHEDCVNIIMTDLIKLLHPRFIEVWGKFLPRGGLSIDPYCNYGIPNTEWRDFARFRLLRHDLDPEKIDNR

SEQ ID NO: 45721 - protein, 164 aa, Dialister micraerophilus
  REGION 1..164: note = tr|F2BVI6|F2BVI6_9FIRM NADPH-dependent 7-cyano-7-deazaguanine reductase OS=Dialister micraerophilus DSM 19965 OX=888062 GN=queF PE=3 SV=1
MDNRKTKIEDLSHLGNKNTKYVFETTPEVLEAVPNSHEDRDYFVKFNCPEFTSLCPKTGQPDFATIYISYVPDKFIVESKSLKLYLFSYRNHGAFHEDCVNMIMEDLIKLLKPRYIEVWGKFLPRGGLSIDPYCNYGKKGTKWEGVAENRLINHDMYPEIVNNR

SEQ ID NO: 45722 - protein, 164 aa, unidentified
  source 1..164: note = Dialister microaerophilus
  REGION 1..164: note = tr|E4L8F2|E4L8F2_9FIRM NADPH-dependent 7-cyano-7-deazaguanine reductase OS=Dialister microaerophilus UPII 345-E OX=910314 GN=queF PE=3 SV=1
MDNRKTKIEDLSHLGNKNTKYVFETTPEVLEAVPNSHEDRDYFVKFNCPEFTSLCPKTGQPDFATIYISYVPDKFIVESKSLKLYLFSYRNHGAFHEDCVNMIMEDLIKLLKPRYIEVWGKFLPRGGLSIDPYCNYGKKGTKWESVAENRLINHDMYPEIVNNR

SEQ ID NO: 45723 - protein, 164 aa, Dialister pneumosintes
  REGION 1..164: note = tr|A0A1B3WEV3|A0A1B3WEV3_9FIRM NADPH-dependent 7-cyano-7-deazaguanine reductase OS=Dialister pneumosintes; OX = 39950 GN=queF PE=3 SV=1
MSNSKNGLESLTLLGNQNTRYTFFYQPEILEKIPNAHSYRDFFVKFNCPEFTSLCPKTGQPDFATLYISYIPDAYMVESKSLKLYLFSYRNHGDFHENCVNTIMNDLISLLDPRYIEVWGKFLPRGGLSIDPYCNYGKEDTKWEEFATHRLLQHDLYPEIVTNR

SEQ ID NO: 45724 - protein, 163 aa, Dialister sp.
  REGION 1..163: note = tr|A0A510GE01|A0A510GE01_9FIRM NADPH-dependent 7-cyano-7-deazaguanine reductase OS=Dialister sp. 5BBH33; OX = 2582419 GN=queF PE=3 SV=1
MSQRDDLDKLNQLGNKNTKYSYDYDPSLLEKIENKHQDNDYFIKFNCPEFTSLCPKTGQPDFATIYISYIPDKYMVESKSLKLYLFSYRNHGDFHEDCVNQIMIDLIRLLRPRYIEVWGKFLPRGGLSIDPFCNYGILGTEWKDFARYRLLHHDLNPERIDNR

SEQ ID NO: 45725 - protein, 164 aa, Dialister sp.
  REGION 1..164: note = tr|R6AG17|R6AG17_9FIRM NADPH-dependent 7-cyano-7-deazaguanine reductase OS=Dialister sp. CAG:486; OX = 1262870 GN=queF PE=3 SV=1
MPNTREGLDQLKQLGSQNTKYTYDYNPSLLERIPNKHADRHYFIKFNCPEFTSLCPKTGQPDFATIYISYIPDQYMVESKSLKLYLFSFRNHGDFHEDCVNIIMSDLIELLHPRYIEVWGKFLPRGGLSIDPYCNYGTPDTEWKDFARFRLLHHDMNPEMVNNR

SEQ ID NO: 45726 - protein, 164 aa, Dialister succinatiphilus
  REGION 1..164: note = tr|H1CXW7|H1CXW7_9FIRM NADPH-dependent 7-cyano-7-deazaguanine reductase OS=Dialister succinatiphilus YIT 11850 OX=742743 GN=queF PE=3 SV=1
MTEKREGLDELKQLGSRNTKYTYDYDPGLLERIPNKHSDRDFFIKFNCPEFTSLCPKTGQPDFATIYISYIPDKYMVESKSLKLYLFSYRNHGDFHEDCVNMIMTDLIRLLRPRYIEVWGKFLPRGGLSIDPYCNYGIPGTEWKDFARFRLLHHDMNPEKVDNR

SEQ ID NO: 45727 - protein, 281 aa, Diaphorobacter nitroreducens
  REGION 1..281: note = tr|A0A3N1Z8T7|A0A3N1Z8T7_9BURK NADPH-dependent 7-cyano-7-deazaguanine reductase OS=Diaphorobacter nitroreducens OX=164759 GN=queF PE=3 SV=1
MNTPEHSQLGKASAYADQYDASLLFPIPRADKRAEIGIDGNAPFFGADLWTAFELSWLNLRGKPQVAIAHITVPCETPHIVESKSFKLYLNSFNNTRFASEAEVRARIRADVSEAVWRGAEHPGTVGVTLLLPEAFDREPIHELDGLLLDRLDVECTRYQPAPELLAAHHDEAPVTETLVSHLLKSNCLVTGQPDWGSVQITYSGAQIDQAGLLQYLVSFRNHNEFHEQCVERIFMDIWTRCRPIKLAVYARYTRRGGLDINPLRTSHPQQLPRNVRTARQ

SEQ ID NO: 45728 - protein, 281 aa, unidentified
  source 1..281: note = Diaphorobacter polyhydroxybutyrativorans
  REGION 1..281: note = tr|A0A2Z2LBE0|A0A2Z2LBE0_9BURK NADPH-dependent 7-cyano-7-deazaguanine reductase OS=Diaphorobacter polyhydroxybutyrativorans OX=1546149 GN=queF PE=3 SV=1
MNTPEHSQLGKASAYADQYDASLLFPIPRADKRAEIGIDGNAPFFGADLWTAFELSWLNLRGKPQVAIAHITVPCETPHIVESKSFKLYLNSFNNTRFASEAEVRACIRADVSEAVWRGAEHPGTVGVTLLLPEAFDREPIHELDGLLLDRLDVECTRYQPAPELLAAHHDEAPVTETLVSHLLKSNCLVTGQPDWGSVQITYSGAQIDQAGLLQYLVSFRNHNEFHEQCVERIFMDIWTRCRPIKLAVYARYTRRGGLDINPLRTSHPQQLPRNVRTARQ

SEQ ID NO: 45729 - protein, 281 aa, Diaphorobacter sp.; identical to SEQ ID NO: 43617
  REGION 1..281: note = tr|A0A2S4KHW3|A0A2S4KHW3_9BURK NADPH-dependent 7-cyano-7-deazaguanine reductase OS=Diaphorobacter sp. LR2014-1 OX=1933219 GN=queF PE=3 SV=1

SEQ ID NO: 45730 - protein, 281 aa, Diaphorobacter sp.; identical to SEQ ID NO: 43617
  REGION 1..281: note = tr|A0A0J0UH26|A0A0J0UH26_9BURK NADPH-dependent 7-cyano-7-deazaguanine reductase OS=Diaphorobacter sp. J5-51 OX=680496 GN=queF PE=3 SV=1

SEQ ID NO: 45731 - protein, 157 aa, Dichelobacter nodosus
  REGION 1..157: note = tr|A5EUT9|A5EUT9_DICNV NADPH-dependent 7-cyano-7-deazaguanine reductase OS=Dichelobacter nodosus (strain VCS1703A) OX=246195 GN=queF PE=3 SV=1
MRTPQECAQITLLGKQKSDYPTHYDPSILEAFANKHLENDYFVHFICPEFTSLCPITGQPDFATIHLAYLPDQLLVESKSLKFYLFSFRNHGDFHEDCVNIIMKDLITLMAPKYIEVLGCFTPRGGIAIHPYANYGRPNTIYAEMAQQRLQNHRIAS

SEQ ID NO: 45732 - protein, 157 aa, Dichelobacter nodosus; identical to SEQ ID NO: 45731
  REGION 1..157: note = tr|A0A5F1ACG0|A0A5F1ACG0_DICNO NADPH-dependent 7-cyano-7-deazaguanine reductase OS=Dichelobacter nodosus; OX = 870 GN=queF PE=3 SV=1

SEQ ID NO: 45733 - protein, 150 aa, Dichotomicrobium thermohalophilum
  REGION 1..150: note = tr|A0A397Q6D2|A0A397Q6D2_9RHIZ NADPH-dependent 7-cyano-7-deazaguanine reductase OS=Dichotomicrobium thermohalophilum OX=933063 GN=queF PE=3 SV=1
MSDDLTQLGKAAAIPASPEEARLERVANPHPDVDYVARFTAPEFTSICPVTGQPDFAHLVIDYVPDAWIVESKSLKLYLSAFRNHGAFHEDCTIAIAKRLVDLLSPKWLRIGGYWYPRGGIPIDVFWQTGEPPAGVWIPDQGVAPYRGRG

SEQ ID NO: 45734 - protein, 280 aa, unidentified
  source 1..280: note = Dickeya aquatica
  REGION 1..280: note = tr|A0A375A7R7|A0A375A7R7_9GAMM NADPH-dependent 7-cyano-7-deazaguanine reductase OS=Dickeya aquatica; OX = 1401087 GN=queF PE=3 SV=1
MHITENDSITHLGVRSSYPDNYDPALLEALPRARGRDLIGVTGEALPFHGHDIWTAFELSWLNRKGKPLVGIAEFIIPASSENLIESKSFKLYLNSFNQTRFNDIGEVHATLINDLSAAAKGDVKVTLYPALSGYPAEIDKLPGTNIDELDIEVNDYSFNPDYLQHAVRDNAPVVSETLNSNLLKSNCLVTHQPDWGSVVIKYEGRQIDQEALLRYLISFRQHNEFHEQCVERIFNDLKRYCQPQKLSVFARYTRRGGLDINPFRSDFESEATTGRLVRQ

SEQ ID NO: 45735 - protein, 280 aa, Dickeya chrysanthemi
  REGION 1..280: note = tr|C6CHU9|C6CHU9_DICC1 NADPH-dependent 7-cyano-7-deazaguanine reductase OS=Dickeya chrysanthemi (strain Ech1591) OX=561229 GN=queF PE=3 SV=1
MHITENDSITHLGVRSSYPDKYDPTLLEALPRARGRDLVGLTGSTLPFDGYDLWTAFELSWLNRKGKPLVGIAEFIIPASSENLIESKSFKLYLNSFNQTRFQDIGEVHATLIKDLSAAANGDVKVTLYPGLTGYPSQIDTLPGINIDELDIEVNDYGFNPDYLQHAVRDNAPLVSETLCSNLLKSNCLVTYQPDWGSVVIKYEGRQIDREALLRYLISFRQHNEFHEQCVERIFNDLKHYCQPEKLTVFARYTRRGGLDINPFRSDFETEAATGRLVRQ

SEQ ID NO: 45736 - protein, 280 aa, Dickeya dadantii
  REGION 1..280: note = tr|E0SBN5|E0SBN5_DICD3 NADPH-dependent 7-cyano-7-deazaguanine reductase OS=Dickeya dadantii (strain 3937) OX=198628 GN=queF PE=3 SV=1
MHITENDSITHLGVRSSYPDKYDPTLLEALPRARGRDLVGLTGSDLPFDGYDLWTAFELSWLNHKGKPLVGIAEFIIPASSENLIESKSFKLYLNSFNQTRFRDIGEVHATLIKDLSAAANGDVKVTLYPGLTGYPSQIDTLPGINIDELDIEVNDYGFNPDYLQHAVRDKAPVVAETLCSNLLKSNCLVTYQPDWGSVVIKYEGRQIDREALLRYLISFRQHNEFHEQCVERIFNDLKRYCQPEKLTVFARYTRRGGLDINPFRSNFETEAATGRLVRQ

SEQ ID NO: 45737 - protein, 280 aa, Dickeya dianthicola
  REGION 1..280: note = tr|A0A385XVV3|A0A385XVV3_9GAMM NADPH-dependent 7-cyano-7-deazaguanine reductase OS=Dickeya dianthicola; OX = 204039 GN=queF PE=3 SV=1
MHITENDSITHLGVRSSYPDKYDPALLEALPRARGRDLVGLTGPDLPFDGYDLWTAFELSWLNHKGKPLVGIAEFIIPASSENLIESKSFKLYLNSFNQTRFRDIGEVHATLIKDLSAAANGDVKVTLYPGLTGYPAQIDTLPGINIDELDIEVNDYGFNPDYLQHAVRDNAPVVAETLCSNLLKSNCLVTYQPDWGSVVIKYEGRQIDREALLRYLISFRQHNEFHEQCVERIFNDLKRYCRPEKLTVFARYTRRGGLDINPFRSDFETQAATGRLVRQ

SEQ ID NO: 45738 - protein, 280 aa, unidentified
  source 1..280: note = Dickeya fangzhongdai
  REGION 1..280: note = tr|A0A2K8QIM6|A0A2K8QIM6_9GAMM NADPH-dependent 7-cyano-7-deazaguanine reductase OS=Dickeya fangzhongdai; OX = 1778540 GN=queF PE=3 SV=1
MHITENDSITHLGVRSSYPDKYDPALLEALPRARGRDLVGLTGPDLPFDGYDLWTAFELSWLNHKGKPLVGIAEFIIPASSENLIESKSFKLYLNSFNQTRFRDIGEVHATLIKDLSAAANGDVKVTLYPGLTGYPAQIDTLPGINIDELDIEVNDYGFNPDYLQHAVRDNAPLVAETLCSNLLKSNCLVTYQPDWGSVVIKYEGRQIDREALLRYLISFRQHNEFHEQCVERIFNDLKRYCRPEKLTVFARYTRRGGLDINPFRSDFETEAATGRLVRQ

SEQ ID NO: 45739 - protein, 280 aa, Dickeya paradisiaca
  REGION 1..280: note = tr|C6CD57|C6CD57_DICP7 NADPH-dependent 7-cyano-7-deazaguanine reductase OS=Dickeya paradisiaca (strain Ech703) OX=579405 GN=queF PE=3 SV=1
MHITENDHITHLGVRSSYPDHYAPELLEALPRSRGRDLIGVDGASLPFSGYDLWTGFELSWLNHKGKPLVGIAEFTIPASSENLIESKSFKLYLNSFNQTRFRDAGEVHATLIKDLSAAANGDVGVTLYPGLAGYPAGTDALPGINIDELDIDVNNYDFNPDYLQHAIAEKAPLVAETLCSNLLKSNCLVTHQPDWGSVLIRYEGRQIDREALLRYLISFRQHNEFHEQCVERIFSDIKCYCQPEKLSVFARYTRRGGLDINPFRSDFETTAAVGRLVRQ

SEQ ID NO: 45740 - protein, 280 aa, unidentified
  source 1..280: note = Dickeya solani
  REGION 1..280: note = tr|A0A2K8W2U1|A0A2K8W2U1_9GAMM NADPH-dependent 7-cyano-7-deazaguanine reductase OS=Dickeya solani RNS 08.23.3.1.A OX=1240086 GN=queF PE=3 SV=1
MHITENDSITHLGVRSSYPDKYDPTLLEALPRARGRDLVGLTGPDLPFDGYDLWTAFELSWLNHKGKPLVGIAEFIIPASSENLIESKSFKLYLNSFNQTRFRDIGEVHATLIKDLSAAANGDVKVTLFPGLTGYPAQIDTLPGINIDELDIEVNDYGFNPDYLQHAVRDKAPVVAETLCSNLLKSNCLVTYQPDWGSVVIKYEGRQIDREALLRYLISFRQHNEFHEQCVERIFNDLKRYCQPEKLTVFARYTRRGGLDINPFRSDFETEAATGRLVRQ

SEQ ID NO: 45741 - protein, 280 aa, Dickeya sp.
  REGION 1..280: note = tr|A0A454UPI7|A0A454UPI7_9GAMM NADPH-dependent 7-cyano-7-deazaguanine reductase OS=Dickeya sp. FVG10-MFV-A16 OX=2487135 GN=queF PE=3 SV=1
MHITENDSITHLGVRSSYPDKYDPALLEALPRARGRDLVGLTGPDLPFSGYDLWTAFELSWLNHKGKPLVGIAEFIIPASSENLIESKSFKLYLNSFNQTRFRDIGEVHATLIKDLSAAANGDVKVTLYPGLTGYPAQIDTLPGINIDELDIEVNDYGFNPDYLQHAVRDNAPLVAETLCSNLLKSNCLVTYQPDWGSVVIKYEGRQIDREALLRYLISFRQHNEFHEQCVERIFNDLKRYCQPEKLTVFARYTRRGGLDINPFRSDFETEAATGRLVRQ

SEQ ID NO: 45742 - protein, 280 aa, Dickeya sp.; identical to SEQ ID NO: 45741
  REGION 1..280: note = tr|A0A3N0FYE8|A0A3N0FYE8_9GAMM NADPH-dependent 7-cyano-7-deazaguanine reductase OS=Dickeya sp. FVG1-MFV-O17 OX=2487136 GN=queF PE=3 SV=1

SEQ ID NO: 45743 - protein, 280 aa, Dickeya zeae
  REGION 1..280: note = tr|A0A2K9QBM5|A0A2K9QBM5_9GAMM NADPH-dependent 7-cyano-7-deazaguanine reductase OS=Dickeya zeae OX=204042; GN = queF PE=3 SV=1
MHITENDSITHLGVRSSYPDKYDPTLLEALPRARGRDLVGLTGSPLPFDGYDLWTAFELSWLNRKGKPLVGIAEFIIPASSENLIESKSFKLYLNSFNQTRFQDIGEVHATLIKDLSAAANGDVKVTLYPGLTGYSSQIDTLPGINIDELDIEVNDYGFNPDYLQHAVRDNAPHVTETLCSNLLKSNCLVTYQPDWGSVVIKYEGRQIDREALLRYLISFRQHNEFHEQCVERIFNDLKRYCQPEKLTVFARYTRRGGLDINPFRSDFETEATTGRLVRQ

SEQ ID NO: 45744 - protein, 280 aa, Dickeya zeae
  REGION 1..280: note = tr|A0A0A8FAA7|A0A0A8FAA7_9GAMM NADPH-dependent 7-cyano-7-deazaguanine reductase OS=Dickeya zeae EC1; OX = 1427366 GN=queF PE=3 SV=1
MHITENDGITHLGVRSSYPDKYDPTLLEALPRARGRDLVGLSGASLPFDGYDLWTAFELSWLNRKGKPLVGIAEFIIPASSENLIESKSFKLYLNSFNQTRFQDIGEVHATLIKDLSAAANGDVKVTLYPGLTGYSSQIDTLPGINIDELDIEVNDYGFNPDYLQHAVRDNAPHVTETLCSNLLKSNCLVTYQPDWGSVVIKYQGRQIDREALLRYLISFRQHNEFHEQCVERIFNDLKRYCQPEKLTVFARYTRRGGLDINPFRSDFETEATTGRLVRQ

SEQ ID NO: 45745 - protein, 149 aa, unidentified
  source 1..149: note = Dictyobacter alpinus
  REGION 1..149: note = tr|A0A402BI84|A0A402BI84_9CHLR NADPH-dependent 7-cyano-7-deazaguanine reductase OS=Dictyobacter alpinus; OX = 2014873 GN=queF PE=3 SV=1
MQETEQTRVPGRYGFEEIAANQLEAWPNSYTDRDYVTHFEIPEFTCLCPRSGFPDFATIIVDYVPDKSVVELKSLKLYINTYRNRQISHEASANAILDDLVALLAPRWMRVVGDFTVRGNIKTVITTEYAHPEYTGPRPELKRYLPANG

SEQ ID NO: 45746 - protein, 149 aa, unidentified
  source 1..149: note = Dictyobacter aurantiacus
  REGION 1..149: note = tr|A0A401ZQC1|A0A401ZQC1_9CHLR NADPH-dependent 7-cyano-7-deazaguanine reductase OS=Dictyobacter aurantiacus OX=1936993 GN=queF PE=3 SV=1
MSESEQDRVIGRYGFDEIAANHLEAWPNSYPERDYVTHFEIPEFTCLCPRSGFPDFATIIVDYVPDKQVVELKSLKLYINAYRNRQISHEASTNAILDDLVALLSPRWMRVVGDFTVRGNIKTVITTEYANPEYHGPRPELKRFLPAIG

SEQ ID NO: 45747 - protein, 149 aa, unidentified
  source 1..149: note = Dictyobacter kobayashii
  REGION 1..149: note = tr|A0A402AWJ5|A0A402AWJ5_9CHLR NADPH-dependent 7-cyano-7-deazaguanine reductase OS=Dictyobacter kobayashii OX=2014872 GN=queF PE=3 SV=1
MPESEQDRIPGRYGFDEIAANQLEAWPNSYPERDYVTHFEIPEFTCLCPRSGFPDFATIIIDYVPDKHVVELKSLKLYINTYRNRQISHEASSNAILDDLVELLAPRWMRVVGDFTVRGNIKTVITTEYANPDYQGPRPELKRFLPAIG

SEQ ID NO: 45748 - protein, 149 aa, unidentified
  source 1..149: note = Dictyobacter sp.
  REGION 1..149: note = tr|A0A5A5T673|A0A5A5T673_9CHLR NADPH-dependent 7-cyano-7-deazaguanine reductase OS=Dictyobacter sp. Uno17; OX = 2014874 GN=queF PE=3 SV=1
MAESEQDRIPGRYGFDEIASSHLEAWPNSYQDRDYVTHFEIPEFTCLCPRSGFPDFATIIVDYVPDASVVELKSLKLYINAYRNRQISHEASANAILDDLVTLLSPRWMRVVGDFTVRGNIKTVITTEYARPEYQGPRPALTRYLPAIG

SEQ ID NO: 45749 - protein, 149 aa, unidentified
  source 1..149: note = Dictyobacter sp.
  REGION 1..149: note = tr|A0A5J4KUD9|A0A5J4KUD9_9CHLR NADPH-dependent 7-cyano-7-deazaguanine reductase OS=Dictyobacter sp. W12; OX = 2607529 GN=queF PE=4 SV=1
MQETEQGREPGRYGFEEIAANQLEAWPNAYPDRDYVTHFEIPEFTCLCPRSGFPDFATIIVDYVPDKNVVELKSLKLYINAYRNRQISHEASTNAILDDLVALLAPRWIRIVGDFTVRGNIKTVITTEYAIPEYHGPRPELRRFMPAIG

SEQ ID NO: 45750 - protein, 119 aa, unidentified
  source 1..119: note = Dissulfuribacter thermophilus
  REGION 1..119: note = tr|A0A1B9F8C9|A0A1B9F8C9_9DELT NADPH-dependent 7-cyano-7-deazaguanine reductase OS=Dissulfuribacter thermophilus OX=1156395 GN=queF PE=3 SV=1
MKYGEKEIQEAKLEPWPNPSPQRDYEISISFPEFTCLCPRSGYPDFATIKITYTPNEWIVELKSLKLFLNQYRDRYISHEQATCEIFEALDQILKPKKLKVIGDFNPRGNVHTVITVEK

SEQ ID NO: 45751 - protein, 274 aa, Dokdonella fugitiva
  REGION 1..274: note = tr|A0A4R2IF04|A0A4R2IF04_9GAMM NADPH-dependent 7-cyano-7-deazaguanine reductase OS=Dokdonella fugitiva; OX = 328517 GN=queF PE=3 SV=1
MTTADTHGPLGRSVAYASRYDAGLLFPIARSIGRAELGLDASLPFDGVDVWNAYELSWLDARGKPEVALAEFRVPAASPAIIESKSFKLYLNSYNQERLASIDALRERLVHDLSAAAGASVEVLLLPPSRFGSLALRELDGESIDGLAIDVDDYGPPNDAHLHAGGVPVTETLVSNLLKSNCPVTGQPDWASVQVRYRGPRIDREGLLRYLVSFREHAGFHEQCVERIFVDISRRCAPESLEVYARYTRRGGLDINPWRASSGAGVANPRGARQ

SEQ ID NO: 45752 - protein, 277 aa, unidentified
  source 1..277: note = Dokdonella immobilis
  REGION 1..277: note = tr|A0A1I4XVZ3|A0A1I4XVZ3_9GAMM NADPH-dependent 7-cyano-7-deazaguanine reductase OS=Dokdonella immobilis; OX = 578942 GN=queF PE=3 SV=1
MTHRITDSPLGRAVTGSRQLDPGLLFPIARAHGREQLGFGSVLPFEGVDIWNAYELSWLDPRGKPVVAIAEFRVPASTPNLIESKSFKLYLNSLNQTRFSDPAAVRDRIADDLSAAAGARIGVSMAEVDQPLASMQGAFAGECIDGLPVAIDCYGPPQVQELAVRSGESLVEETLVSHLLKSNCPVTGQPDWASVQIAYAGAPIDREGLLRYLVSYRDHDDFHEQCVERIFRDLLARCAPTRLTVSARYTRRGGLDINPWRSNDPQRRADNPRLLRQ

SEQ ID NO: 45753 - protein, 276 aa, Dokdonella koreensis
  REGION 1..276: note = tr|A0A160DXI3|A0A160DXI3_9GAMM NADPH-dependent 7-cyano-7-deazaguanine reductase OS=Dokdonella koreensis DS-123 OX=1300342 GN=queF PE=3 SV=1
MNTPHDSPLGRTVAFAADYDPTLLFPIPREAKRAEIGIAAPLPFVGIDYWNAYELSWLEPGGKPRVAVATFEVPASSPRIVESKSLKLYLNSYNQTHLADVATLRARLVADLSAAAGAPVGVAVQLLPAPQAPWIGEPEGELIDDLDVTFDRYTPPQPDLLTVDTGEDEADEALVSHLLRSNCPVTGQPDWATVQVAYVGPRIDRRGLLRYLVSYRLHDDFHEQCVERIFIDIVRRCAPRRLSVYARYTRRGGLDINPWRATAGSPPPPNRRAFRQ

SEQ ID NO: 45754 - protein, 138 aa, unidentified
  source 1..138: note = Dolichospermum compactum
  REGION 1..138: note = tr|A0A1Z4UXV4|A0A1Z4UXV4_9CYAN NADPH-dependent 7-cyano-7-deazaguanine reductase OS=Dolichospermum compactum NIES-806 OX=1973481 GN=queF PE=3 SV=1
MSNFAPETVSPASQEMKYGEREIAEGKLITFPNPRIGRRYDVNITLPEFTCKCPFSGYPDFATIYITYIPDEKVVELKALKLYINSYRDRYISHEETANQILDDLVAACDPLAITVKTDFTPRGNVHTVVEVRHQKAV

SEQ ID NO: 45755 - protein, 138 aa, unidentified
  source 1..138: note = Dolichospermum planctonicum
  REGION 1..138: note = tr|A0A480AHU8|A0A480AHU8_9CYAN NADPH-dependent 7-cyano-7-deazaguanine reductase OS=Dolichospermum planctonicum OX=136072 GN=queF PE=3 SV=1
MSNFAPETLPPDIQEMKYGEREIAEGKLITFPNPRIGRRYDINITLPEFTCKCPFSGYPDFATIYITYIPDQRVVELKALKLYINSYRDRYISHEETANQILDDFVAACDPVEVTVKTDFTPRGNVHTVVEVKHQKGV

SEQ ID NO: 45756 - protein, 151 aa, unidentified
  source 1..151: note = Dolichospermum sp.
  REGION 1..151: note = tr|A0A5C0E074|A0A5C0E074_9CYAN NADPH-dependent 7-cyano-7-deazaguanine reductase OS=Dolichospermum sp. UHCC 0315A OX=1914871 GN=queF PE=3 SV=1
MSNFAPETVSPASQEMKYGEREIAEGKLITFPNPRIGRRYDVNITLPEFTCKCPFSGYPDFATIYITYVPDERVVELKALKLYINSYRDRYISHEETANQILDDFVAACDPLEVTVKTDFTPRGNVHTVVEVRHQKGVYSRSQESGVRSQE

SEQ ID NO: 45757 - protein, 165 aa, unidentified
  source 1..165: note = Domibacillus aminovorans
  REGION 1..165: note = tr|A0A177KJJ9|A0A177KJJ9_9BACI NADPH-dependent 7-cyano-7-deazaguanine reductase OS=Domibacillus aminovorans OX=29332 GN=queF PE=3 SV=1
MAGRREDELKDITLLGNQGTKYVFDYDPSVLETFDNKHQNRDYFVKFNCPEFTSLCPMTGQPDFATIYISYIPDVKMVESKALKLYLFSFRNHGDFHEDCMNIILNDLVELMNPRYIEVWGKFTPRGGISIDPYTNYGRPGTKYEKMADYRMMNHDLYPETVDNR

SEQ ID NO: 45758 - protein, 165 aa, unidentified
  source 1..165: note = Domibacillus aminovorans
  REGION 1..165: note = tr|A0A177L3H4|A0A177L3H4_9BACI NADPH-dependent 7-cyano-7-deazaguanine reductase OS=Domibacillus aminovorans OX=29332 GN=queF PE=3 SV=1
MAGRREDELKDITLLGNQGTKYIFDYDPSVLETFDNKHQNRDYFVKFNCPEFTSLCPMTGQPDFATIYISYIPDVKMVESKALKLYLFSFRNHGDFHEDCMNIILNDLVELMNPRYIEVWGKFTPRGGISIDPYTNYGRPGTKYEKMADYRMMNHDLYPETVDNR

SEQ ID NO: 45759 - protein, 165 aa, unidentified
  source 1..165: note = Domibacillus antri
  REGION 1..165: note = tr|A0A1Q8Q8G8|A0A1Q8Q8G8_9BACI NADPH-dependent 7-cyano-7-deazaguanine reductase OS=Domibacillus antri; OX = 1714264 GN=queF PE=3 SV=1
MAGRKEDELKDITLLGNQGTKYIFDYDPSVLETFDNKHQNRDYFVKFNCPEFTSLCPMTGQPDFATIYISYIPDVKMVESKSLKLYLFSFRNHGDFHEDCMNIILNDLVELMDPRYIEVWGKFTPRGGISIDPYTNYGRPGTKYEKMAEYRMMNHDLYPEKIDNR

SEQ ID NO: 45760 - protein, 165 aa, unidentified
  source 1..165: note = Domibacillus enclensis
  REGION 1..165: note = tr|A0A1N6WYE7|A0A1N6WYE7_9BACI NADPH-dependent 7-cyano-7-deazaguanine reductase OS=Domibacillus enclensis; OX = 1017273 GN=queF PE=3 SV=1
MAGRKEEELQDITLLGNQGTKYVFDYDPSVLETFDNKHQNRDYFVKFNCPEFTSLCPMTGQPDFATIYISYIPDVKMVESKALKLYLFSFRNHGDFHEDCMNIILNDLVELMDPRYIEVWGKFTPRGGISIDPYTNYGKPGTKYEKMAEYRMMNHDLYPETVDNR

SEQ ID NO: 45761 - protein, 165 aa, unidentified
  source 1..165: note = Domibacillus epiphyticus
  REGION 1..165: note = tr|A0A1V2AAX4|A0A1V2AAX4_9BACI NADPH-dependent 7-cyano-7-deazaguanine reductase OS=Domibacillus epiphyticus OX=1714355 GN=queF PE=3 SV=1
MAGRNKDELKDITLLGNQGTKYIFDYDPSVLETFDNKHQNRDYFVKFNCPEFTSLCPMTGQPDFATIYISYIPDVKMVESKSLKLYLFSFRNHGDFHEDCMNIILNDLVELMDPRYIEVWGKFTPRGGISIDPYTNYGKPGTKYEKMAEYRMMNHDLYPETVDNR

SEQ ID NO: 45762 - protein, 165 aa, unidentified
  source 1..165: note = Domibacillus iocasae
  REGION 1..165: note = tr|A0A1E7DPY0|A0A1E7DPY0_9BACI NADPH-dependent 7-cyano-7-deazaguanine reductase OS=Domibacillus iocasae; OX = 1714016 GN=queF PE=3 SV=1
MAGRNEEELKDITLLGNQGTKYVFDYDPSVLETFDNKHQNRDYFVKFNCPEFTSLCPMTGQPDFATIYISYIPDVKMVESKSLKLYLFSFRNHGDFHEDCMNIILNDLVELMDPRYIEVWGKFTPRGGISIDPYTNYGKPGTKYEKMAEYRMMNHDLYPETVDNR

SEQ ID NO: 45763 - protein, 165 aa, unidentified
  source 1..165: note = Domibacillus mangrovi
  REGION 1..165: note = tr|A0A1Q5P1E1|A0A1Q5P1E1_9BACI NADPH-dependent 7-cyano-7-deazaguanine reductase OS=Domibacillus mangrovi; OX = 1714354 GN=queF PE=3 SV=1
MAGRREDELKDITLLGNQGTKYVFDYDASVLETFDNKHQNRDYFVKFNCPEFTSLCPMTGQPDFATIYISYIPDVKMVESKALKLYLFSFRNHGDFHEDCMNIILNDLVELMNPRYIEVWGKFTPRGGISIDPYTNYGRPGTKYEKMADYRMMNHDLYPETVDNR

SEQ ID NO: 45764 - protein, 154 aa, Donghicola sp.
  REGION 1..154: note = tr|A0A1M4N6Q1|A0A1M4N6Q1_9RHOB NADPH-dependent 7-cyano-7-deazaguanine reductase OS=Donghicola sp. KarMa; OX = 1779855 GN=queF PE=3 SV=1
MTDSIYSNLKQLGGATVMPQSPEEAELERVQNPQADVLYNVRFTAPEFTSLCPMTGQPDFAHLMIDYVPGEWLVESKSLKLFLGSFRNHGAFHEDCTISIARRLADFLDPKWLRIGGYWYPRGGIPIDVHYQTGPIPEGVWIPDQGVPPYRGRG

SEQ ID NO: 45765 - protein, 154 aa, unidentified
  source 1..154: note = Donghicola tyrosinivorans
  REGION 1..154: note = tr|A0A2T0WFY2|A0A2T0WFY2_9RHOB NADPH-dependent 7-cyano-7-deazaguanine reductase OS=Donghicola tyrosinivorans OX=1652492 GN=queF PE=3 SV=1
MTDSIYSNLKQLGGATVMPQSLDEAELERVQNPQADVLYNVRFTAPEFTSLCPMTGQPDFAHLMIDYVPGEWLVESKSLKLFLGSFRNHGAFHEDCTISIARRLADFLEPKWLRIGGYWYPRGGIPIDVHYQTGPIPEGVWIPDQGVPPYRGRG

SEQ ID NO: 45766 - protein, 160 aa, Dorea longicatena
  REGION 1..160: note = tr|A0A564UF11|A0A564UF11_9FIRM NADPH-dependent 7-cyano-7-deazaguanine reductase OS=Dorea longicatena; OX = 88431 GN=queF PE=3 SV=1
MREKENLTLLGNQQTEYSMDYNPSVLEAFQNKHPENDYFVKFNCPEFTSLCPITGQPDFATITISYVPDERLVESKSLKLYLFSFRNHGDFHEDVINIIMKDLVKLLEPKYIEVWGKFLPRGGLSIDPYCNYGKPGTDWDQVAWNRMSNHDMFPERVDNR

SEQ ID NO: 45767 - protein, 160 aa, Dorea longicatena
  REGION 1..160: note = tr|A0A3E5GE63|A0A3E5GE63_9FIRM NADPH-dependent 7-cyano-7-deazaguanine reductase OS=Dorea longicatena; OX = 88431 GN=queF PE=3 SV=1
MREKENLTLLGNQQTEYSMDYNPSVLEAFQNKHPENDYFVKFNCPEFTSLCPITGQPDFATITISYVPDERLVESKSLKLYLFSFRNHGDFHEDVINIIMKDLVKLLEPKYIEVWGKFLPRGGLSIDPYCNYGKPGTDWEQVAWNRMSNHDMFPERVDNR

SEQ ID NO: 45768 - protein, 156 aa, Dorea sp.
  REGION 1..156: note = tr|R9N8Q3|R9N8Q3_9FIRM NADPH-dependent 7-cyano-7-deazaguanine reductase OS=Dorea sp. 5-2; OX = 1235798 GN=queF PE=3 SV=1
MSELHALGKQTKYQMDYAPEVLESFENKHMDNDYFVKFNCPEFTSLCPITGQPDFATIYISYVPDRKMVESKSLKLYLFSYRNHGDFHEDCCNKIMKDLINLMEPKYIEVWGKFLPRGGISIDPYCNYGKKGTKWEEMAYDRLAHHDMYPEKVDNR

SEQ ID NO: 45769 - protein, 156 aa, unidentified
  source 1..156: note = Draconibacterium sediminis
  REGION 1..156: note = tr|A0A0D8JBX0|A0A0D8JBX0_9BACT NADPH-dependent 7-cyano-7-deazaguanine reductase OS=Draconibacterium sediminis OX=1544798 GN=queF PE=3 SV=1
MSELKHLGNETNYDFNYRPDVLESFDNKHPENDYWVKFNCPEFTSLCPITGQPDFATIYLSYIPDEKLVESKSLKLYLFSFRNHGAFHEDCINIIMKDLIALMNPKYIEVWGKFLPRGGLSIDPFSNYGKPGTKYEEMAWFRMQNHDLNPEKIDNR

SEQ ID NO: 45770 - protein, 277 aa, unidentified
  source 1..277: note = Duganella phyllosphaerae
  REGION 1..277: note = tr|A0A1E7WGG6|A0A1E7WGG6_9BURK NADPH-dependent 7-cyano-7-deazaguanine reductase OS=Duganella phyllosphaerae OX=762836 GN=queF PE=3 SV=1
MTNTVDLSPLGKTSAYRTDYAPELLFPIPRQGKRDELGLSGTLPFFGVDIWNAYEISWLNSRGKPQVAIARITVPADSPNIIESKSFKLYLNSFNQTRLDSVDALQALLQQDLSKAVGASIHIVLTQPDGFSKIAMGELDGLLLDRLDIEIDHYSPAPELLKAALDEEPVEEKLVSHLLKSNCLVTGQPDWASVQIHYSGPQIDQESLLKYLIGFREHNEFHEQCVERIFVDILRECAPQQLAVYARYTRRGGLDINPWRSNFSTGRNPPNLRGARQ

SEQ ID NO: 45771 - protein, 277 aa, unidentified
  source 1..277: note = Duganella sacchari
  REGION 1..277: note = tr|A0A1M7QVN0|A0A1M7QVN0_9BURK NADPH-dependent 7-cyano-7-deazaguanine reductase OS=Duganella sacchari; OX = 551987 GN=queF PE=3 SV=1
MTNTADQSPLGKTSAYRTDYAPELLFPIPRQGKRDELGLSGTLPFFGVDIWNAYEISWLNQRGKPQVAIARITFPADSPNIIESKSFKLYLNSFNQTRLDSVAALKALLQQDLSAAAGGNVHIILTQPEEFGMVEMGELDGLLLDRLDIDVDHYSPSPEILKAALDEEPVEEKLVSHLLKSNCLVTGQPDWASVQIHYAGPQIDQESLLRYLIGFREHNEFHEQCVERIFVDILRQCQPQQLAVYARYTRRGGLDINPWRSNFSTAQKPLNLRGARQ

SEQ ID NO: 45772 - protein, 277 aa, Duganella sp.
  REGION 1..277: note = tr|A0A0Q5DYB8|A0A0Q5DYB8_9BURK NADPH-dependent 7-cyano-7-deazaguanine reductase OS=Duganella sp. Leaf126; OX = 1736266 GN=queF PE=3 SV=1
MTNTADLSPLGKTSAYRTDYAPELLFPIPRQGKRDELGLSGTLPFFGVDIWNAYEISWLNHRGKPQVAIARVTVPADSPNIIESKSFKLYLNSFNQTRLDSVEALRALLQQDLSAAVGASVHLVLTQPDGFGAIAMGELDGLLLDRLDIEIDDYRPAPELLKAALDEEPVEEQLVSHLLKSNCLVTGQPDWASVQIHYSGPQIDQESLLRYLVGFREHNEFHEQCVERIFVDILRQCAPQQLAVYARYTRRGGLDINPWRSNFSTGRQPPNLRGARQ

SEQ ID NO: 45773 - protein, 277 aa, Duganella sp.
  REGION 1..277: note = tr|A0A0Q7VRS3|A0A0Q7VRS3_9BURK NADPH-dependent 7-cyano-7-deazaguanine reductase OS=Duganella sp. Root1480D1 OX=1736471 GN=queF PE=3 SV=1
MPNLPEQSPLGKTSAYRTDYAPELLFPIPRQAKRDELGLQGTLPFFGVDIWNGYELSWLNMRGKPQVAVARFTIPADSPNLIESKSFKLYLNSFNQTRLTGPDALKILLQQDLSAAAGASVHVTLTMQEDFEKLGMGELEGQLLDRLDIDVDNYSPQPETLKANFDELPVEETLVSHLLKSNCLVTGQPDWGSVQISYYGPQIDQESLLKYLIGFREHNEFHEQCIERIFTDILRQCKPQHLTVYARYTRRGGLDINPWRTNFSSARRPSNLRNARQ

SEQ ID NO: 45774 - protein, 156 aa, unidentified
  source 1..156: note = Duncaniella muris
  REGION 1..156: note = tr|A0A2V1IMC5|A0A2V1IMC5_9BACT NADPH-dependent 7-cyano-7-deazaguanine reductase OS=Duncaniella muris; OX = 2094150 GN=queF PE=3 SV=1
MRSEQELDGVSLLGNTGVKYPTQYAPEVLETFVNKHPDNEYLVTFTCPEFTSLCPKTGQPDFAKIIISYIPREKMVESKSLKLYLFSFRNHGDFHEDCVNIIMKDLIALMDPRYIEVKGIFTPRGGIAILPFANHGDSEHQEMARRRMLDSFPSDF

SEQ ID NO: 45775 - protein, 155 aa, unidentified
  source 1..155: note = Duncaniella sp.
  REGION 1..155: note = tr|A0A4Z0V341|A0A4Z0V341_9BACT NADPH-dependent 7-cyano-7-deazaguanine reductase OS=Duncaniella sp. TLL-A3; OX = 2530391 GN=queF PE=3 SV=1
MRTSNELDGVTLLGDTHVKYPDQYTPEVLEAFVNKHPGNEYLVTFTCPEFTSLCPKTGQPDFAKILISYIPRERMVESKSLKLYLFSFRNHGDFHEDCVNIIMKDLIRLMDPKYIEVKGIFTPRGGIAIHPFANWGDDEHQGLVKSRLLASFPNE

SEQ ID NO: 45776 - protein, 156 aa, unidentified
  source 1..156: note = Duncaniella sp.
  REGION 1..156: note = tr|A0A4P7VY35|A0A4P7VY35_9BACT NADPH-dependent 7-cyano-7-deazaguanine reductase OS=Duncaniella sp. C9; OX = 2530392 GN=queF PE=3 SV=1
MRSEQELDGVSLLGNTGVKYPTQYAPEVLETFVNKHPDNEYLVTFTCPEFTSLCPKTGQPDFAKIIISYIPREKMVESKSLKLYLFSFRNHGDFHEDCVNIIMKDLIALMDPRYIEVKGIFTPRGGIAILPFANHGDSEHQEMARRRMLDSFPSDL

SEQ ID NO: 45777 - protein, 274 aa, Dyella japonica
  REGION 1..274: note = tr|A0A075JWY0|A0A075JWY0_9GAMM NADPH-dependent 7-cyano-7-deazaguanine reductase OS=Dyella japonica A8; OX = 1217721 GN=queF PE=3 SV=1
MSTPEHSPLGKTTAYADRYDPSLLFPIPRQAKRDEIGVAAPLPFHGEDVWNAYELSWLDARGKPVVALAEFRVPATSPNIIESKSFKLYLNGFSQERMADRGALVATLARDLSAAAGAPVDVLLSDPQAQGHAVIDLDGTLVDELPVDIDDYGPPRADYLAVDDAKPVVEQTLVSNLLRSNCPVTGQPDWGSVQIRYRGAPIDPAGLLRYLVSFRNHNEFHEQCVERIFVDVMQRCRPEQLSVYARYTRRGGLDINPYRSTGLERPGNPRGARQ

SEQ ID NO: 45778 - protein, 274 aa, Dyella japonica
  REGION 1..274: note = tr|A0A0G9H3H0|A0A0G9H3H0_9GAMM NADPH-dependent 7-cyano-7-deazaguanine reductase OS=Dyella japonica DSM 16301 OX=1440762 GN=queF PE=3 SV=1
MSTPEHSPLGKTTVYADRYDPALLFPIPRQAKRDEIGVAEPLPFHGEDVWNAYELSWLDMRGKPVVALAEFRVPASSPNIIESKSFKLYLNGFSQERMAGGDALAAILVRDLSAAAGAPVEVTLSHAQARGHAVTDLPGTLVDELAIEIDDYGPPRADYLMTNEHAPVVEESLVSNLLRSNCPVTGQPDWGSVQIHYRGAPIDHAGLLRYLVSFRNHNEFHEQCVERIFVDVMERCRPQHLSVYARYTRRGGLDINPYRSTGSERPGNPRGARQ

SEQ ID NO: 45779 - protein, 274 aa, unidentified
  source 1..274: note = Dyella jiangningensis
  REGION 1..274: note = tr|A0A023NYT1|A0A023NYT1_9GAMM NADPH-dependent 7-cyano-7-deazaguanine reductase OS=Dyella jiangningensis; OX = 1379159 GN=queF PE=3 SV=1
MSTPEHSPLGKTTVYADRYDPALLFPIPRSAKREEIGVAEPLPFHGIDIWNAYELSWLDARGKPVAALAEFRVPAESPNIIESKSFKLYLNGFSQERVASTDALLATLLRDLSAAAGAPVQVLLTEPRAKGHATTDLAGESIDDLDVEISDYGPPRADYLTADAASSTVEETLVSDLLRSNCPVTGQPDWGSVQIRYRGAPIDREGLLRYLVSFRNHNEFHEQCVERIFVDVMARCRPEQLSVYARYTRRGGLDINPYRSTGTDTPDNPRGARQ

SEQ ID NO: 45780 - protein, 274 aa, unidentified
  source 1..274: note = Dyella jiangningensis
  REGION 1..274: note = tr|A0A328P5H1|A0A328P5H1_9GAMM NADPH-dependent 7-cyano-7-deazaguanine reductase OS=Dyella jiangningensis; OX = 1379159 GN=queF PE=3 SV=1
MSTPEHSPLGKTTVYADRYDPALLFPIPRSAKRDEIGVTQPLPFHGIDIWNAYELSWLDARGKPVAALAEFRIPAESPNIIESKSFKLYLNGFSQERMASTDALLAALLRDLSAAAGAPVQVLLTEPRAKGHATTDLAGESIDGQDLEISDYGPPRADYLKADAALAVLEETLVSDLLRSNCPVTGQPDWGSVQIRYRGAPIDREGLLRYLVSFRNHNEFHEQCVERIFVDVMARCRPEQLSVYARYTRRGGLDINPYRSTGTETPDNPRGARQ

SEQ ID NO: 45781 - protein, 273 aa, Dyella marensis
  REGION 1..273: note = tr|A0A1I2HE22|A0A1I2HE22_9GAMM NADPH-dependent 7-cyano-7-deazaguanine reductase OS=Dyella marensis; OX = 500610 GN=queF PE=3 SV=1
MSTPEHSPLGKTTVYADRYDPSLLFPIPRQSKRDEIGVSAPLPFHGVDIWNAYELSWLDARGKPRVALAEFRVPAGSPNIIESKSFKLYLNGFAQERIDDVQALAATLRRDLSAAAGAEVGVQLSEPSARAHAVVDLDGISIDTLDVAIDDYGPPKAAYLCADVDEVIEETLVSDLLRSNCPVTGQPDWGSVQIRYRGPRIEREGLLRYLVSFRNHNEFHEQCVERIFVDVTRHCAPLQLSVYARYTRRGGLDINPFRASAEAVPGNPRGARQ

SEQ ID NO: 45782 - protein, 275 aa, Dyella soli
  REGION 1..275: note = tr|A0A4R0YGX1|A0A4R0YGX1_9GAMM NADPH-dependent 7-cyano-7-deazaguanine reductase OS=Dyella soli OX=522319; GN = queF PE=3 SV=1
MSTPEHSPLGKTTVYADRYDPSLLFPIPRTAKREEIGVGDNLPFHGVDVWNAYELSWLDARGKPRVALAEFRVPATSPNIIESKSFKLYLNGFSQERIADERTLADTLTRDLSAAAGAPIEVVLSGPDADGRVFTDLAGESIDGLDVAIDDYGPPKASHLALAAEADVVDEALVSNLLRSNCPVTGQPDWGSVQIRYRGPRMDRAGLLRYLVSFRNHNEFHEQCAERIFVDVMAQCAPVYLSVYARYTRRGGLDINPFRSTDATDAPGNPRGTRQ

SEQ ID NO: 45783 - protein, 274 aa, Dyella soli
  REGION 1..274: note = tr|A0A4R0YJS9|A0A4R0YJS9_9GAMM NADPH-dependent 7-cyano-7-deazaguanine reductase OS=Dyella soli OX=522319; GN = queF PE=3 SV=1
MSTPEHSPLGKTTAYADRYDPGLLFPIPRSGKREEIGVSEPLPFHGADIWNAYELSWLDARGKPVVALAEFRVPAGSPNIIESKSFKLYLNGFSQERMRDADVLAATLARDLSAAAGAPVEVILSEASARGHAFRDLEGELIDHQALDIDDYGPPRADYLAADAGAPAVEQTLVSNLLRSNCPVTGQPDWGSVQIRYRGAPIDPAGLLRYLVSFRNHNEFHEQCVERIFVDVMQRCRPVQLSVYARYTRRGGLDINPYRSTGMELPGNPRGARQ

SEQ ID NO: 45784 - protein, 274 aa, Dyella sp.
  REGION 1..274: note = tr|A0A370X034|A0A370X034_9GAMM NADPH-dependent 7-cyano-7-deazaguanine reductase OS=Dyella sp. 4MSK11; OX = 1927960 GN=queF PE=3 SV=1
MSTPEHSPLGKHTAYADRYDPSLLFPIPRQAKRDEIGVSEPLPFQGVDIWNAYELSWLDMHGKPVAAVAEFHVPAHSPNIIESKSFKLYLNGFAQEPLANAAALSALLQHDLSRAAGAPVMVHIHAPRTAQHSFADLAGESIDGLPVKIDDYGPPKADYLRTDKNADVVEETLVSDLLRSNCPVTGQPDWGSVQIAYRGSPIDREGLLRYLVSFRTHNEFHEQCVERIFVDVMARCAPERLSVYARYTRRGGLDINPFRSTEKTQPENLRGARQ

SEQ ID NO: 45785 - protein, 285 aa, Dyella sp.
  REGION 1..285: note = tr|A0A1G7W9S0|A0A1G7W9S0_9GAMM NADPH-dependent 7-cyano-7-deazaguanine reductase OS=Dyella sp. 333MFSha; OX = 1798240 GN=queF PE=3 SV=1
MAAFTAAVAAMSSPEHSPLGKSTVYADRYDAGLLFPIPRQGKRDEIGVAEAALPFHGVDVWNGYELSWLDKRGKPHVAVAEFRFPATTPNIVESKSFKLYLNSFAQERVADAATLRQTLVRDLSAAAGGPVGIVLHAPGELDGTPISEPEGLLLDTQELDFDSYGPPRADFLVTNDGDAREVLVSHLLRSNCPVTGQPDWGSVQIAYTGKPIDRAGLLRYLVSFRNHTEFHEQCVERIFMDVTARCAPRELSVYARYTRRGGLDINPFRSTDPAAVPANPRGARQ

SEQ ID NO: 45786 - protein, 273 aa, Dyella thiooxydans
  REGION 1..273: note = tr|A0A160N434|A0A160N434_9GAMM NADPH-dependent 7-cyano-7-deazaguanine reductase OS=Dyella thiooxydans; OX = 445710 GN=queF PE=3 SV=1
MNTPEDSQLGKTTVYADRYDPTLLYPIARAAKRAEIGVTGPLPFHGVDIWNAYEFSWLDARGKPMVAIVEIRVPATSPNIIESKSLKLYLNGFSQERMPDAPHLIGVLERDLSAAAGATVKVELSLPAAIVHTIRDLEGEYIDDQPLEIDDYGPPKADCLRVAGTDVVEEELVSDLLRSNCPVTGQPDWGTVQIRYRGRPIDREGLLRYLISFRTHNEFHEQCVERIYVDLMARCAPDTLSVYARYTRRGGLDINPFRSSSEQVPVNLRGARQ

SEQ ID NO: 45787 - protein, 162 aa, unidentified
  source 1..162: note = Dysgonamonadaceae bacterium
  REGION 1..162: note = tr|A0A2N4S773|A0A2N4S773_9BACT NADPH-dependent 7-cyano-7-deazaguanine reductase OS=Dysgonamonadaceae bacterium OX=2065189 GN=queF PE=3 SV=1
MESKSDHLEGLSHLGHKTEYKTDYAPEMLETFVNKHLENDYWVTFNCPEFTSLCPITGQPDFATIRIDYIPDVKMVESKSLKLYLFSFRNHGAFHEDCVNIIMKDLIRLMEPKYIEVTGIFTPRGGISIYPYANYGKKGTKYEQLAETRLFNHSFPLSSSIR

SEQ ID NO: 45788 - protein, 160 aa, unidentified
  source 1..160: note = Dysgonomonas alginatilytica
  REGION 1..160: note = tr|A0A2V3PTR4|A0A2V3PTR4_9BACT NADPH-dependent 7-cyano-7-deazaguanine reductase OS=Dysgonomonas alginatilytica OX=1605892 GN=queF PE=3 SV=1
MQQDKQLENLSLLGGKTEYKDNYAPEVLEAFTNKHPENDYWVAFNCPEFTSLCPITGQPDFATIHINYIPEINMVESKSLKLYLFSFRNHGAFHEDCMNIIMKDLIKLMDPRYIEVIGVFTPRGGISIYPYANYGRLGTQYEQMAKTRLWDRNPQQEYTR

SEQ ID NO: 45789 - protein, 159 aa, Dysgonomonas capnocytophagoides
  REGION 1..159: note = tr|A0A4Y8L1I7|A0A4Y8L1I7_9BACT NADPH-dependent 7-cyano-7-deazaguanine reductase OS=Dysgonomonas capnocytophagoides OX=45254 GN=queF PE=3 SV=1
MSTNHIEGLSHLGGKTEYKDDYAPEVLEAFDNKHPGNDYWVAFNCPEFTSLCPITGQPDFATIHINYLPDIKMVESKALKLYLFSFRNHGAFHEDCVNIIMKDLIKLMDPRYIEVIGVFTPRGGISIYPYCNYGRPGTEYEQMAKTRLLNRNPQQGYKG

SEQ ID NO: 45790 - protein, 155 aa, Dysgonomonas gadei
  REGION 1..155: note = tr|F5IZ45|F5IZ45_9BACT NADPH-dependent 7-cyano-7-deazaguanine reductase OS=Dysgonomonas gadei ATCC BAA-286 OX=742766 GN=queF PE=3 SV=1
MGIEGLSHLGAKTEYKDDYAPEVLEAFENKHQGNDYWVTFNCPEFTSLCPITGQPDFATIHINYIPDVKMVESKSLKLYMFSFRNHGAFHEDCVNIIMKDLVNLMNPKYIEVVGIFTPRGGISIYPFCNYGRPGTKYEMAAKERLLKHNPQQIYR

SEQ ID NO: 45791 - protein, 157 aa, unidentified
  source 1..157: note = Dysgonomonas macrotermitis
  REGION 1..157: note = tr|A0A1M4Y959|A0A1M4Y959_9BACT NADPH-dependent 7-cyano-7-deazaguanine reductase OS=Dysgonomonas macrotermitis OX=1346286 GN=queF PE=3 SV=1
MSNEHIDGLSHLGGKTEYKDNYAPEVLEAFDNKHPENDYWVVFNCPEFTSLCPITGQPDFATIHINYLPDIKMVESKALKLYLFSFRNHGAFHEDCVNIIMKDLIKLMNPRYIEVIGVFTPRGGISIYPYCNYGRPGTEYEQMARTRLLHRNPQQGY

SEQ ID NO: 45792 - protein, 155 aa, Dysgonomonas mossii
  REGION 1..155: note = tr|F8X4P7|F8X4P7_9BACT NADPH-dependent 7-cyano-7-deazaguanine reductase OS=Dysgonomonas mossii DSM 22836 OX=742767 GN=queF PE=3 SV=1
MTIEGLSHLGAKTEYKDNYAPEVLEAFENKHQDNDYWVTFNCPEFTSLCPITGQPDFATIHINYIPDVKMVESKSLKLYLFSFRNHGAFHEDCVNIMMKDLIKLMNPKYIEVVGIFTPRGGISIYPFCNYGRPGTKFERLAEERLINHNAQQIYK

SEQ ID NO: 45793 - protein, 155 aa, Dysgonomonas mossii
  REGION 1..155: note = tr|A0A4Y9IQF8|A0A4Y9IQF8_9BACT NADPH-dependent 7-cyano-7-deazaguanine reductase OS=Dysgonomonas mossii; OX = 163665 GN=queF PE=3 SV=1
MTIEGLSHLGGKTEYKDNYAPDVLEAFENKHQGNDYWVTFNCPEFTSLCPITGQPDFATIHINYIPDVKMVESKSLKLYLFSFRNHGAFHEDCVNIMMKDLIELMNPKYIEVVGIFTPRGGISIYPFCNYGRPGTKFERLAEERLINHNPQQIYK

SEQ ID NO: 45794 - protein, 155 aa, Dysgonomonas sp.; identical to SEQ ID NO: 45793
  REGION 1..155: note = tr|A0A1M3L744|A0A1M3L744_9BACT NADPH-dependent 7-cyano-7-deazaguanine reductase OS=Dysgonomonas sp. 37-18; OX = 1895907 GN=queF PE=3 SV=1

SEQ ID NO: 45795 - protein, 157 aa, Dysgonomonas sp.
  REGION 1..157: note = tr|A0A3D3TFM4|A0A3D3TFM4_9BACT NADPH-dependent 7-cyano-7-deazaguanine reductase OS=Dysgonomonas sp.; OX = 1891233 GN=queF PE=3 SV=1
MNNQTEDLSLLGGKTEYKDNYAPEVLEAFTNKHPENDYWVAFNCPEFTSLCPITGQPDFATIHINYLPDIKMVESKSLKLYLFSFRNHGAFHEDCVNIIMKDLIRLMDPRYIEIIGVFTPRGGISIYPYCNYGRPGTDYEQMAKTRLLNKNPQEGYK

SEQ ID NO: 45796 - protein, 134 aa, Ectothiorhodosinus mongolicus
  REGION 1..134: note = tr|A0A1R3W5Q7|A0A1R3W5Q7_9GAMM NADPH-dependent 7-cyano-7-deazaguanine reductase OS=Ectothiorhodosinus mongolicus OX=233100 GN=queF PE=3 SV=1
MSTEPSRQLETFPNPNAERDYIIRMRLPEFTCLCPKTGQPDFAELHLEYVPDQLCVELKSLKLYIWSFREEGGFHEAMTNRILDDLVAATNPRFMRLTADWNVRGGIYTIVTVEHRQPDWQPADPAITESKVRV

SEQ ID NO: 45797 - protein, 129 aa, Ectothiorhodospira haloalkaliphila
  REGION 1..129: note = tr|W8KVI1|W8KVI1_9GAMM NADPH-dependent 7-cyano-7-deazaguanine reductase OS=Ectothiorhodospira haloalkaliphila OX=421628 GN=queF PE=3 SV=1
MTTQPSKQLETFENPNKARDYTIRIQVPEFTCLCPKTGQPDFAELRLEYVPDERCVELKSLKLYVWSFRDEGAFHEAVTNRILEDLVKATAPRFMRLTAEFNVRGGVYTTVVVEHRDPQWVAPEEVKLP

SEQ ID NO: 45798 - protein, 129 aa, Ectothiorhodospira magna
  REGION 1..129: note = tr|A0A1H9DG41|A0A1H9DG41_9GAMM NADPH-dependent 7-cyano-7-deazaguanine reductase OS=Ectothiorhodospira magna OX=867345 GN=queF PE=3 SV=1
MSSQPSKHLETFENPQKDRDYTIRIRIPEFTCLCPKTGQPDFAQLQLEYVPDGQCVELKSLKMYVWSFRDEGAFHEAVTNRILGDLVAATAPRFMRLTAEFNVRGGVYTTVTAEHRAPDWQPPQEVKLP

SEQ ID NO: 45799 - protein, 149 aa, Ectothiorhodospira marina
  REGION 1..149: note = tr|A0A1H7FHK2|A0A1H7FHK2_9GAMM NADPH-dependent 7-cyano-7-deazaguanine reductase OS=Ectothiorhodospira marina OX=1396821 GN=queF PE=3 SV=1
MNPRFSRWRPARRDQTGLILMTTQPSKQLETFENPNKARDYTIRIQVPEFTCLCPKTGQPDFAELRLEYVPDERCVELKSLKLYVWSFRDEGAFHEAVTNRILEDLVKATAPRFMRLTAEFNVRGGVYTTVVVEHRDPQWVAPEEVKLP

SEQ ID NO: 45800 - protein, 129 aa, Ectothiorhodospira mobilis
  REGION 1..129: note = tr|A0A1I4SS56|A0A1I4SS56_ECTMO NADPH-dependent 7-cyano-7-deazaguanine reductase OS=Ectothiorhodospira mobilis OX=195064 GN=queF PE=3 SV=1
MSTQPSKNLDTFENPNRARDYTIRIRIPEFTCLCPKTGQPDFAELLLEYVPDARCVELKSLKTYIWSFREEGGFHEAMTNRILGDLVAATAPRFMRLTAEFNVRGGIYTTVVAEHRDPAWEAPRPVSLP

SEQ ID NO: 45801 - protein, 129 aa, Ectothiorhodospira sp.
  REGION 1..129: note = tr|H1G2V0|H1G2V0_9GAMM NADPH-dependent 7-cyano-7-deazaguanine reductase OS=Ectothiorhodospira sp. PHS-1 OX=519989 GN=queF PE=3 SV=1
MSSQPSKTLETFENPKKDRDYTIRIRVPEFTCLCPKTGQPDFAELRLEYVPDERCVELKSLKMYVWSFRDEGAFHEAVTNRILGDLVAATAPRFMRLTAEFNVRGGVYTTVTAEHRAPDWQPPLEVKLP

SEQ ID NO: 45802 - protein, 129 aa, Ectothiorhodospira sp.
  REGION 1..129: note = tr|A0A167BIJ2|A0A167BIJ2_9GAMM NADPH-dependent 7-cyano-7-deazaguanine reductase OS=Ectothiorhodospira sp. BSL-9 OX=1442136 GN=queF PE=3 SV=1
MTTQPSKQLETFENPNKARDYTIRIQVPEFTCLCPKTGQPDFAELRLEYVPDERCVELKSLKLYVWSFRDEGAFHEAVTNRILEDLVKATQPRFMRLTAEFNVRGGVYTTVVVEHRDPQWVAPEEVKLP

SEQ ID NO: 45803 - protein, 129 aa, unidentified
  source 1..129: note = Ectothiorhodospiraceae bacterium
  REGION 1..129: note = tr|A0A2A4XAQ1|A0A2A4XAQ1_9GAMM NADPH-dependent 7-cyano-7-deazaguanine reductase OS=Ectothiorhodospiraceae bacterium OX=2026737 GN=queF PE=3 SV=1
  VARIANT 43: note = Xaa can be any naturally occurring amino acid
MTTQPSKDLETFDNPHPERDYTIRMDIPEFTCLCPKTGQPDFXTFTLEYVADKACIELKSLKMYMWSFRNEGAFHEAVTNQILSDMVKACSPRFMRLTGEFNVRGGIYTSVIIEHRAEGWQPAERVELP

SEQ ID NO: 45804 - protein, 119 aa, unidentified
  source 1..119: note = Ectothiorhodospiraceae bacterium
  REGION 1..119: note = tr|A0A2E0UMT5|A0A2E0UMT5_9GAMM NADPH-dependent 7-cyano-7-deazaguanine reductase OS=Ectothiorhodospiraceae bacterium OX=2026737 GN=queF PE=3 SV=1
MPNIETFNNPYPQRDYEITHVNPEFTSVCPKTGLPDFATITVYYIPDKTCIELKSLKYYYLEFRNKGIFFESSINEILDDLVAVCNPRFMRVTGEFNTRGGIHSTVKAEFRKEESASGS

SEQ ID NO: 45805 - protein, 166 aa, unidentified
  source 1..166: note = Edaphobacillus lindanitolerans
  REGION 1..166: note = tr|A0A1U7PLS9|A0A1U7PLS9_9BACI NADPH-dependent 7-cyano-7-deazaguanine reductase OS=Edaphobacillus lindanitolerans OX=550447 GN=queF PE=3 SV=1
MPGRNKEEGLKDLTLLGNQNVPYAFEYAPEVLEAVDNLHSSRDYFVKFNCPEFTSLCPITNQPDFATMYISYIPDKKLVESKSLKLYLFSFRNHGDFHEDCVNIIMNDLIDLLDPRYIEVWGKFTPRGGISIDPWCNWGRPGTRYEEIAEYRLMNHDLNPETIDNR

SEQ ID NO: 45806 - protein, 139 aa, Edaphobacter aggregans
  REGION 1..139: note = tr|A0A428MQQ8|A0A428MQQ8_9BACT NADPH-dependent 7-cyano-7-deazaguanine reductase OS=Edaphobacter aggregans; OX = 570835 GN=queF PE=3 SV=1
MTIKTTGYTDDHAKAGLDTTFPAIETWQNQFKAYEILVDDPEFTSVCPKTGLPDFGRLTIRYMPRERCMELKSLKEYLFVYRNLGIFQENIVNQVLDDVVKATDPVWAKVVGDFRPRGGISTIVEAFYPRPKDSKGPRP

SEQ ID NO: 45807 - protein, 139 aa, unidentified
  source 1..139: note = Edaphobacter dinghuensis
  REGION 1..139: note = tr|A0A495BSL0|A0A495BSL0_9BACT NADPH-dependent 7-cyano-7-deazaguanine reductase OS=Edaphobacter dinghuensis OX=1560005 GN=queF PE=3 SV=1
MTTKKTTGYTDHAASGLDIKFPAIETWQNQFKAYEILVDDPEFTSVCPKTGLPDFGRITIRYMPRKSCLELKSLKEYLFTYRNLGIFQENIVNQVLDDVVKACNPVWAKVVGDFRPRGGISTVVEAFHPRPEKSKGPWK

SEQ ID NO: 45808 - protein, 143 aa, Edaphobacter modestus
  REGION 1..143: note = tr|A0A4Q7YPV5|A0A4Q7YPV5_9BACT NADPH-dependent 7-cyano-7-deazaguanine reductase OS=Edaphobacter modestus; OX = 388466 GN=queF PE=3 SV=1
MSKKQKTKTTGYTDDHAAAGLDTKFPEIETWPNQFKAYEILIDDPEFTSVCPKTGLPDFGRLTIRYMPREKCMELKSLKEYLFTYRNLGIFQENIVNQVLDDVIKATNPIWAKVVGDFRPRGGISTIVEVFYPRPKDSKGPRG

SEQ ID NO: 45809 - protein, 281 aa, unidentified
  source 1..281: note = Edwardsiella anguillarum
  REGION 1..281: note = tr|A0A076LQS8|A0A076LQS8_9GAMM NADPH-dependent 7-cyano-7-deazaguanine reductase OS=Edwardsiella anguillarum ET080813 OX=667120 GN=queF PE=3 SV=1
MSYQENPALTSLTLGKATEYRDQYDASLLQAVPRSMNREPLGLYPDALPFHGADIWTLYELSWLNANGLPQVALAEVALDAYGANLIESKSFKLYLNSFNQTRFADWDTVQRTLQHDLAHCAQGGVSVTLLRLSQVEGQPIAALPGECIDDQPISIDSYSFDATLLENAADPTRQVDETLVSHLLKSNCLITHQPDWGSVMIRYRGAAISREALLRYLVSFRHHNEFHEQCVERIFNDIQRFCQPEALSVYARYTRRGGLDINPWRSNVPFQPPCGRLARQ

SEQ ID NO: 45810 - protein, 281 aa, Edwardsiella hoshinae
  REGION 1..281: note = tr|A0A376DJY0|A0A376DJY0_9GAMM NADPH-dependent 7-cyano-7-deazaguanine reductase OS=Edwardsiella hoshinae; OX = 93378 GN=queF PE=3 SV=1
MSYQENPALSALTLGKATEYRDQYDASLLQAVPRSMNREPLGLYPASLPFHGADIWTLYELSWLNANGLPQVALAEVELDAYSANLIESKSFKLYLNSFNQTRFADWESVQRTLQRDLAHCAQGGVHVTLLRLTQVEGQAIASLPGVCIDDQPITIDNYSFTASLLENAADPARQVEETLVSHLLKSNCLITHQPDWGSVMIRYRGGAIDRAALLRYLVSFRHHNEFHEQCVERIFNDIQRFCQPQALTVYARYTRRGGLDINPWRSNVPFQPPRGRLARQ

SEQ ID NO: 45811 - protein, 281 aa, Edwardsiella ictaluri
  REGION 1..281: note = tr|C5BHA7|C5BHA7_EDWI9 NADPH-dependent 7-cyano-7-deazaguanine reductase OS=Edwardsiella ictaluri (strain 93-146) OX=634503 GN=queF PE=3 SV=1
MSYQENPALTSLTLGKATEYRDQYDASLLQAVPRSMNREPLGLYPNALPFHGADIWTLYELSWLNANGLPQVALAEVVLDAYGANLIESKSFKLYLNSFNQTRFADWDTVQHTLQRDLTHCAQGSVSVTLLRLSQAEGQPIAALPGECIDDQPISIDSYCFDATLLENAADPTRQVEETLVSHLLKSNCLITHQPDWGSVMIRYRGAAISHEALLRYLVSFRHHNEFHEQCVERIFNDIQRFCRPEALSVYARYTRRGGLDINPWRSNVPYQPPRGRLARQ

SEQ ID NO: 45812 - protein, 281 aa, unidentified
  source 1..281: note = Edwardsiella piscicida
  REGION 1..281: note = tr|A0A411H0G3|A0A411H0G3_9GAMM NADPH-dependent 7-cyano-7-deazaguanine reductase OS=Edwardsiella piscicida; OX = 1263550 GN=queF PE=3 SV=1
MSYQENPALTSLTLGKATEYRDQYDASLLQAVPRSMNREPLGLYPDALPFHGADIWTLYELSWLNANGLPQVALAEVALDAYGANLIESKSFKLYLNSFNQTRFADWETVQRTLQRDLAHCAQGGVSVTLLRLSQVEGQPIAALPGECIDDQPIRIDSYCFDATLLENAADPARQVEETLVSHLLKSNCLITHQPDWGSVMIRYRGAAISREALLRYLVSFRHHNEFHEQCVERIFNDIQRFCRPEALSVYARYTRRGGLDINPWRSNIPFQPPRGRLARQ

SEQ ID NO: 45813 - protein, 281 aa, unidentified; identical to SEQ ID NO: 45809
  source 1..281: note = Edwardsiella piscicida
  REGION 1..281: note = tr|A0A034T1X6|A0A034T1X6_9GAMM NADPH-dependent 7-cyano-7-deazaguanine reductase OS=Edwardsiella piscicida; OX = 1263550 GN=queF PE=3 SV=1

SEQ ID NO: 45814 - protein, 281 aa, Edwardsiella tarda
  REGION 1..281: note = tr|A0A2A7U5F2|A0A2A7U5F2_EDWTA NADPH-dependent 7-cyano-7-deazaguanine reductase OS=Edwardsiella tarda; OX = 636 GN=queF PE=3 SV=1
MSYQENPALSALTLGKATEYRDQYDATLLQAVPRSMNREPLGLYPDALPFHGADIWTLYELSWLNANGLPQVALAEVELDAYSANLIESKSFKLYLNSFNQTRFADWQSVQRTLQHDLAHCAQGGVQVTLQRLDQVEGQPIAGLPGVCIDDQPITIDHYCFDASLLANAADPARQVDETLVSHLLKSNCLITHQPDWGSLMIRYRGGAIDREALLRYLVSFRHHNEFHEQCVERIFNDIQRFCQPQALTVYARYTRRGGLDINPWRSNVPFQPPRGRLARQ

SEQ ID NO: 45815 - protein, 281 aa, Edwardsiella tarda; identical to SEQ ID NO: 45812
  REGION 1..281: note = tr|A0A0H3DN13|A0A0H3DN13_EDWTF NADPH-dependent 7-cyano-7-deazaguanine reductase OS=Edwardsiella tarda (strain FL6-60) OX=718251 GN=queF PE=3 SV=1

SEQ ID NO: 45816 - protein, 120 aa, unidentified
  source 1..120: note = Effusibacillus lacus
  REGION 1..120: note = tr|A0A292YKG8|A0A292YKG8_9BACL NADPH-dependent 7-cyano-7-deazaguanine reductase OS=Effusibacillus lacus; OX = 1348429 GN=queF PE=3 SV=1
MSTRPSKELEIVPNPHPDRDYLVEIESPEFTALCPKTGQPDFATITIKYIPGPSIVELKSLKLYLWSFRDEGHFHEDVTNVILNDLVKALEPRYMQVIGKFNVRGGIYTTVTAEHGKKTV

SEQ ID NO: 45817 - protein, 154 aa, Eggerthella sp.
  REGION 1..154: note = tr|R7B4N5|R7B4N5_9ACTN NADPH-dependent 7-cyano-7-deazaguanine reductase OS=Eggerthella sp. CAG:298 OX=1262876 GN=queF PE=3 SV=1
MTKTREDEGLELLGNQQVSYPTDYAPEMLETFQNKHPENDYWVRFNCPEFTSLCPITSQPDFATIYINYVPDERMVESKSLKLYLFSFRNHGDFHEDCVNTIMKDLIELMDPKYIEVWGEFTPRGGISIHPYANYGRPNTRWEEVAWIRLSMHE

SEQ ID NO: 45818 - protein, 165 aa, Eggerthella sp.
  REGION 1..165: note = tr|R7BRZ6|R7BRZ6_9ACTN NADPH-dependent 7-cyano-7-deazaguanine reductase OS=Eggerthella sp. CAG:368 OX=1262877 GN=queF PE=3 SV=1
MTNKEREAEKSISLLGNQHTEYPSDYDSSVLETFINKHPDTDYFVKFNCPEFTSLCPITDQPDFATIYISYVPNIKMVESKSLKLYLFSFRNHGDFHEDCINIIKKDLIALMDPKYIEVWGKFLPRGGISIDPYSNYGKPGTRWEEVAWDRLAHHDLYPEVVNNR

SEQ ID NO: 45819 - protein, 88 aa, unidentified
  source 1..88: note = Eggerthellaceae bacterium
  REGION 1..88: note = tr|A0A3C1DD08|A0A3C1DD08_9ACTN NADPH-dependent 7-cyano-7-deazaguanine reductase (Fragment); OS = Eggerthellaceae bacterium OX=1972561 GN=queF PE=3 SV=1
MRTREDLTLLGAKAEIPTDYDPGVLEAFDNAHPDRDYVVTLRCPEFTTLCPITGQPDFATMVINYIPDKRMVESKSLKLYLFSFRNHG

SEQ ID NO: 45820 - protein, 78 aa, unidentified
  source 1..78: note = Eggerthellaceae bacterium
  REGION 1..78: note = tr|A0A3C1D8V0|A0A3C1D8V0_9ACTN NADPH-dependent 7-cyano-7-deazaguanine reductase QueF (Fragment); OS = Eggerthellaceae bacterium OX=1972561 GN=DCP91_00410; PE = 4 SV=1
LFSFRNHGDFHEDVTNVIMNDLIALMRPKYIEVTGLFVPRGGIAIHPFANWANPDFGYADKAAARLFERMEKALAEEQ

SEQ ID NO: 45821 - protein, 156 aa, Eikenella corrodens
  REGION 1..156: note = tr|A0A1A9RIH7|A0A1A9RIH7_EIKCO NADPH-dependent 7-cyano-7-deazaguanine reductase OS=Eikenella corrodens; OX = 539 GN=queF PE=3 SV=1
MRNKEELSGLSLLGNTGTQYPSTYAPEILEAFDNKHPGNDYFVKFVCPEFTSLCPLTGQPDFATILIRYIPDIKMVESKSLKLYLFSFRNHGDFHEDCINIIMKDLIKLMNPKYIEVFGEFTPRGGIAIHPFANYGRPGTPFEQMARERLFTHDRQ

SEQ ID NO: 45822 - protein, 156 aa, Eikenella corrodens
  REGION 1..156: note = tr|A0A1A9RB73|A0A1A9RB73_EIKCO NADPH-dependent 7-cyano-7-deazaguanine reductase OS=Eikenella corrodens; OX = 539 GN=queF PE=3 SV=1
MRNKEELSGLSLLGNTGTQYPSTYAPEILEAFDNKHPGNDYFVKFVCPEFTSLCPITGQPDFATILIRYIPDIKMVESKSLKLYLFSFRNHGDFHEDCINIIMKDLIKLMNPKYIEVFGEFTPRGGIAIHPFANYGRPGTPFEQMARERLFTHDMQ

SEQ ID NO: 45823 - protein, 156 aa, unidentified
  source 1..156: note = Eikenella exigua
  REGION 1..156: note = tr|A0A5B9BV19|A0A5B9BV19_9NEIS NADPH-dependent 7-cyano-7-deazaguanine reductase OS=Eikenella exigua; OX = 2528037 GN=queF PE=3 SV=1
MRNKEELSGLSLLGNTGTQYPSTYAPEILEAFDNKHPGNDYFVKFVCPEFTSLCPLTGQPDFATILIRYIPDIKMVESKSLKLYLFSFRNHGDFHEDCINIIMKDLIKLMNPKYIEVFGEFTPRGGIAIHPFANYGRPGTPFEQMARERLFTHDMQ

SEQ ID NO: 45824 - protein, 161 aa, Eikenella sp.
  REGION 1..161: note = tr|A0A1A9S120|A0A1A9S120_9NEIS NADPH-dependent 7-cyano-7-deazaguanine reductase OS=Eikenella sp. NML03-A-027 OX=1795828 GN=queF PE=3 SV=1
MRNKEELSGLSLLGNTGTQYPSTYAPEILEAFDNKHPGNDYFVKFVCPEFTSLCPLTGQPDFATILIRYIPDIKMVESKSLKLYLFSFRNHGDFHEDCINIIMKDLIKLMNPKYIEVFGEFTPRGGIAIHPFANYGRPGTPFEQMARERLFTHDMLSLRAS

SEQ ID NO: 45825 - protein, 156 aa, Eikenella sp.
  REGION 1..156: note = tr|A0A1F0F7Q6|A0A1F0F7Q6_9NEIS NADPH-dependent 7-cyano-7-deazaguanine reductase OS=Eikenella sp. HMSC073A11 OX=1739535 GN=queF PE=3 SV=1
MRNKEELSGLSLLGNTGTQYPSTYAPEILEAFDNKHPGNDYFVKFVCPEFTSLCPLTGQPDFATILIRYIPDIKMVESKSLKLYLFSFRNHGDFHEDCINIIMKDLIKLMNPKYIEVFGEFTPRGGIAIHPFANYGRLGTSFEQMARERLFKHDMQ

SEQ ID NO: 45826 - protein, 154 aa, unidentified
  source 1..154: note = Eilatimonas milleporae
  REGION 1..154: note = tr|A0A3M0C5C3|A0A3M0C5C3_9PROT NADPH-dependent 7-cyano-7-deazaguanine reductase OS=Eilatimonas milleporae; OX = 911205 GN=queF PE=3 SV=1
MTDSVYDDLEQLGGMAKAPDRPEDAILETVRNPRPDSLYLVRFTCPEFTSLCPVTGQPDFAHLVLDYVPDGLLVESKSLKLYLQSFRNHRAFHEDCTVGIAERLVGILKPVWLRLGGYWYPRGGIPIDVFYQTGQPPQSVWVPPQDVQPYRGRG

SEQ ID NO: 45827 - protein, 152 aa, Elioraea sp.
  REGION 1..152: note = tr|A0A541C5I4|A0A541C5I4_9PROT NADPH-dependent 7-cyano-7-deazaguanine reductase OS=Elioraea sp. Yellowstone OX=2592070 GN=queF PE=3 SV=1
MTGYEGLTRLGRPSTIPASPAEAVLERVPNPEPGLAYVVRFVCPEFTSLCPLTGQPDFAHLVLDYIPDSWIVESKSLKLFLASFRNHGAFHEACTLMVARRVADLLAPRWLRIGGYWYPRGGMPIDVFWQTGAPPEGVWIPPQEVAPYRGRG

SEQ ID NO: 45828 - protein, 153 aa, unidentified
  source 1..153: note = Elstera cyanobacteriorum
  REGION 1..153: note = tr|A0A255XMN3|A0A255XMN3_9PROT NADPH-dependent 7-cyano-7-deazaguanine reductase OS=Elstera cyanobacteriorum OX=2022747 GN=queF PE=3 SV=1
MMTSKYSGLTQLGHATQQPQTPEDAILEAVPNTQDVDYVVRFVAPEFTSLCPLTGQPDFAHLVIDYIPGPSLVESKSLKLFLTSFRNHGAFHEDCTVGIARRLVATIQPKWLRIGGYWYPRGGIPIDVFYQTGPAPAGVWVPDQAVPSYRGRG

SEQ ID NO: 45829 - protein, 152 aa, unidentified
  source 1..152: note = Elstera litoralis
  REGION 1..152: note = tr|A0A0F3IQ55|A0A0F3IQ55_9PROT NADPH-dependent 7-cyano-7-deazaguanine reductase OS=Elstera litoralis; OX = 552518 GN=queF PE=3 SV=1
MTNKYSGLTQLGQATAQPASPDAAVLEAVPNTQDVDYVVRFVAPEFTSLCPLTGQPDFAHLVIDYIPGGLLVESKSLKLFLTSFRNHGAFHEDCTVGIARRLVATIQPKWLRIGGYWYPRGGIPIDVFYQTGPAPDGVWVPDQAVPSYRGRG

SEQ ID NO: 45830 - protein, 127 aa, unidentified
  source 1..127: note = Elusimicrobia bacterium
  REGION 1..127: note = tr|A0A2M7RZQ0|A0A2M7RZQ0_9BACT NADPH-dependent 7-cyano-7-deazaguanine reductase OS=Elusimicrobia bacterium CG_4_10_14_0_8_um_filter_37_32 OX=2014301; GN = queF PE=3 SV= 1
MKYGEKAIKESKFELWDNPYKNRNYKVDITFPEFTCLCPRSGYPDFATVKITYIPRRYIVELKSVKLYLNKYRNQHISHESAINKIFSDIYKTLKPKFLEVTGDFNPRGNVKTTIRIDSETLKIHSL

SEQ ID NO: 45831 - protein, 140 aa, unidentified
  source 1..140: note = Elusimicrobia bacterium
  REGION 1..140: note = tr|A0A355E5L3|A0A355E5L3_9BACT NADPH-dependent 7-cyano-7-deazaguanine reductase OS=Elusimicrobia bacterium OX=2030800 GN=queF PE=3 SV=1
MKNTKSPRQVTRLGYTSEQAASGTRDRLPAIDTWPNQYRGYEIRIEIPEFTAVCPKTGLPDFGTVIIEYMPERSCLELKSLKDYINSFRNLGVFNENAVNRILRDVVRAARPRWAVVTGRFTARGGMNSTVTSRHRRRTA

SEQ ID NO: 45832 - protein, 132 aa, Elusimicrobium minutum
  REGION 1..132: note = sp|B2KDU6|QUEF_ELUMP NADPH-dependent 7-cyano-7-deazaguanine reductase OS=Elusimicrobium minutum (strain Pei191) OX=445932 GN=queF PE=3 SV=1
MSDIDFGYTKDHARKGANAKLPEIQCWENQYKRDYDIRIELPEFTSVCPKTGLPDFGVITIDYIPDRLCLELKSLKYYLLEYRDMGIFMENIANKILDDVVKACKPKKAVVTGDFTPRGGLRSVIVAKYEKK

SEQ ID NO: 45833 - protein, 132 aa, Elusimicrobium sp.
  REGION 1..132: note = tr|A0A1Y4DEV4|A0A1Y4DEV4_9BACT NADPH-dependent 7-cyano-7-deazaguanine reductase OS=Elusimicrobium sp. An273 OX=1965617 GN=queF PE=3 SV=1
MHDIDFGYTSDHARKNADAVLPDIQCWPNQYKRDYDIKIELPEFTSVCPKTGLPDFGVITIEYVPDELCLELKSLKYYLLEYRDMGIFMENIANKILDDVVKACKPKRAVVTGVFTPRGGLRSVITAKYEKK

SEQ ID NO: 45834 - protein, 154 aa, unidentified
  source 1..154: note = Emcibacter congregatus
  REGION 1..154: note = tr|A0A2G4YM38|A0A2G4YM38_9PROT NADPH-dependent 7-cyano-7-deazaguanine reductase OS=Emcibacter congregatus; OX = 2043170 GN=queF PE=3 SV=1
MTKDIYQGLNQLGKDVKAPTNPDEAQLDRVANPRPNVDYFVRFTCPEFTSLCPVTGQPDFAHIVIDYVPDETLVESKSLKLYMQSFRNHAAFHEDCTVGIGERLVAELKPKWLRIGGYWYPRGGIPIDVFFQTGKAPEHVWVPDQDVPTYRGRG

SEQ ID NO: 45835 - protein, 154 aa, unidentified
  source 1..154: note = Emcibacter nanhaiensis
  REGION 1..154: note = tr|A0A501PR91|A0A501PR91_9PROT NADPH-dependent 7-cyano-7-deazaguanine reductase OS=Emcibacter nanhaiensis; OX = 1505037 GN=queF PE=3 SV=1
MSKEVYQGLSQLGGSSQLPENPDEAVLEKVKNPRPESAYFVRFTCPEFTSLCPVTGQPDFAHLVIDYVPGELLVESKSLKLYLHSFRNHAGFHEDCTVGIAERLVDELKPVWLRIGGYWYPRGGIPIDVFFQTGEPPEGVWIPDQGVPPYRGRG

SEQ ID NO: 45836 - protein, 277 aa, unidentified
  source 1..277: note = Empedobacter haloabium
  REGION 1..277: note = tr|A0A5C7BN60|A0A5C7BN60_9FLAO NADPH-dependent 7-cyano-7-deazaguanine reductase QueF OS=Empedobacter haloabium OX=592317 GN=queF PE=3 SV=1
MTNTADQSPLGKNSAYRTDYAPELLFPIPRQGKRDELGLTGTLPFFGVDIWNAYELSWLNMRGKPQVAVARITVPADSPNIIESKSFKLYLNSFNQTRLGGPDALRDLLQQDLSAAAGANVHVVLTLQEDFGTLQMGELDGLLLDRLDIEVDNYSPQPEVLKANFDELPVEETLVSHLLKSNCLVTGQPDWGSVQITYAGPQIDQESLLKYLIGFRDHNEFHEQCVERIFTDILRQCRPQHLSVYARYTRRGGLDINPWRTNYSKGGRPSNLRNARQ

SEQ ID NO: 45837 - protein, 128 aa, unidentified
  source 1..128: note = Endomicrobium proavitum
  REGION 1..128: note = tr|A0A0G3WJ06|A0A0G3WJ06_9BACT NADPH-dependent 7-cyano-7-deazaguanine reductase OS=Endomicrobium proavitum OX=1408281 GN=queF PE=3 SV=1
MKNTPVFDKVTPKLLEAMPYQYAGKDINVCIETEEFTCLCPWTGLPDFAYVVINYTPSKTVVELKSLKMYFQSYRNVGMVHESVVNNILNDLVKAISPKELTIDIEFGIRGGITTTVSAQYCKRQSGK

SEQ ID NO: 45838 - protein, 129 aa, unidentified
  source 1..129: note = Galathealinum brachiosum
  REGION 1..129: note = tr|A0A370DHL3|A0A370DHL3_9GAMM NADPH-dependent 7-cyano-7-deazaguanine reductase OS=endosymbiont of Galathealinum brachiosum OX=2200906 GN=queF PE=3 SV=1
MTTQPSKELETFDNPRPERDYTIRIHTPEFTCICPKTGQPDFATIHLDYIADKKCVELKSFKLYMWSFREQGAFHEDITNQILSDLVDATDPRFMRITAEFNVRGGVYTTVIAEHRQEGWVAPEPVVLP

SEQ ID NO: 45839 - protein, 129 aa, Ridgeia piscesae
  REGION 1..129: note = tr|A0A0T5Z5X9|A0A0T5Z5X9_9GAMM NADPH-dependent 7-cyano-7-deazaguanine reductase OS=endosymbiont of Ridgeia piscesae OX=54398 GN=queF PE=3 SV=1
MPSQPSKQLETFDNPQPERDYTIRIRVPEFTCLCPKTGQPDFAELTLEYVADQLCVELKSLKMYVWSFRDEGAFHEAVTNHILEDLVKATRPRFMRLTADFNVRGGVYTTVVAEHRADGWEPPIAVQLP

SEQ ID NO: 45840 - protein, 273 aa, unidentified
  source 1..273: note = Endozoicomonadaceae bacterium
  REGION 1..273: note = tr|A0A3S3QY17|A0A3S3QY17_9GAMM NADPH-dependent 7-cyano-7-deazaguanine reductase OS=Endozoicomonadaceae bacterium GTF-13 OX=2506149 GN=queF PE=3 SV=1
MSQDLHLSPLGKQSEYVCEYSPQLLHPIARSENRAALGIGELLPFRGVDIWNAYELSWLNLNGKPQVAVGRFSIPCDSTHIIESKSFKLYLNSFNQSRIGDQGTLQGVLERDLSAAAGAPVGVAIQTHQQVSEAGLELPLGDGIDDLDVSIDHYDTDAGLLQVADMVVNERLYSRLLKSNCPVTGQPDWGTLMIAYRGKRLCRESLLKYIVSFRQHSDFHEHCVERIFMDIKAITKAESLEVVARYVRRGGLDINPCRSLGECSFGNGRLANQ

SEQ ID NO: 45841 - protein, 279 aa, Endozoicomonas elysicola
  REGION 1..279: note = tr|A0A081KF35|A0A081KF35_9GAMM NADPH-dependent 7-cyano-7-deazaguanine reductase OS=Endozoicomonas elysicola OX=305900 GN=queF PE=3 SV=1
MSDGLHASPLGKTSEYKSEYDPSLLFPIERKEKREELGIHQNNLPFYGRDLWYGYELSWLNLSGKPVVRVAQFELPCDSPCLIESKSFKLYLNSFNQSRFESAEQVASCIIDDLSKVARAQVSAQLYTIDEFEARAFDCAQGINIDDLDVAVDCYQYDASLLARRDPEFSSEVISETLNTHLLKSNCPVTGQPDWGTLVVRYRGEPIEHAALLRYVCSFRDHQEFHEQCVERAFVDLQKHYQFEELTVYAQYLRRGGLDINPWRSTLDIQPEALRFIRQ

SEQ ID NO: 45842 - protein, 274 aa, Endozoicomonas montiporae
  REGION 1..274: note = tr|A0A081N515|A0A081N515_9GAMM NADPH-dependent 7-cyano-7-deazaguanine reductase OS=Endozoicomonas montiporae OX=1027273 GN=queF PE=3 SV=1
MANSVEMSQLGKTSLYETEYNPSILFPIPRKEKQEQLGLDPQNLPYVGCDVWYAYEISWLNGRGKPVAMVARFELPCDSPCLIESKSFKLYLNSFNQSRFESVSAARETMVKDLSDAAGAPVKVELMTVAEMEVFGFSKAPGTCVDELDVAIDTYMYQPDFLTKGDGKVEEAIHSNLLKSNCPVTGQPDWGTIVVEYKGEAINHESFLRYICSFREHQEFHEQCAERVFTDIQQRFQMDELTVYAQYVRRGGLDINPWRSTHHKETNRLRLVRQ

SEQ ID NO: 45843 - protein, 276 aa, Endozoicomonas montiporae
  REGION 1..276: note = tr|A0A142BFR2|A0A142BFR2_9GAMM NADPH-dependent 7-cyano-7-deazaguanine reductase OS=Endozoicomonas montiporae CL-33 OX=570277 GN=queF PE=3 SV=1
MIMANSVEMSQLGKTSLYETEYNPSILFPIPRKEKQEQLGLDPQNLPYVGCDVWYAYEISWLNGRGKPVAMVARFELPCDSPCLIESKSFKLYLNSFNQSRFESVSAARETMVKDLSDAAGAPVKVELMTVAEMEVFGFSKAPGTCVDELDVAIDTYMYQPDFLTKGDGKVEEAIHSNLLKSNCPVTGQPDWGTIVVEYKGEAINHESFLRYICSFREHQEFHEQCAERVFTDIQQRFQMDELTVYAQYVRRGGLDINPWRSTHHKETNRLRLVRQ

SEQ ID NO: 45844 - protein, 274 aa, unidentified
  source 1..274: note = Endozoicomonas numazuensis
  REGION 1..274: note = tr|A0A081NG35|A0A081NG35_9GAMM NADPH-dependent 7-cyano-7-deazaguanine reductase OS=Endozoicomonas numazuensis OX=1137799 GN=queF PE=3 SV=1
MSELVNASPLGKNSEYPSEYNPELLFPIPRKEKQLELGLDPENLPFVGSDVWYGYELSWLDSKGKPLAMIGRFELPCNSPSLVESKSFKLYLNSFNQSQFESVAHVQAVMEKDLSQAAGAPVRVKLMTVAEMEAFGFKPAPGTGVDELDVTIDCYDYSPDLLQRTEGDREETIHSHLLKSNCPVTGQPDWGTVVVQYKGEAISHESFLRFICSFRGHQEFHEQCVERVFTEIQARFKMESLTVYARYVRRGGLDINPWRSTHQAEQDDLRLIRQ

SEQ ID NO: 45845 - protein, 274 aa, Endozoicomonas sp.
  REGION 1..274: note = tr|A0A1D2X5S9|A0A1D2X5S9_9GAMM NADPH-dependent 7-cyano-7-deazaguanine reductase OS=Endozoicomonas sp. (ex Bugula neritina AB1) OX=1868284 GN=queF PE=3 SV=1
MTVVIETSPLGKSCQYKAEYAPELLFPLPRKEKRDELGITESQLPFHGRDLWYGYELSWLGPKGKPEVRIAQFEIPCESRCLIESKSFKLYLNSFNQTRFDDAVAVKHCLEKDLSEATEAKVLVTLFTLPEFEQLGIQSVPGICIDEQDVEVTTYQYNPDLLASREGQITETLCSHLLKSNCLVTGQPDWGTLVISYQGEAIDHGSLLQYICSFRQHQEFHEQCVERIYSDLQKRFKLSSLTVYAQYVRRGGLDINPWRSSESKSPEALRFVRQ

SEQ ID NO: 45846 - protein, 273 aa, Endozoicomonas sp.; identical to SEQ ID NO: 45840
  REGION 1..273: note = tr|A0A3P3VSW3|A0A3P3VSW3_9GAMM NADPH-dependent 7-cyano-7-deazaguanine reductase OS=Endozoicomonas sp. GTF13 OX=2528527 GN=queF PE=3 SV=1

SEQ ID NO: 45847 - protein, 151 aa, Enhydrobacter aerosaccus
  REGION 1..151: note = tr|A0A1T4SU01|A0A1T4SU01_9PROT NADPH-dependent 7-cyano-7-deazaguanine reductase OS=Enhydrobacter aerosaccus OX=225324 GN=queF PE=3 SV=1
MSKYPHLRQLGRPAALPASPDQAILEAVPNPDPKTLYLVRFTAPEFTSLCPMTGQPDFAHLVIDYAPRAKLVESKSLKLFLGSFRNHPDFHEACTLAIGQRLVKTIRPRWLRIGAYWYPRGGMPIDVFWQTGAPPKGLWLPDQGVPAYRGR

SEQ ID NO: 45848 - protein, 158 aa, Enhydrobacter sp.
  REGION 1..158: note = tr|A0A5C8PGB1|A0A5C8PGB1_9PROT NADPH-dependent 7-cyano-7-deazaguanine reductase OS=Enhydrobacter sp. CC-CFT640 OX=2586908 GN=queF PE=3 SV=1
MTGTSRMPDYKHLKQLGRATSLPASPDAAVLESVPNPHPRTLYLVRFTQPEFTSLCPMTGQPDFAHLVIDYAPAAKLVESKSLKLFLASFRNHGAFHEDCTLMIAKRLVAALKPRWLRIGGYWYPRGGMPIDVFWQTGAPPKGLWLPDQGVAPYRGRG

SEQ ID NO: 45849 - protein, 283 aa, Enhydrobacter sp.
  REGION 1..283: note = tr|A0A1V2GSL0|A0A1V2GSL0_9PROT NADPH-dependent 7-cyano-7-deazaguanine reductase OS=Enhydrobacter sp. H5; OX = 1907940 GN=BKE17_03640 PE=3 SV=1
MKPLETHGILGQSTSYPKTYAPDMLYPIPRALGRANLALPADALSIGMDWWQVFEMSWLNSQGISQVAMARLAIPATSDYIVESKSLKLYFNSLNFTEFDNQQAVKATVEKDLSACLKTDVTLEIFEVNIANSLPISAPQGDCIDNALDSSDKKIAIVSDVNPSSLTAAHQGASDSQLQILHSHLLHSNCPVTNQPDWGTLEIQIDSQPIDRAGLLEYILSFRQHNGFHEQCVEQIFSDLTQAFAPKTLMVRAWYTRRGGIDINPCRVSDISLLPPPSRLNRQ

SEQ ID NO: 45850 - protein, 118 aa, Enhygromyxa salina
  REGION 1..118: note = tr|A0A0C2DCA4|A0A0C2DCA4_9DELT NADPH-dependent 7-cyano-7-deazaguanine reductase OS=Enhygromyxa salina; OX = 215803 GN=queF PE=3 SV=1
MPSQPSRELETFANPKPGRDYEIRFECPEFTCVCPKTGQPDFATIRIRYTPDQRCVELKSLKLYLWSFRDVGAFHEAVTNQILDDLVSALQPRAMVVEGDFLVRGGIHTVVEARHTMP
